United States Patent Application Publication US 2009/0104218 A1 - sequence listing, part 5

SEQ ID NO: 16101 - protein, 846 aa, Streptococcus agalactiae
ATGAAATATTTAGCGGGTATTGTCACCTTTAACCCCAATATTGAACGCTTAGATCAGAACATTCGAGCAATTTATCCTCAAGTAAGCCATATCTACATCGTAGATAATGGCTCGAAAAATAAGGAAGAAATTTCTCAATTAGTGGCCGATTATAATGAAGAGGGGCACCTAACTGTTGATTATTTAACAGAAAATAAAGGAATTGCATATGCTTTGAACTGTATCGGTCAATTTGCAGTAGCACAAGAATTTGATTGGTTCTTGACTTTAGATCAAGATTCGGTTGTCCTAGGTGATTTGATAGATAATTATGAAAATTACCTTCTTTTACCTAAGGTCGGTATGTTATCTTGTTTGTATCAAGATATGAACCGTGAAGATTTAGTTATGCAAGAATTTGACTATAAAGAAATTGAAGAGTGTATTACTTCGGCTGCTTTAATGAAAACGAGCGTTTTTGAAGAAACATCTGGCTTTGCAGAAGAGATGTTTATTGATTTTGTTGACTCTGAAATGAATTATCGTCTGTCAGAGATGGGATATAAGACTTATCAGGTTAATTTTATTGGTCTTTTACACGAAATTGGACACTCTTCACGAGTTAAAAAATTTGGCCATGTTTTTCATGTATTGAATCATTCACCATTTCGAAAATATTACATGATACGCAATGCGATTTATATTATAAAAAAATATGGTAAGAAGAAGCGGCACAAATATTTAGTATTTATGCGAAATGAATTTGTTCGAGTGTTGGTAGCAGAAGAGCAAAAGAGCAAAAAATTAGTTGCTATGATTAAAGGCTTAAAAGATGGCTTATTGATGAAAGTGGATAAATATGGAAAA

SEQ ID NO: 16102 - protein, 282 aa, Streptococcus agalactiae
MKYLAGIVTFNPNIERLDQNIRAIYPQVSHIYIVDNGSKNKEEISQLVADYNEEGHLTVDYLTENKGIAYALNCIGQFAVAQEFDWFLTLDQDSVVLGDLIDNYENYLLLPKVGMLSCLYQDMNREDLVMQEFDYKEIEECITSAALMKTSVFEETSGFAEEMFIDFVDSEMNYRLSEMGYKTYQVNFIGLLHEIGHSSRVKKFGHVFHVLNHSPFRKYYMIRNAIYIIKKYGKKKRHKYLVFMRNEFVRVLVAEEQKSKKLVAMIKGLKDGLLMKVDKYGK

SEQ ID NO: 16103 - protein, 1422 aa, Streptococcus agalactiae
ATGAAACTTTTGAAAAATATGTTTTATAATACCTCATACCAGTTATTGACTTTGTTGTTACCTTTAGTAACAGTTCCTTATGTTTCCCGTGTACTATCTCCTCAAGGCATCGGTATTAATGCCTATACGAGCTCCATTGTCATGTACTTTACTTTATTTGGTGCTTTAGGGATATCTTTGTACGGTAATCGTGAGATAGCTTTTGTGCAGTCAAATAAGTATAAGAGAAGTAAGATATTTTGGGAATTAGTTGTATTAAAACTTGCCTCTGTATCTATAGCAACGTTATTATTCTTTGGATTTGTCTTACTTACAAACGAATGGCAATTATTCTATTTAATTCAAGGTATTAATTTATTAGCGACTGCAACTGATATTTCGTGGTATTTTATTGGAGTTGAAGACTTTAAGATAATTGTCATTCGTAATACCATTGTTAAGCTTATTACAGTTGTTTTGACCTTCTTAGTTGTGAAGACGCCAGATGACCTAGCACTTTATATGTTTTTAATTGCATTTGCATCATTACTCGGAAATTTAACAGTCTGGCATCATTTAAAGCATGAAATCATCAAGATACCATTTAGTAGATTAGATATCTTAATACATCTAAGACCAACTTTAATGTTATTTTTACCCCAAATCACCATGCAGATTTATCTCTCTCTTAACAAGAGTATGCTGGGAGCAATGGATAGTGTGGTCAGTGCTGGATATTTTGATCAATCTGATAAAATTATTCGTATTTTATTTACCATTGTTTCAGCAATCGGAGGAGTTTTCTTACCAAGGCTCTCCAGTCTATTTTCTTCAGGAAAAGAAAAGCAAGCTAAGGCTTTACTTTTGAAACTTGTTGATTTAAGCAATGCTATCTCAATGTTAATGATTGCGGGAGTGGTAGGAGTTTCGTCGACATTTGCCGTCTTCTTTTTTGGGAAAGGGTATGAAGCTGTCGGTCCGCTAATGGCTGTTGAGTCTTTGATGATCATTTGCATTTCTTATGGTAACGCTTTAGGGACACAGTATCTACTGGCTTCAAGACGTACAAAAGCTTACACAATGTCTGCAGTTATTGGACTTGTGGCAAATGTTGTGCTTAATATACTTTTAATACCAATTTTAGGTGCTATGGGAGCTATTATCTCTACAGTTATTACTGAATTTATTGTCTCCCTCTATCAAGCTATCTCTTTAAGAGATGTATTTACTTTTAAAGAATTAACAAGAGGAATGCTGCGCTATTTAATTGCTGCTACTCTTAGTGGAGCTGTACTTTATTATATCAATACTCAAATGTCAGTATCATTGGTAAATTATGTCATTCAAAGTTTAGTAGCAGTAACTATCTATGTCGGTATCGTTTTTATAACCAAAGCACCAGTCATTCAGTTATTTAGAGATTTTAGAAAAGAGCATAGAACA

SEQ ID NO: 16104 - protein, 474 aa, Streptococcus agalactiae; identical to SEQ ID NO: 2638

SEQ ID NO: 16105 - protein, 1362 aa, Streptococcus agalactiae; identical to SEQ ID NO: 7219

SEQ ID NO: 16106 - protein, 454 aa, Streptococcus agalactiae; identical to SEQ ID NO: 7220

SEQ ID NO: 16107 - protein, 924 aa, Streptococcus agalactiae; identical to SEQ ID NO: 7221

SEQ ID NO: 16108 - protein, 308 aa, Streptococcus agalactiae; identical to SEQ ID NO: 2642

SEQ ID NO: 16109 - protein, 686 aa, Streptococcus agalactiae
GTGTTAGCCTATGAGGTTGACTATGTCTTTTTAGTGATCAAGATGATATTTGGTATCTTGATAAAAACGAACGACAGTTTGCCATTATGTCAGATAACCCTCAAATTGAGGTTTTGAGTGCAGACGTTGATATCAAAACGATGTCTACAGAAGCCAGTGTTCCACATTTTCTAACTTTTTCTTCTAGTGATAGAATCAGTCAGTATCCTAAAGTATATGATTATCAAACATTCCGTCCCGGATGGACCATTGCTATGAAGAGAGATTTTGCGCAAGCTATCGCTGATAATTGGACTTTTGGAGCTAATATTTCGCACGATAATCTTATCGAGACAACTGCCAGTATTATTGGAAATGGTTATAACCTTAACGAAAGCGTAGGAGTTCATATTCGATATGGAGGAAACGCAAGTGGTAATAGCAAATTTGTTTTGAATTGGAAGTCGCCTAAAACACAACATATCACAGGATTAAAAACATTTGTTGATTTTTACGAAACCATGCAGAAGGTTGTCAACAAATATCAAAATGATGTCGCTTTAAATCAACGCTTAGCCTTTGAAAAAGAAAGATTGGAAGCTTCTAAATTGTCATTAATTCATAATAGTGCTTTTGTGATTAAAAATTGGCGACTCTATAACTCTAATAGTGGACGTATGAGAGATTTATTATTTGCGTTTAAAAAG

SEQ ID NO: 16110 - protein, 229 aa, Streptococcus agalactiae
MLAYEVDYVFFSDQDDIWYLDKNERQFAIMSDNPQIEVLSADVDIKTMSTEASVPHFLTFSSSDRISQYPKVYDYQTFRPGWTIAMKRDFAQAIADNWTFGANISHDNLIETTASIIGNGYNLNESVGVHIRYGGNASGNSKFVLNWKSPKTQHITGLKTFVDFYETMQKVVNKYQNDVALNQRLAFEKERLEASKLSLIHNSAFVIKNWRLYNSNSGRMRDLLFAFKK

SEQ ID NO: 16111 - protein, 906 aa, Streptococcus agalactiae
ATGTTTTTAATGCCATTGGCATCATTACTCGGAAATTTAACAGTCTGGCATCATTTAAAGCATGAAATCATCAAGATACCATTTAGTAGATTAGATATCTTAATACATCTAAGACCAACTTTAATGTTATTTTTACCCCAAATCACCATGCAGATTTATCTCTCTCTTAACAAGAGTATGCTGGGAGCAATGGATAGTGTGGTCAGTGCTGGATATTTTGATCAATCTGATAAAATTATTCGTATTTTATTTACCATTGTTTCAGCAATCGGAGGAGTTTTCTTACCAAGGCTCTCCAGTCTATTTTCTTCAGGAAAAGAAAAGCAAGCTAAGGCTTTACTTTTGAAACTTGTTGATTTAAGCAATGCTATCTCAATGTTAATGATTGCGGGAGTGGTAGGAGTTTCGTCGACATTTGCCGTCTTCTTTTTTGGGAAAGGGTATGAAGCTGTCGGTCCGCTAATGGCTGTTGAGTCTTTGATGATCATTTGCATTTCTTATGGTAACGCTTTAGGGACACAGTATCTACTGGCTTCAAGACGTACAAAAGCTTACACAATGTCTGCAGTTATTGGACTTGTGGCAAATGTTGTGCTTAATATACTTTTAATACCAATTTTAGGTGCTATGGGAGCTATTATCTCTACAGTTATTACTGAATTTATTGTCTCCCTCTATCAAGCTATCTCTTTAAGAGATGTATTTACTTTTAAAGAATTAACAAGAGGAATGCTGCGCTATTTAATTGCTGCTACTCTTAGTGGAGCTGTACTTTATTATATCAATACTCAAATGTCAGTATCATTGGTAAATTATGTCATTCAAAGTTTAGTAGCAGTAACTATCTATGTCGGTATCGTTTTTATAACCAAAGCACCAGTCATTCAGTTATTAGANNNNNTTAAT

SEQ ID NO: 16112 - protein, 302 aa, Streptococcus agalactiae
  VARIANT 299, 300, 301: Xaa = Any Amino Acid
MFLMPLASLLGNLTVWHHLKHEIIKIPFSRLDILIHLRPTLMLFLPQITMQIYLSLNKSMLGAMDSVVSAGYFDQSDKIIRILFTIVSAIGGVFLPRLSSLFSSGKEKQAKALLLKLVDLSNAISMLMIAGVVGVSSTFAVFFFGKGYEAVGPLMAVESLMIICISYGNALGTQYLLASRRTKAYTMSAVIGLVANVVLNILLIPILGAMGAIISTVITEFIVSLYQAISLRDVFTFKELTRGMLRYLIAATLSGAVLYYINTQMSVSLVNYVIQSLVAVTIYVGIVFITKAPVIQLLXXXN

SEQ ID NO: 16113 - protein, 714 aa, Streptococcus agalactiae
ATGGTAAAGACAGCAGTTTTAATGGCGACATACAATGGCGAAAAATTTATATCTGAACAACTTGATTCAATTCGCCAACAGACATTAAAACCAGATTATGTATTATTGAGGGATGATTGTTCAACGGATGAAACAGTCAATGTCGTCAATAACTATATCGCAAAACATGAGTTAGAAGGCTGGAAAATTGTTAAAAACGACAAAAACTTAGGCTGGCGTTTAAATTTTCGTCAATTACTTATTGATGTGTTAGCCTATGAGGTTGACTATGTCTTTTTTAGTGATCAAGATGATATTTGGTATCTTGATAAAAACGAACGACAGTTTGCCATTATGTCAGATAACCCTCAAATTGAGGTTTTGAGTGCAGACGTTGATATCAAAACGATGTCTACAGAAGCCAGTGTTCCACATTTTCTAACTTTTTCTTCTAGTGATAGAATCAGTCAGTATCCTAAAGTATATGATTATCAAACATTCCGTCCCGGATGGACCATTGCTATGAAGAGAGATTTTGCGCAAGCTATCGCTGATAATTGGACTTTTGGAGCTAATATTTCGCACGATAATCTTATCGAGACAACTGGCAGTATTATTGGAAAATGGTATAACCTTAACGAAAGCGTAGGAGTTCATATTCGATATGGAGGAAACCGCAGTGGGTATAGCAAATTTGTTTTGAATGGAAAGTCGCTAAACACACATATCACAGAT

SEQ ID NO: 16114 - protein, 238 aa, Streptococcus agalactiae
MVKTAVLMATYNGEKFISEQLDSIRQQTLKPDYVLLRDDCSTDETVNVVNNYIAKHELEGWKIVKNDKNLGWRLNFRQLLIDVLAYEVDYVFFSDQDDIWYLDKNERQFAIMSDNPQIEVLSADVDIKTMSTEASVPHFLTFSSSDRISQYPKVYDYQTFRPGWTIAMKRDFAQAIADNWTFGANISHDNLIETTGSIIGKWYNLNESVGVHIRYGGNRSGYSKFVLNGKSLNTHITD

SEQ ID NO: 16115 - protein, 1056 aa, Streptococcus agalactiae
ATGATGATTAAATTTAGTAATAAAATTGTACAAGAAGATTTAGCACTTATTAGTAACCAAAATTATATTAATTGGGAAAGAATTGCTAATAAAGGCGTTTTAATAAGTGGTTCTAATAGTATGTTAGCGAGTTATATGGTATTTTTACTAGCCTATCTCAATGAGACAAGAAATTACCAAACGCAAATTATTGCGACAGCTAGAAACATTGAAAAAGCCCGTGATAAATTTTCAGATTTAGTTGGGAAAGATTATTTCACCTTAATTCCTTATGATGTAGAAGAACGCCTAGAGTATGATGGAAAAGTGGATTACATTATCCATGCAGCAAGCAATGCTAGTCCAACTGCTATTTTGAGTAATCCTGTTAGCATCATAAAAGCTAATACAATTGGTACATTGAATTTATTAGACTTTGCAAAGGAAAAAACAATTGAAAACTTCTTGTTCTTATCAACGCGTGAAGTATATGGAACATCTATTAAAGAAGTGATTGATGAAGAAGCTTATGGTGGATTTGATATTTTAGCTACTAGAGCTTGTTACCCAGAAAGCAAACGTATGGCTGAAACTCTACTGCAAAGTTACTATGATCAATATAAGGTACCCTTTACTATTGCTCGTATTGCACATTCATTTGGTCCTGGTATGGAGCTTGGTAACGATGGTCGTATTATGAATGATCTTTTATCGAATGTCATTGATGGCAAAGATATCGTTTTAAAAAGTAGTGGTACAGCAGAGCGTGCTTTCTGTTATTTAGCAGATGCTGTATCAGGGTTATTTACTATTTTATTAAATGGTGAAGTTGGTCAAGCTTACAATGTAGCAAATGAAGATCAACCCATTATGATTAAGGATTTGGCACAAAAGTTAGTTGATCTCTTTTCTGATAAAAATATTTCAGTAGTATTCGATATTCCTAAAACTATGAGTGCAGGTTATAGCAAAATGGGGAGAACACGTCTCACTATGGCCAAATTAGAAGCGTTGGGATGGAAGCGAGAAGTTTCTCTTGAATCTGGAATATTAAAAACAGTACAAGCATTTGAGGAG

SEQ ID NO: 16116 - protein, 352 aa, Streptococcus agalactiae; identical to SEQ ID NO: 2646

SEQ ID NO: 16117 - protein, 717 aa, Streptococcus agalactiae; identical to SEQ ID NO: 7227

SEQ ID NO: 16118 - protein, 239 aa, Streptococcus agalactiae; identical to SEQ ID NO: 2648

SEQ ID NO: 16119 - protein, 777 aa, Streptococcus agalactiae; identical to SEQ ID NO: 7229

SEQ ID NO: 16120 - protein, 259 aa, Streptococcus agalactiae; identical to SEQ ID NO: 2650

SEQ ID NO: 16121 - protein, 1730 aa, Streptococcus agalactiae
ATGAGTAAAAAACATATTTTTATTTGTCTGTTTTTCATGCTTTTTTTAGTAGGTTGCCAAAATAATAAAAAAGTAAAAACAGATAAAAAAGTAGATATTACAGCTTATTATTATCATAATAATACCCCGCAATACAGTGTTCAGATTAATGCTATTCATTTACAAACAGCATTGGATAAAGTGAGGACGGGGGAGTTTGAGAGCAAAGACTTTACACACTATACTTTTGATAGTATCAAGCGGAAGTACCAAGTTAGTGGTAAAAAAGTCCTTATGGATAATAACTATAGATTTGGTTCTGGTATAAAAAATACTAGACAGGATGCTATTGCTATTGTAAGGTTACTGCTTGAAAAGAATAAAGATTATTTAATTTACATGAATGGCTTAGAAGAGCCAAGTGTTTTATATAATCCAGAAAATAAACGTTATAAGTTCACAAATAACAAAGGAAAAGCAATTGGTAATATTCCAGTTGGTTTAACTGCTTTTGAAAACAGCGCAGAAACTCAAGAATATGTGTTGAAAAATATTCAGAAAAACGAAACGATTTATCTTGGTAATACCCGAGTAGATAATCCTCGAGTAACTGTTAATAACAAAAAAAGAGATACTATAGGAGTTGAATACGGTAAACGTATTACTTATAGGATTCCAATTTATTCAAAGCAGCTGACTGTCAGAGTTAGCCCTAATTTTGTAGTAGATAGTACTAATTATAATTACCGACTTTCTCAAGCGCCTATTATTGCGGAAGAAGGTAAAGAGGGACGTTTGTATCCAATAGATAGCAGTATTAGTGTCGATGGTGATAAAATTGTTTTAAATAGTAGTGGTGATGAAACAGAGCAAAAAGAATTATTACAAAATAGCCTGTATAAACTTCACTCTATTGATAAGTTAGACTTTGATTTGACAAATGCTGATATTAAAGAGTTAGAGATTACAGGACATGTTGCTTCAAAAGAGATTATAATTTGTCTGTTGCTCAGGAAAAGAAAGGCGTCATAGAGACTAAACGGAGTCTAATTTCTGTTGATAATCAAAAACAAGATCAAGGGATTTTTGTCGAGGATTCTAAAGGCTATATAAAGACACCTAGTTTGAGCAGTTATGGTATAAATTTTGCCATGTATGACGACAATCAAAATAGATTATTGCAAGGTTCAGAGTATATTTTAGGAAGATTGAATGCAGATAAAAAAGTATCTCTATATCAACCTAATGGCTTTTGGATAAATACTCAAAAAACGATTAAGAGTTTAAATAAAGAATATCTTAACCAAAATGCTTACCATATTAGAGGAAATAACATTATAGGTATTGATGGCTATTCAAATGACATAGACTTGAATCCTAGGTTATGGGCTTATAACTATAAAAAACAAGTGAAAAGTAACCAATCATTATTTAAATTACGAGGTTTGTCTAATAAGTATAAGTATTTCTTAATACAGACAAAATCTCCAAAAGGCTACTTACAAAGCAATAAACCATTTTATTTTACAGTAAATAAAGATAGTGTTTCTAAAGCACAATTTGGTAACTATAATATAAATGGTTATATAATGGACATGCAGTACAACAAACAAGAATACAATGCACTTGCAAACACTCCAAAAGGTCAAAAAACAAAGAAAACTTTCAAACCTATGACCCTAGTGATTCTTTTTGCAGTAGCTTTATTTATTTTCTATATTACAGCTATAAGATTTGTATTTAAAAGAATG

SEQ ID NO: 16122 - protein, 577 aa, Streptococcus agalactiae; identical to SEQ ID NO: 7232

SEQ ID NO: 16123 - protein, 351 aa, Streptococcus agalactiae
ATGAGTTTAGCATTGCAAATTGAAATGTTTATTTTAGCCATTGTCCTACTTTATATGATTATAAGAATGGTTAATAAAAACACATTTTCTGTTAAACGTTCTTTACCTTGGCTATTAGTTGGTTTAATTCTAGTCTTTATTAGTGTATTTCCTGGGGTGGTCTCATTTATCGCTCATCACCTTGGATTCGCTTTAACGATGAATTTCTTGTTATTTGGTGCTATTTTATTTCTGTTTTGTTTAGAATTATTTGATACTAGTAGCAATACCAAAAGAGATGAGCAAATTAAACGCCTGATTCAAGAGGTTTCTTTGTTGAAAAAAGAGATAGAGGATAGCACTTTAGATGAG

SEQ ID NO: 16124 - protein, 117 aa, Streptococcus agalactiae; identical to SEQ ID NO: 2656

SEQ ID NO: 16125 - protein, 729 aa, Streptococcus agalactiae
ATGATGAAAAAAATTTTACTAGTGATACCTGCTTATAATGAAGAAGGTAGTATTGCAAAGACAGTCCAGACTATTGTAGATTTTAAGGCGTCTCGCTCACTACCTTTTGAGCTGGATTATATTGTTATTAACGATGGGTCAACCGATGGTACTCCAGAGTTATTAGATAGATTGGGTTTAAATCATATTGACCTTGTTCAAAATCTAGGTATTGGTGGCTGTGTGCAGACAGGATACTTATACGCTAATCGTAATCATTACGATGTTGCCGTTCAATTTGATGGTGATGGTCAACATGATATTAGAAGCATTGAAGATGTTGTTATGCCAATCTTAAATGACGAAGCAGATTTTGTTATTGGTTCTCGCTTTGTTGATAAAAAACATCAAAATTTTCAATCGACAGCAATGAGGCGTCTTGGCATAAATTTAATATCTGCTGCTATAAAATTAACGACGGGACACAAAGTCTATGATACAACAAGTGGTTATAGGGCAGCCAACGCGGCGCTAATAGCTTATTTATCGTGTCATTATCCAGTACAATACCCAGAGCCTGAATCAACTGCTCGGATTTTGAAAAAAGGCTATCGTTTGAAGGAAGTCACAGCTAATATGTTTGAACGTGAGGCAGGTACTTCAAGTATAAGTTCCCTAAAATCGATTTTTTATATGACGGATGTTTTAACATCAATTATTATTGCAGGGTTTATTAAGGAGGATGATAAA

SEQ ID NO: 16126 - protein, 243 aa, Streptococcus agalactiae
MMKKILLVIPAYNEEGSIAKTVQTIVDFKASRSLPFELDYIVINDGSTDGTPELLDRLGLNHIDLVQNLGIGGCVQTGYLYANRNHYDVAVQFDGDGQHDIRSIEDVVMPILNDEADFVIGSRFVDKKHQNFQSTAMRRLGINLISAAIKLTTGHKVYDTTSGYRAANAALIAYLSCHYPVQYPEPESTARILKKGYRLKEVTANMFEREAGTSSISSLKSIFYMTDVLTSIIIAGFIKEDDK

SEQ ID NO: 16127 - protein, 693 aa, Streptococcus agalactiae
ATGACGGTCTCAGAAATAAGAGAAGTTCAACTTGAAATGTTAGCTTATATTGATAAAGTTGCGCGTGATAATAAAATTGAATATTCTTTAGGCGGAGGCAGCCTACTGGGAGCAATGAGACATAAAGGATTCATTCCATGGGATGACGATATTGATTTGATGCTAGAAAGAAGCCAGTATGAGCGTTTGATGAAAGCATTAGCTGATGCTAATAATAGCGATTTTAAATTGCTACATCATTCTGTTGAAAAAAATCTATGGCCATTTGCCAAGCTGTATCACACAAAGTCAATGTACTTAAGTAAAACAGATAGAATTCATCCTTGGACAGGGATTTTTATTGATATCTTCCCACTTGACCGATTACCAGAGAGTGCAGAAGAACGTCAAAGATTCTTTAAAAAAGTTCACTCTGCTGCTGCAAATTTGATGTGTACGACTTACCCCAATTTTGCTAGCGGTTCCCGAAAGCTTTATGCAAATGCAAGGCTAATTTTGGGGCTACCCCGATTCATCGCTTATCACGGCCAAGCTATAAAACGTGCTGAAATTGTTGATCAAGTGATGGAAACATATAATAATCAAGAAGTTCCTTACATGGGTTATACCCGATTCAGATATCGCTTTGAAGATATTTTTCAAGAGAAAATTTTTCTGAGTATGAAGAATGTATGTTTGAAAACNNNNNTTAAT

SEQ ID NO: 16128 - protein, 231 aa, Streptococcus agalactiae
  VARIANT 229, 230: Xaa = Any Amino Acid
MTVSEIREVQLEMLAYIDKVARDNKIEYSLGGGSLLGAMRHKGFIPWDDDIDLMLERSQYERLMKALADANNSDFKLLHHSVEKNLWPFAKLYHTKSMYLSKTDRIHPWTGIFIDIFPLDRLPESAEERQRFFKKVHSAAANLMCTTYPNFASGSRKLYANARLILGLPRFIAYHGQAIKRAEIVDQVMETYNNQEVPYMGYTRFRYRFEDIFQEKIFLSMKNVCLKTXXN

SEQ ID NO: 16129 - protein, 120 aa, Streptococcus agalactiae
ATGAGCCATAAAGGATTCATTCCATGGGATGACGATATTGATATGATGTTAGAAAGAAGCCAGTATGAGCCTGTGATGAAAGCATTAGCTGATGCTAATAATAGCGATTTNNNNNTTAAT

SEQ ID NO: 16130 - protein, 40 aa, Streptococcus agalactiae
  VARIANT 37, 38, 39: Xaa = Any Amino Acid
MSHKGFIPWDDDIDMMLERSQYEPVMKALADANNSDXXXN

SEQ ID NO: 16131 - protein, 759 aa, Streptococcus agalactiae
ATGAAAGTTAATATTTTAATGGCCACCTACAATGGAGAGAAGTTTCTGGCGCAGCAAATCGAAAGTATCCAAAAGCAAACCTTTAAAGAGTGGAACCTCCTAATCAGAGATGATGGTTCAAGTGACAAGACATGTGATATTATTAGAAACTTTACTGCTAAAGATTCTCGAATTCGTTTCATTAATGAAAATGAGCACCATAATTTAGGAGTTATTAAATCATTTTTTACGCTAGTTAATTACGAAGTTGCAGATTTCTATTTTTTTAGTGATCAAGATGATGTATGGTTGCCAGAAAAGTTATCTGTAAGTTTAGAGGCAGCAAAGCATAAAGCATCTGATGTACCATTACTTGTTTATACTGATTTGAAAGTTGTTAATCAAGAATTAAATATTTTACAAGACAGCATGATTCGGGCTCAATCGCACCATGCCAATACGACATTATTACCAGAACTAACTGAGAATACTGTTACTGGGACTATGATGATAAATCATGCATTAGCTGAGAAGTGGTTTACTCCTAATGATATCTTAATGCATGATTGGTTTTTAGCACTCTTAGCAGCAAGTTTAGGAGAAATCATTTATTTGGATTTACCAACTCAACTATACCGTCAACATGACAATAATGTTTTGGGGGCGAGGACAATGGATAAGAGATTTAAGATACTTCGTGAAGGTCCTAAATCTATATTTACAAGGTATTGGAAACTTATCCATGACTCACAAAAGCAAGCTTCCTTAATTGTTGATAAG

SEQ ID NO: 16132 - protein, 254 aa, Streptococcus agalactiae
  VARIANT 161: Xaa = Any Amino Acid
MKVNILMATYNGEKFLAQQIESIQKQTFKEWNLLIRDDGSSDKTCDIIRNFTAKDSRIRFINENEHHNLGVIKSFFTLVNYEVADFYFFSDQDDVWLPEKLSVSLEAAKHKASDVPLLVYTDLKVVNQELNILQDSMIRAQSHHANTTLLPELTENTVTGXTMMINHALAEKWFTPNDILMHDWFLALLAASLGEIIYLDLPTQLYRQHDNNVLGARTMDKRFKILREGPKSIFTRYWKLIHDSQKQASLIVDK

SEQ ID NO: 16133 - protein, 1152 aa, Streptococcus agalactiae
ATGCAAGATGTTTTCATTATAGGAAGTAGAGGGTTGCCAGCTCGTTACGGTGGTTTTGAAACTTTTGTTTCAGAATTGATTAATCATCAAAAAAGTTCCGACATAAAATACCATGTTGCATGCCTTAGTGATAAAGAACATCATACTCATTTTAACTTTGCTGACGCTGATTGTTTTACTATAAATCCTCCCCAATTAGGGCCAGCACGTGTGATTGCTTATGATATTATGGCCATTAATTATGCCCTTGACTTGGTTAAGACACATGATTTAAAAGAGCCTATTTTTTATATTTTAGGAAATACAATTGGTGCCTTTATTTGGCATTTTGCCAATAAAATACATAAAGTCGGTGGCTTATTGTATGTTAATCCGGATGGTTTAGAGTGGAAGCGATCAAAGTGGTCTCGTCCCACACAGCGTTATTTAAAATACGCCGAAAAATGTATGACTAAAAATGCAGACCTAATTATTTCTGATAATATTGGTATTGAAAATTACATTCAATCTACCTACTCTAATGTGAAGACAAGGTTCATTGCTTACGGTACAGAGATTAATTCTAGGAAATTATCGTCAGATGATCCACGTGTCAAACAGTTGTTTAAAAAATGGAATATTAAGTCTAAGGGTTACTATCTAATCGTTGGTCGATTTGTCCCTGAAAACAATTATGAAACGGCTATTAGGGAGTTCATGGCTTCAGATACTAAGCGTGATTTAGTTATTATCTGTAACCATCAAAATAACCCCTACTTTGAAAAGTTGTCCTTAAAGACAAACCTTCAACAAGATAAAAGAGTTAAGTTTGTAGGTACGCTCTATGAAAAAGATCTGCTGGATTATGTTCGTCAACAAGCCTTTGCTTATATTCATGGGCATGAAGTTGGCGGTACTAATCCAGGACTGCTTGAGGCTTTAGCTAATACTGATTTGAATCTTGTTCTAGATGTTGATTTCAACAAATCAGTAGCAGGTCTCTCAAGTTTTTACTGGACTAAAAAAGAGGGGGATTTAGCTAAGCTTATTAACGATAGTGATCAACAACAGGATTTATCTACTTACGGTGATCGAGCAAAAGCCATTATTCAAGAAAACTATACTTGGAAAAAAATTGTTGAAGAATATGAGGATTTGTTTTTAAATGAAAGT

SEQ ID NO: 16134 - protein, 384 aa, Streptococcus agalactiae
MQDVFIIGSRGLPARYGGFETFVSELINHQKSSDIKYHVACLSDKEHHTHFNFADADCFTINPPQLGPARVIAYDIMAINYALDLVKTHDLKEPIFYILGNTIGAFIWHFANKIHKVGGLLYVNPDGLEWKRSKWSRPTQRYLKYAEKCMTKNADLIISDNIGIENYIQSTYSNVKTRFIAYGTEINSRKLSSDDPRVKQLFKKWNIKSKGYYLIVGRFVPENNYETAIREFMASDTKRDLVIICNHQNNPYFEKLSLKTNLQQDKRVKFVGTLYEKDLLDYVRQQAFAYIHGHEVGGTNPGLLEALANTDLNLVLDVDFNKSVAGLSSFYWTKKEGDLAKLINDSDQQQDLSTYGDRAKAIIQENYTWKKIVEEYEDLFLNES

SEQ ID NO: 16135 - protein, 851 aa, Streptococcus agalactiae
ATGATTTTAATTACAGGGGCAAACGGGCAATTAGGTAGTGAATTACGTCACCTTTTAGACGAACGAACTCAAGAGTATGTTGCTGTTGATGTAGCTGAAATGGATATTACAAATGCCGAGATGGTGGACAAAGTCTTTGAAGAGGTGAAGCCATCTTTAGTTTACCATTGTGCAGCTTACACAGCTGTTGATGCGGCAGAAGATGAAGGAAAAGAGCTAGACTTTGCAATCAATGTCACTGGTACAGAGAATGTCGCTAAGGCTGCTGCTAAACATGATGCAACACTTGTTTACATTTCGACGGACTACGTGTTTGATGGTGAAAAACCAGTGGGGCAAGAATGGGAAGTAGATGATCTGCCTGATCCCAAAACAGAGTACGGTCGTACAAAACGTATGGGTGAAGAGTTAGTTGAAAAATATACTTCAAAATTCTATACCATTCGCACAGCGTGGGTATTGGTAACTATGGTAAAAACTTTGTCTTTACGATGCAAAACCTTGCAAAAACACACAAAACTCTAACTGTTGTTAACGACCAACATGGACGACCAACATGGACACGTACTTTGGCTGAGTTTATGACTTATTTAGCTGAAAATCAAAAAGATTTTGGTTACTATCATTTATCAAATGATGCTAAAGAAGATACAACATGGTATGATTTTGCGGTTGAAATCTTAAAAGACACAGATGTGGAGGTTAAGCCTGTTGATTCTAGTCAATTCCCAGCAAAAGCAAAACGTCCTTTAAATTCAACTATGAGTTTGGAAAAAGCGAAAGCAACAGGATTTGTGATTCCTACTTGGCAAGATGCTTTAAAAGAGTTCTACAAGCAGGAAGTTAAAAAA

SEQ ID NO: 16136 - protein, 284 aa, Streptococcus agalactiae; identical to SEQ ID NO: 7244

SEQ ID NO: 16137 - protein, 339 aa, Streptococcus agalactiae; identical to SEQ ID NO: 7245

SEQ ID NO: 16138 - protein, 113 aa, Streptococcus agalactiae; identical to SEQ ID NO: 7246

SEQ ID NO: 16139 - protein, 1107 aa, Streptococcus agalactiae; identical to SEQ ID NO: 7247

SEQ ID NO: 16140 - protein, 369 aa, Streptococcus agalactiae; identical to SEQ ID NO: 7248

SEQ ID NO: 16141 - protein, 1872 aa, Streptococcus agalactiae
TTGAAAAAGCTTTTGAAAAAATTTACACAGAAAAGAAAAAATGATATAATCAAATGTAAAACTATAATGGGTTATTTCTGTGGAGGTCATGACTTGGCAATTGATAAAGAAAAAATTTCTGAAATCAAGAACAGTGTTAACATTGTTGATGTCATCGGTGAAGTTGTCGGTTTGACAAAAACAGGACGCAATCATCTTGGTTTATGCCCATTTCATAAAGAAAAAACGCCATCTTTTAATGTTATCGAAGATAGGCAGTTTTTTCATTGTTTTGGTTGTGGTCGCTCTGGTGATGTCTTTAAATTTGTGGAAGATTACCAACATATTAGTTTTTTAGATAGTGTACAAGTTCTAGCTGAACGTTCAGGAATACCTCTAGATACTAATTTTAAGGGGCAAGTTCCTAAAAAACCTAAAGCTAATCAGTCGCTTTTAGATATTCATAGAGTTGCTTCGGGATTTTACCATGCCTATTTAATGACAACTAATGATGGTGAACGCGCTAGACAATACCTTGCCGAGCGCGGAGTGACAGAGGACTTAATTAAACATTTTCAAATAGGATTATCGCCGGGAGGGCAGGATTTTCTATATCGTCGTCTGGCAAAAGAGTTTGATGAAAAAACTTTGATGTCTTCTGGTTTGTTCAATTATTCAGAAAATAGCAATCAGTTTTACGATTCATTTAATAATAGAATTATGTTTCCGTTAACTAATGATATTGGTGAAGTCATTGCGTTTTCAGGACGAGTTTGGACTCAAGAGGACATTGATAGAAAACAAGCTAAATATAAAAATTCTCGTGCCACCCCTATTTTTAATAAGTCTTACGAGCTTTACCATTTAGATAAAGCGCGTGCTGTAATTAATAAAGCACACGAAGTTTACCTAATGGAAGGCTTTATGGATGTTATTGCAGCTTATCGTGCAGGAATTGAGAATGTTGTTGCTTCTATGGGGACCGCTTTAACCAATGAACACGTTAGACACCTTAAAAGATTTACTAAGAAAGTTGTTCTGACTTATGATGGTGATAGAGCTGGTCAAAACGCAATTGACAAGTCTTTAGAACTGCTATCAGATATGACTGTTGATATCGTTAGGATACCTAATAAAATGGACCCTGATGAATTTCTACAAGCAAATTCAGCAGAAGATTTTAAACAACTCTTAGAAAATGGGCGCATCAGTAATACAGAGTTTTATATCCACTACTTAAAGCCTGAAAACACCGATAATTTACAATCTGAAATTGCTTATGTTGAAAAAATAGCGAAATTAATTGCTAAATCTCCATCGATAACAGCACAAAATTCATATATTACAAAAGTGGCTGAACTCTTGCCAGATTTTGATTATTTTCAAGTAGAACAATCGGTTAATAACGAACGATTGCATCATAGAAGTCAACAGCAAGCTTCATCTTCAGTACAAACAAGTGCTACAGTGCAATTACCACAGACAGGTAAGTTATCAGCTATCACTAAAACAGAAATGCAATTGTTTCATCGATTATTGAATCATCCCTACCTGTTAAATGAATTCCGTAATAGGGATAATTTTTATTTTGATACAACAGAAATACAAGTTTTATATGAGTTGCTAAAAGAAAGTGGTGAGATCACGTCTTATGATTTATCACAAGAAAGTGACAAAGTTAATCGTACTTATTATATAATTTTAGAGGAACAATTACCTGTAGAAGTATCTATTGGAGAGATTGAAGCCGTCGAAAAGGCACGTGACCGTTTATTGAAAGAACGTGATTTAAGAAAACAAAGCCAGTTAATTAGACAATCTAGTAATCAAGGTGATGAAGAAGGAGCCTTGGCTGCATTAGAAAATTTAATTGCTCAAAAAAGAAATATGGAA

SEQ ID NO: 16142 - protein, 624 aa, Streptococcus agalactiae
MKKLLKKFTQKRKNDIIKCKTIMGYFCGGHDLAIDKEKISEIKNSVNIVDVIGEVVGLTKTGRNHLGLCPFHKEKTPSFNVIEDRQFFHCFGCGRSGDVFKFVEDYQHISFLDSVQVLAERSGIPLDTNFKGQVPKKPKANQSLLDIHRVASGFYHAYLMTTNDGERARQYLAERGVTEDLIKHFQIGLSPGGQDFLYRRLAKEFDEKTLMSSGLFNYSENSNQFYDSFNNRIMFPLTNDIGEVIAFSGRVWTQEDIDRKQAKYKNSRATPIFNKSYELYHLDKARAVINKAHEVYLMEGFMDVIAAYRAGIENVVASMGTALTNEHVRHLKRFTKKVVLTYDGDRAGQNAIDKSLELLSDMTVDIVRIPNKMDPDEFLQANSAEDFKQLLENGRISNTEFYIHYLKPENTDNLQSEIAYVEKIAKLIAKSPSITAQNSYITKVAELLPDFDYFQVEQSVNNERLHHRSQQQASSSVQTSATVQLPQTGKLSAITKTEMQLFHRLLNHPYLLNEFRNRDNFYFDTTEIQVLYELLKESGEITSYDLSQESDKVNRTYYIILEEQLPVEVSIGEIEAVEKARDRLLKERDLRKQSQLIRQSSNQGDEEGALAALENLIAQKRNME

SEQ ID NO: 16143 - protein, 290 aa, Streptococcus agalactiae
TTGGATTTCTCAAAAGAAATCTGCTATAATGAACGTGAATTAAATAATATTAAGGAGCTTGTTCACATGATTAAAGAACTAAAAGAATTTTTATTTAAGGGTAATGTTTTAGACCTTGCTGTTGCTGTTATTTTAGGTGCAGCTTTTAATGCTATCATCACTTCACTTGTTAAAGACGTTATTACACCGCTTATCCTTAATCCTGTATTAAAAGCTGCTGGCGTTTCAAATATCGCACAGCTTTCATGGAATGGTGGCTTACGGTAATTCTAAGTGCCAGTAATAATTTC

SEQ ID NO: 16144 - protein, 97 aa, Streptococcus agalactiae
MDFSKEICYNERELNNIKELVHMIKELKEFLFKGNVLDLAVAVILGAAFNAIITSLVKDVITPLILNPVLKAAGVSNIAQLSWNGVLTVILSASNNF

SEQ ID NO: 16145 - protein, 618 aa, Streptococcus agalactiae
ATGGGAGTACTGATTTTTCAGGGCGGAATGTCGTTTCATTATTCTGCAGGGCTTTCTTCGTATATTTTAGCTCATGTTATGGGCAAGAGTGACCATCAGCACAATAAGGTTAAAAATGATAGTCTCTTTTTAGGAATGATACTTATTACATTTGGTTGGTTTGGATTTAATATGGGTCCAGTTGGTGAGTGGAATTCACAAGCCATTATGATACTTTTAAATACTATATTTGCTATTATAGGTGGTGGTTTGGCGTGGACATTGGCTGCTAAGTGGAATGGTGAGGAAGAGAAAACAGGAAGCTTATTGAATGGCATTATTGTTGGTCTTGTGACGAGTACAGCAGGAGTTGGGTATCTCTTAACTTGGCAATTATTAGCTGTAACATTCTTTGCATCCCTCTTCACCTACTTTGTAACGGATTACGTTGCGAAAGCTTTTGCCATTGATGATGTCGTTTCCTCCTTTGGAATGAATGGTATTGGGGGATTGTTGGGAAGTTTAGGAGTTGGTCTCTTTAAATTATCACATATGCCAGTTCAACTGTTAGCATTAGCTACCACAATTCTTTTGTCAATTATAATGACCTATATCATATCTAAAGCGATTTTTAGAAAA

SEQ ID NO: 16146 - protein, 206 aa, Streptococcus agalactiae
MGVLIFQGGMSFHYSAGLSSYILAHVMGKSDHQHNKVKNDSLFLGMILITFGWFGFNMGPVGEWNSQAIMILLNTIFAIIGGGLAWTLAAKWNGEEEKTGSLLNGIIVGLVTSTAGVGYLLTWQLLAVTFFASLFTYFVTDYVAKAFAIDDVVSSFGMNGIGGLLGSLGVGLFKLSHMPVQLLALATTILLSIIMTYIISKAIFRK

SEQ ID NO: 16147 - protein, 455 aa, Streptococcus agalactiae
GTGTTTTTACTATTATGATTTTATCGATGTGGCTCATGATTTTTGGGGTTGCATTCTATTACTTTGGGTCGCTACATCAATCATTGACTTCAAGGATTATTTATCAGTTTGTACTTACTGTTTTGCTAACGACAACAGCTTGGTTCATGGGTGCCTATTTTTTAGCATTTGAAGGTCATTTTAAAACTGTCTTTCAATTCCAAGAAGCAGATGGTAAACAAATTGTAAATTGTTTATTTCAACTTTGTTTCGCCCTTTACGCAGTAGTAATGCTTATTGGGTCAATTATTGATAGAGTTCAGACGAAGCGACTTTTATTAGCTGTTGTTTCTTGGCTTTTCTTGGTGTATACGCCCTTAGCTTATTTAATTTGGAATTCAGAGGGTGTTTTTGCAAAGATGGGAGTACTTGATTTTTCAGGCGGAAAAGTCGTTCATTTATCTGCNNNNNTTAAT

SEQ ID NO: 16148 - protein, 152 aa, Streptococcus agalactiae
  VARIANT 6, 150, 151: Xaa = Any Amino Acid
MFLLLXILSMWLMIFGVAFYYFGSLHQSLTSRIIYQFVLTVLLTTTAWFMGAYFLAFEGHFKTVFQFQEADGKQIVNCLFQLCFALYAVVMLIGSIIDRVQTKRLLLAVVSWLFLVYTPLAYLIWNSEGVFAKMGVLDFSGGKVVHLSAXXN

SEQ ID NO: 16149 - protein, 1125 aa, Streptococcus agalactiae
ATGAAACATTATCAAACCATAATTATCGGTGCAGGCGCTGCAGGAATCGGTTTTGGTTCTGCCATGCAACGATTAGGACTTACAAATTTTCTTATCATTGAAAAAGGGCACATTGGAGAATCTTTTTTAAGATGGCCCAGAACAACACAATTTATCACACCTTCCTTCACTACCAATGGCTTTGGTTTTCCAGATCTAAACGCTGTTATTCCAGATACTTCTCCTGCTTTCTCATTTGAAAAAGAACATCTTTCTGGAGTGGAATATGCACGCTACTTACAATTAGTTGCTGCTCATTATAATCTCCCTATCCAAAACGAAACATCTGTTCTATCTATTGATAAACGAGATAGCCTTTTTGTTATTAAAACTTCAAAGGGAGATTTTTCTGCTGATTATCTTATTATGGCAACAGGAGAATTTCAAAATCCAAATACCATTGATATTAAAGGTGCAGATCTAGGAATGCACTATGGTCAAGTTGATAATTTCCATATCAAATCTGACAATCCATTTATCATCATTGGTGGAAACGAAAGTGCTTGTGATGCACTAACACATCTAGTATATTTGGGAAATCAAGTCGAATTATATACAGATACGTTTGGTCGTAAAGAGAGCAATCCCGATCCAAGCATCTCTTTATCCCCCCTAACTAAAGAACGTTTAAAACATATACAAGACCACAAAAAAGAATATTATAGTATCTCTGAAGGCAAGAAAGCCATTGAGATTAAACAAATTGGAAAACAATATCAAGTTACTTTTGATGACGGTAGTACTGCGGAGTCTTTCCATAAACCTATTCTTTCCACAGGTTTTCTAAATACCTGTCATCTCATTGACGGAATCGCTTTATTTGAATACGATAAAAATCAGTTGCCAATAGTTACTGAAGATGACGAATCTACTATCGTTAATAACTGTTTCTTAATTGGTCCAAGCTTACGACAAAGAGATACTATTTTCTGCTATATTTATAAATTCAGACAGCGCTTTGTCCCTGTTATTAATCATATCGCACAACGAGAAGGGATTATATTAGACGAAGATACCCTTGAATTCTTTAAAGAAAATCAAATGTACCTTGATAACCTAGCTTGTTGCGATGTCAATTGTGATTGC

SEQ ID NO: 16150 - protein, 375 aa, Streptococcus agalactiae
MKHYQTIIIGAGAAGIGFGSAMQRLGLTNFLIIEKGHIGESFLRWPRTTQFITPSFTTNGFGFPDLNAVIPDTSPAFSFEKEHLSGVEYARYLQLVAAHYNLPIQNETSVLSIDKRDSLFVIKTSKGDFSADYLIMATGEFQNPNTIDIKGADLGMHYGQVDNFHIKSDNPFIIIGGNESACDALTHLVYLGNQVELYTDTFGRKESNPDPSISLSPLTKERLKHIQDHKKEYYSISEGKKAIEIKQIGKQYQVTFDDGSTAESFHKPILSTGFLNTCHLIDGIALFEYDKNQLPIVTEDDESTIVNNCFLIGPSLRQRDTIFCYIYKFRQRFVPVINHIAQREGIILDEDTLEFFKENQMYLDNLACCDVNCDC

SEQ ID NO: 16151 - protein, 984 aa, Streptococcus agalactiae
ATGTCAGAAAAAATCAGAGTTTTACTCTATTATAAATATGTTTCAATTGAAAATGCGGAAGAGTACGCTGCGAAACATCTAGAATTTTGTAAATCTATTGGGCTTAAAGGTCGTATTTTGATTGCGGATGAGGGGATTAATGGAACTGTTTCTGGAGATTATGAAACAACTCAGAAGTATATGGATTGGATCCACAGCGATGAGCGTTTTGCTGATCTTTGGTTCAAGATTGACGAGGAAAATCAACAAGCTTTCCGTAAAATGTTTGTTCGTTATAAGAAAGAGATTGTGCACCTTGGGTTAGAAGATAATAACTTTGATAGCGATATTAATCCTTTGGAAACAACAGGTGAGTATTTAAATCCTAAACAATTTAAAGAAGCCTTGCTTGATGAAGATACTGTTGTTTTAGATACGCGTAATGATTATGAGTATGACTTAGGTCACTTCCGTGGAGCAATTCGTCCTGATATTCGCAATTTCCGTGAGTTACCACAATGGGTACGTGACAACAAAGATAAGTTTATGGAAAAACGTGTTGTTGTGTACTGTACCGGTGGTGTTCGTTGTGAGAAATTCTCGGGTTGGATGGTTCGAGAAGGTTTTAAAGATGTTGGACAATTACACGGTGGTATTGCAACATATGGAAAAGATCCGGAAGTTCAAGGTGAACTTTGGGATGGTGCGATGTATGTTTTTGATGATCGTATCTCGGTGCCAATTAATCATGTTAATCCAACTGTTATTAGTAAAGATTATTTTGATGGAACACCTTGTGAACGTTATGTCAATTGTGCAAATCCGTTTTGTAACAAACAAATTTTTGCTTCAGAAGAAAACGAAGCGAAGTATGTTCGAGGGTGCTCGCCTGAATGTCGTGCACATGAACGTAATCGCTATGTGCAAGAAAATGGTTTATCACGTCAAGAATGGGCAGAACGTTTAGAAGCTATTGGAGAATCCTTACCTCAAGTAGCAAATATT

SEQ ID NO: 16152 - protein, 328 aa, Streptococcus agalactiae
MSEKIRVLLYYKYVSIENAEEYAAKHLEFCKSIGLKGRILIADEGINGTVSGDYETTQKYMDWIHSDERFADLWFKIDEENQQAFRKMFVRYKKEIVHLGLEDNNFDSDINPLETTGEYLNPKQFKEALLDEDTVVLDTRNDYEYDLGHFRGAIRPDIRNFRELPQWVRDNKDKFMEKRVVVYCTGGVRCEKFSGWMVREGFKDVGQLHGGIATYGKDPEVQGELWDGAMYVFDDRISVPINHVNPTVISKDYFDGTPCERYVNCANPFCNKQIFASEENEAKYVRGCSPECRAHERNRYVQENGLSRQEWAERLEAIGESLPQVANI

SEQ ID NO: 16153 - protein, 147 aa, Streptococcus agalactiae
ATGACTTATGAATTATGTCTAGAATACGGTACTTATCCACTTAGACCTGTAGATGCTTGGGCTGATGAAATCAATACTGCACCTGCGTTTATTACTGAAGATAAAAAAACTTTTAGAACTTTTAGAAGAAGTCAATACCTTATTCCA

SEQ ID NO: 16154 - protein, 49 aa, Streptococcus agalactiae
MTYELCLEYGTYPLRPVDAWADEINTAPAFITEDKKTFRTFRRSQYLIP

SEQ ID NO: 16155 - protein, 252 aa, Streptococcus agalactiae
ATGCTTGGGCTGATGAAATCAATACTGCACCTGCGTTTATTACTGAAGATAAAAAAACTTTTAGAACTTTTAGAAGAAGTCAATACCTTATTCCATGAGCTCTTTTTAACGATAGAATGTTCCTTCCACTATATTGGTCATGACTTCCCAGAAAAAAGAGCAAAAATCACACAAATTTATCATGTGATTATCGAACATTTAAGCATACACTACCCTGAATATGACATTAAAATTGAATCATTATTAATGGGG

SEQ ID NO: 16156 - protein, 84 aa, Streptococcus agalactiae
MLGLMKSILHLRLLLKIKKLLELLEEVNTLFHELFLTIECSFHYIGHDFPEKRAKITQIYHVIIEHLSIHYPEYDIKIESLLMG

SEQ ID NO: 16157 - protein, 1370 aa, Streptococcus agalactiae
ATGTTGAAAAAACTATTTGCACCCCCTCAGAAAAGAGAACGTTTATCAGCTGAGGAAATTAAGCATAAATATCCTCGTTATCGTGTACAAGTCCTTATTTCTATTTTTGTAGGTTATATGGGATACTATTTTGTTCGTAATACGACTTCAATTTTATCTGGTATCCTTAATATGTCTGCTACTGAGATTGGTATTATTACCTGTGCTAGCTACATTGCTTATGGTCTCTCTAAATTTATTTCTGGTTTGATTTCAGATGAATCGAATTCTAAAATTTTCCTTCCAGTTGGTTTGTTTCTTACAGGACTAGTTAATGTGTTAATCGGTGTTATTCCATCTGTAATTACTAGTATCTGGCTCTTTACTATCATGTATCTTATTAATGGTTGGTTACAAGGGATGGGATACCCTCCTGGAGCGCGTACATTAGTCTATTGGTATGATAATAAAGAAAGAATTAAATATGCTACCATTTGGAATTTATCTCACAATTTTGGTGGAGCAATAGCGCCGATTTTAACTGGTGTAGGTCTAGCTCTTGCTGGTAATGATTCTCTTAATCAAGCGCGTGCTGCTTATTGGTTTCCAGGGGTGGTGGCTTGTCTTTTGGCTGTTCTTGTTTACTTTTTACAAGAAGATACTCCAGAATCTATCGGACTTCCGCCTATAGAAGAGTATCATAAAGAGCAATATACTAATGTTGTGGATTCAAGTGACATTTTAGAAGAGCCTGAAGTTTTGGGTATGGGCGAAATTATAAAAAATATATTCTACCAAATACTAAACTGATGTGGGCATCCTTGTATTCAATATTTGTATATATTTTACGTTACGGTATTGTCTCATGGACTCCTAAGTTTTTAGCGACGAGTGTGCAAGATGGTGGAAAAGGTATTACTGCAACAGCTGGTATGGGTGGTTTTTCACTTTTTGAAATAGGTGGTATTATTGGGATGCTAACAGCAGGATATCTATCTGCCAAAGTGTTTAAAAACTCTAAACCTTTAACCAATGTAGCCTTCTTAGTTGTAGCAATCTTATTACTAGCTGCCTATTGGTTTATTCCAGCAGGACCTCAATATATGGCATTAGACTTCATTATTTTACTAGGTTTGGGGGCATCAATCTACGGTCCTGTTATGATGGTTGGCCTGTATGCTATGGAGTTAGTTCCAAAAGCAGCAGCTGGAGCAGCTTCAGGATTGACTGGCACATTTAGTTATGTCGGAGGAGCAACGATCGCTACTCTAGCTATTGGTATTATTATTGACCACTTTGGTTGGGGAGTAGCATTTATAATATTTGGTATTTCTGGATTTGCGGCTATTGTCTGTACCTTGCTTTCAAGAGATAAGAGTCTAGAGTATTGG

SEQ ID NO: 16158 - protein, 457 aa, Streptococcus agalactiae
MLKKLFAPPQKRERLSAEEIKHKYPRYRVQVLISIFVGYMGYYFVRNTTSILSGILNMSATEIGIITCASYIAYGLSKFISGLISDESNSKIFLPVGLFLTGLVNVLIGVIPSVITSIWLFTIMYLINGWLQGMGYPPGARTLVYWYDNKERIKYATIWNLSHNFGGAIAPILTGVGLALAGNDSLNQARAAYWFPGVVACLLAVLVYFLQEDTPESIGLPPIEEYHKEQYTNVVDSSDILEEPEVLGMGEIIKKYILPNTKLMWASLYSIFVYILRYGIVSWTPKFLATSVQDGGKGITATAGMGGFSLFEIGGIIGMLTAGYLSAKVFKNSKPLTNVAFLVVAILLLAAYWFIPAGPQYMALDFIILLGLGASIYGPVMMVGLYAMELVPKAAAGAASGLTGTFSYVGGATIATLAIGIIIDHFGWGVAFIIFGISGFAAIVCTLLSRDKSLEYW

SEQ ID NO: 16159 - protein, 2314 aa, Streptococcus agalactiae
ATGACAAGAAATTTTACAACTTACGTTGGACAAAGGAAAAGTATTATCAGAATTAACAAATGAAGAGATTTACGTTGAATTGTTAAATTTTGTAAAAGAAGAAGCTGCCGCTAAATCAAAAAATAGCTCTCAACGTAAGGTATACTATATTTCAGCTGAGTTTCTAATTGGTAAATTACTTTCAAATAATTTGATTAACTTAGGGATTTATAAAGATGTCAAAAAAGAGTTAGAACTTGTAGGTAAATCAATTGCTGAAATAGAAGATGTAGAGCCAGAACCATCACTTGGTAATGGTGGTTTAGGGCGTTTAGCATCATGTTTTATTGACTCGATTTCTTCTTTAGGTATTAATGGTGAAGGTGTTGGTTTAAACTATCACTGTGGGCTTTTCAAACAAGTATTTCGCAACAATCAACAAGAAGCAGAAGCTAACTACTGGATTGAGAATAATTCTTGGTTAGTACCAACAGATATTTCTTATGATGTTCCTTTCCGTGACTTTACTTTAAAATCACGCCTAGATAGAATTGATGTATTAGGTTATAAGAAAGATACTAAAAATTATTTGAACCTTTTTGATATTGATGGACTTGATTATAACCTTATTGAAAAAGGTATCACTTTTGATAAGACAGAAATCAAGAAGAATTTAACCTTGTTCTTGTATCCAGATGATTCAGATAAAAATGGAGAATTATTACGTATCTATCAGCAATATTTCATGGTCTCAAATGCTGCTCAATTATTAATTGATGAAGCATCGAGCGTGGTTCAAACCTTCATGATTTAGCTGAATATGCTTATGTTCAAATTAATGACACTCACCCATCTATGGTCATCCCTGAGTGATTCGTTTATTGACAGAAAAACATGGTTTTGAATTTGACGAAGCTGTGTCAGTTGTTCGCAATATGGTTGGCTATACAAACCATACCATCCTTGCAGAAGCTCTTGAAAAATGGCCTTTAGAGTATCTTAATGAGGTAGTACCCCACCTAGTAACAATCATTAAAAAATTAGATCAAATGATTCGTGAAGAGCAAACAAATCCAGAGGTTCAAATTATTGATGAAGCTGGACGTGTTCACATGGCGCATATGGATATCCACTTCTCAACAAGCGTTAATGGTGTAGCAGCATTACATACAGAAATCCTTAAAAATAGTGAATTAAAGGTTTTCTATGATATTTACCCAGATAAGTTTAACAATAAGACAAACGGTATTACATTCCGTCGCTGGTTGGAGTTTGCTAACCAAGATTTAGCAGATTACTTGAAAGAACTAATTGGGGATAGCTATCTTACTGATGCGACTCAGCTCGAAAAATTGTTAACTTATGCTGATAGCAATGAAGTTCATGATAAATTAGCTGCTATTAAATTTAAAAACAAACTGGCTCTTAAACGTTACCTTAAGGAAAATAAAGGTATTGAATTGGATGAATACTCAATTATTGATACACAAATCAAACGATTCCACGAATATAAGCGCCAACAAATGAATGCTTTATATGTTATTCATAAATACTTAGAAATTAAACGTGGGCATTTCCCATCACGTAAATTAACAGTTATTTTTGGTGGTAAAGCTGCTCCAGCCTATACTATTGCACAGGATATCATTCACTTAATTCTCTGCTTATCAGAATTAATTAATAATGATCCAGAAGTTAATAAATACCTTAATGTCCATTTAGTAGAAAATTACAATGTGACAGTAGCGGAAAAGTTAATCCCTGCAACAGATATTTCGGAACAAATTTCATTGGCTTCCAAAGAAGCATCTGGTACAGGTAACATGAAATTTATGTTGAATGGTGCTCTTACTCTTGGTACTATGGATGGGGCAAATGTTGAAATAGCTGAATTAGCTGGCAAAGAGAACATCTACACATTTGGTAAAGACTCTGATACTATCATTAATCTTTATGAAACATCTGGTTATCGTTCAAAAGATTACTATGATAAAGACAAAGTAATTCGTGAAGCTGTTGATTTTATCATTAGTGATGATATAGTGTCACTCGGTAATGCAGAACGACTAAAGAGATTGCATGATGAGTTAGTAGGTAAAGATTGGTTCATGACATTGATTGATTTGAAAGAATACATTGCTGTTAAAGAACAAGTGCTTGCTGATTATGAAGATTATGAATCATGGAATAAGAAAGTTATACACAATATTGCTAAAGCAGGGTTCTTCTCATCAGATCGTACAATCGAACAATATAATCAAGATATTTGGCATTCAATAAAAAGTCTCTAAAAGTAAGGTTTTCAACCTTACTTTTTTCTTGTCTAATAAAACTA

SEQ ID NO: 16160 - protein, 773 aa, Streptococcus agalactiae
  VARIANT 285: Xaa = Any Amino Acid
MTRNFTTYVGQQGKVLSELTNEEIYVELLNFVKEEAAAKSKNSSQRKVYYISAEFLIGKLLSNNLINLGIYKDVKKELELVGKSIAEIEDVEPEPSLGNGGLGRLASCFIDSISSLGINGEGVGLNYHCGLFKQVFRNNQQEAEANYWIENNSWLVPTDISYDVPFRDFTLKSRLDRIDVLGYKKDTKNYLNLFDIDGLDYNLIEKGITFDKTEIKKNLTLFLYPDDSDKNGELLRIYQQYFMVSNAAQLLIDEAIERGSNLHDLAEYAYVQINDTHPSMVIPEXIRLLTEKHGFEFDEAVSVVRNMVGYTNHTILAEALEKWPLEYLNEVVPHLVTIIKKLDQMIREEQTNPEVQIIDEAGRVHMAHMDIHFSTSVNGVAALHTEILKNSELKVFYDIYPDKFNNKTNGITFRRWLEFANQDLADYLKELIGDSYLTDATQLEKLLTYADSNEVHDKLAAIKFKNKLALKRYLKENKGIELDEYSIIDTQIKRFHEYKRQQMNALYVIHKYLEIKRGHFPSRKLTVIFGGKAAPAYTIAQDIIHLILCLSELINNDPEVNKYLNVHLVENYNVTVAEKLIPATDISEQISLASKEASGTGNMKFMLNGALTLGTMDGANVEIAELAGKENIYTFGKDSDTIINLYETSGYRSKDYYDKDKVIREAVDFIISDDIVSLGNAERLKRLHDELVGKDWFMTLIDLKEYIAVKEQVLADYEDYESWNKKVIHNIAKAGFFSSDRTIEQYNQDIWHSNKKSLKVRFSTLLFSCLIKL

SEQ ID NO: 16161 - protein, 1492 aa, Streptococcus agalactiae
ATGAAAAAACGTGCAAGTGGTGTCTTAATGCACATCACTTCTCTACCAGGTGATTTAGGTATTGGAACATTTGGACGAGAAGCCTACGCTTTTGTTGATTTTTTGGTCGAAACTGATCAAAAATTTTGGCAAATTCTTCCCTTAACAACAACAAGCTTCGGGGACTCTCCTTACCAGTCTTTTTCTGCAGTAGCTGGTAATACACATTTAATTGATTTTGATTTGCTAACGCTTGAGGTTTCATTTCGAAAGATGACTACCAAAATATTAGTTTTGGACAGGATCCAGAAGTTGTTGATTATGCTGGTCTGTTTGAAAAACGCCGTCCAGTTTTAGAAAAAGCAGTTAAAAATTTCTTGCAAGAAGAGAGAGCTACGAGAATGCTATCTGATTTCTTGCAAGAAGAAAAATGGGTAACTGATTTGCTGAATTTATGGCGATCAAAGAACATTTTGGTAATAAGGCGCTTCAAGAATGGGATGACAAGGCTATTATACGCCGCGAAGAAGAAGCCTTAGCAGGATATCGTCAAAAGCTTAGTGAAGTGATAAAATATCATGAAGTAACGCAATATTTCTTTTACAAACAATGGTTTGAGTTAAAAGAATATGCTAATGATAAAGGGATTCAAATTATCGGTGATATGCCAATCTACGTTTCTGCCGATAGTGTAGAAGTTTGGACAATGCCTGAACTGTTTAAATTAGATTGCGACAAACAACCACTTGCTATTGCTGGTGTACCAGCGGATGATTTTTCTGACGATGGTCAGCTTTGGGGCAATCCTATTTACAATTGGGATTACCACAAAGAGTCAGATTTTGACTGGTGGATTTATCGTATTCAATCTGGTGTTAAGATGTATGACTATTTGCGTATTGATCATTTTAAAGGTTTTTCAGATTATTGGGAAATTCGAGGAGATTATCAAACAGCTAATGATGGCTCATGGCAACCAGCTCCCGGTCCAGAATTATTTGCAACTATCAAAGAAAAATTAGGTGATTTACCTATTATTGCTGAGAATTTAGGCTATATTGATGAGAGAGCAGAGAGATTACTGGCTGGAACAGGGTTCCCAGGTATGAAAATCATGGAATTCGGTTTTTATGATACAACAGGAAATAGTATTGATATTCCTCATAACTACACAGAAAATACAATTGCATATGCTGGAACTCATGATAACGAAGTTATTAATGGCTGGTTTGAAAATCTTACAGTCGAACAGAAAGCTTATGCAGAAAATTACATGCGTCGTTTGCCAAATGAGCCCATTACTGAGACTGTACTGCGTACCTTGTATGCAACCGTTAGTCAAACAACGATTACATGTATGCAAGATCTACTAGATAAACCTGCAGATAGCCGTATGAACATGCCAAATACCGTTGGAGGTAACTGGCAATGGCGTATGAGAAAAGAAGACTTAACAGAAAATCGCAAAGCATTCTTAAAAGAGATTACAACTATTTATAATAGAGGGAATAAA

SEQ ID NO: 16162 - protein, 498 aa, Streptococcus agalactiae
MKKRASGVLMHITSLPGDLGIGTFGREAYAFVDFLVETDQKFWQILPLTTTSFGDSPYQSFSAVAGNTHLIDFDLLTLEGFISKDDYQNISFGQDPEVVDYAGLFEKRRPVLEKAVKNFLQEERATRMLSDFLQEEKWVTDFAEFMAIKEHFGNKALQEWDDKAIIRREEEALAGYRQKLSEVIKYHEVTQYFFYKQWFELKEYANDKGIQIIGDMPIYVSADSVEVWTMPELFKLDCDKQPLAIAGVPADDFSDDGQLWGNPIYNWDYHKESDFDWWIYRIQSGVKMYDYLRIDHFKGFSDYWEIRGDYQTANDGSWQPAPGPELFATIKEKLGDLPIIAENLGYIDERAERLLAGTGFPGMKIMEFGFYDTTGNSIDIPHNYTENTIAYAGTHDNEVINGWFENLTVEQKAYAENYMRRLPNEPITETVLRTLYATVSQTTITCMQDLLDKPADSRMNMPNTVGGNWQWRMRKEDLTENRKAFLKEITTIYNRGNK

SEQ ID NO: 16163 - protein, 1026 aa, Streptococcus agalactiae
ATGGTAACTATAAAAGATGTTGCTGCCAAAGCTGGTGTTAATCCATCGACAGTAAGTCGTGTACTAAAAGATAATGAATCTATTTCAAGTAAGACGAAAGAGCGCGTGAAAAAAGCTATGGAAGAGCTGGGCTATGTTCCTAATGTTGCAGCACAAATGTTGGCTAGTGGTTTAACGCAAAATATTGGAGTTATTTTTCCTCCACTGGTTTTACCAGACCGCTTAAGTGAACCCTTTTTCATGGAGATTCTTTCTACATTAACTAATGAAGCAAAAGAGCATGGGTTTACAGTTTCTATTGCAACAAGTATGTCTTCTGAGGAGTTGTTAGAACAAGTAAAATTAATGCATCTACAAAAACGAGTGGATGGTTTTATTGTTCTCTATTCGGATCAAAAAGATCCTATCAGAGAGTATTTATTAAAATATAAACTGCCCTTTGTTGTTGTTGGTGCTGCTAATGGCTATGAAAATGAGATTACTTATATTGATAATGATAATCAGCTGATGGGGAAATCTGCCATTGATTATCTCTATAAAAAAGGACATAAAAGCATCCAGTTTGTTACAGATGATTTAAATTCAGAAGTATCAGAAGAGCGCTATTTAGGGTATTTTAAAGGTGCTAGAAAGTTAGGTTTAAACCAAAAGCCAGCTCTTTTATTTGACAGAGGCAATCCGCAAGTTTTAGAGGAATTTATAAATAGAGTCAAAGAAGAAGAAACAACTGCTTTAATTGTTATTGGTGATACTGTCTCTGTTAGAGTAATGCAATTTCTTTCTTTCTATAAATTAAAAGTTCCAGATGACATTTCTATCATGACCTTTAATAATTCTCTCTTCTCACATCTGATTCATCCTTACCTAAGCACATTTGATATTAATGTTAATAATCTAGGAAGGACAAGCGTTCGTCGTCTGATTGACATCATTAAATCTCCAGACAAAGTCTTTAGTGAGACTATTATTGTGCCTTTTACTTTAGAAGAGCGTGAAAGTGTCCGAGATATTTCTAAAAATAATAAT

SEQ ID NO: 16164 - protein, 342 aa, Streptococcus agalactiae
MVTIKDVAAKAGVNPSTVSRVLKDNESISSKTKERVKKAMEELGYVPNVAAQMLASGLTQNIGVIFPPLVLPDRLSEPFFMEILSTLTNEAKEHGFTVSIATSMSSEELLEQVKLMHLQKRVDGFIVLYSDQKDPIREYLLKYKLPFVVVGAANGYENEITYIDNDNQLMGKSAIDYLYKKGHKSIQFVTDDLNSEVSEERYLGYFKGARKLGLNQKPALLFDRGNPQVLEEFINRVKEEETTALIVIGDTVSVRVMQFLSFYKLKVPDDISIMTFNNSLFSHLIHPYLSTFDINVNNLGRTSVRRLIDIIKSPDKVFSETIIVPFTLEERESVRDISKNNN

SEQ ID NO: 16165 - protein, 1240 aa, Streptococcus agalactiae
ATGGAAAAAAATACTTGGAAAAAATTACTTGTTAGTACTGCTGCTCTTTCAGTAGTGCAGAGGAGCAATTGCTGCTACTCACTTAACTCAGTTGATGCTGCTTCAAAAACAACTATCAAACTTTGGGTCCCAACAGATTCAAAAGCGTCTTATAAAGCAATTGTTAAAAAATTCGAGAAGGAAAACAAAGGCGTTACTGTAAAAATGATTGAGTCTAATGACTCCAAAGCTCAAGAAAACGTAAAAAAAGACCCAAGCAAGGCAGCCGATGTATTCTCACTTCCACATGACCAACTTGGTCAATTAGTAGAATCTGGTGTTATCCAAGAAATTCCAGAGCAATACTCAAAAGAAATTGCTAAAAACGACACTAAACAATCACTTACTGGTGCACAATATAAAGGGAAAACTTATGCATTCCCATTTGGTATTGAATCTCAAGTTCTTTATTATAATAAAACAAAGTTAACTGCTGACGACGTTAAATCATACGAAACAATTACAAGCAAAGGGAAATTCGGTCACGCTTAAAGCAGCTAACTCATATGTAACAGGTCCTCTTTTCCTTTCTGTAGGCGACACTTTATTTGGTAAATCTGGTGAAGATGCTAAAGGCACTAACTGGGGTAATGAAGCAGGTGTTTCTGTCCTTAAATGGATTGCAGATCAAAAGAAAAATGATGGTTTTGTCAACTTGACAGCTGAAAATACAATGTCTAAATTTGGCGATGGTTCTGTTCATGCTTTTGAAAGTGGACCATGGGATTACGACGCTGCTAAAAAAGCTGTCGGTGAAGATAAAATCGGTGTTGCTGTTTACCCAACAATGAAAATCGGTGACAAAGAAGTTCAACAAAAAGCATTCTTGGGCGTTAAACTTTATGCCGTTAACCAAGCACCTGCTGGTTCAAACACTAAACGAATCTCAGCTAGCTACAAACTCGCTGCATATCTAACTAATGCTGAAAGTCAAAAAATTCAATTCGAAAAACGTCATATCGTTCCTGCTAACTCATCAATTCAATCTTCTGATAGCGTCCAAAAAGATGAACTTGCAAAAGCAGTTATCGAAATGGGTAGCTCAGATAAATATACAACGGTTATGCCTAAGTTGAGTCAAATGTCAACATTCTGGACAGAAAGTGCTGCTATTCTTAGCGATACTTACAGTGGTAAAATCAAATCTAGCGATTACCTTAAACGTCTAAAACAATTCGATAAAGACATCGCTAAAACAAAA

SEQ ID NO: 16166 - protein, 415 aa, Streptococcus agalactiae
  VARIANT 29: Xaa = Any Amino Acid
MEKNTWKKLLVSTAALSVVAGGAIAATHXNSVDAASKTTIKLWVPTDSKASYKAIVKKFEKENKGVTVKMIESNDSKAQENVKKDPSKAADVFSLPHDQLGQLVESGVIQEIPEQYSKEIAKNDTKQSLTGAQYKGKTYAFPFGIESQVLYYNKTKLTADDVKSYETITSKGKFGQQLKAANSYVTGPLFLSVGDTLFGKSGEDAKGTNWGNEAGVSVLKWIADQKKNDGFVNLTAENTMSKFGDGSVHAFESGPWDYDAAKKAVGEDKIGVAVYPTMKIGDKEVQQKAFLGVKLYAVNQAPAGSNTKRISASYKLAAYLTNAESQKIQFEKRHIVPANSSIQSSDSVQKDELAKAVIEMGSSDKYTTVMPKLSQMSTFWTESAAILSDTYSGKIKSSDYLKRLKQFDKDIAKTK

SEQ ID NO: 16167 - protein, 341 aa, Streptococcus agalactiae
ATGAATAAAAAACTGATCTCACTTGATGGTATGTCCCTAAAAGAGGTCTTTCAAAAAGGTGATTTAGCAACTAAACTATCATTCTTAATTATGGGACTTGCTAACCTCAAAAATAAACAAATTGTCAAGGGACTTTTATTTTTAATCAGTGAAATTCTGTTTTTAATTACCTTTGTTTACCAAGTTATCCCAGCTGTAAAAGGTCTTATTTCCTTAGGAACCCAAGAACAGGTATGACAACTAAAACTGTGGATGGTATTAAAATCCAAGTTGCGACACAAGGTGATAACTCTATGTTAATGCTAATTTTTGGACGCTATCAGAAGATTGAATTGATGAGT

SEQ ID NO: 16168 - protein, 114 aa, Streptococcus agalactiae
  VARIANT 77: Xaa = Any Amino Acid
MNKKLISLDGMSLKEVFQKGDLATKLSFLIMGLANLKNKQIVKGLLFLISEILFLITFVYQVIPAVKGLISLGTQEXGMTTKTVDGIKIQVATQGDNSMLMLIFGRYQKIELMS

SEQ ID NO: 16169 - protein, 363 aa, Streptococcus agalactiae
TTGACAGCTGAAAATACAATGTCTAAATTTGGCGATGGTTCTGTTCATGCTTTTGAAAGTGGACCATGGGATTACGACGCTGCTAAAAAAGCTGTCGGTGAAGATAAAATCGGTGTTGCTGTTTACCCAACAATGAAAATCGGTGACAAAGAAGTTCAACAAAAAGCATTCTTGGGCGTTAAACTTTATGCCGTTAACCAAGCACCTGCTGGTTCAAACACTAAACGAATCTCAGCTAGCTACAAACTCGCTGCATATCTAACTAATGCTGAAAGTCAAAAAATTCAATTCGAAAAACGTCATATCGTTCCTGCTAACTCATCAATTCAATCTTCTGATAGCGTCCAAAAATTAGCATTAACA

SEQ ID NO: 16170 - protein, 121 aa, Streptococcus agalactiae
MTAENTMSKFGDGSVHAFESGPWDYDAAKKAVGEDKIGVAVYPTMKIGDKEVQQKAFLGVKLYAVNQAPAGSNTKRISASYKLAAYLTNAESQKIQFEKRHIVPANSSIQSSDSVQKLALT

SEQ ID NO: 16171 - protein, 585 aa, Streptococcus agalactiae
ATGGATTGCAGATCAAAAGAAAATGATGGTTTTGTCAACTTGACAGCTGAAAATACAATGTCTAAATTTGGCGATGGTTCTGTTCATGCTTTTGAAAGTGGACCATGGGATTACGACGCTGCTAAAAAAGCTGTCGGTGAAGATAAAATCGGTGTTGCTGTTTACCCAACAATGAAAATCGGTGACAAAGAAGTTCAACAAAAAGCATTCTTGGGCGTTAAACTTTATGCCGTTAACCAAGCACCTGCTGGTTCAAACACTAAACGAATCTCAGCTAGCTACAAACTCGCTGCATATCTAACTAATGCTGAAAGTCAAAAAATTCAATTCGAAAAACGTCATATCGTTCCTGCTAACTCATCAATTCAATCTTCTGATAGCGTCCAAAAAGATGAACTTGCAAAAGCAGTTATCGAAATGGGTAGCTCAGATAAATATACAACGGTTATGCCTAAGTTGAGTCAAATGTCAACATTCTGGACAGAAAGTGCTGCTATTCTTAGCGATACTTACAGTGGTAAAATCAAATCTAGCGATTACCTTAAACGTCTAAAACAATTCGATAAAGACATCGCTAAAACAAAA

SEQ ID NO: 16172 - protein, 195 aa, Streptococcus agalactiae
MDCRSKENDGFVNLTAENTMSKFGDGSVHAFESGPWDYDAAKKAVGEDKIGVAVYPTMKIGDKEVQQKAFLGVKLYAVNQAPAGSNTKRISASYKLAAYLTNAESQKIQFEKRHIVPANSSIQSSDSVQKDELAKAVIEMGSSDKYTTVMPKLSQMSTFWTESAAILSDTYSGKIKSSDYLKRLKQFDKDIAKTK

SEQ ID NO: 16173 - protein, 426 aa, Streptococcus agalactiae
ATGAATAAAAAACTGATCTCACTTGATGGTATGTCCCTAAAAGAGTCTTTCAAAAGGTGATTTACACTAAACTATCATTCTTATTATGGGACTTGCTAACCTCAAAAATAAACAAATTGTCAAGGGACTTTTATTTTTAATCAGTGAAATTCTGTTTTTAATTACCTTTGTTTACCAAGTTATCCCAGCTGTAAAAGGTCTTATTTCCTTAGGAACCCAAGAACAAGGTATGACAACTAAAACTGTGGATGGTATTAAAATCCAAGTTGCGACACAAGGTGATAACTCTATGTTAATGCTAATTTTTGGATTAGCTTCGCTTATCTTCTGTTGCGTATTTGCCTATATTTACTGGTCAAACATTAAAAGCGCAGCACATTTATTGACCTTGAAAGAAGAAGGAAGAGATTCCATCCTTAAAGATAT

SEQ ID NO: 16174 - protein, 145 aa, Streptococcus agalactiae
  VARIANT 142: Xaa = Any Amino Acid
MNKKLISLDGMSLKEVFQKGDLATKLSFLIMGLANLKNKQIVKGLLFLISEILFLITFVYQVIPAVKGLISLGTQEQGMTTKTVDGIKIQVATQGDNSMLMLIFGLASLIFCCVFAYIYWSNIKSAAHLLTLKEEGREFHPXKRY

SEQ ID NO: 16175 - protein, 734 aa, Streptococcus agalactiae
ATGGCCAGTACTTTCTTCCCTGTTCTATCTTGGACATTAATTTGGGCTGTTTTCGCTACTGTAACGAATTTCTTCTTTGGTATATTCTTGCCTTACTAATTAATACAAAAGGTTTGAAATTCAAAAAGATGTGGCGTACTATTTTTGTTATTACCATGGCTGTCCCTCAATTTATCTCTCTCTTAATCATGAGAAACCTCTTAAGTGACGCTGGACCGGTTAACGCCTTGTTAATAAAATGGGGACTTATTTCTTCAGCACATCCCCTTCCATTCCTTTCTGATCCGGTCTGGGCGAAATTCTCAATCATCTTTGTTAATATGTGGGTTGGTATTCCTGTAACAATGCTTGTTGCTACTGGTATCATCATGAATTTACCTGCAGAACAAATTGAAGCTGCTGAAATTGATGGGGCGAATAAGTTCCAAGTCTTTCAATCAATTACTTTCCCACAAATTTTGTTGATTATGACTCCTACTTTAATTCAACAATTTATCGGAAATATTAACAACTTCAACGTTATCTACCTACTCACTCAAGGTGGACCAACAAACTCAACATACTACCAAGCAGGTAGCACCGATTTACTTGTCACTTGGCTATACAATTTGACAGTAACTGCTGCAGATTATAACTTAGCATCTGTTGTTGGTATCTTAATCTTTATTCTTTCAGCAGTATTTAGTTTACTAGCTTACACAAGAACAAATTCTTACAAGGAAGGGGCAGCTAAA

SEQ ID NO: 16176 - protein, 245 aa, Streptococcus agalactiae
MASTFFPVLSWTLIWAVFATVTNFFFGIILALLINTKGLKFKKMWRTIFVITMAVPQFISLLIMRNLLSDAGPVNALLIKWGLISSAHPLPFLSDPVWAKFSIIFVNMWVGIPVTMLVATGIIMNLPAEQIEAAEIDGANKFQVFQSITFPQILLIMTPTLIQQFIGNINNFNVIYLLTQGGPTNSTYYQAGSTDLLVTWLYNLTVTAADYNLASVVGILIFILSAVFSLLAYTRTNSYKEGAAK

SEQ ID NO: 16177 - protein, 834 aa, Streptococcus agalactiae
ATGAATAAGAAAAAACGTCTTAACCTTACTTTTGTTTATATTTTATTGATAGTACTATCAATTATGTGGCTCTTTCCCATTGTTTGGGTCGTTCTCACAAGCTTCCGTGGTGAAGGAAGTGCCTTTGTCAACTACTTTATTCCTAAAACTTGGACATTAGACAACTACGCTAAACTCTTCACCCAAAACACATTCCCATTTGGTCAATGGTTCTTAAATACATTATTTGTCGCTACATGTACTTGTATACTATCAACTTTAATCACTGTAGCAATGGCTTATTCTCTCAGCAGAATCAAATTCAAACACCGTAATGGTTTCCTAAAGCTAGCTTTAGTCTTGAATATGTTTCCTGGGTTCATGTCAATGATTGCAGTTTACTACATCCTAAAAGCTCTAAATCTAGACCAAACATTAACCGCTTTAATATTTGTCTATTCTGCAGGAGCAGCATTAACCTTCTACATCGCAAAAGGTTTCTTTGATACTATTCCATACTCTTTGGATGAGTCTGCTATGATTGATGGGGCGACCCGTTTGGATATTTTCCTTAAAATCACCCTACCATTGTCAAAACCCATTATCGTTTATACTGCATTAATCGCTTTTATGGGCCCTTGGATGGACTTTATCTTTGCAAAAGTTATTTTAGGTGATGCTACGAGCAAGTACACAGTCGCTATTGGTCTCTTTTCAATGTTGCAACAAGATACCATCAACCAGTGGTTCATGTCATTTACAGCAGGATCTGTTATTATTGCAATTCCAATCACAATACTTTTCATGTTCATGCAAAAATACTATGTTGAAGGTATTACAGGTGGATCTGTAAAA

SEQ ID NO: 16178 - protein, 278 aa, Streptococcus agalactiae; identical to SEQ ID NO: 11538

SEQ ID NO: 16179 - protein, 1467 aa, Streptococcus agalactiae
ATGGAAAAAACAAAATCATTCTTGGACATCCTCGTGGTTTGTCCACTCTTTTCTTTACTGAAATGTGGGAAAGATTCTCATCCTATGGTATGCGTGCTATTTTGCTGTACTATATGTACTATAGTGTTTCTCAAGGTGCCTTGGTATGGACAAACTGTCGCTGCATCAATCATGGCTGTCTATGGTTCACTGGTTTATCTCTCATCAGTAATTGGTGGTTTTGTCAGCGACCGTATTCTAGGTAGTCGTAAAACTGTTCTGTATGGTGGTATTCTAATCATGCTAGGTCATATTGCTCTAGCTACACCATTTGGTCAAACAGCTCTATTCATTTCGATTGCTCTAATTATCCTTGGTACTGGACTATTAAAACCAAATGTATCAGAGATGGTTGGTAATTTATATGGAGAAAATGATTCTCGTCGTGATGCTGGTTTTAGTATCTTTGTTTTTGGTATTAACCTTGGTGCTTTTATTTCACCCATTGTAGTGGGGTACCTCGGACAAGAAGTAAATTTCCATCTTGGTTTCTCACTTGCTGCTATTGGTATGTTCTTTGGTCTCCTCCAATATACCTTAGATGGAAAAAAATATTTGACTGAAGAGAGTCTCAGACCAAACGATCCTTTAAGTCCTGAAGAAAAGTCCTCTCTATATAAAAAAGTTGGGCTTATCCTTATTGGTATTGTTATTGTACTTATTCTACTTCACTTGATGCATATGCTAACAATTGAAGTAATTATCGATATTTTTAGTATTATTGCAATCGCCATCCCAATTATTTATTTTATCAAGATTTTAAGTAGTAAAAAGATTTCTTCTGTTGAGCGTTCTCGAGTGTGGGCATATATCCCTCTCTTTATCGCCTCAATTCTATTTTGGTCAATTGAAGAACAAGGTTCAGTTGTCTTAGCCTTATTTGCAGATGAACAAACAAAACTTTACCTTAACTTCTTTGGGCATCATATTAATTTCCCATCAAGTTATTTCCAAAGTATGAACCCTCTCTTCATTATGCTTTATGTACCATTCTTTGCTTGGTTATGGGCTAAATGGGGAAGTAAGCAACCTTCATCACCTAAAAAATTTGCGTATGGACTTTTCTTTGCTGGAGCTTCATTCTTATGGATGATGCTACCAGGTTTACTCTTTGGAGTTAACGCTAAAGTAAGCCCTCTTTGGTTAACAATGAGTTGGGCTATTGTCATCGTTGGGGAAATGCTAATCTCACCAGTTGGATTATCAGCAACTAGTAAGCTCGCACCTAAAGCATTCCAAGCTCAAATGATGAGCATCTGGTTCTTAAGTAATGCTGCAGCACAAGCTATTAACGCTCAAATCGTTAAATTGTACACACCTGATACTCAAATTCTTTATTATGGTGTTGTTGGTGGTATAACAGTTGTATTTGGATTTATCCTCTTATTTTATGTTCCACGCATTGAAAAACTAATGTCTGGAGTTAAA

SEQ ID NO: 16180 - protein, 490 aa, Streptococcus agalactiae
  VARIANT 8, 47, 52: Xaa = Any Amino Acid
MEKTKSFXGHPRGLSTLFFTEMWERFSSYGMRAILLYYMYYSVSQGXLGMDXTVAASIMAVYGSLVYLSSVIGGFVSDRILGSRKTVLYGGILIMLGHIALATPFGQTALFISIALIILGTGLLKPNVSEMVGNLYGENDSRRDAGFSIFVFGINLGAFISPIVVGYLGQEVNFHLGFSLAAIGMFFGLLQYTLDGKKYLTEESLRPNDPLSPEEKSSLYKKVGLILIGIVIVLILLHLMHMLTIEVIIDIFSIIAIAIPIIYFIKILSSKKISSVERSRVWAYIPLFIASILFWSIEEQGSVVLALFADEQTKLYLNFFGHHINFPSSYFQSMNPLFIMLYVPFFAWLWAKWGSKQPSSPKKFAYGLFFAGASFLWMMLPGLLFGVNAKVSPLWLTMSWAIVIVGEMLISPVGLSATSKLAPKAFQAQMMSIWFLSNAAAQAINAQIVKLYTPDTQILYYGVVGGITVVFGFILLFYVPRIEKLMSGVK

SEQ ID NO: 16181 - protein, 531 aa, Streptococcus agalactiae
ATGAAATTAAGTTATGAAGATAAACTAGAAATATACGAGTTAAGAAAGATCGGGATGTCCTGGTCTCAGATTAGTCAACGATATGATGTTCGTATCTCGAATCTTAAATACATGATAAAACTCATGGATCGGTATGGTGTAGAAATCGTCGAAAAAGGTAGAAATGAGTATTATCCACCTGAATTAAAGCAGGAAATGATAGATAAAGTCTTGATTCATGGTTGTTCTCAACTCTCTGTTTCTCTTGATTATGCTCTCTCTAATTGTTCTATACTCACAAATTGGCTTTCCCATTTAAGAAAATGGTATACTATTGTTGAGAAAACAAGAGGGAGACCGAGTAAAATGGGACGTAAGCGTAAGAAAACTTGGGAAGAAATGACAGAGCTCGAGCGACTTCAGGAAGAAAATGAGCGCTTGAGAACGGAGAATGCCTTTCTAAAAAAGTTGAGGGATTTGCGCTTGAGGGACGAAGCCTTACAGAGCGAACGGCAGAAACAATTAGAGAAATGGTCACAGGAGGATTCCGAC

SEQ ID NO: 16182 - protein, 178 aa, Streptococcus agalactiae; identical to SEQ ID NO: 2808

SEQ ID NO: 16183 - protein, 90 aa, Streptococcus agalactiae
ATGGTCACAGGAGGATTCCGACTAGACCTCTTACTTGAGATAACTAAGATAGCTCGTGCAACTTACTATTATCAACTAAAGAAACTGGGA

SEQ ID NO: 16184 - protein, 30 aa, Streptococcus agalactiae
MVTGGFRLDLLLEITKIARATYYYQLKKLG

SEQ ID NO: 16185 - protein, 1989 aa, Streptococcus agalactiae
ATGATAGATAGAAAAGATACTAACCGATTTAAATTAGTTTCCAAATATAGTCCTTCAGGAGATCAACCTCAAGCTATTGAAACGTTGGTTGACAATATTGAAGGAGGAGAAAAAGCTCAGATTTTAAAAGGTGCTACTGGTACTGGTAAAACCTACACAATGAGCCAAGTTATCGCCCAAGTTAACAAGCCAACCTTGGTGATTGCACATAATAAAACCCTAGCAGGTCAACTTTATGGAGAGTTTAAAGAATTTTTTCCTGACAATGCCGTAGAGTACTTTGTTTCATATTATGATTATTATCAACCAGAAGCTTATGTGCCTTCTTCGGATACTTATATTGAAAAAGATAGCTCAGTCAATGACGAAATTGACAAATTACGTCACTCAGCGACTTCTTCGTTATTAGAAAGAAATGACGTTATTGTTGTAGCATCTGTTTCTTGTATTTACGGTTTAGGTTCTCCTAAAGAGTATGCAGACAGTGTTGTTAGCCTTAGGCCAGGTCAAGAAATTTCACGTGATCAGTTATTGAACAATCTCGTTGATATTCAATTTGAGCGTAACGATATTGATTTTCAACGTGGAAAATTTCGCGTTCGTGGCGATGTTGTAGAATTTTTTCCTGCGAGTCGTGATGAGCATGCCTTTCGAATTGAATTTTTTGGTGATGAAATTGATCGTATAAGAGAAATAGAATCGTTAACAGGGCGTGTGCTAGGAGAAGTGGAACATTTAGCTATTTTCCCAGCAACACACTTTATGACAAATGATGAACATATGGAAGAAGCTATTTCAAAAATACAAGCTGAAATGGAAAATCAAGTAGAACTTTTTGAAAAAGAAGGGAAATTGATTGAAGCGCAACGTATTCGACAAAGGACAGAATATGATATTGAAATGCTTCGTGAAATGGGATATACAAATGGTGTTGAGAACTACTCACGTCACATGGATGGTAGAAGTGAAGGTGAGCCACCTTTTACTTTGTTAGATTTCTTCCCAGAAGATTTTTTGATTATGATTGATGAGAGTCACATGACAATGGGGCAAATCAAAGGGATGTATAATGGAGACCGTTCGCGTAAAGAAATGTTGGTTAATTACGGTTTTCGTTTACCATCTGCCTTAGATAACCGTCCACTTCGTCGTGAAGAATTCGAAAGCCATGTCCATCAAATTGTCTATGTATCTGCAACGCCAGGAGACTATGAAATGGAGCAAACAGATACAGTTGTTGAGCAAATTATCCGGCCAACAGGACTTCTTGATCCAGAAGTTGAAGTTAGACCAAGTATGGGGCAGATGGATGACTTGCTTGGTGAAATCAATTTGAGGACTGAAAAAGGTGAGCGTACCTTTATTACAACATTGACAAAGCGTATGGCAGAAGACTTAACAGATTATCTCAAAGAAATGGGAGTTAAAGTTAAGTATATGCACAGCGATATTAAAACCTTAGAACGTACAGAGATTATTCGTGATCTACGACTTGGTGTGTTTGATGTTTTAATTGGTATTAATCTCTTACGTGAAGGAATAGATGTTCCTGAAGTTTCCCTTGTTGCAATCTTAGATGCTGATAAGGAAGGTTTCCTTCGTAATGAGCGTGGTCTTATCCAAACAATCGGACGTGCAGCACGTAACAGTAATGGTCATGTTATTATGTATGCTGATAAAATAACAGATTCTATGCAAAGAGCTATGGATGAGACCGCTCGCCGTCGTCGTTTACAAATGGATTATAATGAAAAGCATGGAATTGTGCCACAAACAATAAAAAAAGAAATCCGTGATTTAATTGCTATTACTAAAAGTAATGATAGCGATAAGCCTGAAAAAGTTGTCGATTACAGTAGTTTATCTAAAAAAGAAAGGCAAGCTAAAATTAAAGCTCTTCAAAAGCAAATGCAAGATGCAGCTGAATTATTGGACTTTGAGCTAGCTGCACAAATCCGAGATGTTATCTTAGAACTAAAAGCAATCGAT

SEQ ID NO: 16186 - protein, 663 aa, Streptococcus agalactiae
MIDRKDTNRFKLVSKYSPSGDQPQAIETLVDNIEGGEKAQILKGATGTGKTYTMSQVIAQVNKPTLVIAHNKTLAGQLYGEFKEFFPDNAVEYFVSYYDYYQPEAYVPSSDTYIEKDSSVNDEIDKLRHSATSSLLERNDVIVVASVSCIYGLGSPKEYADSVVSLRPGQEISRDQLLNNLVDIQFERNDIDFQRGKFRVRGDVVEFFPASRDEHAFRIEFFGDEIDRIREIESLTGRVLGEVEHLAIFPATHFMTNDEHMEEAISKIQAEMENQVELFEKEGKLIEAQRIRQRTEYDIEMLREMGYTNGVENYSRHMDGRSEGEPPFTLLDFFPEDFLIMIDESHMTMGQIKGMYNGDRSRKEMLVNYGFRLPSALDNRPLRREEFESHVHQIVYVSATPGDYEMEQTDTVVEQIIRPTGLLDPEVEVRPSMGQMDDLLGEINLRTEKGERTFITTLTKRMAEDLTDYLKEMGVKVKYMHSDIKTLERTEIIRDLRLGVFDVLIGINLLREGIDVPEVSLVAILDADKEGFLRNERGLIQTIGRAARNSNGHVIMYADKITDSMQRAMDETARRRRLQMDYNEKHGIVPQTIKKEIRDLIAITKSNDSDKPEKVVDYSSLSKKERQAKIKALQKQMQDAAELLDFELAAQIRDVILELKAID

SEQ ID NO: 16187 - protein, 918 aa, Streptococcus agalactiae
ATGAATAAAAGGATTTTAAATAGTCAGTTCGCTGTCTATAAAAACTGGCCGTCATGGCTATTATTGTTATTTGCTTGTTTTATGGTATACCTATTTTTTTTCGTCGGTCTAACTCTAGGTGGTGTGGGAATTGTTCTAGTGTCTTCTGTACTCTATAAGTTTTCTTCCTATACTTTTTTTGAGTTTATTAATTTATTTAATAATATCTATGGAGAATTAGGAACCTTTAGTTTTTCAGCATTCCTTTTGCTTATCTGGGTAAAATTCGTAGAAAAAAGACCTTTTTCAGAATTGGGTTTTTCTACAAAGTTTAAAAGAACTCTGTGGTCACTTATAAAAGGCTGGAGTATAGGTTTTATTCTATTTTCAATTTCTGTCATCACTGCTTATATATTGGGAGGACTTGACTTTCATAGCTATGATGTTTCTAAGGCAACGATTTTCTATGTTGTAACTCTCCTTCCTTTTTGGCTTATTCAAAGCGGTACGGAAGAATTGCTAACACGAGGGTGGCTTCTTCCTCTAATTAATCATCGTTTTCATTTAGCTGTTGCCATAGGGGTCTCATCCACTTTATTTGGCATTTTGCACTTGGTAAATGCCCATGTCACTTTTCTTTCTATTGTAAGTATTATATGTTCGGGAGTTTTAATGTCCTTGTATATGATTAAAAGTGGTAATATTTGGAGCGTTGCAGCCTTACATGGAGCTTGGAATTTTAGCCAAGGTAATCTCTATGGTATTGCAGTAAGTGGTCAGAAAGCAGGAGCATCTCTTTTGCATTTTACCGTTAAAGAAAACGCACCGGACTGGATATCAGGTGGTGCATTCGGAATAGAAGGAAGTTTGATTTCTATTTTTGTTCTCTTAGCTGCAATTATATACCTTCTATGGCTAATTAAGACTGAAGAAACAGAT

SEQ ID NO: 16188 - protein, 306 aa, Streptococcus agalactiae; identical to SEQ ID NO: 2718

SEQ ID NO: 16189 - protein, 1583 aa, Streptococcus agalactiae
ATGAAGCACAAGTTAAAAGCTTTTACGCTTGCTTTACTCTCAATATTCTTTGTGTTTGGTGGAAAGGTCAGTGCAGAGACTGTGAATATTGTTTCTGATACAGCATACGCTCCATTCGAATTTAAAGATTCTGATCAAACTTATAAAGGAATCGATGTTGACATCGTTAACGAAGTCGCTAAGCGTGCTGGCTGGAATGTTAACATGACGTATCCAGGTTTTGATGCCGCAGTTAACGCTGTTCAATCTGGACAGGCAGATGCGCTAATGGCCGGAACTACTGTTACTGAAGCACGTAAAAAAGTCTTTAATTTCTCAGATACTTATTACGATACTTCCGTTATTCTTTATACTAAAAATAATAATAAAGTCACAAACTACAAACAACTAAAAGGAAAAGTAGTCGGTGTAAAAAATGGAACAGCTGCTCAAAGCTTCTTAGAAGAAAATAAATCTAAATACGGCTATAAAGTTAAAACATTTGATACAAGCGACCTAATGAATAACAGCCTTGATTCTGGTTCTATTTACGCCGCTATGGACGATCAACCAGTTGTGCAATTTGCGATAAATCAAGGAAAAGCTTACGCCATTAACATGGAAGGCGAAGCAGTTGGTAGCTTTGCATTTGCTGTCAAAAAAGGTAGTGGACACGATAATCTAATTAAAGAATTTAACACAGCTTTTGCACAAATGAAATCAGATGGCACTTATAATGACATCATGGATAAATGGCTTGGAAAAGACGCTACAAAAACAAGCGGCAAAGCAACAGGTAATGCCAATGAAAAAGCAACTCCTGTAAAGCCAAGTTATAAAATTGTTTCTGATTCTTCATTCGCACCATTCGAATATCAAAACGGTAAAGGGAAATATACTGGTTTTGATATGGAATTAATCACGAAAATTGCTAAACAGCAAGGTTTTAAACTTGATATCTCAAATCCAGGTTTTGATGCCGCTTTAAATGCTGTCCAATCTGGGCAAGCTGACGGTGTTATTGCAGGAGCCACAATCACAGAAGCACGCCAAAAAATCTTTGATTTTTCTGATCCTTATTACACATCTAGCGTTATCTTAGCGGTTAAAAAAGGAAGCAATGTCAAATCATACCAAGATTTAAAAGGAAAAACAGTTGGTGCTAAAAATGGTACTGCCTCATATACTTGGTTATCAGACCACGCAGATAAGTACACTATCATGTTAAAGCATTTGATGAAGCATCTACAATGTATGATAGTATGAACTCAGGTCATTGATGCTCTAATGGATGACGAGCCGTTCTTGCTTACGCTATTAATCAAGGTCGTAAATTTGAAACACCTATCAAAGGTGAAAAATCAGGCGATATCGGATTTGCAGTGAAAAAAGGGGCAAATCCAGAATTAATTAAAATGTTTAACAACGGTCTTGCTTCACTCAAAAAATCGGGTGAGTACGATAAACTTGTTAAAAAATACCTTTCCACAGCCAGCACTTCTTCAAACGATAAAGCTGCTAAACCTGTAGATGAATCAACTATTTTAGGGTTAATTTCTAATAACTACAAACAATTGCTATCTGGTATTGGAAAACTACTTAGT

SEQ ID NO: 16190 - protein, 529 aa, Streptococcus agalactiae
  VARIANT 399: Xaa = Any Amino Acid
MKHKLKAFTLALLSIFFVFGGKVSAETVNIVSDTAYAPFEFKDSDQTYKGIDVDIVNEVAKRAGWNVNMTYPGFDAAVNAVQSGQADALMAGTTVTEARKKVFNFSDTYYDTSVILYTKNNNKVTNYKQLKGKVVGVKNGTAAQSFLEENKSKYGYKVKTFDTSDLMNNSLDSGSIYAAMDDQPVVQFAINQGKAYAINMEGEAVGSFAFAVKKGSGHDNLIKEFNTAFAQMKSDGTYNDIMDKWLGKDATKTSGKATGNANEKATPVKPSYKIVSDSSFAPFEYQNGKGKYTGFDMELITKIAKQQGFKLDISNPGFDAALNAVQSGQADGVIAGATITEARQKIFDFSDPYYTSSVILAVKKGSNVKSYQDLKGKTVGAKNGTASYTWLSDHADKYXYHVKAFDEASTMYDSMNSGSIDALMDDEAVLAYAINQGRKFETPIKGEKSGDIGFAVKKGANPELIKMFNNGLASLKKSGEYDKLVKKYLSTASTSSNDKAAKPVDESTILGLISNNYKQLLSGIGKLLS

SEQ ID NO: 16191 - protein, 570 aa, Streptococcus agalactiae
ATGATAGATAGAAAAGATACTAACCGATTTAAATTAGTTTCCAAATATAGTCCTTCAGGAGATCAACCTCAAGCTATTGAAACGTTGGTTGACAATATTGAAGGAGGAGAAAAAGCTCAGATTTTAAAAGGTGCTACTGGTACTGGTAAAACCTACACAATGAGCCAAGTTATCGCCCAAGTTAACAAGCCAACCTTGGTGATTGCACATAATAAAACCCTAGCAGGTCAACTTTATGGAGAGTTTAAAGAATTTTTTCCTGACAATGCCGTAGAGTACTTTGTTTCATATTATGATTATTATCAACCAGAAGCTTATGTGCCTTCTTCGGATACTTATATTGAAAAAGATAGCTCAGTCAATGACGAAATTGACAAATTACGTCACTCAGCGACTTCTTCGTTATTAGAAAGAAATGACGTTATTGTTGTAGCATCTGTTTCTTGTATTTACGGTTTAGGTTCTCCTAAAGAGTATGCAGACAGTGTTGTTAGCCTTAGGCCAGGTCAAGAAATTTCACGTGATCAGTTATTGAACAATCTCGTTGATATTAATTTGAGCGTAACGATA

SEQ ID NO: 16192 - protein, 190 aa, Streptococcus agalactiae
MIDRKDTNRFKLVSKYSPSGDQPQAIETLVDNIEGGEKAQILKGATGTGKTYTMSQVIAQVNKPTLVIAHNKTLAGQLYGEFKEFFPDNAVEYFVSYYDYYQPEAYVPSSDTYIEKDSSVNDEIDKLRHSATSSLLERNDVIVVASVSCIYGLGSPKEYADSVVSLRPGQEISRDQLLNNLVDINLSVTI

SEQ ID NO: 16193 - protein, 1290 aa, Streptococcus agalactiae
ATGGAATTAATCACGAAAATTGCTAAACAGCAAGGTTTTAAACTTGATATCTCAAATCCAGGTGATGCCGCTTTAAATGCTGTCCAATCTGGGCAAGCTGACGGTGTTATTGCAGGAGCCACAATCACAGAAGCACGCCAAAAAATCTTTGATTTTTCTGATCCTTATTACACATCTAGCGTTATCTTAGCGGTTAAAAAAGGAAGCAATGTCAAATCATACCAAGATTTAAAAGGAAAAACAGTTGGTGCTAAAAATGGTACTGCCTCATATACTTGGTTATCAGACCACGCAGATAAGTACAACTATCATGTTAAAGCATTTGATGAAGCATCTACAATGTATGATAGTATGAACTCAGGTTCAATTGATGCTCTAATGGATGACGAAGCCGTTCTTGCTTACGCTATTAATCAAGGTCGTAAATTTGAAACACCTATCAAAGGTGAAAAATCAGGCGATATCGGATTTGCAGTGAAAAAAGGGGCAAATCCAGAATTAATTAAAATGTTTAACAACGGTCTTGCTTCACTCAAAAAATCGGGTGAGTACGATAAACTTGTTAAAAAATACCTTTCCACAGCCAGCACTTCTTCAAACGATAAAGCTGCTAAACCTGTAGATGAATCAACTATTTTAGGGTTAATTTCTAATAACTACAAACAATTGCTATCTGGTATTGGAACTACTTTAAGTTTAACTCTTATCTCGTTTGCGATTGCTATGGTTATTGGTATTATCTTTGGTATGATGAGCGTATCACCAAGTAATACTCTCCGCACAATTTCAATGATTTTTGTTGATATTGTCCGTGGTATTCCACTCATGATTGTGGCCGCTTTTATTTTCTGGGGTATTCCTAATTTAATCGAAAGCATCACAGGTCACCAAAGTCCAATTAATGACTTCGTTGCTGCTACTATCGCTCTTTCTTTAAATGGTGGTGCGTACATTGCTGAAATTGTACGTGGTGGTATTGAAGCTGTTCCTTCTGGTCAAATGGAAGCAAGTCGCAGCTTAGGTATTTCTTACGGCAAAACTATGCAAAAGGTTATCTTACCTCAAGCAGTACGCCTTATGTTACCAAACTTTATCAACCAATTTGTCATCTCATTAAAGGATACAACAATTGTATCAGCAATCGGACTTGTGGAACTCTTCCAAACTGGTAAAATCATAATTGCACGTAACTATCAATCATTCCGTATGTATGCTATCCTTGCAATTATGTATCTTGTAATCATTACCCTTCTCACCCGTCTAGCAAAACGTTTAGAAAAGAGGCTTAAA

SEQ ID NO: 16194 - protein, 431 aa, Streptococcus agalactiae
  VARIANT 22: Xaa = Any Amino Acid
MELITKIAKQQGFKLDISNPGXDAALNAVQSGQADGVIAGATITEARQKIFDFSDPYYTSSVILAVKKGSNVKSYQDLKGKTVGAKNGTASYTWLSDHADKYNYHVKAFDEASTMYDSMNSGSIDALMDDEAVLAYAINQGRKFETPIKGEKSGDIGFAVKKGANPELIKMFNNGLASLKKSGEYDKLVKKYLSTASTSSNDKAAKPVDESTILGLISNNYKQLLSGIGTTLSLTLISFAIAMVIGIIFGMMSVSPSNTLRTISMIFVDIVRGIPLMIVAAFIFWGIPNLIESITGHQSPINDFVAATIALSLNGGAYIAEIVRGGIEAVPSGQMEASRSLGISYGKTMQKVILPQAVRLMLPNFINQFVISLKDTTIVSAIGLVELFQTGKIIIARNYQSFRMYAILAIMYLVIITLLTRLAKRLEKRLK

SEQ ID NO: 16195 - protein, 738 aa, Streptococcus agalactiae
ATGGCAGAATTAAAAATTGATGTCCAAGATTTACACAAGTCGTATGGGCAAAATGAAGTTTTAAAAGGTATTGATGCTAAATTTTATGAAGGTGATGTTGTTTGTATTATTGGACCTTCTGGTTCAGGAAAATCAACTTTCCTTCGCACATTGAACTTACTTGAATCAATCACAAGTGGAAAAGTTGTTGTGGACGGCTTTGAGTTATCAAATCCAAAAACAGACATAGACAAAGCACGTGAAAATATCGGAATGGTATTTCAACACTTCAATCTTTTTCCACATATGTCAGTTCTTGAAAACATCACTTTTGCTCCTATAGAACTTGGTAAAGAATCTAAAGAAGCAGCTGAAAAGCATGGGATGGAATTACTTGAAAAAGTTGGTTTAGCCGATAAAGCTAATGCCAAACCAGATAGTTTATCTGGAGGACAAAAACAACGTGTAGCTATCGCAAGAAGCTTAGCGATGAATCCAGATATCTTACTTTTTGACGAACCAACTTCTGCACTTGATCCAGAAATGGTTGGAGATGTTCTCAATGTTATGAAAGATTTAGCTGAACAAGGTATGACTATGTTAATTGTGACACACGAAATGGGATTTGCTCGTCAAGTTGCCAATCGTGTTATCTTTACAGATGGTGGTCGTTTCCTCGAAGATGGGACACCTGAGCAAATCTTTGATACACCTCAACACCCACGTCTCCAAGACTTCCTTAATAAAGTTTTAAACGTT

SEQ ID NO: 16196 - protein, 246 aa, Streptococcus agalactiae; identical to SEQ ID NO: 2722

SEQ ID NO: 16197 - protein, 348 aa, Streptococcus agalactiae; identical to SEQ ID NO: 11589

SEQ ID NO: 16198 - protein, 116 aa, Streptococcus agalactiae; identical to SEQ ID NO: 2724

SEQ ID NO: 16199 - protein, 156 aa, Streptococcus agalactiae
ATGGGAGATAAACCGATATCATTTCGTGATAAAGATGGGAACTTTGTTTCAGCGGCCGATGTCTGGAATGCTGAAAAATTAGAAGAACTCTTTAACACATTAAATCCTAATCGTAAACTTCGTTTAGAACGCGAAAAATTAGCAAAAGAAAAAGGA

SEQ ID NO: 16200 - protein, 52 aa, Streptococcus agalactiae; identical to SEQ ID NO: 2726

SEQ ID NO: 16201 - protein, 1311 aa, Streptococcus agalactiae
ATGAGTATGTTTTTAGATACTGCCAAAATTAGTGTTAAGGCAGGTCGCGGTGGTGATGGCATGGTTGCTTTTCGCCGTGAGAAATATGTCCCCAATGGAGGCCCGTGGGGCGGTGATGGCGGTAAAGGCGGATCGGTCATTTTTAAAGTAAACGAAGGTTTACGAACTTTGATGGATTTTCGATATAACCGTAATTTTAAAGCAAAAGCTGGTGAAAAAGGGATGACTAAAGGTATGCACGGTCGAGGTGCAGAAGACCTTATTGTGTCATTACCACCTGGAACAACTGTTCGTGATGCTAATACAGGTAAGGTTATTACCGACCTTGTGGAGCATGATCAGGAATTCGTTGTAGCCAGAGGTGGCCGCGGTGGTCGTGGAAATATTCGCTTTGCAACCCCACGTAATCCAGCTCCTGAAATTGCTGAAAATGGGGAGCCTGGCGAAGAACGTGAATTACAATTAGAATTAAAAATTTTGGCTGATGTTGGTCTCGTTGGTTTCCCATCAGTTGGGAAGTCGACGCTACTTAGTGTTGTTTCAGCAGCAAAGCCTAAAATTGGTGCCTATCATTTTACGACAATTGTCCCTAATTTAGGGATGGTTCGTACAAAATCAGGTGATAGCTTTGCAATGGCTGATCTCCCTGGTTTGATTGAAGGGGCTAGTCAAGGTGTCGGATTAGGAACTCAGTTCCTTAGACATATTGAGCGTACACGTGTTATTCTACATGTTATTGATATGTCGGCAAGTGAAGGACGAGACCCTTACGATGACTATATTTCAATTAATAATGAGTTGGAAACTTACAATCTTCGATTGATGGAACGTCCGCAAATTATTGTTGCCAATAAAATGGATATGCCTGATTCAGAAGAGAATTTGGCAGCATTCAAAGAAAAATTAGCTGCAAACTATGATGAGTTTGATGACATGCCTATGATTTTTCCAATTTCAAGTTTAGCACATCAAGGACTAGAGAACCTTATGGATGCGACGGCTAAATTATTAGCCAATACAGAAGAGTTTCTTCTTTATGACGAAACTGACATGCAAGAAGATGAAGCATACTATGGATTTAACGAAGATGAACGTCCATTTGAGATTACACGTGATGATGATGCAACGTGGGTATTGTATGGTGATAAGCTAGAAAAACTCTTTGTTATGACAAATATGGAACGCGATGAATCAATAATGAAATTTGCTCGTCAGTTACGTGGTATGGGCGTTGATGAAGCACTTCGAGAGCGCGGAGCTAAGGATGGAGATATTGTTCGTATAGGTAACTTCGAATTTGAATTTGTAGAT

SEQ ID NO: 16202 - protein, 437 aa, Streptococcus agalactiae
MSMFLDTAKISVKAGRGGDGMVAFRREKYVPNGGPWGGDGGKGGSVIFKVNEGLRTLMDFRYNRNFKAKAGEKGMTKGMHGRGAEDLIVSLPPGTTVRDANTGKVITDLVEHDQEFVVARGGRGGRGNIRFATPRNPAPEIAENGEPGEERELQLELKILADVGLVGFPSVGKSTLLSVVSAAKPKIGAYHFTTIVPNLGMVRTKSGDSFAMADLPGLIEGASQGVGLGTQFLRHIERTRVILHVIDMSASEGRDPYDDYISINNELETYNLRLMERPQIIVANKMDMPDSEENLAAFKEKLAANYDEFDDMPMIFPISSLAHQGLENLMDATAKLLANTEEFLLYDETDMQEDEAYYGFNEDERPFEITRDDDATWVLYGDKLEKLFVMTNMERDESIMKFARQLRGMGVDEALRERGAKDGDIVRIGNFEFEFVD

SEQ ID NO: 16203 - protein, 126 aa, Streptococcus agalactiae
GTGGCTTTTGGAGATAACGGACAACGAAAAAAAACTGGGTTTGAAAAACTAACTCTTTTTGTTGTTATTTTGATGGTACTAGTAACAGTTGGTGGTTTGGTATTTGGTGCTATTAGTGCAATCATG

SEQ ID NO: 16204 - protein, 42 aa, Streptococcus agalactiae; identical to SEQ ID NO: 2730

SEQ ID NO: 16205 - protein, 1239 aa, Streptococcus agalactiae
ATGGTTTTACAAGATTTCGACAACCTTTTAAAAAAATATGCCCAATTAATTATTTCTAAAGGTTTAAATGTCCAAAAAGGGCACACTCTCGCTTTAACAATCGATGTGGAACAAGTCCACTTAGCAAGGCTTTTAACTGAAGTCGCTTATGAAAAGGGAGCAAGTGAAGTTATTGTTGATTATACAGATGATTTTATCACGCGCCAGCGACTACTTCATGCTTCAGACGAAGTTCTCACGAATGTTCCACAGTATACCGTTGATAAATCTTTAGCGCTATTAAATAAGAAGGCTAGTCGATTAGTTGTGAAATCTTCTAACCCTAACGCTTTCGCTACTGTTGATCCTAAACGTTTATCTAAAACAACTAGAGCAACCGCTATTGCCTTAGAGGAACAAAGTAGAGCAATACAAGCTAATAAAGTATCTTGGAACGTGGCTGCAGCTGCTGGTAGAGAATGGGCTGCACTTGTCTTCCCAGAATTAAAAACAAGCGACCAACAAGTTGATGCTCTTTGGGATACCATTTTCAAATTAAATCGTATTTATGAAGATAATCCTATTGCTGCTTGGGATGCACATGAAGCTAAATTATTAGAAAAAGCTACTAGACTAAATCAAGAACAATTTGATGCTCTTCATTATACCGCACCAGGTACAGATTTAACGCTTGGTATGCCTAAAAATCACATTTGGGAGGCAGCCGGTAGTCTCAACGCTCAGGGAGAGACTTTTATCGCTAATATGCCTACTGAAGAAATCTTTTCAGCACCTGATTACCGTCGTGCAGATGGGTATGTGACAAGTACAAAACCTCTCAGTTATGCTGGCGTTATTATCGAAAATATGACGTTTACTTTTAAAGACGGTAAAATTATCAATGTCACTGCAGAAAAAGGGCAAGAAACAATCCAACGCTTGATCGAGGAAAATGATGGGGCAAGATCGCTTGGGGAAGTTGCACTTGTCCCACATAAAACACCAATTTCACTGTCTGGACTAATTTTCTTTAATACTTTATTCGATGAAAATGCCTCTAATCACCTCGCTATTGGATCTGCATATGCCTTCAATGTAGAAGGAGGAACAGAAATGACAAGTCAAGAATTGGATGAAGCTGGTTTAAATCGTTCTTCAACACATGTTGATTTTATGATTGGTTCAGAACAAATGGATATTGATGGTATTCGTGCAGATGGAACTGCTGTCCCAATCTTTAGAAATGGCGAATGGGCTATT

SEQ ID NO: 16206 - protein, 413 aa, Streptococcus agalactiae
MVLQDFDNLLKKYAQLIISKGLNVQKGHTLALTIDVEQVHLARLLTEVAYEKGASEVIVDYTDDFITRQRLLHASDEVLTNVPQYTVDKSLALLNKKASRLVVKSSNPNAFATVDPKRLSKTTRATAIALEEQSRAIQANKVSWNVAAAAGREWAALVFPELKTSDQQVDALWDTIFKLNRIYEDNPIAAWDAHEAKLLEKATRLNQEQFDALHYTAPGTDLTLGMPKNHIWEAAGSLNAQGETFIANMPTEEIFSAPDYRRADGYVTSTKPLSYAGVIIENMTFTFKDGKIINVTAEKGQETIQRLIEENDGARSLGEVALVPHKTPISLSGLIFFNTLFDENASNHLAIGSAYAFNVEGGTEMTSQELDEAGLNRSSTHVDFMIGSEQMDIDGIRADGTAVPIFRNGEWAI

SEQ ID NO: 16207 - protein, 576 aa, Streptococcus agalactiae
ATGAAAGTGAAAAATAAGATTTTAACGATGGTAGCACTTACTGTCTTAACATGTGCTACTTATTCATCAATCGGTTATGCTGATACAAGTGATAAGAATACTGACACGAGTGTCGTGACTACGACCTTATCTGAGGAGAAAAGATCAGATGAACTAGACCAGTCTAGTACTGGTTCTTCTTCTGAAAATGAATCAAGTTCATCAAGTGAACCAGAAACAAATCCCTCAACTAATCCACCTACAACAGAACCATCGCAACCCTCACCTAGTGAAGAGAACAAGCCTGATGGGAGCACGAAGACAGAAATTGGCAATAATAAGGATATTTCTAGTGGAACAAAAGTATTAATTTCAGAAGATAGTATTAAGAATTTTAGTAAAGCAAGTAGTGATCAAGAAGAAGTGGAACGCGATGAATCATCATCTTCAAAAGCAAATGATGAGAAAAAAGGCCACAGTAAGCCTAAAAAGGAACTTCCTAAAACAGGAGATAGCCACTCAGATACTGTAATAGCATCTACGGGAGGGATTATTCTGTTATCATTAAGTCTTTACAATAAGAAAATGAAACTTTAT

SEQ ID NO: 16208 - protein, 192 aa, Streptococcus agalactiae
MKVKNKILTMVALTVLTCATYSSIGYADTSDKNTDTSVVTTTLSEEKRSDELDQSSTGSSSENESSSSSEPETNPSTNPPTTEPSQPSPSEENKPDGSTKTEIGNNKDISSGTKVLISEDSIKNFSKASSDQEEVERDESSSSKANDEKKGHSKPKKELPKTGDSHSDTVIASTGGIILLSLSLYNKKMKLY

SEQ ID NO: 16209 - protein, 2037 aa, Streptococcus agalactiae
ATGAAACGTAAATACTTTGTTCTTAATACGGTGACGGTTTTAACGTTAGCTACTGCAATGAATACTAGCAGTAGCTATGCTAATAGTACTGAGACAAGTGCTTCAGTAGCTCCTACTACAAATACTATCGTTCAAACTAATGACAGTAATCCTACCGCAAAATTTGCATCAGAATCAGGACAATCTGTAATAGGTCAAGTAAAACCAGCTAATTCTGCGGCGCTTACAACAGTTGACACGCCTCATATTTCAGCTCCAGATGCTTTAAAAACAACTCAATCAAGTCCTGTCGTTGAGAGTCCTTCTACTAAGTTAACTGAAGAGACATACAAACAAAAAGATGGTCAAGATTTAGCCAACATGGTGAGAAGTGGTCAAGTTACTAGTGAGGAACTCGTCAATATGGCATACGATATTATCGCTAAAGAAAACCCATCTTTAAATGCAGTCATTACTACTAGACGCCAAGAAGCCATTGAAGAGGCTAGAAAACTTAAAGATACTAATCAGCCGTTTTTAGGTGTTCCCTTGTTAGTCAAGGGGTTAGGGCACAGTATTAAAGGTGGTGAAACCAATAATGGCTTGATCTATGCAGATGGAAAAATTAGCACATTTGACAGTAGCTATGTCAAAAAATATAAAGATTTAGGATTTATTATTTTAGGACAAACGAATTTTCCAGAGTATGGGTGGCGTAATATAACAGACTCTAAATTATACGGTCCAACGCATAATCCTTGGAATCTTGCTCATAACGCTGGTGGCTCTTCTGGTGGAAGTGCAGCAGCTATTGCTAGCGGAATGACGCCAATTGCTAGCGGCAGTGATGCTGGTGGTTCTATCCGTATTCCATCTTCTTGGACGGGCTTAGTAGGTTTAAAACCAACAAGAGGATTGGTGAGTAATGAAAAGCCAGATTCGTATAGTACAGCAGTTCATTTTCCATTAACTAAGTCATCTAGAGACGCAGAAACATTGTTAACTTACCTAAAGAAAAGCGATCAAACGCTAGTATCAGTTAATGATTTAAAATCTTTACCAATTGCTTATACTTTGAAATCACCAATGGGAACAGAAGTTAGTCAAGATGCTAAAAATGCTATTATGGACAACGTCACATTCTTAAGAAAACAAGGATTCAAAGTGACAGAGATAGATTTACCAATTGATGGTAGAGCATTAATGCGTGATTATTCAACCTTGGCTATTGGCATGGGAGGAGCTTTTTCAACAATTGAAAAAGACTTAAAAAAACATGGTTTTACTAAAGAAGACGTTGATCCCATTACTTGGGCAGTTCATGTTATTTATCAAAATTCAGATAAGGCTGAACTTAAGAAATCTATTGTGGAAGCCCAAAAACATATGGATGATTATCGTAAGGCAATGGAGAAGCTTCACAAGCAATTTCCTATTTTCTTATCGCCAACGACCGCAAGTTTAGCCCCTCTAAATACAGATCCATATGTAACAGAGAAAGATAAAAGAGCGATTTATAATATGGAAAACTTGAGCCAAGAAGAAAGAATTGCTCTCTTTAATCGCCAGTGGGAGCCTATGTTGCGTAGAACACCTTTTACACCAATTGCTAATATGACAGGACTCCCAGCTATCAGTATCCCGACTTACTTATCTGAGTCTGGTTTACCCATAGGGACGATGTTAATGGCAGGTGCAAACTATGATATGGTATTAATTAAATTTGCAACTTTCTTTGAAAAACATCATGGTTTTAATGTTAAATGGCAAAGAATAATAGATAAAGAAGTGAAACCATCTGCTGACCTAATACAGCCTACTAACTCCCTCTTTAAAGCTCATTCATCATTAGTAAATTTAGAAGAAAATTCACAAGTTACTCAAGTATCTATCTCTAAAAAATGGATGAAATCGTCTGTTAAAAATAAACCATCCGTAATGGCATATCAAAAAGCACTTCCTAAAACAGGTGATACAGAATCAAGTCTATCTCCAGTTTTAGTAGTAACCCTTTTATTAGCTTGTTTTAGCTTTGTAACAAAAAAGAATCAGAAAAGT

SEQ ID NO: 16210 - protein, 679 aa, Streptococcus agalactiae
MKRKYFVLNTVTVLTLATAMNTSSSYANSTETSASVAPTTNTIVQTNDSNPTAKFASESGQSVIGQVKPANSAALTTVDTPHISAPDALKTTQSSPVVESPSTKLTEETYKQKDGQDLANMVRSGQVTSEELVNMAYDIIAKENPSLNAVITTRRQEAIEEARKLKDTNQPFLGVPLLVKGLGHSIKGGETNNGLIYADGKISTFDSSYVKKYKDLGFIILGQTNFPEYGWRNITDSKLYGPTHNPWNLAHNAGGSSGGSAAAIASGMTPIASGSDAGGSIRIPSSWTGLVGLKPTRGLVSNEKPDSYSTAVHFPLTKSSRDAETLLTYLKKSDQTLVSVNDLKSLPIAYTLKSPMGTEVSQDAKNAIMDNVTFLRKQGFKVTEIDLPIDGRALMRDYSTLAIGMGGAFSTIEKDLKKHGFTKEDVDPITWAVHVIYQNSDKAELKKSIVEAQKHMDDYRKAMEKLHKQFPIFLSPTTASLAPLNTDPYVTEKDKRAIYNMENLSQEERIALFNRQWEPMLRRTPFTPIANMTGLPAISIPTYLSESGLPIGTMLMAGANYDMVLIKFATFFEKHHGFNVKWQRIIDKEVKPSADLIQPTNSLFKAHSSLVNLEENSQVTQVSISKKWMKSSVKNKPSVMAYQKALPKTGDTESSLSPVLVVTLLLACFSFVTKKNQKS

SEQ ID NO: 16211 - protein, 1164 aa, Streptococcus agalactiae
ATGACAAAACACAAACACCTAACTCTCTCAGACCGTAATGACATCCAATCTGGTTTGGATAGAGGAGAAACCTTTAAAGCCATCGGGCTTAATCTACCGAAACACCCTACTACTATCGCAAAAGAAGTCAAACGAAATAAGCAACTAAGAGAATCAACCAAAGACTGCCTAGACTGTCCGCTACTAAGAAAAGCTCCCTATGTTTGTAATGGGTGTCCAAAGAGAAGGATCAACTGTGGTTACAAGAAGACCTTCTATCTTGCTAAGCAAGCTCAAAGAAACTATGAAAAACTTTTAGTTGAATCTAGAGAAGGAATCCCTTTGAACAAAGAGACCTTCTGGAAAATAGATAGAGTGCTTTCTAATGGGGTCAAGAAGGGCCAACGTATCTATCATATCCTCAAAACCAACGATCTAGAAGTGAGTTCTTCAACCGTTTATCGACACATCAAGAAAGGCTACCTATCCATCACACCAATCGACCTACCCAGAGCTGTGAAGTTCAAAAAAAGGCGAAAGAGCACACTCCCTCCTATTCCAAAAGCGATTAAAGAAGGGCGACGGTACGAGGATTTTATAGAACACATGAACCAATCAGAGCTGAACTCCTGGCTTGAAATGGACACGGTTATTGGACGGATTGGTGGAAAGGTCCTTCTCACCTTCAATGTCGCCTTCTGTAACTTCATCTTTGCCAAACTGATGGATTCTAAGACAGCTATCGAAACTGCTAAACACATACAGGTCATTAAGAGGACACTCTATGATAACAAGAGAGACTTCTTCGAACTCTTTCCTGTTATCCTAACGGATAATGGTGGGGAATTCGCTAGAGTGGATGATATTGAGATAGATGTTTGTGGACAGTCTCAACTCTTCTTTTGTGACCCTAATCGGTCTGACCAGAAAGCAAGAATCGAGAAGAATCATACCCTCGTGAGAGACATACTGCCTAAGGGGACTTCCTTCGACAACTTGACTCAAGAGGACATTAATCTGGCACTATCTCATATCAACAGCGTTAAGAGACAGGCTCTAAATGGTAAAACGGCTTATGAGCTATTCTCTTTTACTTACGGAAAAGACATCGCAAGTATACTCGGTATTGAGGAAATTACTGCGGAAGACGTCTGCCAATCTCCCAAACTATTAAAAGACAAAATC

SEQ ID NO: 16212 - protein, 388 aa, Streptococcus agalactiae
MTKHKHLTLSDRNDIQSGLDRGETFKAIGLNLPKHPTTIAKEVKRNKQLRESTKDCLDCPLLRKAPYVCNGCPKRRINCGYKKTFYLAKQAQRNYEKLLVESREGIPLNKETFWKIDRVLSNGVKKGQRIYHILKTNDLEVSSSTVYRHIKKGYLSITPIDLPRAVKFKKRRKSTLPPIPKAIKEGRRYEDFIEHMNQSELNSWLEMDTVIGRIGGKVLLTFNVAFCNFIFAKLMDSKTAIETAKHIQVIKRTLYDNKRDFFELFPVILTDNGGEFARVDDIEIDVCGQSQLFFCDPNRSDQKARIEKNHTLVRDILPKGTSFDNLTQEDINLALSHINSVKRQALNGKTAYELFSFTYGKDIASILGIEEITAEDVCQSPKLLKDKI

SEQ ID NO: 16213 - protein, 720 aa, Streptococcus agalactiae
ATGAGACTTGATAAATTTTTAGTAGAATGCGGACTTGGTTCACGTACTCAAGTCAAATTAATATTGAAAAAAAAGCAGATTAGTGTTAATAGTAATAGCGAGACATCTCCAAAAGTACAGGTAGATGAATATAGAGATGAGATTAAATATAATGGAACTCTAGTGTCATATGAAAAGTTTGTTTATTATATGCTTCATAAACCCAAAGGTGTTATATCAGCAACGGATGATCCTTCGCATAAAACCGTATTAGATTTGCTAGACAAAACTGCTCGAGATAAAGCTGTTTTTCCAGTGGGGCGTTTAGATATTGATACAACAGGCCTTTTGTTAATAACTAATAATGGGGAATTAGCGCATAAAATGTTATCACCTAAAAAACACGTTGATAAATGCTATGAGGCAAAAATCTCAGGGATAATGACAGAAGACGATATTTTGGCATTTGATAAAGGGATTATTCTGAAAGATTTTACTTGTTTACCAGCATTATTAGAAATTGTGGAAGTAAATCAGGTGAAGAAGCAGAGTCTTGTTAAAATCACTATTAAGGAAGGAAAATTCCATCAAGTTAAACGTATGGTTGCTGCGTGTGGCAAGGAAGTCTTAGAGCTAAAGCGTCTAAGTATGGGAAATCTACAATTAGATAAACAGCTAGAAAGTGGACAATGGAGACGGCTAACAATAAAAGAAATAGAAAAATTAGAAAAACATATGCAA

SEQ ID NO: 16214 - protein, 240 aa, Streptococcus agalactiae
MRLDKFLVECGLGSRTQVKLILKKKQISVNSNSETSPKVQVDEYRDEIKYNGTLVSYEKFVYYMLHKPKGVISATDDPSHKTVLDLLDKTARDKAVFPVGRLDIDTTGLLLITNNGELAHKMLSPKKHVDKCYEAKISGIMTEDDILAFDKGIILKDFTCLPALLEIVEVNQVKKQSLVKITIKEGKFHQVKRMVAACGKEVLELKRLSMGNLQLDKQLESGQWRRLTIKEIEKLEKHMQ

SEQ ID NO: 16215 - protein, 654 aa, Streptococcus agalactiae
GTGTTTGGCGCGAGAAAGTATCTTTTGACAACTAAGATTTGGAATGACAAACATGACTATCATTTAGCCAAAGCTTCTATTGATGATTCTCTGCAGAAATTAGGTGTTGATTATATTGATCTTCTTTTGATTCATTGGCCAAATCCAAAAGCTCTTCGTGAAAATGATGCGTGGAAAGCTGGGAATGCAGGCACTTGGAAAGCGATGGAAGAAGCTTATAAAGAAGGAAAGGTAAAAGCTATTGGTGTTTCGAATTTCATGAAACATCACTTAGAGGCTTTATTTGAAACCGCCGAAATAAAACCTATGGTTAATCAAATTATCCTAGCACCAGGTTGTGCTCAAGAAGATTTGGTTCGCTTCTGTAAAGGAAATGATATCTTATTAGAAGCTTACAGTCCATTTGGAACAGGTACTATTTTTGAAAATGAATCTATAAAAGCTATTGCTGAAAAATATGGTAAATCAGTTGCACAAGTAGCTCTTCGCTGGTCACTTGATAATGGCTTTTTACCATTACCTAAGTCAGCGACTCCCAAAAATATTGAAGCAAACCTTGATATTTTTGATTTTCAATTAAACGAAGATGATATTGCTACCTTAATACAACTAGATTCAGGTATTAAACCCAAAGATCCAGATAATGTCTCATTT

SEQ ID NO: 16216 - protein, 218 aa, Streptococcus agalactiae
MFGARKYLLTTKIWNDKHDYHLAKASIDDSLQKLGVDYIDLLLIHWPNPKALRENDAWKAGNAGTWKAMEEAYKEGKVKAIGVSNFMKHHLEALFETAEIKPMVNQIILAPGCAQEDLVRFCKGNDILLEAYSPFGTGTIFENESIKAIAEKYGKSVAQVALRWSLDNGFLPLPKSATPKNIEANLDIFDFQLNEDDIATLIQLDSGIKPKDPDNVSF

SEQ ID NO: 16217 - protein, 384 aa, Streptococcus agalactiae
TTGATGGATTTTCGATATAACCGTAATTTTAAAGCAAAAGCTGGTGAAAAAGGGATGACTAAAGGTATGCACGGTCGAGGTGCAGAAGACCTTATTGTGTCATTACCACCTGGAACAACTGTTCGTGATGCTAATACAGGTAAGGTTATTACCGACCTTGTGGAGCATGATCAGGAATTCGTTGTAGCCAGAGGTGGCCGCGGTGGTCGTGGAAATATTCGCTTTGCAACCCCACGTAATCCAGCTCCTGAAATTGCTGAAAATGGGGAGCCTGGCGAAGAACGTGAATTACAATTAGAATTAAAAATTTTGGCTGATGTTGGTCTCGTTGGTTTCCCATCAGTTGGGAAGTCGACGCTACTTAGTGTTGTTTCNNNNNTTAAT

SEQ ID NO: 16218 - protein, 128 aa, Streptococcus agalactiae
  VARIANT 126, 127: Xaa = Any Amino Acid
MMDFRYNRNFKAKAGEKGMTKGMHGRGAEDLIVSLPPGTTVRDANTGKVITDLVEHDQEFVVARGGRGGRGNIRFATPRNPAPEIAENGEPGEERELQLELKILADVGLVGFPSVGKSTLLSVVSXXN

SEQ ID NO: 16219 - protein, 821 aa, Streptococcus agalactiae
ATGGAAACATATACTCTATCGAATACTCTTAACATTCCTAAAATTGGTTTTGGGACATGGCAACTAACTGAAGGTGAAGAAGCTTATAAAGCAGTGACTCATGCTTTAAAAGTTGGTTATACTCATATTGATACTGCTCAGATTTATGGTAATGAACATAGTGTTGGACGTGCTATAAGAGACAGTGGTTTGGCGCGAGAAAGTATCTTTTTGACAACTAAGATTTGGAATGACAAACATGACTATCATTTAGCCAAAGCTTCTATTGATGAATCTCTGCAGAAATTAGGTGTTGATTATATTGATCTTCTTTTGATTCATTGGCCAAATCCAAAAGCTCTTCGTGAAAATGATGCGTGGAAAGCTGGGAATGCAGGCACTTGGAAAGCGATGGAAGAAGCTTATAAAGAAGGAAAGGTAAAAGCTATTGGTGTTTCGAATTTCATGAAACATCACTTAGAGGCTTTATTTGAAACCGCCGAAATAAAACCTATGGTTAATCAAATTATCCTAGCACCAGGTTGTGCTCAAGAAGATTTGGTTCGCTTCTGTAAAGGAAATGATATCTTATTAGAAGCTTACAGTCCATTTGGAACAGGTACTATTTTTGAAAATGAATCTATAAAAGCTATTGCTGAAAAATATGGTAAATCAGTTGCACAAGTAGCTCTTCGCTGGTCACTTGATAATGGCTTTTTACCATTACCTAAGTCAGCGACTCCCAAAAATATGAAGCAAACCTTGATATTTTTGATTTTCATTAAACGAAGATGATATTGCTCCCTTATACACTAGATTCAGGTATTAAACCCAAANNNNNT

SEQ ID NO: 16220 - protein, 275 aa, Streptococcus agalactiae
  VARIANT 274, 275: Xaa = Any Amino Acid
METYTLSNTLNIPKIGFGTWQLTEGEEAYKAVTHALKVGYTHIDTAQIYGNEHSVGRAIRDSGLARESIFLTTKIWNDKHDYHLAKASIDESLQKLGVDYIDLLLIHWPNPKALRENDAWKAGNAGTWKAMEEAYKEGKVKAIGVSNFMKHHLEALFETAEIKPMVNQIILAPGCAQEDLVRFCKGNDILLEAYSPFGTGTIFENESIKAIAEKYGKSVAQVALRWSLDNGFLPLPKSATPKNIEANLDIFDFQLNEDDIATLIQLDSGIKPKXX

SEQ ID NO: 16221 - protein, 672 aa, Streptococcus agalactiae
ATGACAAAAGAAGATATCAAAAAACAAGTTCGAAGAGCTTTTGATTTTCGTATGGCGATTCGTGTTTATAATAATAATGATATTCCTAAAGAAGATATGGAGTATATTTTAGACACTGCTTGGTTGAGTCCTTCTTCAGTCGGTTTAGAAGGCTGGCGATTTTTAGTACTAGATAGACAAACAATTGCAAAATTTCGAGATAAACTTAAGGAAGTTGCTTGGGGAGCACAATATCAACTAGATACTGCTAGTCACTTTGTTTTACTACTAGCTGAAAAAGGTGCTTATTATAACGCTGATAGCATGATTAACAGTCTCATTCGACGTGGTCTAGGTGATCCAGCCGCCCTTGAGAGTAGGATACCTCTCTACAAATCCTTCCAAGAAAACGATATGAAAATTGATTCTGAACGTTCTCTTTGGGATTGGACAGCAAAACAAACTTATATCGCACTTGGTAATATGATGACGGCTGCTGCTATGATCGGCGTAGATTCATGCCCAATTGAAGGATTTGACTATGAAAAGGTCAATAATATTCTTAGTAAAGAAGGGTTAATAGACGATAAGAAAGAAGCTATTTCTTGTATGGTTTCATTTGGTTATCGTTTGCGTGAACCTAAACATTCCCGTGCTAGGAAAGAACGTCAAGAGGTCATTACTTGGGTTGAG

SEQ ID NO: 16222 - protein, 224 aa, Streptococcus agalactiae; identical to SEQ ID NO: 2742

SEQ ID NO: 16223 - protein, 390 aa, Streptococcus agalactiae
ATGCCATTTTTACATACTTGTATTCGCGTTAAAGATTTGGACGCCTCAATTGCTTTTTATCAAGAAGCACTTGGTTTTAAGGAAGTTCGTCGTAATGACTTTCCTGAAAATCAATTTACTTTAGTCTATATGTCCCTAGAGGACGACCCTAGTTACGAATTAGAGTTAACCTATAACTATGATCACGAAGCTTATGATTTAGGAAATGGGTATGGTCACATTGCTGTTGGTGTAGACGATTTGGAAACTACTTATGATGCCCATCAGAAAGCAGGTTACTCTGTAACAAAAATTTCTGGATTACCAGGTAAACCTAATATGTTCTACTTTATTCAAGATCCAGATGGCTATAAAATTGAAGTTATTCGACTCAGTCAATTTAAAGCTGAC

SEQ ID NO: 16224 - protein, 130 aa, Streptococcus agalactiae
MPFLHTCIRVKDLDASIAFYQEALGFKEVRRNDFPENQFTLVYMSLEDDPSYELELTYNYDHEAYDLGNGYGHIAVGVDDLETTYDAHQKAGYSVTKISGLPGKPNMFYFIQDPDGYKIEVIRLSQFKAD

SEQ ID NO: 16225 - protein, 924 aa, Streptococcus agalactiae
ATGGCTTTATTATCAGTTATTGTCCCTTGTTATAATGAACAAGAGACTGTCTCAACTTTTTTAACAGAAATCAAAAAAGTTGAATCCGAAATGGCTCGTTACACCCATTTTGAATATATTTTCGTAAACGATGGTTCTACCGATCGTACACTCGAACTTCTTAAGAAAGCAGCTAAACAATTTGACAATGTTCATTACCTTTCATTTTCACGCCATTTTGGTAAAGATGCTGCTTTATTGGCTGGTTTAGAACATACTACTGGTGATTTTATCACTGTTATGGATGTTGACTTGCAAGATCCACCCACTTTATTACCAGAAATGTACCTAAAACTTCAAGAAGGTTATGATATTGTCGCTACAAGGCGAAAAGATCGTAAAGGGGAGCCGTTGATACGCTCTCTTTTTGCCAAGCTTTTTTATAAATTAATCAATCAAGTGTCAGATACTAAAATGGTTGATGGTGCGCGTGATTTTCGTCTCATGACAAAACAAGTTGTTGACAGTATTCTCGAGCTAAATGAAGTGAATCGCTTCTCAAAAGGGATTTTTTCCTGGATTGGATATGATGTCGCTTATATTAGTTATGAGAATCGAGAACGAATTGCGGGTAAGACCTCATGGAGTTTCTTTAATCTCTTAAAATACTCTCTAGACGGTTTCATCAACTTCTCAGAAATTCCATTAGCTATAGCTACCTGGATTGGAACCCTTAGTTCAGTACTATCACTTTTAGCTATCATTTTTATTATAATTCGAAAATTACTATTTGGGGATCCCGTTTCAGGTTGGGCAAGCACAGTTACCATTGTACTTTTTATGGGTGGTATTCAGTTATTGTCGCTAGGAATTATAGGCAAATACATCTCTAAGATTTTCCTAGAAACTAAAAAACGCCCAGTCTATATTGTCAAGGAAGAGGGA

SEQ ID NO: 16226 - protein, 308 aa, Streptococcus agalactiae; identical to SEQ ID NO: 2746

SEQ ID NO: 16227 - protein, 1386 aa, Streptococcus agalactiae
ATGTCAAAAAATAATAATGACCACACTCAAAAATCTGAGAATGGTATGGTACGCGGCCTAGAAAATCGTCACGTACAGTTAATTGCGATTGCAGGGACAATCGGAACTGGGCTTTTTCTTGGTGCAGGTCGTTCAATTAGCCTGACGGGTCCTTCAATAGTTCTTGTCTATGCTATCACTGGCGCTTTCATGTTCTTCATGATGCGTGCTATTGGAGAGATGCTTTATCAAGATCCAAATCAGCATACTTTTATTAATTTCATTACCAAATATTTAGGACCCGGTTGGGGATTTTTCTCAACACTTTCTTATTGGATTTCCCTAATATTTATCGGTATGGCAGAGATTACAGCCGTAGGAGAGTATGTTCAATTTTGGTTCCCTGAATGGCCATCCTGGATTATCCAAATTGTTTTTTTAGCTATCCTAAGTTCTATCAACTTAATTGCTGTAAAAGCATTCGGAGAAACCGAGTTTTGGTTTGCTATGATAAAAGTTATTGCAATTCTTGGTTTAATAGCAACCGGTATCTTTATGGTATTGACAAACTTTGACACCGGTCACGGATACCATGCTTCAATCTCAAATATCACCAATCATTTTGAATGGTTCCCTAAAGGTAAATTGAATTTCTTCATGGCTTTCCAAATGGTATTCTTTGCTTATTTAGCTATTGAATTTGTCGGAGTAACAACTTCTGAAACAGCTAATCCACGTAAAGTTTTACCAAAAGCAATCCAAGAAATTCCGATGCGTATTATTTTATTCTACGCAGGTTCATTATTAGCAATTATGGCCATCTTCCCATGGCAACAGTTACCAGTTAATGAGTCACCTTTCGTTACAGTATTCAAACTAGCTGGGATTAAGTGGGCTGCCGCTTTGATTAACTTTGTTGTCCTAACGTCTGCAGCATCTGCTCTTAATTCTACTTTGTACTCAACAGGGCGTCATTTATTCCAATTGGCTAATGAATCACCAAATGCTCTTACAAAAGCGTTAAAATTAGACCAATTATCTCGTCAAAGCGTTCCAAGTCGAGCTATTATTGCATCAGCTGTAATCGTTGGAGCTTCAGCACTTATCAGTGTTTTACCTGGTATTTCAGATGCCTTCTCCTTAATTACTGCATCATCTTCTGGTGTTTACATTTCTATCTATGTTCTTATTATGATTGCACATTGGAAATATCGTAAATCACCTGATTTTATGGAAGATGGTTATAAAATGCCTGCCTACAAAATCCTTTCACCAATCACACTTCTCTTCTTCCTCTTTGTATTCGTTTCTCTCTTCTTGCAAGATTCAACATACATCGGGGCTATTGGAGCAACCATCTGGATTATTGGATTTGGTTTATATAGTCACTTCAAACATAAATCACAT

SEQ ID NO: 16228 - protein, 462 aa, Streptococcus agalactiae; identical to SEQ ID NO: 11614

SEQ ID NO: 16229 - protein, 465 aa, Streptococcus agalactiae; identical to SEQ ID NO: 11615

SEQ ID NO: 16230 - protein, 155 aa, Streptococcus agalactiae; identical to SEQ ID NO: 2750

SEQ ID NO: 16231 - protein, 2403 aa, Streptococcus agalactiae
ATGAAAGAAAAAATTATAAAATATTTGGAAGAACACGGTAAAACCAGCGTTAATGATTTAGCTGCTGCCCTAGATATGGCAGGCGCAAAAGCATTTCCAAAATTAATCAAAACAATCTCAAATTTGGAGAGCCACAGGCAATTAAGATTTGACGATAATGGAAGTCTTTCTCTTCAAAAGAAAGAAGCTAAGAAAAAGGAAATCACAGTAAGGGGTCTTTTTAGAGCAAATAAAGCAGGATTTGGTTTTCTTAGTATTGACCAAGACGAAGATGATATGTTTATCGGAAAAAACGATATTGCTTATGCTATTGATGGTGACACGGTAGAAGCTGTTGTAAAGAAACCAGCGGACCGTCTTAACGGGACTGCAGCAGAAGCGCGTGTTGTTAATATTGTTGAACGTAGTTTAAAGACGCTTGTTGGTAAGTTTGTCTTAGACGATGAGCGCCCTAAATACGCAGGATATATCAAATCGAAAAATCAAAAAATCAATCAAAAGATTTATATACGCAAAGAACCGGTCGTTTTAGACGGAACAGAAATTATCAAAGTAGATATTGATAAATATCCGACACGAGGACATGATTACTTCGTAGCAAGTGTTCGTGATATCGTTGGACATCAAGGAGATGTTGGTATTGATGTTTTAGAAGTCTTGGAAAGTATGGATATCGTCTCAGAATTTCCTGAGGACGTTATTGCAGAAGCCAATGCTATCCCAGATGCTCCAACGGAGAAAGATTTAATTGGGCGTGTTGATTTACGTCAAGAGGTCACTTTCACTATTGATGGAGCGGACGCCAAAGATTTAGACGATGCTGTGCATATTAAATTACTGGATAATGGTCATTTTGAACTTGGAGTTCATATCGCAGATGTATCATACTACGTTACTGAAGGCTCTGCCTTAAATCGTGAAGCACTTAGTCGTGGTACGTCCGTATATGTCACAGATCGCGTTGTACCAATGTTACCAGAGCGTCTATCTAACGGTATATGTTCATTAAATCCAAATCTTGATCGTTTAACGCAGTCTTGTATTATGGAAATTGACCAAAATGGGAGAGTTGTTAATCATCAAATTACACAGTCAGTGATTAATACCACTTATCGTATGACTTATATCGCTGTAAATGATATTATTGCTGGCGATGAGGAAATCTGCTCAGAATATGAGTCTATTGTGTCCTCAGTACAGCATATGGTCACTTTACACCATACTTTGGAAGCTATGCGTACGCGTCGTGGAGCGCTGAATTTTGACACATCTGAAGCAAAAATTATGGTTAATGATAAGGGAATGCCAGTTGATATTGTTATTCGCAACAGAGGCATTGCTGAACGCATGATTGAGTCATTTATGTTGGCGGCAAATGAAACGGTTGCTGAACATTATGCTCGTCTAAAACTGCCATTTATTTATCGTATACACGAAGAGCCTAAAGCTGAAAAATTACAAAAATTCATCGATTATGCTTCTGTTTTCGGTGTTCAGATTCAAGGAACAGCAACTAAAATCACCCAATCTGCTTTACAGGACTTTATGAAAAAAGTACAAGGGCAGCCAGGAAGTGAAGTGTTATCTATGATGTTATTGCGCTCGATGCAACAAGCTAGATATTCTGAACACAACCATGGACATTATGGACTTGCTGCGGAATATTACACTCACTTTACTAGCCCCATTCGACGTTATCCAGACTTGTTAGTTCATCGTATGATTCGTGATTATGATGATAAAGCGATGGATAAAGCTGATCATTTTGCTAACCTTATCCCAGAAATTGCAACTCAAACGTCTAGTCTTGAGAGACGTGCCATTGATGCTGAACGTATTGTAGAGGCAATGAAGAAAGCCGAATATATGGAAGAATATGTTGGTGAGGAATTTGAAGGTGTGGTTGCAAGCGTTGTTAAATTTGGTATGTTTGTAGAATTACCAAATACTATTGAAGGATTGATTCACGTAACGACCTTGCCTGAATATTATCACTTTAATGAACGTACGCTGACGCTTCAAGGTGAGAAATCTGGGAAAGTTTTCCGTGTTGGTCAACAAATTAAGGTTAAGTTGATTCGTTCTGATAAGGAAACTGGTGATATCGATTTTGATTATTTACCATCAGATTTTGATATTGTTGAAAAGGTAAGTAAAAGCTCGCGTGAGGGTCGTCCTAATAGAAGTTCTAAACGAGAACATCAGCATAGAATTTCTGATCGTGATAATAAGAATAAAAATACATCTAAGAAAAAAGCATCTCGAAAACCCAAAAGGAACTCGGATAGCAAATCACATCATCATAAAGACGATAGAACAACAGGTTCAACCAAGAAAAAAACGAAAAAACCTTTCTATAAAGGCGTTGCTAAGAAAGGTCAGAAACGGAAATCTAAGAAAGGT

SEQ ID NO: 16232 - protein, 801 aa, Streptococcus agalactiae
MKEKIIKYLEEHGKTSVNDLAAALDMAGAKAFPKLIKTISNLESHRQLRFDDNGSLSLQKKEAKKKEITVRGLFRANKAGFGFLSIDQDEDDMFIGKNDIAYAIDGDTVEAVVKKPADRLNGTAAEARVVNIVERSLKTLVGKFVLDDERPKYAGYIKSKNQKINQKIYIRKEPVVLDGTEIIKVDIDKYPTRGHDYFVASVRDIVGHQGDVGIDVLEVLESMDIVSEFPEDVIAEANAIPDAPTEKDLIGRVDLRQEVTFTIDGADAKDLDDAVHIKLLDNGHFELGVHIADVSYYVTEGSALNREALSRGTSVYVTDRVVPMLPERLSNGICSLNPNLDRLTQSCIMEIDQNGRVVNHQITQSVINTTYRMTYIAVNDIIAGDEEICSEYESIVSSVQHMVTLHHTLEAMRTRRGALNFDTSEAKIMVNDKGMPVDIVIRNRGIAERMIESFMLAANETVAEHYARLKLPFIYRIHEEPKAEKLQKFIDYASVFGVQIQGTATKITQSALQDFMKKVQGQPGSEVLSMMLLRSMQQARYSEHNHGHYGLAAEYYTHFTSPIRRYPDLLVHRMIRDYDDKAMDKADHFANLIPEIATQTSSLERRAIDAERIVEAMKKAEYMEEYVGEEFEGVVASVVKFGMFVELPNTIEGLIHVTTLPEYYHFNERTLTLQGEKSGKVFRVGQQIKVKLIRSDKETGDIDFDYLPSDFDIVEKVSKSSREGRPNRSSKREHQHRISDRDNKNKNTSKKKASRKPKRNSDSKSHHHKDDRTTGSTKKKTKKPFYKGVAKKGQKRKSKKG

SEQ ID NO: 16233 - protein, 291 aa, Streptococcus agalactiae; identical to SEQ ID NO: 11619

SEQ ID NO: 16234 - protein, 97 aa, Streptococcus agalactiae; identical to SEQ ID NO: 2754

SEQ ID NO: 16235 - protein, 1167 aa, Streptococcus agalactiae
GTGGCTTGGCTCGGTAATTTTTTTACTGGGGCAAGCTTTTCACTTGTTATGCCTTTTATGGTATTATATGTAGAACAATTAGGAGCACCTAGCAACAAAGTAGAGTGGTATGCAGGCCTATCAGTATCCTTATCAGCCTTGTCTTCAGCTTTAGTTGCCCCATTATGGGGGCGCTTAGCTGATAAATATGGTAGAAAACCGATGATGGTAAGAGCAGGGTTGATGATGACTTTTACTATGGGAGGCCTTGCTTTCATTCATAGTGTTACAGGACTTCTGATTTTACGTATATTAAACGGCATTTTTGCAGGCTATGTACCTAACTCTACAGCTTTGATAGCAAGTCAAGCTCCTCAAGAGGAATCAGGATATGCCTTAGGAACCTTAGCGACAGGAGTGACTGGAGGTATGTTAATTGGTCCACTTTTAGGGGGACTTTTAGCAGAGTGGTTTGGTATTAGGGAAGTTTTTTTATTAGTGGGAACCATATTGTTAATATCTACTTTAATGACCATTTTTATGGTAAAGGAAGATTTCAAACCCATTTCTAACGAAGAAACCATGCCAACTACAGAAGTATTCAAAAGCGTTAAAAGCTTACAAATTTTAATAGGGCTGTTTGTAACAAGCATGATTATTCAAATTTCTGCACAATCAATTGCACCTATTTTAACACTTTACATTCGTCATTTAGGACAGACTGAAAACTTGATGTTTGTTTCCGGATTAATTGTTTCTGGTATGGGATTCTCTAGTATTCTGAGTAGTCCAAAGCTAGGAAGAATCGGGGATCGCATAGGCAATCATCGTTTGCTATTATTAGCTCTACTGTATAGTTTCCTCATGTATGTCTTATGTTCATTGGCACAGACTTCATTACAGCTAGGGGTTATTAGATTCCTGTATGGTTTTGGAACAGGTGCCTTGATGCCGAGTATTAATTCAATCTTGACTAAAATTGCTCCAAGACAAGGTTTATCAAGGATTTTCAGTTATAACCAAATGTTTAGCAATTTAGGACAAGTATTAGGTCCTTTTGTCGGTTCAGCAGTTTCTATTCATTTAGGATTCCGATGGGTTTTCTTTGTGACTAGCTTCATCGTTTTAGCTAATTTTGTTTGGTGTTTTATTAATTTTAGAAAATATATTAGAGTTAAGGAAATTGTG

SEQ ID NO: 16236 - protein, 389 aa, Streptococcus agalactiae; identical to SEQ ID NO: 2756

SEQ ID NO: 16237 - protein, 1593 aa, Streptococcus agalactiae
TTGATAGTGCTAGAGCTTATAATAGTTTTTTATATTACCTTCAGAAAATCCCCTGGTTGGGAAGAAAAATCCCTAACCGATGGTATAAAAGGTGTAGTACTATTTATTCGTATCATTTTCTTTTTCTTAAGAGGTTTTGGTCGTTCCATAGGTTACGTACTATATTGTTATGTTTTATCATTTTTTGTTAGAAGTGGCATGAAGCAGTTAAATATTTTACCGCAAGAAGGTTTTACCCTAACTTTAACATTGATGGTGATTACCTCTCTTTTAATTGTCATAAATTTCTATATAAAACTTATAGAACCTAATGATATGCAACAAACTCATATGATTCGCCTTTTCAGAATTGAGCCATCGAGGTATTTCCAATCCGCTGAACTTTTAGAAGCCAGTAGTGAACTATTTTTTAGAAGTTTGAGCTTTGGCATATTTTTCCATTTAAATCACTTTGCTTTTTGGCATGGTTTGACTTTTGCTTTATTTTTAGCAGGTAGTCGCCTTGGAATCAAGGTGCTCTGTTTACCTTTATATGGTAGAGGTAAAGACCAAGAGAATCCAGAGTCTTTACTAAATATTTTATTTTACTTAGGGATTGGTATAGGAGTCTTCCTTTCTCTCTTTTTCCTTCTTCTTGGCAAACAGTTCTCTCCATATCCATTTTTTTCATGGTACACCGGTATTGCAGGACTTATCATATGGTTAGTTAGTTACTATCGATTAAAAACTTATTCTAAACTTAACCACTTGACCTACCTTACCCTAACGCATGAGACGATGAAGGAGAAAATTGCAAAGATTGATAATATAGAGCTGCTTGGGATTGAAATGAAAGATAGGGATATAAATGTCAGTGAACTTTCTCCCCTGCTATTTGAAAATTTATCAGGTATTTCATATTTAAACGCTATCTTTTTAAAACGGATGAGTAGATACTTGCAAAGGAAAATTTTGGTACGTTTAGCTGTTTTAAGTGTTCTGTTTGGAATAGAACTCCTTTTCCTGCTATTTTTTAAAGAAAAGATAAATATTCCGATGAATGAGCATAGTTTTTCAAAATTCCTATTTTTGAGTGCAGTTCCAGGATATCTAATATATATCGGTGAATCCTATTCAAAATTTTGTTTCTATCATTTGGATCGTCCATTATTAAGATATAATTTCTATCGTGAAAGAGAAAATATCTTAGCAACCTTAAAAATACGTTTCCTTTATAGTATAAAACTTAATTTCCCCATTTTTGTAGCTTTAAACATATGTTTTGGAACCTATTATTTTAATTTTTTCACCCCTAAGATTGATCAGATTATCATATTAGTAATTACACAAGCTATATCAATGATTTTATTTAGTTTTTACTTTTTGTATCTTTATTTCTTATTACAGCCTTTTACAGAAGGATTAAAATCAAAGAGTGCTATGTATAATATTTTAACCTTTATTATATACTATATGGGATATAAGCTATTTACCTTTACTAAATCTATAACGATGCCAATATTATTAGTAAGCCTAGGAATTATAGTTGTTATTTTAATTATTGGCTATTTAGCAGTTGTAGTATTTGCTCCAAAAACTTTCCGTTTAAAAAGT

SEQ ID NO: 16238 - protein, 531 aa, Streptococcus agalactiae
MIVLELIIVFYITFRKSPGWEEKSLTDGIKGVVLFIRIIFFFLRGFGRSIGYVLYCYVLSFFVRSGMKQLNILPQEGFTLTLTLMVITSLLIVINFYIKLIEPNDMQQTHMIRLFRIEPSRYFQSAELLEASSELFFRSLSFGIFFHLNHFAFWHGLTFALFLAGSRLGIKVLCLPLYGRGKDQENPESLLNILFYLGIGIGVFLSLFFLLLGKQFSPYPFFSWYTGIAGLIIWLVSYYRLKTYSKLNHLTYLTLTHETMKEKIAKIDNIELLGIEMKDRDINVSELSPLLFENLSGISYLNAIFLKRMSRYLQRKILVRLAVLSVLFGIELLFLLFFKEKINIPMNEHSFSKFLFLSAVPGYLIYIGESYSKFCFYHLDRPLLRYNFYRERENILATLKIRFLYSIKLNFPIFVALNICFGTYYFNFFTPKIDQIIILVITQAISMILFSFYFLYLYFLLQPFTEGLKSKSAMYNILTFIIYYMGYKLFTFTKSITMPILLVSLGIIVVILIIGYLAVVVFAPKTFRLKS

SEQ ID NO: 16239 - protein, 699 aa, Streptococcus agalactiae
ATGGAGTTAGTAATTAGAGATATTCGTAAGCGGTTTCAGGAAACAGAGGTCTTGAGAGGAGCAAGTTACCGATTTTATTCAGGTAAAATAACAGGGGTCTTAGGTAGGAATGGTGCTGGGAAAACAACTTTATTTAATATACTTTATGGGGATCTTGCAGCTGACAACGGGACCATTTGTTTATTGAAGGATAATCACGAGTATCCTCTTACCGATAAGGATATTGGTATTGTTTATTCCGAAAACTACCTTCCAGAATTTTTAACAGGGTATGAATTTGTAAAATTTTACATGGATTTACATCCTTCAGATGATTTAATGACAATAGATGATTATTTAGATTTTATGGAAATAGGACAAACAGAGCGTCATAGAATTATCAAAGGATATTCTGATGGAATGAAGAGTAAGCTCTCATTAATTTGCCTGATGATTTCTAAGCCAAAAGTAATTTTACTAGATGAGCCACTGACTGCAGTTGATGTTGTATCAAGTATTGCAATAAAACGCCTTTTGTTGGAATTAAGTGAGGATCATATTATTATATTATCAACTCATATAATGGCCTTAGCAGAAGATCTATGTGATATTGTGGCTGTATTAGACAAAGGAAAACTCCAAACATTAGATATTGATCGTAAACATGAACAATTCGAAGAGCGTCTTCTTCAAGTGTTGAAGGGAGATGAATATGACAAG

SEQ ID NO: 16240 - protein, 233 aa, Streptococcus agalactiae; identical to SEQ ID NO: 7372

SEQ ID NO: 16241 - protein, 591 aa, Streptococcus agalactiae
ATGCTTATGACAAAAATAATAGGACTGACAGGAGGGATAGCTTCTGGAAAGTCAACGGTAACAAAAATAATACGAGAATCAGGTTTTAAAGTCATAGATGCGGATCAAGTGGTTCATAAATTGCAAGCTAAGGGTGGGAAACTTTACCAAGCTTTATTAGAATGGTTGGGTCCCGAGATACTTGATGCTGATGGTGAGTTGGATAGACCAAAGCTTTCTCAAATGATTTTTGCTAATCCAGACAATATGAAGACATCAGCTAGGCTACAAAATAGTATCATTCGTCAAGAGTTAGCATGTCAGCGCGACCAATTAAAACAAACAGAAGAGATATTTTTCATGGATATTCCTTTATTGATTGAAGAAAAGTATATAAAATGGTTTGATGAGATTTGGTTGGTATTTGTTGATAAAGAAAAACAATTACAACGATTAATGGCCCGTAACAACTACAGTCGAGAAGAAGCAGAATTACGACTTTCACACCAAATGCCTTTAACAGATAAAAAAAGTTTCGCTAGTCTTATTATTGACAATAATGGTGATTTAATAACTTTAAAAGAGCAAATATTGGATGCTCTTCAACGTTTA

SEQ ID NO: 16242 - protein, 197 aa, Streptococcus agalactiae
MLMTKIIGLTGGIASGKSTVTKIIRESGFKVIDADQVVHKLQAKGGKLYQALLEWLGPEILDADGELDRPKLSQMIFANPDNMKTSARLQNSIIRQELACQRDQLKQTEEIFFMDIPLLIEEKYIKWFDEIWLVFVDKEKQLQRLMARNNYSREEAELRLSHQMPLTDKKSFASLIIDNNGDLITLKEQILDALQRL

SEQ ID NO: 16243 - protein, 817 aa, Streptococcus agalactiae
ATGCCAGAATTACCAGAAGTAGAAACCGTTAGAAAAGGACTAGAAAGACTTGTAGTTAATCAAGAAATAGCTTCTATAACGATTAAAGTCCCTAAAATGGTGAAAACTGATTTGAATGACTTTATGATAAGTCTACCAGGAAAAACAATTCAACAGGTATTGAGACGAGGGAAGTATCTTCTTTTTGATTTTGGTGAAATGGTTATGGTATCACATTTACGCATGGAAGGAAATATCTACTCTTCCCAAATAAAGTACCAGATAACAAACATTTTCACCTTTATTTCAATTGACTAATGGCAGCACATTGGTTTACCAAGATGTCCGTAAATTTGGGACATTTGAGTTGGTTCGTAAATCATCTCTCAAAGATTATTTTACTCAAAAAAAATTAGGTCCTGAGCCAACTGCTGACACATTTCAATTTGAGCCTTTTTCAAAAGGCTTAGCAAACTCCAAAAAGCCAATAAAACCTTTACTATTAGATCAGAGATTAGTAGCAGGACTTGGAAATATTTACGTAGATGAAGTCTTGTGGGCAGCAAAAATTCACCCACAGCGTTTGGCTAATCAATTGACCGAATCTGAAACAAGCTTATTACACAAGGAAATTATTCGCATTTTAACTTTAGGCATCGAAAAAGGTGGCTCCACGATTAGAACATATAAGAATGCTCTTGGAGAGGACGGTACGATGCAAAAGTATTTACAGGTCTATGGTAAAACTGGGCAACCGTGTCCAAGGTGTGGTTGTTTAATTAAGAAGATAAAAGTAGGAGGGAGAGGGACGCATTATTGCCCTCGGTGTCAATGCTTA

SEQ ID NO: 16244 - protein, 273 aa, Streptococcus agalactiae; identical to SEQ ID NO: 7376

SEQ ID NO: 16245 - protein, 846 aa, Streptococcus agalactiae
ATGGAAAAAGAATTAGGAAAAACACTAAGAAGATTACGTAAAGGAAAAAAAGTTAGTATTTCTTCTTTAGCAGATGAGCACCTATCCAAGTCACAAATCTCAAGGTTTGAGAGAGGAGAGTCAGAAATTACTTGTAGTCGTTTGCTTAATATTTTAGACAAACTCAACATCACTATTGATGAATTTGTGTCGATTCATTCTAAGGCGCACACTCATTTTTTTATCCTTTTAAATCGAGTAAGAAAATATTGTGCTGAAAAAAATGTAACTAAATTAGTGGCTCTCTTAGAGGATCATAACCATAAAGACTATGAAAAGATTATGATTAAGGCTCTTATTTTTTCAATTGATCAATCAATAGAGCCTAATCAAGAAGAATTAGCACGCTTAACAGACTATCTTTTTACGGTGGAGCAGTGGGGATATTATGAAATTATTCTCTTAGGAAATTGCTCACGTCTCATTAATTACAATACTTTATTTTTATTGACCAAAGAAATGGTTAATTCGTTTGCTTATTCAGAACAAAATAAAACCAATAAAATCCTAGTTACACACTTAGCAATTAATTGTCTAATCATCAGCATTGATCACTCTTACTTTGAGCATAGCCACTACTTAATTGATAAGGTTAGATCATTGTTACAGGATGAAGTTAATTTCTATGAAAAAACTGTTTTCTTATATGTAACTGGATACTATCATTTAAAACTTGGTGATACTTCTTCAGGAAAAGAAGATATGAGGAAAGCTTTACAGATTTTTAAATATTTAGGTGAAGATTCATTTTACAATACTTATAATGAACATTATTGTCAAAAAGTACTTGGCAATAATAAAGAATGC

SEQ ID NO: 16246 - protein, 282 aa, Streptococcus agalactiae
MEKELGKTLRRLRKGKKVSISSLADEHLSKSQISRFERGESEITCSRLLNILDKLNITIDEFVSIHSKAHTHFFILLNRVRKYCAEKNVTKLVALLEDHNHKDYEKIMIKALIFSIDQSIEPNQEELARLTDYLFTVEQWGYYEIILLGNCSRLINYNTLFLLTKEMVNSFAYSEQNKTNKILVTHLAINCLIISIDHSYFEHSHYLIDKVRSLLQDEVNFYEKTVFLYVTGYYHLKLGDTSSGKEDMRKALQIFKYLGEDSFYNTYNEHYCQKVLGNNKEC

SEQ ID NO: 16247 - protein, 1587 aa, Streptococcus agalactiae
ATGAAGATTAAAAAAATTATTAGTGGCTTTGCCGCAGCTTTAATTATCAGTTCACTATCAACTATTAACTATGAGGTTAAAGCTGATGACACCACCAGTGAGTATCACTATATCAGTAAGCAAAATAATGAAAAGCAGCTTATTAGTTACATCAAGGAACAACATCGTTTGCTCAATCAATTTGTTGTTGATAATGTCAACTCATTCACTCAACTAAATGCTAATCCAACTATTGAACAGTTAAATAGAGCTATAACATTATTTAAACAAAAAGATGAGCAATTATTTAACCAGGTGAAAGCTGGTCATCTCTCTCCCAGTAACTATAATGCTATCGTTAATCAACGTAATGTCATTAACCAAACTGTTCAAAATCTGATTGACCAAAATCATAATAAGATTCAGACAAGTCAAAATAAAGCAGCTCAGCTCGTGGGGCAACGTAATCAGGTTGTTAACAAAATTCAAGCTATTTTAGCAACTGTAAACTACAACTCTGTGAATTCTATACAAGAAGCTGAAAATTTATTTCATTCACTCAGAAATCAAATTGAACCTCTTGTAGCTGAAGTTAATAATTACAAAGCTGCTATGGCAATCCTTCAACAAGAAGTAGATGCCCTATCAACAGCGGCTATTGAAACTGAGACTTCTAAACTTGCTACTCTCAAAGTTAGCGAAAATACTTCTGTTCCTGCAAACAAAGTAGAAGAAAAAACTACTCAATCAGAAGCGTCAGGCAATAAACAAGAAGTAACTAAGAGTGAGGAAAAACAGGCTACCTCTGATGCAAAGGCATCACAGCCTGAGTCAGCTAATATTGCCGATTACGATAGTTTAAAAGAAGTTTTACGAAATAATATTAGCAACCAAGTACCACACATCAGTGTTCAAATGGAGTTTAAAACTCAAGAACAAGTTGACGAATACCAAAAAAATCTCGGAAGCATCATCCGGGAAATTGGAGATACACTTGGAACAGCAACTGAATTCAATGCCAAAAGTAACATTAGCACTTATACTCTTGGTGGACAAATCCAACGCATTATTGTAAAAAGCGACATCACAATCACCTATACTCTTAAAGGTGACATGGTAGGATTACATAAAGAATATAAACAGTTTGTAGATTCTTTTGTCAAAGAAAATATTACTAACAAAAATATCACAAGTGATTATGAAAAAGCTAAAGTAATTCATGACCACTTGGTTAATAATTACACTTACGCGACTGAAGAACTGGCAACCACTCGTGAAACTGCTAGTGGTATCAGTATCCATGCTCCTGAAGCACTCTACAAAGATAAACGTGGTGTTTGTCAAGCCTTTGCAGTAATGTTTAAAGATATGGCTGCTGCTGGCTTATCAGTATGGTATGTAACTGGTCAAGCTGGAGGTGGAAATCACGCTTGGAACATTGTTACTATTAATGGCGTTAAATATTATGTTGATACAACATGGGATAATAATATAAAAAGCAATAAATATTTCCTTGTTGGTAAAACAATAATGGATGCTGATCATCTTTTGGATAGTCAATACAATGCATTAGCTAAAGATATTCCAGCTGATCGCCATCAAGGTGCA

SEQ ID NO: 16248 - protein, 529 aa, Streptococcus agalactiae
MKIKKIISGFAAALIISSLSTINYEVKADDTTSEYHYISKQNNEKQLISYIKEQHRLLNQFVVDNVNSFTQLNANPTIEQLNRAITLFKQKDEQLFNQVKAGHLSPSNYNAIVNQRNVINQTVQNLIDQNHNKIQTSQNKAAQLVGQRNQVVNKIQAILATVNYNSVNSIQEAENLFHSLRNQIEPLVAEVNNYKAAMAILQQEVDALSTAAIETETSKLATLKVSENTSVPANKVEEKTTQSEASGNKQEVTKSEEKQATSDAKASQPESANIADYDSLKEVLRNNISNQVPHISVQMEFKTQEQVDEYQKNLGSIIREIGDTLGTATEFNAKSNISTYTLGGQIQRIIVKSDITITYTLKGDMVGLHKEYKQFVDSFVKENITNKNITSDYEKAKVIHDHLVNNYTYATEELATTRETASGISIHAPEALYKDKRGVCQAFAVMFKDMAAAGLSVWYVTGQAGGGNHAWNIVTINGVKYYVDTTWDNNIKSNKYFLVGKTIMDADHLLDSQYNALAKDIPADRHQGA

SEQ ID NO: 16249 - protein, 174 aa, Streptococcus agalactiae; identical to SEQ ID NO: 7385

SEQ ID NO: 16250 - protein, 58 aa, Streptococcus agalactiae; identical to SEQ ID NO: 7386

SEQ ID NO: 16251 - protein, 96 aa, Streptococcus agalactiae
ATGTTAAAAGATGTGAATGTTGGAATGAGTCATTTATTAGTTAGAGGTGCTATTATTCTAGTAGTAGGGATTGTTTTTCTGTTGCAACAGATTCAG

SEQ ID NO: 16252 - protein, 32 aa, Streptococcus agalactiae; identical to SEQ ID NO: 2758

SEQ ID NO: 16253 - protein, 330 aa, Streptococcus agalactiae; identical to SEQ ID NO: 7389

SEQ ID NO: 16254 - protein, 110 aa, Streptococcus agalactiae; identical to SEQ ID NO: 7390

SEQ ID NO: 16255 - protein, 399 aa, Streptococcus agalactiae
ATGCATAATATATTAAGATTTTTAGGCATTGTTATTATTTCTGCAGTGATTCTATTTAGTATAGGTAGTTTCTACGATTTATCATTAATGAAAAATATACTACTTATCTGTTGGAGTTTTCTCTTTGATCTATTGGTTTTTGTCTTCAAACAAAGACAAACGACAGAAGTACTCACATGGTATCAAGTTGTTAAGCAATTTTGGTTATTTATTAAGTGTACTATTCTTATTCCTATCTTAGTTGCTTTTATTATAATGAAAGGATGTTTGACAAGTATATCAGATATATTAATTTACTTTTATTTACACCTTGTCGTTGTTTATTATACGATAGGAATGATTTTATCATTAGGTCGTATCATTTCTCCTGAACACTCTATGTTTAATAAACTTAGAAAG

SEQ ID NO: 16256 - protein, 133 aa, Streptococcus agalactiae; identical to SEQ ID NO: 7394

SEQ ID NO: 16257 - protein, 897 aa, Streptococcus agalactiae
ATGACATTTAAGTCAGGATTTGTAGCAATTTTAGGTCGTCCAAATGTTGGAAAATCAACCTTCCTAAACCATGTTATGGGACAAAAAATTGCTATCATGAGTGATAAAGCTCAAACAACACGTAATAAAATTATGGGGATTTATACAACAGAAACTGAGCAAATTGTTTTCATTGATACCCCAGGAATTCATAAACCAAAGACCGCCCTTGGTGATTTTATGGTTGAATCTGCTTATAGTACTTTACGTGAAGTTGAAACAGTTCTTTTCATGGTTCCTGCCGATGAAAAGCGAGGCAAAGGCGATGATATGATTATTGAACGTCTTAAGGCTGCCAAGATTCCTGTTATTTTAGTAATCAACAAAATTGATAAGGTTCATCCAGACCAACTTTTGGAACAGATTGATGACTTCCGTAGTCAAATGGATTTTAAAGAAGTAGTGCCAATTTCTGCCCTTCAAGGAAATAATGTGCCAACCCTAATCAAGTTATTGACTGATAATCTTGAAGAAGGTTTCCAATATTTCCCAGAAGATCAGATTACTGATCATCCGGAACGATTTTTAGTATCAGAAATGGTTCGTGAGAAGGTACTTCATTTAACGCAACAAGAGGTTCCTCACTCAGTAGCGGTTATTGTCGAATCCATGAAACGTGATGAAGAAACTGATAAAGTGCATATTCGTGCAACTATCATGGTTGAACGTGATAGTCAAAAAGGCATTATCATTGGAAAACAAGGTGCTATGCTCAAGAAAATAGGAAAAATGGCGCGCCGTGATATTGAACTTATGTTAGGTGATAAAGTTTACCTAGAGACTTGGGTAAAAGTCAAGAAAAACTGGCGTGATAAAAAGCTTGATTTAGCTGATTTTGGCTATAATGAAAAAGAGTAT

SEQ ID NO: 16258 - protein, 299 aa, Streptococcus agalactiae
MTFKSGFVAILGRPNVGKSTFLNHVMGQKIAIMSDKAQTTRNKIMGIYTTETEQIVFIDTPGIHKPKTALGDFMVESAYSTLREVETVLFMVPADEKRGKGDDMIIERLKAAKIPVILVINKIDKVHPDQLLEQIDDFRSQMDFKEVVPISALQGNNVPTLIKLLTDNLEEGFQYFPEDQITDHPERFLVSEMVREKVLHLTQQEVPHSVAVIVESMKRDEETDKVHIRATIMVERDSQKGIIIGKQGAMLKKIGKMARRDIELMLGDKVYLETWVKVKKNWRDKKLDLADFGYNEKEY

SEQ ID NO: 16259 - protein, 396 aa, Streptococcus agalactiae
ATGGACTTAAACGACAATAATCAAAAAAAATGGAAAAATCGTACCTTAACATCAAGCATGGAATTTGCTGTTACAGGGATTTTTACAGCTTTTAAAGAAGAAAGAAATATGCGTAAGCATTTGGTTTCTGCCATTTTAGTAATACTTGCTGGTCTTACTTTTCAAGTATCTATGGTGGAGTGGTTATTTCTTTTATTGAGTATTTTTTTGGTAATTACTTTTGAAATTATCAATTCAGCTATTGAAAATGTAGTTGATTTGGCAAGTAATTACCATTTCTCGATGCTGGCTAAAAATGCTAAAGATATGGCAGCAGGAGCGGTTTTAGTTGTTTCCTTATTTGCCGTATTGGTGGGATTGATTATTTTTATACCCAAGATACTTGCTTTACTTTTA

SEQ ID NO: 16260 - protein, 132 aa, Streptococcus agalactiae; identical to SEQ ID NO: 2764

SEQ ID NO: 16261 - protein, 495 aa, Streptococcus agalactiae
ATGTACGTTGAAATGATTGATGAAACTGGACAAGTATCAGAAGATATCAAAAAGCAAACTCTTGATTTGTTAGAGTTTGCAGCACAAAAAACAGGTAAAGAGAATAAAGAAATGGCTGTAACGTTTGTCACTAATGAACGTAGCCATGAATTGAATTTAGAGTATCGAGATACCGATCGTCCGACTGATGTTATCAGTTTAGAATATAAGCCTGAGGTTGATATTTCTTTTGATGAAGAAGATCTGGCTGAAAATCCTGAACTTGCTGAGATGCTAGAAGATTTTGATTCTTATATTGGTGAACTTTTTATTTCTATTGATAAAGCTAAAGAACAAGCAGAAGAGTACGGTCACTCTTATGAACGTGAAATGGGTTTTTTAGCTGTACATGGTTTTTTGCATATTAACGGTTATGATCATTATACACCCGAAGAAGAAAAAGAGATGTTCAGCTTACAGGAAGAAATTTTAACTGCTTATGGACTTAAACGACAA

SEQ ID NO: 16262 - protein, 165 aa, Streptococcus agalactiae; identical to SEQ ID NO: 7400

SEQ ID NO: 16263 - protein, 804 aa, Streptococcus agalactiae
ATGAAGATAACATTACACGGCGTTGCTGAAACGTTATTAATCACCTTATATATTAGGGCTAAAGATGCGATGGCTAAACATCCGATACTTAATGATCAAAAATCCTTAGCAATTGTTGAACAGATAGAATATGATTTGGATAAATTCGATAATTCAGAAGCTTCTTTTTATGCAACATTAGCTAGAATTCGCGTTATGGATAGAGAAATCAAAAAATTTATTAGAGAAAATCCAAATAGTCAAATCCTTTCAATTGGTTGTGGACTTGATACAAGGTTTGAAAGAGTCGATAATGGACAAATTAGGTGGTATAACCTTGATTTGCCAGAGGTTATGGAGATAAGAAAATTATTTTTTGAAGAGCATGAAAGAGTTACTAATATAGCAAAATCAGCCCTAGATGAAACTTGGACACGGGAGGTAAATCCCCAAAATGCCCCTTTTCTAATCGTGTCAGAAGGTGTTTTAATGTTTCTAAAAGAAGATGACGTAGAGACTTTTCTTCATATCCTGACAAATTCATTTAGCCAATTTATGGCACAATTTGATTTGTGTCATAAGGAAATGATTAATAAAGGAAAGCAACATGATACAGTAAAGTATATGGATACAGAATTTCAGTTTGGTATCACAGATGGTCATGAGATTGTGGATTTAGACCCTAAATTAAAGCAAATAAATCTGATTAACTTTACAGATGAGATGAGCAAATTTGAGTTAGGCACACTTCGCTCTTTACTTCCAACAATTCGTAAATTTAATAATTGTTTAGGTGTGTACGAATATAAAGCATCTGAGAAAAAG

SEQ ID NO: 16264 - protein, 268 aa, Streptococcus agalactiae
MKITLHGVAETLLITLYIRAKDAMAKHPILNDQKSLAIVEQIEYDLDKFDNSEASFYATLARIRVMDREIKKFIRENPNSQILSIGCGLDTRFERVDNGQIRWYNLDLPEVMEIRKLFFEEHERVTNIAKSALDETWTREVNPQNAPFLIVSEGVLMFLKEDDVETFLHILTNSFSQFMAQFDLCHKEMINKGKQHDTVKYMDTEFQFGITDGHEIVDLDPKLKQINLINFTDEMSKFELGTLRSLLPTIRKFNNCLGVYEYKASEKK

SEQ ID NO: 16265 - protein, 117 aa, Streptococcus agalactiae; identical to SEQ ID NO: 7403

SEQ ID NO: 16266 - protein, 39 aa, Streptococcus agalactiae; identical to SEQ ID NO: 7404

SEQ ID NO: 16267 - protein, 474 aa, Streptococcus agalactiae; identical to SEQ ID NO: 7405

SEQ ID NO: 16268 - protein, 158 aa, Streptococcus agalactiae; identical to SEQ ID NO: 7406

SEQ ID NO: 16269 - protein, 801 aa, Streptococcus agalactiae
ATGGACCATTTCACAAAACTCTGGCAAGATTTCTCTAAACTTCCAAATGTTGTTGCTATAGCACTCGGAGGCTCACGCTCTGGTGACAGTTTTGACCAATCTTCCGATTATGATTTGTATGTTTATTGTGCAGCAACTCCTGATATCACTAGTCGTAAACGTATCCTTAACAAGCACTGTCATTACATTGAACTTAACAATCATTACTGGGAGCTTGAAGATAATGGTACTTTAAACGACGGAACTGATATTGATATTCTCTATCGTAACATAGATAACTTTTTATCAGACTTAGAAGATGTCGTTGAACACCACAATTCTCGAATTGGATACACTACTTGTTTTTGGCATAACCTCATCAATTGCCAAATACTCTATGATCCTGAAAATCAATTACAATCACTCAAAGAGAGATTCGAAGTTTCTTATCCCAGTCAGTTACAAAAACAAATTATCATTCAAAATCGTAACTTATTAACTGGCAAGCTTCCCTCTTACGATAAACAAATTATAAAAGCCCTTAAACGCCAAGACTTTGTTAGTACTCACCATAGAACTACTGCTTTCTTAGATTCCTACTTTGATATTATTTTTGCACTTAATAAGTTGACACATCCTGGCGAAAAAAGAATGATTTCCTATGCTAAGAAGAATGCTACATTGCTTCCTAAACATTTCGAAGAAAATATCATTAAACTATGTCATCACAACTCCAACGAACACACTGTTAAAGAAACATTAAACGATATAATAATGCATCTCGACGTCATGCTTAAAGAAAATTTTCAACACTTTATAGGT

SEQ ID NO: 16270 - protein, 267 aa, Streptococcus agalactiae
MDHFTKLWQDFSKLPNVVAIALGGSRSGDSFDQSSDYDLYVYCAATPDITSRKRILNKHCHYIELNNHYWELEDNGTLNDGTDIDILYRNIDNFLSDLEDVVEHHNSRIGYTTCFWHNLINCQILYDPENQLQSLKERFEVSYPSQLQKQIIIQNRNLLTGKLPSYDKQIIKALKRQDFVSTHHRTTAFLDSYFDIIFALNKLTHPGEKRMISYAKKNATLLPKHFEENIIKLCHHNSNEHTVKETLNDIIMHLDVMLKENFQHFIG

SEQ ID NO: 16271 - protein, 984 aa, Streptococcus agalactiae
TTGCAAGAATACTCTATCGAAATTACTTTACAACATCCAGATGATATGATGTCACTCTTTGGCAGCAATGAGCGCCATTTAAAATTAATCGAAGAAAATTTAGATGTTATCATTCATGCTAGAACTGAACGTGTTCAGGTATTAGGTGACTCTGAAGAAGCAGTAGAAACCGCTCGGTTAACCATTGAAGCATTATTAGTGCTTGTTAACCGCGGGATGACTGTGAATACTTCAGATGTTGTAACAGCCTTATCCATGGCACAAAATGGTTCAATTGATAAATTCGTTGCCCTTTATGAGGAAGAAATTATTAAGGATAGCTATGGTAAGCCTATCCGTGTTAAGACTTTAGGGCAAAAAATATACGTTGATAGCGTTAAAAATCATGATGTTGTTTTTGGTATTGGGCCTGCTGGAACGGGAAAAACTTTTTTAGCAGTCACTCTAGCAGTAACGGCACTAAAGCGTGGTCAAGTTAAACGAATAATCTTAACGAGACCAGCGGTTGAAGCTGGTGAAAGCCTTGGTTTCTTGCCTGGAGATCTCAAAGAGAAAGTTGATCCTTATTTGAGACCAGTTTATGATGCCCTATATCAAATTTTAGGTAAAGAGCAAACAAGTCGCTTAATGGAGCGTGAAATCATCGAAATTGCTCCATTGGCTTACATGCGTGGTCGTACTTTAGATGATGCATTTGTCATATTAGATGAAGCGCAAAACACCACTATAATGCAAATGAAAATGTTCCTAACACGTCTTGGCTTCAATTCTAAAATGATTGTAAATGGCGATGTTAGCCAAATTGACTTACCAAAGAATGTTAAATCTGGTTTGATTGATGCTGTTGAGAAATTACGAAATATCAAAAAGATTGACTTTATTCATTTATCAGCAAAGGATGTTGTAAGACACCCTGTCGTTGCTGAAATAATAAATGCTTATTCAGATTCAGAAAGTAGTCACAAGCTACAATCTGATAAGGAC

SEQ ID NO: 16272 - protein, 328 aa, Streptococcus agalactiae; identical to SEQ ID NO: 2770

SEQ ID NO: 16273 - protein, 1770 aa, Streptococcus agalactiae
ATGAGATATACAAATGGAAATTTTGAAGCCTTTGCAAGACCTCGAAAACCTGAAGGTGTGGATAAAAAATCCGCTTATATTGTTGGTTCTGGTTTAGCAGGATTAGCTGCCGCTGTCTTTTTAATACGTGACGGTCAAATGGATGGTCAACGTATTCATATTTTTGAAGAACTACCTCTTTCTGGAGGATCACTTGACGGTGTCAAACGACCTGATATCGGTTTTGTAACGCGTGGTGGTCGTGAAATGGAAAATCACTTCGAATGTATGTGGGATATGTACCGTTCCATCCCCTCTCTCGAAGTTCCAGATGCTTCTTATCTAGATGAATTTTATTGGCTTGACAAGGATGATCCCAATTCATCTAACTGTCGCCTCATTCATAAACAGGGGAATCGCTTAGAATCTGATGGTGATTTTACACTCGGAACACATTCCAAAGAGTTAGTTAAGCTAGTCATGGAGACTGAAGAGTCTTTAGGTGCTAAGACGATTGAAGAAGTTTTTTCAAAAGAATTTTTTGAAAGTAATTTTTGGACTTATTGGGCTACTATGTTTGCCTTTGAGAAATGGCATTCAGCGATTGAAATGCGTCGATATGCTATGCGCTTTATCCATCATATTGGTGGTCTGCCTGATTTCACTTCATTAAAATTTAATAAATATAATCAATATGATTCTATGGTGAAACCAATCATCAGTTATTTAGAGTCTCATAATGTAGATGTTCAATTTGATAGCAAGGTAACTAATATCTCCGTAGACTTTAAGAACGGTCAGAAGCTTGCAAAAGCCATTCATCTCACAGTTGGTGGTGAAGCAAAAACAATTGATCTTACTCCAAATGATTTTGTTTTTGTAACGAATGGTTCTATCACTGAAAGTACGAACTATGGTAGTCATGATACTGTAGCTAAACCTAATACCGATTTGGGAGGTTCTTGGAATCTTTGGGAAAACTTAGCTGCTCAATCTGATGAATTTGGACATCCTAAAGTCTTCTACAAAGATATTCCAAAAGAGTCATGGTTTGTTTCTGCTACTGCAACAATAAAAGATCCAGCTATTGAACCTTATATAGAGCGTTTAACACATCGTGACCTCCATGATGGTAAAGTAAATACCGGAGGCATTGTTACAGTTACAGATTCTAATTGGATGATGAGTTTTGCTATCCATCGCCAACCGCATTTCAAAGAGCAAAAGGAAAATGAAACAATTGTTTGGATTTATGGACTCTATTCAAATGTGGAAGGTAATTATATTAAAAAACCAATTGAAGAATGTACTGGTCGAGAAATCACAGAAGAGTGGTTATATCACTTAGGTGTTCCTGAAATGAAGATTCATGATTTATCTGATAAACAATATGTAAGTACAGTTCCTGTTTATATGCCTTACATTACTAGTTATTTCATGCCTCGAGTTAAAGGTGACCGACCAGATGTTATCCCACAAGGATCTGTTAACCTAGCCTTCATTGGTAATTTTGCAGAATCTCCATCCAGAGATACAGTATTTACAACGGAATATTCTATTAGAACTGCTATGGAAGCTGTTTATACTTTCTTAAATATTGAACGTGGTGTTCCAGAAGTCTTTAATTCAGCATTTGATATTCGTGTCTTGTTGCAATCTTTATACTATCTCAATGATAAGAAATCTGTTGAAGATATGGATTTACCAATACCTGCCTTAATGCGTAAAGTAGGCATGAAAAAAATTAGAGGAACTTATTTAGAAGAATTACTTCGAGAAGCTCATCTTTTA

SEQ ID NO: 16274 - protein, 590 aa, Streptococcus agalactiae
MRYTNGNFEAFARPRKPEGVDKKSAYIVGSGLAGLAAAVFLIRDGQMDGQRIHIFEELPLSGGSLDGVKRPDIGFVTRGGREMENHFECMWDMYRSIPSLEVPDASYLDEFYWLDKDDPNSSNCRLIHKQGNRLESDGDFTLGTHSKELVKLVMETEESLGAKTIEEVFSKEFFESNFWTYWATMFAFEKWHSAIEMRRYAMRFIHHIGGLPDFTSLKFNKYNQYDSMVKPIISYLESHNVDVQFDSKVTNISVDFKNGQKLAKAIHLTVGGEAKTIDLTPNDFVFVTNGSITESTNYGSHDTVAKPNTDLGGSWNLWENLAAQSDEFGHPKVFYKDIPKESWFVSATATIKDPAIEPYIERLTHRDLHDGKVNTGGIVTVTDSNWMMSFAIHRQPHFKEQKENETIVWIYGLYSNVEGNYIKKPIEECTGREITEEWLYHLGVPEMKIHDLSDKQYVSTVPVYMPYITSYFMPRVKGDRPDVIPQGSVNLAFIGNFAESPSRDTVFTTEYSIRTAMEAVYTFLNIERGVPEVFNSAFDIRVLLQSLYYLNDKKSVEDMDLPIPALMRKVGMKKIRGTYLEELLREAHLL

SEQ ID NO: 16275 - protein, 213 aa, Streptococcus agalactiae
TTGAGAAAATCATTTTACAGTTGGTTGATGACACAAAGAAATCCAAAATCAAATGAACCAGTAGCAATCCTAGCAGATTACGCTTTTGATGAAACCACTTTTCCAAAACATAGTTCGGATTTTGAAACAGTTAGTCGCTATTTAGAAGATGAGGCCAGTTTTTCCTTTAATTTAACAGATTTTGATGATATTTGGGAAGATTATCTCAATCAT

SEQ ID NO: 16276 - protein, 71 aa, Streptococcus agalactiae; identical to SEQ ID NO: 7414

SEQ ID NO: 16277 - protein, 507 aa, Streptococcus agalactiae
ATGGAACGTGCGATTTTTGCTGGAGGTTGTTTTTGGTGTATGGTACAACCATTTGAAGAATTAGATGGTATTGAATCTGTTTTATCTGGATACACTGGAGGACATGTTGAGAATCCAACTTATAAAGAAGTTTGTAGTAAAACTACTGGACATACAGAAGCTGTTGAAATTATTTTTAATCCTGAAAAAATCTCTTATGCAGATTTAGTTGAGTTATATTGGGCACAAACAGATCCAACAGACGCTTTTGGTCAGTTTGAAGATCGTGGGGATAATTATCGTCCTGTCATCTTTTATGAGAATGAAGAGCAACGTCAGATTGCTCAAAAATCAAAAGATAAGCTACAAGCTTCGGGTAGATTTGATAGACCAATTGTAACCAGCATTGAGCCTGCTGATACTTTTTACCCAGCAGAAGACTATCATCAAGCATTCTATCGGACTAACCCTGCTCGTTACGCCTTGAGTAGTGCCAGAAGACATGCATTTCTAGAGGAGAACTGGCAT

SEQ ID NO: 16278 - protein, 169 aa, Streptococcus agalactiae; identical to SEQ ID NO: 11660

SEQ ID NO: 16279 - protein, 852 aa, Streptococcus agalactiae
ATGAATACATTATTAGCGACAGTCATAACAGGCTTAGTAACTGATGAAAACAAAGATTTTTACTTTATCCAAAAAGATGGCTTTACCTTTGCATTATCAAAGTCAGAAGGAGAGCATCACATTGGTGAAATGGTTAAAGGATTCGCCTATACAGATATGCAACAAAAAGCACGTCTTACAACTAAAGAAACATTTGCGACTCGAGATCATTATGGTTGGGGGACAGTTACTGAGGTACGTAAAGACTTGGGAGTATTTCTTGATACTGGTCTTCCAGATAAGCAAGTGGTTGTTTCTTTGGATGTTCTTCCTGAATTGAAAGAACTTTGGCCTAAAAAAGGTGATCGCCTCTACGTTTGCTTAGATGTTGATAAAAAAGATCGTCTCTGGGCTCTCCCTGCAGATCCTGAAGTGTTTCAACGAATGGCAACCCCTGCATATAACAATATGCAAAATCAAAATTGGCCAGCAATCGTTTATCGCTTAAAATTGTCAGGAACTTTTGTTTATCTACCAGAAAATAATATGCTCGGCTTTATTCACCCTAGTGAACGTTACAGTGAACCTCGTTTAGGGCAAGTGCTGGATGCACGAGTTATTGGCTTCAGAGAAGTTGATAGAACCTTAAATTTATCATTAAAGCCTCGTTCTTTTGAAATGTTAGAAAATGACGCACAAATGATTTTAACGTATTTAGAAAGTAACGGAGGATTCATGACTTTAAATGATAAATCTTCTCCAGAGGAAATTAAAGCTACTTTTGGAATTTCCAAAGGTCAGTTTAAAAAAGCACTTGGAGGACTCATGAAAGCTAAAAAGATCAAACAAGATCAGCTAGGTACAGAATTATTA

SEQ ID NO: 16280 - protein, 284 aa, Streptococcus agalactiae; identical to SEQ ID NO: 7418

SEQ ID NO: 16281 - protein, 552 aa, Streptococcus agalactiae
ATGACTAAGGAAATCGTTACAAAAGCTCAAGAGCGTTTTGAGCAATCACACCAAAGTTTATCAAGAGAATTTGCAGGGATTCGTGCAGGACGTGCTAATGCTAGCTTGCTTGATCGTATTCAAGTTGAGTATTATGGAGCGCCAACCCCACTTAACCAATTAGCTTCTATTACTGTACCTGAAGCTCGTGTTCTTTTAATTTCACCATTTGATAAATCATCAATCAAAGATATTGAGCGTGCTATTAACGAATCAGATTTAGGTATTAATCCTGCAAATGATGGTTCAGTTATTCGTCTTGTTATTCCAGCTTTGACAGAAGAAACACGTCGTGATTTAGCTAAAGAAGTGAAAAAAGTCGGAGAAAATGCTAAGATTGCTATCCGTAATATTCGCCGTGATGCTATGGATGAAGCTAGAAGCAAGAAAAGAATAAAGAAATTACGAAGATGACTTGAAATCTCTTGAAAAAGATATTCAAAAGGCTACTGATGATGCTGTAAAACATATTGATGAGATGACTGTAATAAAGAAAAAGAATTGTTGGAAGTT

SEQ ID NO: 16282 - protein, 185 aa, Streptococcus agalactiae
  VARIANT 140: Xaa = Any Amino Acid
MTKEIVTKAQERFEQSHQSLSREFAGIRAGRANASLLDRIQVEYYGAPTPLNQLASITVPEARVLLISPFDKSSIKDIERAINESDLGINPANDGSVIRLVIPALTEETRRDLAKEVKKVGENAKIAIRNIRRDAMDEAXKQEKNKEITEDDLKSLEKDIQKATDDAVKHIDEMTVNKEKELLEV

SEQ ID NO: 16283 - protein, 726 aa, Streptococcus agalactiae
GTGGAACCTAAATATCAACGTATATTAATTAAGTTATCTGGTGAAGCATTGGCGGGAGATAAGGGTGTCGGTATTGACATTCCTACCGTTCAATCTATTGCAAAAGAAATTGCCGAAGTACACAATTCAGGTGTTCAAATAGCACTTGTCATTGGTGGAGGTAATCTTTGGCGTGGAGAACCTGCAGCAGAAGCAGGGATGGATCGTGTTCAAGCTGATTATACAGGGATGTTAGGGACAGTAATGAATGCTCTTGTAATGGCTGATAGCCTTCAACAATATGGGGTAGATACTAGAGTTCAAACAGCTATTCCAATGCAAACTGTTGCTGAGCCTTACGTACGTGGTCGTGCTTTACGTCATCTAGAGAAGAATCGTATTGTTGTCTTTGGAGCGGGTATTGGTTCGCCTTATTTCTCAACTGATACAACAGCAGCGCTTCGTGCTGCTGAGATTGAGGCAGAAGCAATTTTAATGGCTAAAAATGGAGTAGATGGTGTTTATAATGCTGATCCAAAGAAAGATGCCAATGCTGTCAAATTTGATGAATTAACTCACGTTGAAGTAATAAAACGAGGGTTAAAAATCATGGATGCAACCGCATCAACTATTTCAATGGATAATGATATTGACCTTGTTGTTTTCAATATGAATGAGACTGGTAATATTAAGCGTGTTGTTCTTGGAGAACAAATCGGAACAACTGTTTCAAACAAAGCATCTGAA

SEQ ID NO: 16284 - protein, 242 aa, Streptococcus agalactiae; identical to SEQ ID NO: 2782

SEQ ID NO: 16285 - protein, 393 aa, Streptococcus agalactiae
ATGAAGCTTTTTATGGAAAAAAAAACAACTTTTGAATTATGTCAAATATTAGAAGCGGTGGGTTTAGATGGAACTTATCTAAAATATAAAGCTAGACAACTTAGTGGTGGTCAGCTACAGAGAGTTTGTATCGCTAGAGCTTTACTCTTAAAGCCTAAAATTATTATTTTTGATGAATCCTTAAGTGGATTAGACCCAGTAACTCAAATTAAAATGCTACGTTTATTACAAAAAATAAAACGCCGTTATGAATTAAGTTTTATAATGATTTCTCATGACCCTAAAATTTGTCAAGCTATCTGTAACCGGGTCTTTCTGATAAAAAATGGTTATTTAGTAGAAGATAATGAATTCTTGAAGAGAGCGTGTTCTACTAACTGTTTGACCAATCTC

SEQ ID NO: 16286 - protein, 131 aa, Streptococcus agalactiae
MKLFMEKKTTFELCQILEAVGLDGTYLKYKARQLSGGQLQRVCIARALLLKPKIIIFDESLSGLDPVTQIKMLRLLQKIKRRYELSFIMISHDPKICQAICNRVFLIKNGYLVEDNEFLKRACSTNCLTNL

SEQ ID NO: 16287 - protein, 318 aa, Streptococcus agalactiae
ATGTTGGTTTGTAATCATGTCGGAAAAACATTTGGACGACAAGAGGTTTTAAAGGACTGTCATTTTCATCTTAAAAGAGGAGAAATAATTGGTATAATGGGTAAAAGTGGCAGTGGTAAAAGTAGCCTTGCCCGACTCATTATAGGACTAGATAGTCCTACTTGTGGTTCGATATATTTTCAAGGAAAAATTTACACACCTAAAGATGGTAAGGCGCAGATTATCCTTGTTTTTCAAGATGCGCTTAGTTCGGTCAATCCATATTTTAGTATTGAGGAAATTTTGAATGAAGCTTTTTATGGAAAAAAAAACAACTTT

SEQ ID NO: 16288 - protein, 106 aa, Streptococcus agalactiae
MLVCNHVGKTFGRQEVLKDCHFHLKRGEIIGIMGKSGSGKSSLARLIIGLDSPTCGSIYFQGKIYTPKDGKAQIILVFQDALSSVNPYFSIEEILNEAFYGKKNNF

SEQ ID NO: 16289 - protein, 705 aa, Streptococcus agalactiae
ATGGGAGAATCGCTAACTATTATTGGTGAGAGTGGTTCAGGGAAAACCCTCTTGGCAAAATTATTGGTTGGTCACATTCCACAAGGTATGACAGTTAGAGGAAACATATTTTTTAAGGGAGTTGATTTAGGTAAACTAACTGTAAAGCAGTGGCAGAAATTAAGGGGACGAGATATTGCCTATTTAGTGCAAAATCCCATGTCTATGTTTAATCCTTTTCAAAAAATTGAAGCGCATATTTTGGAAACAATCCTTAGTCATGAGAAATGTTCAAAGAGAGTAGCCTTATCTAAAGCGTTAGAATGGATGAAACGTTTAAATTTAGATGATGCGATATCCCTGTTAAAAAAATACCCTTTTGAGCTTAGTGGAGGAATGCTACAAAGAATTATGTTAGCCACTATATTATCTCTTGATCCTCAGGTAATCATATTAGATGAGCCGACCTCAGCGGTTGATTGTCATAATTGTTCTACTATATCAGCTATTTTGCAGGAATTGCAAAATAATGGAAAAACCTTGATTACTGTAACGCATGATTATCAGTTAGCTAGAGACCTGGGGGGACAATTATTAGTTATAAGTGAGGGAGAAGTTGTTGAACAGGGACAAACCCAAGCTATTTTAAGCAATCCTCAACATAACTATACGAAAGCACTGACAGTGCAAATGGAGTATGAAGGAGATATTCTTAATGTTGGTTTG

SEQ ID NO: 16290 - protein, 235 aa, Streptococcus agalactiae; identical to SEQ ID NO: 2786

SEQ ID NO: 16291 - protein, 759 aa, Streptococcus agalactiae
GTGATTAGTGCCATTTTTGCCCCTATTCTATCTAGCTTTGATCCACAATACGTAGATTTATCACAAAAATTATTGGCTCCCAATAATGTTCATTTGTTAGGGACTGACCAATTGGGTAGAGATGTATTATCTCGCTTGCTTTATGGTGCTAGATATTCACTGTTTTTAGCTATTATTATTAGCTTATTGGAATTAACGATTGGTATGTTTGTGGGTCTTATTGTTGGTTGGTATCAAGGAAAGTTAGAAAACCTCTTTTTATGGATAGCTAATATTATTTTAGCTTTTCCGAGCTTTTTGCTCTCTCTTGCAACCGTGGGGATCTTAGGTCATGGTCTAGGGAATTTAATTTTTGCAATTGTCTTTGTGGAATGGGTTTACTATGCTAAATTAATGACCAATTTAGTTAAGAGTGCAAAAAAAGAGCCTTATGTGATAAATGCGCAAATTATGGGACTTTCAGTCTGGCATATTTTAAGAAAACATATTTTTCCTTTTGTGTATCAGCCAATCCTCGTTATGGTCCTTATGAATATAGGAAATATTATTTTAATGATTTCTGGCTTTTCTTTCTTAGGGATTGGTGTGCAACCTAATGTCACAGAATGGGGAATGATGTTGCACGATGCTAGAGGATATTTTAGGACAGCTACTTGGATGATGTTATCTCCTGGAATTGCGATTTTTTTAACAGTATTTTCCTTTAATACTTTAGGCGATGCCATAGATAAAAAAGATTGGAAACGACAATGGAACAGT

SEQ ID NO: 16292 - protein, 253 aa, Streptococcus agalactiae; identical to SEQ ID NO: 2788

SEQ ID NO: 16293 - protein, 942 aa, Streptococcus agalactiae
ATGTATCTAAGTAGTTCGATCATCAAAAAAATATTGTCAGCTTTTTTGGCATTGTTTTTCATATCACTTCTAACATTTATTCTTATCAAACTATCAACAGTTAATCCAGCAGAAAATTACCTTCGTTTATCAAAAATAAGTGTTAGTCCAGAAGCGCTAAAAGAAGCAGAGCACTATTTAGGTTTAGATAAGCCATTATGGAAGCAGTACTGGCTGTGGTTCCAAAAAGCATTAACAGGAGATTTTGGATATTCTTATGTGCTCAGGTTGCCAGTATTAGATTTGGTTTTACAACGGTTTTTGGCTACTTTATTTTTAGGCACGAGTGCCTTCTTGCTAATTGTTACCATTTCTACCCCGTTAGGTGTGTGGGCTGGCTTACATGAATCTGCTCGGAGTGATCACTTGATTCGATTTTTGAGTTTTTCTAGTGTGTCTATGCCAAATTTTTGGGTTGCTTACTTGTTGATGCTGCTATTTTCGGCAAAATTAAATCTTCTGCCTGTTTCAGGAGGTAACGATTTACAAAGTTTAATTTTGCCAAGTATTACCTTAAGTTTTTCTACCGTAGGTCAATACATAGCCCTTATTCGAAAAGCTATTAGTCAAGAAAATAGAAGTTTAAATGTGGAAAATGCCCGATTAAGAGGAGTAAAAGAACGTTATATTGTCACACATCACCTCCTTAGAAATGCCTTACCTGCGATAATGACAGCACTTAGCTTGACTTGGGTTTACTTATTAACAGGATCAATTATTGTTGAAGAAATTTTTTCATGGAATGGAATAGGACGTTTATTTGTGACCAGTCTAAGAACTTCAGATCTTCCAGTAATACAAGCTTGTATGCTAATTTTTGGAACCTTATTTTTAGCTAATAATTTTATGACACAGTGTTTTATGAATTGGGTTGATCCTCGGTTACGAAAGTCAAGGGAGAAA

SEQ ID NO: 16294 - protein, 314 aa, Streptococcus agalactiae; identical to SEQ ID NO: 2790

SEQ ID NO: 16295 - protein, 1575 aa, Streptococcus agalactiae
ATGGTGACTCTGACTGCATGCCATTCACAGGATAGCAAAAGTCATAAACTAAACAGTGATAAACTCACGCTTGCTTGGGGAGAAGACTTTGGTGATGTTAATCCGCATCGCTATAACCCTGATCAGTTTGTTATCCAGGATATGGTTTATGAGGGGTTGGTACGATATGGTGACAATGGGAAAATTGAACCAGCTTTAGCGAAAAGCTGGAGCATTAGTCAAGATGGAAAAACCTACACTTTTAAATTGAGAAATGCTAAATATTCTGATGGCAGTAACTTTAATGCTGCGAATGTCAAACGTAATTTTGATAGTATTTTTTCGAAGTCTAATAGAGGTAATCATAATTGGTTTAATTTAACGAATCAATTGGAAAATTATCGTGCCTTGAATCAAAGTACTTTTGAAATTAAACTGAAACAAGCTTATAGTGCTACTTTATATGATCTCTCTATGATTCGACCAATTCGCTTTTTATCTGATAGCGCTTTCCCTAAAGGTGATGATACAACTAAGAAGAATGTAAAAAAACCAATTGGAACGGGTCAATGGGTTGTGAAAAGTAAAAAGCAAAATGAATATATTACCTTCAAACGTAATGAGAATTACTGGGGAAAGAAACCAAAATTAAAAGAAGTAACCGTAAAAGTTATACCCGATGCTCAGACGCGTGCTTTAGCATTCGAATCAGGTGACGTTGATTTGATCTATGGGAATGGCATTATTGGTTTAGACACTTTTGCCCAATATACGAAGGACAAGAAATATGTCACAGCTATTTCTCAACCTATGTCAACAAGACTTTTGTTGCTAAATGCTAAGGAAAGTATTTTCCAAGATAAAAAAGTTCGTCAGGCAATGAATCATGCTATTGACAAGGTTTCTATTGCTAAGAACACCTTTAGAGGAACAGAAAAGCCAGCAGACACTATTTTTTCAAAATCAACATCTCACTCAGATGCTAAGTTAAATCCTTATAGCTATAATGTTGATAAAGCAAATCAGCTATTGGATCAAGCTGGTTGGAAGATGGGAAAAGATAAGGTTCGTGAAAAAGATGGTAAAGCTCTAACCTTACGTCTTCCTTATATCGCCACTAAGGCAACTGATAAAGACCTGGTAACTTATTTCCAAGGAGAATGGCGTAAAATCGGTATTAATGTTTCTCTTATTGCTATGGAAGAAGATGATTATTGGGCTAATGCTAAAAAGGGTAATTTTGATATGATGTTAACCTATTCTTGGGGAGCACCATGGGACCCTCATGCTTGGATGTCGGCATTAACTGCCAAGGCAGATCATGGACATCCAGAAAATATAGCTTTAGAAAATCTAGCAACTAAAACTGAAATGGATAGACTTATTAAGTCAGCTCTAGTAGATCCTAAGGAAGAAAATGTTGATAGAGACTATAAGAAGGTTCTTGAATTATTGCATGATGAGGCTGTATATATCCCATTAACTTATCAATCGGTGATTTCTGTTTATAGGAAAGGTGATTTTAAAACCATGCGTTTTGCGCCAGAAGAAAATTCATTCCCATTACGCTATATAGAAAAAAACAATGTATCTAAG

SEQ ID NO: 16296 - protein, 525 aa, Streptococcus agalactiae
MVTLTACHSQDSKSHKLNSDKLTLAWGEDFGDVNPHRYNPDQFVIQDMVYEGLVRYGDNGKIEPALAKSWSISQDGKTYTFKLRNAKYSDGSNFNAANVKRNFDSIFSKSNRGNHNWFNLTNQLENYRALNQSTFEIKLKQAYSATLYDLSMIRPIRFLSDSAFPKGDDTTKKNVKKPIGTGQWVVKSKKQNEYITFKRNENYWGKKPKLKEVTVKVIPDAQTRALAFESGDVDLIYGNGIIGLDTFAQYTKDKKYVTAISQPMSTRLLLLNAKESIFQDKKVRQAMNHAIDKVSIAKNTFRGTEKPADTIFSKSTSHSDAKLNPYSYNVDKANQLLDQAGWKMGKDKVREKDGKALTLRLPYIATKATDKDLVTYFQGEWRKIGINVSLIAMEEDDYWANAKKGNFDMMLTYSWGAPWDPHAWMSALTAKADHGHPENIALENLATKTEMDRLIKSALVDPKEENVDRDYKKVLELLHDEAVYIPLTYQSVISVYRKGDFKTMRFAPEENSFPLRYIEKNNVSK

SEQ ID NO: 16297 - protein, 687 aa, Streptococcus agalactiae
ATGGCTAAAAAAAGTAAAAACTTACGTGCTGCTCTTGAGAAAATTGACAGCACTAAAGCATACAGCGTAGAAGAAGCTGTAGCTCTTGCAAAAGAAACTAACTTTGCTAAATTTGATGCAACTGTTGAAGTTTCTTATAACCTTAACATTGACGTTAAAAAAGCTGACCAACAAATCCGTGGTGCTATGGTTTTACCAGCAGGTACTGGTAAAACTTCACGTGTTCTTGTTTTTGCTCGTGGTGCTAAAGCTGAAGAAGCTAAAGCAGCAGGTGCAGACTTTGTCGGTGAAGATGACTTAGTTGCTAAAATCCAAGGTGGATGGCTTGACTTTGATGTTGTTATCGCAACACCAGATATGATGGCACTTGTTGGACGTCTTGGACGTGTCCTTGGACCTCGTAACTTGATGCCAAACCCTAAAACTGGTACAGTAACTATGGACGTTGCTAAAGCAGTTGAAGAGTCTAAAGGTGGTAAAATTACTTACCGTGCTGATAAAGCAGGTAACGTCCAAGCCCTTATTGGTAAAGTTTCATTTGATGATGCTAAATTAGTTGATAACTTCAAAGCATTTAATGATGTTATTGTTAAAGCTAAACCAGCTACTGCAAAAGGAACTTACATCACAAACCTTTCAATTACAACAACACAAGGTGTTGGTATCAAAGTTGATCCTAACTCACTT

SEQ ID NO: 16298 - protein, 229 aa, Streptococcus agalactiae; identical to SEQ ID NO: 2794

SEQ ID NO: 16299 - protein, 672 aa, Streptococcus agalactiae; identical to SEQ ID NO: 16221

SEQ ID NO: 16300 - protein, 224 aa, Streptococcus agalactiae; identical to SEQ ID NO: 2742

SEQ ID NO: 16301 - protein, 306 aa, Streptococcus agalactiae
TTGAATGGAGAAAGAAAAGAAATGACATTTAAGTCAGGATTTGTAGCAATTTTAGGTCGTCCAAATGTTGGAAAATCAACCTTCCTAAACCATGTTATGGGACAAAAAATTGCTATCATGAGTGATAAAGCTCAAACAACACGTAATAAAATTATGGGGATTTATACAACAGAAACTGAGCAAATTGTTTTCATTGATACCCCAGGAATTCATAAACCAAAGACCGCCCTTGGTGATTTTATGGTTGAATCTGCTTATAGTACTTTACGTGAAGTTGAAACAGTTCTTTTCATGGGTCCTGCCCGA

SEQ ID NO: 16302 - protein, 102 aa, Streptococcus agalactiae
MNGERKEMTFKSGFVAILGRPNVGKSTFLNHVMGQKIAIMSDKAQTTRNKIMGIYTTETEQIVFIDTPGIHKPKTALGDFMVESAYSTLREVETVLFMGPAR

SEQ ID NO: 16303 - protein, 276 aa, Streptococcus agalactiae
TTGGTTTCTGCCATTTTAGTAATACTTGCTGGTCTTACTTTTCAAGTATCTATGGTGGAGTGGTTATTTCTTTTATTGAGTATTTTTTTGGTAATTACTTTTGAAATTATCAATTCAGCTATTGAAAATGTAGTTGATTTGGCAAGTAATTACCATTTCTCGATGCTGGCTAAAAATGCTAAAGATATGGCAGCAGGAGCGGTTTTAGTTGTTTCCTTATTTGCCGTATTGGTGGGATTGATTATTTTTATACCCAAGATACTTGCTTTACTTTTA

SEQ ID NO: 16304 - protein, 92 aa, Streptococcus agalactiae
MVSAILVILAGLTFQVSMVEWLFLLLSIFLVITFEIINSAIENVVDLASNYHFSMLAKNAKDMAAGAVLVVSLFAVLVGLIIFIPKILALLL

SEQ ID NO: 16305 - protein, 120 aa, Streptococcus agalactiae
TTGGCTTTTTTTGTTATAATGTATCTATTAAAAAGAATGGAGAACGATATGGAACGTGCGATTTTTGCTGGAGGTTGTTTTTGGTGTATGGTACAACCATTTGAAGAATTAGAATTGGGG

SEQ ID NO: 16306 - protein, 40 aa, Streptococcus agalactiae
MAFFVIMYLLKRMENDMERAIFAGGCFWCMVQPFEELELG

SEQ ID NO: 16307 - protein, 1379 aa, Streptococcus agalactiae
ATGTTAACGACAAAGGAAAATTTCAAAGGAAATAACAAATTATTGGTGGGAATTGTACTCGCTGTACTATCATTTTGGTTATTTGCACAGTCTATTTTAAACATGGGACCAGATGTTCAGTCATCATTAGGTATTTCATCTGGTGCAATGGATATGGTGTCTCAAGTACGGCATTGTTTTCAGGTTTATTTATTGTTGTAACTGGTGGTTTAGCAGATAAACTTGGTCGAGTTAAATTTACTTTTATTGGTCTTTGCTTAAATATTATTGGTTCTCTACTAATTGTTTTAGCTAATGGAGCAGTGCTATTTATTATGGGACGTATTTTTCAAGGATTGGCAGCAGCTTTTATTATGCCATCAACAATGGCCTTGGTTAAAACGTACTATGATGGTAAAGATAGACAACGTGCAGTTAGTTTCTGGTCAATCGGATCGTGGGGTGGCTCAGGTCTATGTTCTTATTTTGGTGGAGCGGTGGCAAGTACTCTAGGTTGGCGTTATGTCTTTATCTTTTCAATCATCGCATCAGTAGTTAGTTTTCTATTAATTTTAGGAACCCCAGAAAGTAAAAATGTTGGACAAAAAACTCACTTTGATTACCTTGGTTTAATTATTTTTATTATTTCAATGTTATCGTTAAATATTGGGATATCTATGGCTCAGGAACATGGATTGATGAACGTTATTCCATTGAGTCTTTTTACAGTGATGCTTATTGGATTTGTTCTGTTTTATTATGTTGAAACACGTAAATCTAATAGTTTTATTGACTTTCATCTGTTTGAAAATCGATTTTACTTAGGTGCGACAATATCAAATTTCTTACTGAATGCAGTTGCAGGAACTCTGATTGTTATTAATACTTACATGCAACAAGGTCGCCAGCTAACACCAAAGGTTGCAGGTGAAATGTCTTTAGGCTATTTGGTTTGTGTACTAATTGCTATCCGAGTTGGTGAGAAAATTTTACAACGTTTTGGTGCCCGTAAGCCAATGCTTTTGGGAGCTATGAGTACATTTGTTGGGATATTTTTAATGACTTTGGTCAATATTCAAGGACCTTTGTATCTTGTGTTAGTCTTTGTTGGTTATGCTTTATTTGGAACAGGCTTGGGGATCTATGCGACACCATCAACAGATACAGCTATTTCTAGTATTCCTAATGAAAAAGTAGGTTCTGCATCTGGAATTTACAAAATGGCAAGTTCACTAGGTGGTGCAATTGGTGTAGCAACTTCAATTGCGATTTATCATGCTTTTTCTGGTAATGCAGATTTTCACAAAGCAGCTTTGTGTGGATTAATTTTAAACCTAGTTTTTTGTAGTCTATCGATCTTATCAATTCTTTTTGTTATCCCTAAGAAAATTGAGGATAAA

SEQ ID NO: 16308 - protein, 460 aa, Streptococcus agalactiae
  VARIANT 52: Xaa = Any Amino Acid
MLTTKENFKGNNKLLVGIVLAVLSFWLFAQSILNMGPDVQSSLGISSGAMDXGVSSTALFSGLFIVVTGGLADKLGRVKFTFIGLCLNIIGSLLIVLANGAVLFIMGRIFQGLAAAFIMPSTMALVKTYYDGKDRQRAVSFWSIGSWGGSGLCSYFGGAVASTLGWRYVFIFSIIASVVSFLLILGTPESKNVGQKTHFDYLGLIIFIISMLSLNIGISMAQEHGLMNVIPLSLFTVMLIGFVLFYYVETRKSNSFIDFHLFENRFYLGATISNFLLNAVAGTLIVINTYMQQGRQLTPKVAGEMSLGYLVCVLIAIRVGEKILQRFGARKPMLLGAMSTFVGIFLMTLVNIQGPLYLVLVFVGYALFGTGLGIYATPSTDTAISSIPNEKVGSASGIYKMASSLGGAIGVATSIAIYHAFSGNADFHKAALCGLILNLVFCSLSILSILFVIPKKIEDK

SEQ ID NO: 16309 - protein, 1212 aa, Streptococcus agalactiae
ATGGCCAATGCATCTTTGCGACATCAATTATTTGAAAAACTTGACCAAAAATGTGATCAAATGGTTGCTATTCGTCGCTATTTACATGAAAATCCCGAATTATCATTTAAAGAGACAAAAACAGCAGCTTATATTTCAGATTTTTATAAAGGTAAGGACTGTCATGTTCAGACACAATTTGGTGGTATGAATGGCGTCGTAGTTGATATCTATGGTGATAAAGCGACAGATAAGCCCATCAAACACATTGCTTTGAGAGCCGACTTTGATGCTCTTCCAATTCAGGAAGAGACAGGGCTTTCTTTTGCTTCAAAAACAGCGGGCGTCATGCATGCTTGTGGACATGATGCCCATACAGCTTATTTATTGATTTTGGCTGAGAGCTTGATTGAATTAAAATCAGAATTTTCAGGTCATATCCGTATCTTACATCAACCGGCTGAAGAGGTGCCACCAGGCGGAGCAAAAGCAATGATTGAAGCAGGATGTTTAGATGGCATTGATGCTGTCCTTGGTATCCATGTTATGTCAACGATGGAAGAGGGAACGGTACAATATCACGCAGGTCCCATTCAAACAGGGCGTGCCACTTTTAAAGTTATTTTGCAAGGTAAGGGTGGACATGGTTCCATGCCACATCGTGCAAATGATACAATTGTTGCAGCTTCTAGTTTTGTTATGGCAGCGCAAACGATTGTCAGTCGTCGAGTTAATCCATTTGACACAGCAGTAGTTACTATCGGATCTTTTGATGGTAAAGGTTCTGCTAATGTGATCAAAGATAGTGTAACCTTAGAAGGTGATGTGCGCGTGATGTCTGAAGAGACACGAGGTGTTGTTGAGGAGGAATTTAAGCGTATTCTAGATGGAATAGCACAAACTTATGGTGTTAGTTATCAGTTAGACTATCAGAATGATTATCCTGTTTTAGTTAATAACAGTGAAGTGACACAGAAAGTTGCAAATAGTTTAAAATCTGTTGCTATAAAAGAAATTTTAGATGTCATTGATTGCGACCCTCAAACGCCGTCTGAAGATTTTGCCTATTATGCTCAAACAATCCCAGCTTGCTTCTTCTATGTTGGAGCACATGAAGAGGGGCAACCATATTACCCACATCATCATCCAAAATTCCAAATTGCAGAATCATCATTGATGGTATCTGCTAAATCAATGGCAACAGCAGCGCTTGCTATGCTTGTAGAAGGAGAA

SEQ ID NO: 16310 - protein, 404 aa, Streptococcus agalactiae; identical to SEQ ID NO: 2804

SEQ ID NO: 16311 - protein, 903 aa, Streptococcus agalactiae
TTGAAAAATCAACAAAAATTAATGTATCTAGAGAGTATCGAGCTATACTCAAACATCACTAAAGCCGCTGCACACCTTTTTATTTCTCAACCTTACCTAAGCAAAGTGATCAAGCAATTAGAAAATGAGTTAGAAATAAAACTCATCCAGAGCCAAGGACACCAAACCTTTTTAACTTATGCTGGACAGAGATATCTATTCTACCTAAAAGAAATTGATATGATTGAGCGTCAAATGGCCAAAGAACTATATCTCATCCGTTCTGATAAAAAAGGAGAAATCACACTTGGGATTAACTCTGGCTTAGCAAGTTCTATTCTGGCAAATGTACTTCCCAAATTTAACTTGGAGCACCCAGAAATTTCTGTCAAATTACTCGAAAACAATCAAAATATTTCTGAACAATTGGTAGCGAGTGGTGATATTGACCTAGCTGTTGGGATGGCTCCTATCCTTTATAAAGATGGAATTGCATCAACCACTATTTACCGCGACGAATTGTTTTTAATGATACCTACCACCAGCCAACTCTACAACGCTGAAAAACGTGGACAGATTATTCCTTTTGAATATCCTATTTCAGTTCTAGACAATGAACCTCTTATCCTAACACCATTAGAGTACGGAATTGGCAAAACAATTGCACAATTCTATGAGCTTCATCACATGTCATTAAATCAGATGATTACAACTAGTACCGTTCCTACAGCAGCTAGCCTATCTTTGTCAGGGATGGGAGCAACATTTGTTCCACAAACTCTCATTCATCGCTATTTGGATAAAGAGTGCAATGTCTACCATTTTCATAAGAATAAGTTATTTTCAGAGTACATTATGATTTATAAAAAAGATGTTGAATTATCTGGAATTGCTCTCCTACTTTATAAAGCTTTTTTAACCAAG

SEQ ID NO: 16312 - protein, 301 aa, Streptococcus agalactiae; identical to SEQ ID NO: 2806

SEQ ID NO: 16313 - protein, 534 aa, Streptococcus agalactiae; identical to SEQ ID NO: 14133

SEQ ID NO: 16314 - protein, 178 aa, Streptococcus agalactiae; identical to SEQ ID NO: 2808

SEQ ID NO: 16315 - protein, 831 aa, Streptococcus agalactiae
ATGGTCACAGGAGGATTCCGACTAGACCTCTTACTTGAGATAACTAAGATAGCTCGTGCAACTTACTATTATCAACTAAAGAAACTGAATAAACCAAATAAAGACAAAGCAATCAAATCTGACATTCAATCCATTTATGATGAACATAGAGGAAACTATGGCTATCGTCGGATTTATTTAGAACTGCGAAATCGTGGCTTTGTCATCAACCACAAAAGGGTGCAAGGCTTGATGAAAAGTATGGGCTTGACTGCTCGTATTCGTCGTAAGCGCAAGTATGCCTCTTACAAAGGTGAGGTTGGTAAGAAGGCTGATAACCTGATTCAACGCCAGTTTGAGGGGTCGAAGCCCTATGAGAAGTGCTATACCGATGTGACGGAGTTTGCTTTACCTGAAGGGAAACTTTATCTATCGCCTGTTCTTGATGGCTATAACAGTGAGATAATTGATTTTACCCTGTCTCGGTCTCCTGACTTGAAACAGGTTCAAACCATGCTTGAGAGGGCTTTTCCTGCGGCTTCATACAGCGAAACCATTCTCCACAGCGACCAAGGCTGGCAGTACCAGCACAAGTCCTACCATCAATTTCTGGAGGACAAAGGCATTCGTCCTTCTATGTCACGGAAGGGGAACAGTCCTGACAACGGTATGATGGAATCTTTCTTTGGGATTCTAAAATCTGAGATGTTCTATGGCTTGGAGAAGTCTTACAAATCACTTGATGACCTTGAGCAAGCTATCACAGATTACATTTTTTACTACAACAACAAGCGAATCAAAGCAAAACTAAAAGGACTTAGTCCTGTGCAATACAGAACTAAATCCTTCACT

SEQ ID NO: 16316 - protein, 277 aa, Streptococcus agalactiae; identical to SEQ ID NO: 2810

SEQ ID NO: 16317 - protein, 1713 aa, Streptococcus agalactiae
ATGCATATTGAGACTGTTATTGATTTCAAAGAATTAGGAAAAAGATATCGTTTTAAAAATCCTACAAAAGAATTAATAGCTGATACTTTAGAACAAGTCTTAGAAGTGATAAAAGAAGTTGATTATTATCAATCTCAAAATTATTATGTTGTTGGTTATTTATCTTATGAAGCATCTGCTGCTTTTGATTCACATTTTAAAGTTTCTCAACAGAAGTTGGCTGGAGAACATCTAGCTTATTTTACAGTACATAAAGATTGTGAGAACGAAGCTTTTCCTTTAAGTTATGAAAATGTTAGATTAGCAGATAATTGGACTGCTAATGTTTCTGAGCAAGAATATCAAGAGGCAATTGCTAATATTAAAGGACAAATTAGACAAGGAAATACTTATCAAGTAAATTATACACTAGAGCTTAGCCAACAATTATGCTCGGATCCCTTTAGTGTTTATGAACGCCTAATGGTAGAACAAGGAGCAGGATATAATGCTTATATTGCCTACGACGATAAAAGGATTTTATCTGTAAGCCCGGAATTGTTCTTTAAGAAGAAGGATGAAGTCTTAACAACTAGACCAATGAAGGGAACAAGCGCTAGAAAGCCTACTTATCAAGAAGATGTGGCGGAGCGAGATTGGTTGGCAAATGATCCTAAAAATCGTTCTGAAAATATGATGATTGTTGATTTATTAAGAAACGATATGGGCCGTATCTGTGATGTTGGAACAGTTAAGGTAAAAAAACTATGTCAAGTGGAGCAGTATGCAACTGTGTGGCAAATGACATCAACTATTGAAGGAGTTTTATCGCCAGAAGTGACACTTATGTCTATTTTTCAAGCTCTATATCCTTGTGGATCTATCACTGGAGCTCCTAAGATATCAACAATGGCTATTATTAATGAGTTGGAAAAACGGCCAAGAGGTATTTATTGTGGGACGATAGGACTTTGCATGCCAGACGGACAAGCTATTTTTAACGTTCCTATTCGCACAGTACAAATGAAAGGTCAACAAGCCTATTACGGCGTTGGTGGAGGTATTACGTGGGAGAGCCAGACAGATTCTGAATATGAAGAAACCCGTCAAAAATCAGCTGTTTTAACACGTGTCAATCCAAAATTTCAATTAATAACTACAGGAAGAGTGACTGAAAATAAACTTCTTTTCTCTCAACAACATGTCGAGAGATTAGTTGAATCAGCGTCTTATTTTGCTTATTCTTTTGATAAAAGTAAATTCGAAAGGGAACTGAAAAAATACCTTCATCAGCTAGATGAGAAGGATTACCGCTTGAAAATAATGCTTGATAAAACTGGTAAGGTAACGTTTGAGGTAAAACAACTAGTGAATTTATCAAAAAAGTTTTTAACGGCAGAGGTGGTCGTACAAGACTACCCTATTAAATTATCCCCGTTTACTTATTTTAAAACTTCTTATCGCCCACATATTATTGAAGGTCAGAATGAAAAGATATTTGTATCTCCTGAGGGGTTGCTATTGGAAACAAGTATTGGGAATATTGTTTTAGAAAAAAATGGAAGGTTTTTAACCCCAGATTTATCAGAAGGAGGGTTGAATGGGATTTATCGTCGTCATCTCCTTAAAAACCAAAAAGTAATTGAAGCACCACTAACTTTAAAAGATTTAGAATCAGCCGATGCTATATACGCCTGTAATGCTGTTAGAGGGCTTTATCCTCTAAACCTAAAG

SEQ ID NO: 16318 - protein, 571 aa, Streptococcus agalactiae; identical to SEQ ID NO: 2812

SEQ ID NO: 16319 - protein, 2355 aa, Streptococcus agalactiae
ATGATTACTGCTCTTGTTTTAACAATTATTCTCTTCTTTGGTATTATCAGATTAGGTATTTTTGGTATTACAGTCTATAACGTCATCCGTTTTATGGTAGGTAGCTTGGCTTACTTATTTATTGCGGCAACTTTAATCTACCTTTATTTCTTTAAATGGTTGCGAAAGAAAGATAGCTTAGTAGCAGGTTTTTTGATAGCTTCTTTAGGATTATTGATTGAGTGGCATGCTTACCTTTTCTCAATGCCTATTTTGAAAGATAAAGAAATTTTGCGTTCAACTGCTCGATTAATTGTGTCTGATTTAATGCAATTTAAAATCACTGTTTTTGCCGGTGGAGGTATGTTGGGTGCTTTGATTTACAAGCCAATTGCTTTTCTCTTTTCTAATATTGGTGCCTATATGATTGGTGTTCTCTTCATCATTTTGGGTCTCTTTTTAATGAGTTCTCTGGAAGTTTATGACATCGTCGAATTTATTAGAGCTTTTAAAAATAAAGTGGCAGAGAAGCACGAGCAAAATAAAAAGGAGCGTTTTGCTAAGCGAGAGATGAAAAAAGCAATCGCTGAACAAGAGCGCATAGAGCGTCAAAAAGCTGAAGAAGAAGCTTATTTAGCTTCGGTTAATGTAGACCCTGAAACGGGTGAGATTCTAGAGGATCAAGCTGAGGACAATTTGGATGATGCGCTACCACCTGAGGTAAGTGAAACATCAACTCCGGTATTTGAGCCAGAGATCCTTGCTTATGAGACATCGCCTCAAAATGATCCTTTACCAGTAGAGCCGACAATTTATTTAGAAGACTATGATTCGCCGATTCCTAATATGAGAGAAAATGATGAGGAAATGGTTTATGATTTAGATGATGATGTAGATGATAGTGATATAGAAAATGTCGACTTTACACCTAAAACGACACTGGTTTATAAATTACCAACGATAGATTTATTTGCACCAGATAAGCCTAAAAATCAATCCAAAGAAAAGGATTTAGTCCGAAAGAATATCAGAGTTTTAGAAGAAACATTTAGAAGTTTTGGTATCGATGTAAAAGTAGAACGTGCTGAAATTGGACCATCAGTTACTAAATATGAAATTAAACCAGCAGTTGGAGTTCGTGTGAATCGTATTTCAAATCTATCTGACGACCTAGCTCTTGCTCTTGCAGCAAAAGATGTGCGTATAGAAGCACCAATTCCTGGAAAATCATTAATAGGTATTGAAGTTCCTAACTCAGAAATTGCAACGGTTTCTTTCCGCGAACTTTGGGAACAATCTGATGCCAATCCTGAAAACCTTTTAGAAGTACCACTAGGAAAAGCTGTTAACGGCAATGCTCGCAGTTTTAACTTAGCTAGAATGCCGCATCTTTTGGTAGCTGGTTCAACTGGTTCAGGTAAATCTGTGGCAGTTAATGGAATTATTTCAAGTATTTTGATGAAGGCACGTCCAGATCAAGTTAAGTTTATGATGATTGATCCCAAAATGGTTGAATTATCTGTTTATAATGATATTCCACATTTATTAATCCCTGTTGTAACCAATCCGCGTAAAGCAAGTAAGGCACTCCAAAAAGTTGTTGATGAAATGGAAAATCGATACGAGTTATTTAGCAAAATTGGTGTGCGTAATATAGCAGGTTATAATACAAAGGTTGAAGAGTTTAATGCTTCCTCTGAGCAAAAACAAATGCCTTTGCCTTTAATCGTTGTCATTGTAGATGAATTGGCTGACTTGATGATGGTTGCTAGTAAAGAAGTTGAAGATGCTATTATTCGTTTGGGGCAAAAAGCACGTGCTGCAGGTATCCATATGATTCTTGCAACTCAACGTCCATCCGTAGATGTTATTTCTGGTTTGATTAAAGCAAATGTTCCGTCGCGTATTGCATTTGCTGTTTCAAGTGGTACTGATAGCCGTACGATCCTTGATGAAAATGGTGCTGAAAAGCTCTTGGGACGGGGTGACATGCTCTTTAAGCCTATTGATGAGAATCATCCAGTACGACTACAAGGTTCCTTTATTTCAGATGATGATGTTGAAAGGATCGTTGGTTTTATCAAAGACCAAGCCGAGGCTGACTATGATGATGCCTTTGATCCTGGAGAAGTATCTGAAACAGATAACGGCTCTGGTGGTGGCGGCGGAGTACCTGAAAGTGATCCTCTTTTTGAAGAAGCCAAGGGACTCGTTTTAGAGACGCAAAAAGCAAGTGCCTCAATGATTCAACGCCGATTGTCTGTTGGTTTCAATAGAGCAACAAGACTAATGGAAGAATTAGAAGCAGCGGGGGTTATTGGTCCAGCAGAAGGAACCAAGCCACGAAAAGTTTTAATGACTCCAACTCCGAGTGAA

SEQ ID NO: 16320 - protein, 785 aa, Streptococcus agalactiae
MITALVLTIILFFGIIRLGIFGITVYNVIRFMVGSLAYLFIAATLIYLYFFKWLRKKDSLVAGFLIASLGLLIEWHAYLFSMPILKDKEILRSTARLIVSDLMQFKITVFAGGGMLGALIYKPIAFLFSNIGAYMIGVLFIILGLFLMSSLEVYDIVEFIRAFKNKVAEKHEQNKKERFAKREMKKAIAEQERIERQKAEEEAYLASVNVDPETGEILEDQAEDNLDDALPPEVSETSTPVFEPEILAYETSPQNDPLPVEPTIYLEDYDSPIPNMRENDEEMVYDLDDDVDDSDIENVDFTPKTTLVYKLPTIDLFAPDKPKNQSKEKDLVRKNIRVLEETFRSFGIDVKVERAEIGPSVTKYEIKPAVGVRVNRISNLSDDLALALAAKDVRIEAPIPGKSLIGIEVPNSEIATVSFRELWEQSDANPENLLEVPLGKAVNGNARSFNLARMPHLLVAGSTGSGKSVAVNGIISSILMKARPDQVKFMMIDPKMVELSVYNDIPHLLIPVVTNPRKASKALQKVVDEMENRYELFSKIGVRNIAGYNTKVEEFNASSEQKQMPLPLIVVIVDELADLMMVASKEVEDAIIRLGQKARAAGIHMILATQRPSVDVISGLIKANVPSRIAFAVSSGTDSRTILDENGAEKLLGRGDMLFKPIDENHPVRLQGSFISDDDVERIVGFIKDQAEADYDDAFDPGEVSETDNGSGGGGGVPESDPLFEEAKGLVLETQKASASMIQRRLSVGFNRATRLMEELEAAGVIGPAEGTKPRKVLMTPTPSE

SEQ ID NO: 16321 - protein, 801 aa, Streptococcus agalactiae; identical to SEQ ID NO: 11693

SEQ ID NO: 16322 - protein, 267 aa, Streptococcus agalactiae; identical to SEQ ID NO: 11694

SEQ ID NO: 16323 - protein, 831 aa, Streptococcus agalactiae; identical to SEQ ID NO: 11695

SEQ ID NO: 16324 - protein, 277 aa, Streptococcus agalactiae; identical to SEQ ID NO: 11696

SEQ ID NO: 16325 - protein, 713 aa, Streptococcus agalactiae
ATGATTATTAGTAAACACTTAAGCGTAAGTTATGATAATAATTTAGTGCTAGAAGATATTAATTTACGCTTAGAAGGCTCCGGAATCATTGGTATTTTAGGGCCTAATGGGGCGGGGAAATCTACGCTTATGAAAGCTCTTCTTGGTTGGTTGATTCTACTGGAGAATCAGGGATTGGGGGAGATTTGCTACCTTTAATGGGGAGAGTAGCATATGTTGAACAAAAAACTAATATTGATTACCAATTCCCTATAACTGTTGGAGAATGCGTTTCTTTAGGATTATATAAGGAACGAGGCCTCTTCAAGCGACTATCAAAAACTGACTGGGAAAAAGTATCCCGAGTGATTGATCAAGTTGGTTTGAGAGGGTTTGAAAATAGACCAATTAATGCCTTATCAGGTGGACAATTTCAACGTATGCTTATGGCAAGATGTCTCGTTCAAGAAGCGGATTACATTTTTTTAGATGAGCCGTTTGTAGGGATTGATTCCATTAGTGAACAAATCATAGTTAATTTACTAAAAAAATTAAGTAAGGCCGGAAAATTAATTTTAGTCGTCCATCACGATTTGAGTAAAGTTGATCATTATTTTGATCAAGTAATTATTTTGAACCGTCATCTAATTGCTTGTGGACCAATAGATCAGGCATTTACCCGTGAGAATTTAAGTGCTGCTTACGGTGATGCTATTTTGTTAGGACAAGGAGAC

SEQ ID NO: 16326 - protein, 238 aa, Streptococcus agalactiae; identical to SEQ ID NO: 7454

SEQ ID NO: 16327 - protein, 924 aa, Streptococcus agalactiae
ATGAAAAAGTGGTTAGTTATTGTATCATGTTTTGTAGCATTTTTAGGCTTAGGTGCCTGTGCTAACAAGCAGGATCAAGCCAAAAACGAAAAATTAAAAGTAGTTGTAACCAACTCTATTTTGGCAGATATAACAAAAAATATAGCCGGTAACAAAATCGACTTACATAGTATTGTACCTGTTGGTAAAGATCCTCATGAATATGAGCCATTACCAGCAGACGTTGAAAAAACAACTCAAGCAGACCTTGTTTTTTACAACGGAATTAATCTTGAAACAGGCGGTAATGCTTGGTTTACAAAATTAATAAAGAACGCTAAGAAGAAAGAAAACAAAGATTACTTTGCGGTTAGCGATGGAGTTGATGTTATTTATCTAAATGGTCAAAGCGGAAAAGGTAAAGAAGACCCACATGCTTGGTTGAACCTTGAAAATGGTATTATTTACTCAAAAAATATTGCTAAGCAATTAATTGCTAAAGATCCAAAAAACAAAGCTACTTATGAGAAAAACAGAGATGCTTATGTAGCTAAATTAGAAAAATTGGATAAAGAAGCAAAATCTAAATTTAATGCCATTCCAGCTAATAAAAAATTAATTGTTACTAGTGAAGGTTGCTTTAAATATTTCTCAAAAGCTTATGGAGTTCCATCAGCATACATTTGGGAAATTAACACTGAAGAAGAAGGTACACCAGATCAAATTACTAGCTTAGTTAAGAAATTAAAACAAGTAAGACCTTCAGCTTTATTCGTTGAATCAAGTGTTGACAAGCGTCCTATGAAATCTGTTTCAAGAGAATCAGGTATCCCAATTTACGCAGAAATCTTCACAGACTCAATTGCTAAAAAAGGTCAAAAGGGTGACAGCTACTACGCTATGATGAAATGGAATCTTGATAAGATTGCAGAAGGTTTAGCAAAA

SEQ ID NO: 16328 - protein, 308 aa, Streptococcus agalactiae
MKKWLVIVSCFVAFLGLGACANKQDQAKNEKLKVVVTNSILADITKNIAGNKIDLHSIVPVGKDPHEYEPLPADVEKTTQADLVFYNGINLETGGNAWFTKLIKNAKKKENKDYFAVSDGVDVIYLNGQSGKGKEDPHAWLNLENGIIYSKNIAKQLIAKDPKNKATYEKNRDAYVAKLEKLDKEAKSKFNAIPANKKLIVTSEGCFKYFSKAYGVPSAYIWEINTEEEGTPDQITSLVKKLKQVRPSALFVESSVDKRPMKSVSRESGIPIYAEIFTDSIAKKGQKGDSYYAMMKWNLDKIAEGLAK

SEQ ID NO: 16329 - protein, 504 aa, Streptococcus agalactiae
TTGAACCTTGAAAATGGTATTATTTACTCAAAAAATATTGCTAAGCAATTAATTGCTAAAGATCCAAAAAACAAAGCTACTTATGAGAAAAACAGAGATGCTTATGTAGCTAAATTAGAAAAATTGGATAAAGAAGCAAAATCTAAATTTAATGCCATTCCAGCTAATAAAAAATTAATTGTTACTAGTGAAGGTTGCTTTAAATATTTCTCAAAAGCTTATGGAGTTCCATCAGCATACATTTGGGAAATTAACACTGAAGAAGAAGGTACACCAGATCAAATTACTAGCTTAGTTAAGAAATTAAAACAAGTAAGACCTTCAGCTTTATTCGTTGAATCAAGTGTTGACAAGCGTCCTATGAAATCTGTTTCAAGAGAATCAGGTATCCCAATTTACGCAGAAATCTTCACAGACTCAATTGCTAAAAAAGGTCAAAAGGGTGACAGCTACTACGCTATGATGAAATGGAATCTTGATAAGATTGCAGAAGGTTTAGCAAAA

SEQ ID NO: 16330 - protein, 168 aa, Streptococcus agalactiae; identical to SEQ ID NO: 11700

SEQ ID NO: 16331 - protein, 645 aa, Streptococcus agalactiae
ATGACTCCAAATAAAGAAGATTACCTAAAATGCATTCATGAATTAGGTGAAAAAAACAACAAAATTTCCAATAAGAAAATCGCTGAAATGATGCAAGTCTCGGCTCCTGCCGTGTCAGAAATGATTAAAAAAATGATAAGTGAACAACTGATTGTTAAAGATAAAGATTTAGGATATTATCTTACCAAACAAGGTTTATTAGTTGTTTCTGACCTTTACCGTAAACATCGTCTAGTAGAGGTATTTTTAGTTAACCATTTGCACTATACTGCTGATGATATTCATGAAGAAGCGGAAGTTTTAGAACATACTGTATCAACAACTTTTGTTGATCAATTAGAAAAGTTGTTAGACTTTCCACAATTTTGTCCACACGGTGGGACTATTCCTAAAAAGGGAGAGTTTTTAGTAGAAATTAACCAAATGACATTGGACCAAATTAGTCAGCTTGGCACATATGTTATCAGTCGTGTTCATGATGATTTTCAGCTACTGAAATACCTAGAACAACACCGTTTGCATATCAACGATACCATTGAATTGACACAAATTGACCCTTATGCAAAAACTTATCACATCACCTATAACGATGAAAATCTAACAATCCCTGAGCGTATCGCAAGTCAAATATATGTATCTGCTACA

SEQ ID NO: 16332 - protein, 215 aa, Streptococcus agalactiae
MTPNKEDYLKCIHELGEKNNKISNKKIAEMMQVSAPAVSEMIKKMISEQLIVKDKDLGYYLTKQGLLVVSDLYRKHRLVEVFLVNHLHYTADDIHEEAEVLEHTVSTTFVDQLEKLLDFPQFCPHGGTIPKKGEFLVEINQMTLDQISQLGTYVISRVHDDFQLLKYLEQHRLHINDTIELTQIDPYAKTYHITYNDENLTIPERIASQIYVSAT

SEQ ID NO: 16333 - protein, 687 aa, Streptococcus agalactiae; identical to SEQ ID NO: 7459

SEQ ID NO: 16334 - protein, 229 aa, Streptococcus agalactiae; identical to SEQ ID NO: 7460

SEQ ID NO: 16335 - protein, 267 aa, Streptococcus agalactiae; identical to SEQ ID NO: 7461

SEQ ID NO: 16336 - protein, 89 aa, Streptococcus agalactiae; identical to SEQ ID NO: 2830

SEQ ID NO: 16337 - protein, 552 aa, Streptococcus agalactiae; identical to SEQ ID NO: 7463

SEQ ID NO: 16338 - protein, 184 aa, Streptococcus agalactiae; identical to SEQ ID NO: 2832

SEQ ID NO: 16339 - protein, 1377 aa, Streptococcus agalactiae
ATGTCAAATTATGCCATTATTTTAGCTGCGGGTAAGGGAACTCGCATGAAATCTGATTTACCAAAAGTTATGCATAAAGTATCTGGTATTACCATGCTTGAGCATGTTTTCCGTAGTGTGCAAGCTATTGAGCCAAGTAAAATTGTTACTGTTATTGGACATAAGGCGGAGCTTGTACGTGATGTTTTAGGTGACAAATCAGAGTTTGTAATGCAAACAGAACAGCTAGGAACTGGCCATGCTGTAATGATGGCGGAAGAAGAATTAGCGACATCAAAAGGACATACACTAGTTATTGCAGGTGATACACCCCTGATTACTGGAGAAAGTTTAAAAAACTTAATTGATTTTCATGTCAATCATAAAAACGTTGCAACAATCTTAACAGCCGATGCTGCAAATCCATTTGGATATGGTCGTATTATCCGTAATTCAGATGATGAAGTTACTAAAATTGTAGAACAAAAGGATGCTAATGACTTTGAGCAGCAGGTTAAAGAGATTAATACTGGAACTTATGTTTTTGATAATCAAAGTCTATTTGAAGCACTTAAAGACATTAATACAAATAACGCTCAAGGAGAGTATTATCTAACTGATGTTATTGGAATTTTCAAAGAAGCGGGTAAAAAGGTAGGTGCCTATAAACTTCGTGACTTTGACGAAAGTCTAGGAGTTAATGATCGTGTAGCACTTGCAACTGCTGAAAAAGTGATGCGTCACCGAATTGCACGTCAACATATGGTTAATGGGGTCACAGTGGTTAATCCTGATTCCGCTTATATTGATATTGATGTTGAGATTGGAGAAGAATCTGTAATTGAGCCTAATGTGACTTTAAAAGGACAGACGAAGATTGGTAAAGGTACTTTATTAACCAATGGTAGTTATTTAGTAGATGCTCAAGTCGGAAATGATGTTACCATCACTAATTCGATGGTTGAAGAATCCATTATTTCTGATGGAGTAACCGTAGGCCCTTATGCGCATATTAGACCAGGAACAAGTCTTGCAAAAGGTGTTCATATTGGTAATTTCGTTGAAGTAAAGGGTTCTCAAATAGGTGAGAATACGAAGGCAGGTCATTTAACTTATATCGGCAATGCAGAGGTAGGTTGTGATGTTAACTTTGGCGCAGGGACGATTACTGTCAATTATGATGGACAAAATAAATTTAAAACAGAAATCGGAAGTAATGTCTTTATCGGAAGTAATTCTACTCTGATTGCACCACTTGAAATTGGTGATAATGCTTTAACAGCAGCTGGATCTACCATCACAGATAATGTTCCAATTGATAGCATAGCTATTGGAAGAGGACGTCAAGTCAATAAAGAAGGATATGCCAATAAAAAACCACATCATCCTTCACAAAAG

SEQ ID NO: 16340 - protein, 459 aa, Streptococcus agalactiae; identical to SEQ ID NO: 7466

SEQ ID NO: 16341 - protein, 411 aa, Streptococcus agalactiae
ATGGTTAAAGCACTAGAAACATACATCGTAACAAATGGAAATGGGCGACAAGCGGTTGATTTTTATAAAGATGTCTTTCAAGCGGATTTAGTGAATATGATGACATGGGAAGAGATGGACCCCAACTGTCTTGAAGACCGCAAGGATTTAATCATTAATGCTCAGCTTATTTTTGATGGCATTCGTCTTCAAATCTCGGATGAAAATCCAGATTTCGTGTATCAAGCTGGTAAAAATGTTACAGCCGCTATTATTGTGGGTAGCGTAGAGGAGGCGCGTGAAATTTATGAAAAATTAAAGAAGAGTGCACAAGAAGTTCAGTTAGAGTTACAAGAAACTTTCTGGAATCCTGCTTACGCAAACTTAGTAGACCAATTTGGTGTGATGTGGCAAATTTCAACAGAGTTAAAC

SEQ ID NO: 16342 - protein, 137 aa, Streptococcus agalactiae
MVKALETYIVTNGNGRQAVDFYKDVFQADLVNMMTWEEMDPNCLEDRKDLIINAQLIFDGIRLQISDENPDFVYQAGKNVTAAIIVGSVEEAREIYEKLKKSAQEVQLELQETFWNPAYANLVDQFGVMWQISTELN

SEQ ID NO: 16343 - protein, 234 aa, Streptococcus agalactiae
TTGGATAGTGAAGTTAGCTTCGTCTTACATGACAAAGCAATTATAGCTCAAATGAGTCCTGAGCTAGATTTAGCAACTCCCTCTATTTTATTTGAAACTACTGATATTGACAGTACATATCAAGAATTAACAGCAAATGAGGTTATGACAAATCCTATTGTTGATATGGGGAGTATGAGAGTTTTTAATTTTTCCGATAATGACAATAATTACTTTGCAATCCGTGAAGTAAAA

SEQ ID NO: 16344 - protein, 78 aa, Streptococcus agalactiae
MDSEVSFVLHDKAIIAQMSPELDLATPSILFETTDIDSTYQELTANEVMTNPIVDMGSMRVFNFSDNDNNYFAIREVK

SEQ ID NO: 16345 - protein, 99 aa, Streptococcus agalactiae
ATGATTTCATCAATTGGACAGGTAATGCTCTACGTTAGCAATGTTGAAGCATCAGCAGATTTTTGGAAAAACAAGGTGGGTTTTGAGCGTGTTGAAAAA

SEQ ID NO: 16346 - protein, 33 aa, Streptococcus agalactiae
MISSIGQVMLYVSNVEASADFWKNKVGFERVEK

SEQ ID NO: 16347 - protein, 954 aa, Streptococcus agalactiae; identical to SEQ ID NO: 7471

SEQ ID NO: 16348 - protein, 318 aa, Streptococcus agalactiae; identical to SEQ ID NO: 2840

SEQ ID NO: 16349 - protein, 450 aa, Streptococcus agalactiae
ATGAAGGCACAAGAATTATGGAATAAGTTTAAATCTTTGAATCCTTCAATCGGTGATGAGATAGACGCATGGCAATTTGGAGCAGAACCAGATCTTCTGGCAAAGTTAGTTGTAGATGGGACAAAAACTGCAACGGCCTCTGCCTATGATTTATATGAATTAGATGAGGAAGGGTTACCACAAGTTGGTTCATATGATATTATTTTGGATAGCAATGATGAAGCTATCTGTATTATTGAAATAACTAAAGTTGATATTGTCCCTTTTAAAGATGTCTCTGCAGACCATGCTTTTAAAGAAGGAGAAGGAGATAAAACTTTAGAATGGTGGAGAAAAGCTCACATTGATTTCTTTAAACCTTATTTTGAGGAGTTTGGTTTAATGTTTAGTGAGGACTCTAGGATAGTTTTAGAGGAATTCCAAGTGGTTTACCCAAAGGAGATTAACGAA

SEQ ID NO: 16350 - protein, 150 aa, Streptococcus agalactiae
MKAQELWNKFKSLNPSIGDEIDAWQFGAEPDLLAKLVVDGTKTATASAYDLYELDEEGLPQVGSYDIILDSNDEAICIIEITKVDIVPFKDVSADHAFKEGEGDKTLEWWRKAHIDFFKPYFEEFGLMFSEDSRIVLEEFQVVYPKEINE

SEQ ID NO: 16351 - protein, 696 aa, Streptococcus agalactiae; identical to SEQ ID NO: 7477

SEQ ID NO: 16352 - protein, 232 aa, Streptococcus agalactiae; identical to SEQ ID NO: 2846

SEQ ID NO: 16353 - protein, 234 aa, Streptococcus agalactiae
ATGACATTTGAAGAAATTTTACCAGGTTTAAAAGCAAAGAAAAAATATGTACGTACAGGTTGGGGGGACGCTGAAAATTATGTTCAGTTATTTGATACCCTTGAAGTTAATGGGAAAGTACTACAGGCTACACCTTATTTTCTTATTAATGTTACTGGTGAAGGTGAAGGTTTTTCCATGTGGGCACCAACACCATGTGATGTTTTAGCAGAGGATTGGATCGAGGTCAATGAC

SEQ ID NO: 16354 - protein, 78 aa, Streptococcus agalactiae
MTFEEILPGLKAKKKYVRTGWGDAENYVQLFDTLEVNGKVLQATPYFLINVTGEGEGFSMWAPTPCDVLAEDWIEVND

SEQ ID NO: 16355 - protein, 246 aa, Streptococcus agalactiae; identical to SEQ ID NO: 7481

SEQ ID NO: 16356 - protein, 82 aa, Streptococcus agalactiae; identical to SEQ ID NO: 2850

SEQ ID NO: 16357 - protein, 498 aa, Streptococcus agalactiae
ATGGCTTGCATAATCAGGAGAGCAAGATTAGGAGATGAAGTCAATTTAGCTTATATTCAAACGGAGAGCTGGAAAGCTGCTTTGGGTAAGATACTACCTGAGGATATCATTCAAAAAACTACGGAAATAGAACCTGCCATAACAATGTATCAACAGCTACTACACAAGGAGGTTGGTAAGGGGTATATATTGGAAGTAGATAGCAATCCTCATTGTATGGCTTGGTGGGATAAAAGTAGAGAAGATGGTATGCTTGATTATGCAGAACTCATTTGTATACATAGTCTTAAAGAAGGTTGGGGAAAAGGTTATGGGTCTCAAATGATGAATCATGTACTATCAGAGATACAACAAGCAGGTTATAATAAAGTGATACTTTGGGTATTTACAGAAAATACACGCGCAAGGAAATTTTACGATAGGTTTGGTTTTTCTTTTAAGGGTAAATCAAAAACTTATTTTGAAAAGGAAGAAATGTGTTATGAGAAGATTTTGCAC

SEQ ID NO: 16358 - protein, 166 aa, Streptococcus agalactiae
MACIIRRARLGDEVNLAYIQTESWKAALGKILPEDIIQKTTEIEPAITMYQQLLHKEVGKGYILEVDSNPHCMAWWDKSREDGMLDYAELICIHSLKEGWGKGYGSQMMNHVLSEIQQAGYNKVILWVFTENTRARKFYDRFGFSFKGKSKTYFEKEEMCYEKILH

SEQ ID NO: 16359 - protein, 303 aa, Streptococcus agalactiae
TTGTCCTTATTATTTAATCAATTAAACATCCCATTCTTTATATCATTGGTGAGCCTTTATATCTTTTACTGTGTTTTAATTACATTAAGCTCTTTCTTACACCGTATTTATTCTCAGCAACTAGTAATAGGAATTTTAGATATTGTTAAAGTATTTTATATTGCTGTTTTTAGGTATCTTATCCTACATCCTGTATTAACTTTTGTTAAGGTTGCAAGTGTTATTGGCTATAAAAATAAAAAAATGGTTTGGGGGCATATTACGAGAGAGAAACAAATGAAGGATTTTGAAACAAGTGTTACT

SEQ ID NO: 16360 - protein, 101 aa, Streptococcus agalactiae
MSLLFNQLNIPFFISLVSLYIFYCVLITLSSFLHRIYSQQLVIGILDIVKVFYIAVFRYLILHPVLTFVKVASVIGYKNKKMVWGHITREKQMKDFETSVT

SEQ ID NO: 16361 - protein, 972 aa, Streptococcus agalactiae
ATGGCATTATTTTTTACCTTCCTAAAGGTATCTCAAGTCATTTTCTTAGTATTATTGATTGCCTATGCCAGCTTTTTAGTGATTTCATTAGTCATTGGAGGTGTTCATCTCTATGAAAAAAATGAGCGCAAAAAAAGTTTAACTAGAAATAAAGAAAAAATTCCAATTTCAATTATTGTACCAGCCTATAATGAATCAACAACCATTGTGAGTTCGATTGATTCGTTATTGCACCTTGATTATGAAGCGTATGAAATTATCGTTGTGGATGACGGTTCCAGTGACAATACTTCAGATGTTCTCAAGGAAGAGTTTGCATTAATGAAAATCTCGAATACGATTGATTCAATTATTGCTACTCAAACTTGTAAAGATGTCTTTCAGAGACAGGTTGGTAAGGTTAAACTGACACTCATTGTTAAAGAAAATGGTGGCAAAGGGGATGCCTTAAATATGGGGATCAATGCTGCTAATTACGATTATTTTCTATGTCTAGATGCAGATTCTATGTTGCAGGTAGATTCTTTGAGTCAAATTAGCAAATCCATACAGGTAGATCCGACGGTTATAGCAGTGGGAGGGCTTGTCCAAGTTGCCCAAGGTGTTAAGATTGAGCAGGGGAAAGTAGCATCTTATCGTTTGCCTTGGAGAATTATTCCTTGTGCACAAGCACTTGAGTATGATTCATCATTTTTAGGAGCTCGAATCTTTTTAGACTATTTAAGAGCTAATTTAATTATTTCGGGGGCTTTCGGTCTTTTTAAGAAAGACCTTGTTAAAGCGGTGGGAGGATATGACACCCAGACTCTAGGAGAAGATATGGAGTTGGTGATGAAATTACATTTCTTCTGTCGTAATAATAATATTCCTTATCGTATTTGTTATGAAACAGATGCTGTTTGTTGGAGTCAAGCACCAACGAATTTAGGGGATTTACGTAAACAGAGACGCCGATGGTATCTTGGCTTGTAC

SEQ ID NO: 16362 - protein, 324 aa, Streptococcus agalactiae
MALFFTFLKVSQVIFLVLLIAYASFLVISLVIGGVHLYEKNERKKSLTRNKEKIPISIIVPAYNESTTIVSSIDSLLHLDYEAYEIIVVDDGSSDNTSDVLKEEFALMKISNTIDSIIATQTCKDVFQRQVGKVKLTLIVKENGGKGDALNMGINAANYDYFLCLDADSMLQVDSLSQISKSIQVDPTVIAVGGLVQVAQGVKIEQGKVASYRLPWRIIPCAQALEYDSSFLGARIFLDYLRANLIISGAFGLFKKDLVKAVGGYDTQTLGEDMELVMKLHFFCRNNNIPYRICYETDAVCWSQAPTNLGDLRKQRRRWYLGLY

SEQ ID NO: 16363 - protein, 2139 aa, Streptococcus agalactiae
ATGAAAAAATATCTAAGTATTGTAGCCCTTTTAACTATTTTGTTTAGCTCTATTTATTATTTGTATTACTTTGATGGTAGTTTGTATTTACCAAAGGGCTTATTAAAAGAAAATACAAGAACTAACTTTGTTGTTAAAGGTGATACTGTACTTCACAAGCCCACCAATAAACCTTTTGTTGTTAAAGGAGTAGACGTTGAGTCTTCCTTAGCGGGTTATCATCACAACGATTTTCCTATTACTCAAAAAACGTATCGTGAATGGTTCCATTTAATTTCCAACATGGGGGCAAATACTGTAAGAGTCAAGGTACCGATGAATGTTGCATTTTACGATGCCTTATATCACCACAACAAAGAATCAAAGAGGCCACTGTATTTGTTGCAAGGAATACGTATAGATTCTTATCGCAATAATGCTTCTATAACAGCTTTTAATGATAATTATAGGGGGTATTTAAAACGAGAAGCAAAAGGCGTTGTGGATATTCTCCATGGGCGTAAGCAAGTATGGAATACTGATTTTGGTAGCCGTCATTATCATTATGATCTTAGTCCTTGGGTACTTGGTTATGTCGTAGGGGATGATTGGAATAGTGGTACTGTCGCTTATACTAATCATCAAGAGAAAAAAACGCAATATAAAGGACGTTATTTTAAAACTTCTGTGGCAGCTAATCCATTTGAGGTCATGCTAGCTCAAGTAATGGATGAATTGACACATTATGAGACAGCTAAATATGGTTGGCAACATTTGATTAGTTTTTCAAACTCACCAACAACAGACCCTTTTCATTATCGAAAACCATTTGAGGCACAGGCTCCTAAATACGTACAACTAAATGTAGAAAATATTCAAGCTAATTCAAATGTTAAAGCAGGTATGTTTGCAGCATATAAAGCTATTGATTTCCATCCTCGATACAAGGATTATCTATTATTTGATAAAGAGAATATCAGTAAAGAAGATAGACAAAAGATTAAAGAACTTTCTTTGTCACAGGGATACGTTAAACTGCTAAATGCTTATCACAAAATCCCTGTTCTAGTCACGGGTTATGGCTATTCGACAGCGAGAGGTATTGCCCAAAAAGAAATTGATAAACGTCCTCTGCCGATTAATGAAAAAGAACAAGGTCAGCGTTTACTAGAAGATTATGAATCTTTTATATCATCCGGTAGTTTTGGAGCGACTATCAATGCATGGCAAGACGATTGGAATGCAAGGGCGTGGAATACATCTTTCGCCACAAATAAACATAGTCAATTCCTATGGGGGGATGCACAAGTATTTAATCAAGGTTATGGTTTATTAGGCTTTAAAAACGCAAAACATCATTATCAAGTTGATGGTAAAAGAGGCAAAGGAGAGTGGAAACATCCTCTGATGACTAGTGCAACAGGAGATGACTTATATGCTAGCAGTGATGAAAGCTATCTCTACCTTGCGATTAAAACAAAACCTGAAAAACTAAAAGAAAAACGATTATTACCAATAGATATTACACCAAAATCTGGTAGTAGAAAAATGAATGGTAGTAAGGTCACATTTTCTAAATCTAGTGACTTTGTATTGTCTATTGATCCAAATGGCAAGTCTGAATTATTTGTCCAAGAGCGCTATAATGCCTTAAAAGCGAACTATCTTCGACAGCTTAACGGTAAAGATTTTTATGCTTTCCCACCAAAGAAGAACAGTAGTAATTTTGAGCAGATAAATATGGTATTGAGAAATACAAAGATTGTTGAAGACATGGAAAAAGTAAAAGCAACAGAGAGGTTCTTACCAACTCATCCTACTGGTCTTCTCAAAACAGGAACAACTGATAGGCACCAAAAAACATTTGATTCACAAACAGATATTTCGTTTGGAAAGGACTTTATAGAGGTCAGAATTCCGTGGCAGTTGTTGAATTTTTCTGATCCATCATCTCAAAAAATTCACGATGATTACTTTAAACATTATGGTGTGAAGGAGTTAGAAATTGAGAGCATTGCTTTAGGATTAGGTGCTAATAGCAAAGAAAACACACTGATAAAGATGGCAGATTATCGTTTGAAAAATTGGGAGAGACCCGATACCAAAACCTTTTTAAAAGACTCCTATTATAGTATTAAGAAAGAATGGTCTAAAGAAAGA

SEQ ID NO: 16364 - protein, 713 aa, Streptococcus agalactiae
MKKYLSIVALLTILFSSIYYLYYFDGSLYLPKGLLKENTRTNFVVKGDTVLHKPTNKPFVVKGVDVESSLAGYHHNDFPITQKTYREWFHLISNMGANTVRVKVPMNVAFYDALYHHNKESKRPLYLLQGIRIDSYRNNASITAFNDNYRGYLKREAKGVVDILHGRKQVWNTDFGSRHYHYDLSPWVLGYVVGDDWNSGTVAYTNHQEKKTQYKGRYFKTSVAANPFEVMLAQVMDELTHYETAKYGWQHLISFSNSPTTDPFHYRKPFEAQAPKYVQLNVENIQANSNVKAGMFAAYKAIDFHPRYKDYLLFDKENISKEDRQKIKELSLSQGYVKLLNAYHKIPVLVTGYGYSTARGIAQKEIDKRPLPINEKEQGQRLLEDYESFISSGSFGATINAWQDDWNARAWNTSFATNKHSQFLWGDAQVFNQGYGLLGFKNAKHHYQVDGKRGKGEWKHPLMTSATGDDLYASSDESYLYLAIKTKPEKLKEKRLLPIDITPKSGSRKMNGSKVTFSKSSDFVLSIDPNGKSELFVQERYNALKANYLRQLNGKDFYAFPPKKNSSNFEQINMVLRNTKIVEDMEKVKATERFLPTHPTGLLKTGTTDRHQKTFDSQTDISFGKDFIEVRIPWQLLNFSDPSSQKIHDDYFKHYGVKELEIESIALGLGANSKENTLIKMADYRLKNWERPDTKTFLKDSYYSIKKEWSKER

SEQ ID NO: 16365 - protein, 1431 aa, Streptococcus agalactiae
ATGAGAGGGAAGGTTATTTACGGCACAACCCTTATAGGTCTTTTTCTATTCTTATTTTTCTATTTTTGGATTCCTAAGCATCACATCGAGAGAATACATCATCATCGTATAAAGCAGGTAGATGCGAAGAGTGATTTAACAGGATTTAAAACCCATTTGCCCATTATCAGCATTGATACAAAGCAACAAGTTATTCCTCTTGTTACAAAAGAAGGCGGAAAATATGTCAAAGCTAGGGATAATATTAATGTTGATATCGAATTACGGGATTCTCCAAGTAGATCACATCATTTATCAGAAAAGCCGAGAATTAGGACAAAAGGGTTAATATCATATAGAGGAAATTCCTCTCGTTACTTTGATAAGAAGTCATTGAAAGTTAAGTTTGTTACTAATAAGTTAAAGGAAAAGAAGCATCGATTAGCAGGAATGCCTAAAGAATCGGAGTGGGTATTGCATGGTCCCTTTCTAGACAGAACATTATTAAGAAATTATCTGAGTTATAATATTGCTGGTGAGATTATGTCCTATGCCCCAAACGTTCGCTACTGTGAGTTATTTGTCAATGGTGAGTATCAGGGAGTATATCTAGCAGTTGAGAATATCGAACAAGGTGAGCAACGAGTTCCCATTGAAAAAAGTGATAAAAAGTTGCATAAAACACCTTATATCGTTGCTTGGGATCGTGAACATAAGGCAAAGCAAAAGTTAGATAACTATGTACATTATACACACCAGTCTGGTATCTCAGCTCTTGATGTGAAATATCCAGGTAAACAAAGATTGACATCAAAACAATTAGAGTTTATTAATAAGGACATCAATCATATTGAAAAAGTCCTTTATTCTTATGATTTTTCACAATATCCTAAATATATTGATAGAGAATCATTTGCAAATTATTTTGTCATCAATGAATTTTTTAGAAATGTGGATGCGGGTAAATTTTCAACCTATCTATATAAAGATCTTCGTGATAGAGCAAAACTAGTAGTTTGGGATTTTAATAATGCTTTTGATAATCAAATTGAAGGACGTGTTGATGAGGCAGATTTTACCTTGACGGATGCACCGTGGTTCAATATGCTCATTAAGGACAAAGCATTTATAGACCTGGTTGTTCATCGCTATAAAGAATTACGAAAGGGAGTTCTAGCGACAGAATATTTATCTAATTACATAGACGAGACAAGGCATTTTTTAGATCCAGCTATTGATCGAAATTATAAAAAATGGGGCTATGTCTTTGATTTAAAGAATACTGATCCAAGGAATTATTTGATTCCTACTGAACGCAATGTGACAAGTTATCACAAATCAGTAGAACAATTAAAAGATTTTATCAAAAAGCGTGGCAGATGGATGGATAGAAATATTGAGACCTTGTATCAATATAGTGCACCATCGAAAAATACTAATACTTTACTGGAG

SEQ ID NO: 16366 - protein, 477 aa, Streptococcus agalactiae
MRGKVIYGTTLIGLFLFLFFYFWIPKHHIERIHHHRIKQVDAKSDLTGFKTHLPIISIDTKQQVIPLVTKEGGKYVKARDNINVDIELRDSPSRSHHLSEKPRIRTKGLISYRGNSSRYFDKKSLKVKFVTNKLKEKKHRLAGMPKESEWVLHGPFLDRTLLRNYLSYNIAGEIMSYAPNVRYCELFVNGEYQGVYLAVENIEQGEQRVPIEKSDKKLHKTPYIVAWDREHKAKQKLDNYVHYTHQSGISALDVKYPGKQRLTSKQLEFINKDINHIEKVLYSYDFSQYPKYIDRESFANYFVINEFFRNVDAGKFSTYLYKDLRDRAKLVVWDFNNAFDNQIEGRVDEADFTLTDAPWFNMLIKDKAFIDLVVHRYKELRKGVLATEYLSNYIDETRHFLDPAIDRNYKKWGYVFDLKNTDPRNYLIPTERNVTSYHKSVEQLKDFIKKRGRWMDRNIETLYQYSAPSKNTNTLLE

SEQ ID NO: 16367 - protein, 656 aa, Streptococcus agalactiae
ATGAAAGACCTATTACGAAATAGTCTAGAGCAAAGTGGAAATTTAAGTTTTCAAGATATGATTTTACATATTCTTGTAGCAGCTTTATTGAGTGTAGTTATTTATGTTTCCTATGCTTATACGCATAGTGGAACTGCCTATAGTAAAAAGTTTAATGTTTCATTAATGACATTGACGGTCTTGACTGCAACAGTAATGACCGTTATTGGTAATAATGTAGCCTTGTCATTGGGTATGGTCGGTGCCTTGTCAGTTGTTCGTTTTAGGACAGCCATAAAAGATTCAAGAGATACAGTTTATATTTTTTGGACCATAGTTGTTGGTATCTGTTGTGGTGTCGGTGACTATGTGGTAGCTGCATTAGGAAGTAGCGTTATCTTTATCTATATGGGTTATGGGACGTGTAAAACGAGAATCGTATGTATTGATTGTGAAGTGCGATAGAACACTAGAATGATTTAGAAGGAATTTTCTTCCATATTTGACGGAAAAGCTGTTCAGCGTGTAAAAATTAACAACTAATACTATGAATGATTTTCGAATCTCTAGAAAGATTCGATAAGCAACTCCATGTAGATATCAGTTAACTGAAAAAGTGTACCAATTGGGAAATTGATTATTTCAACATTGTTAGCCAAAGCGACGAAATCAATGGG

SEQ ID NO: 16368 - protein, 225 aa, Streptococcus agalactiae
  VARIANT 130, 136, 143, 162: Xaa = Any Amino Acid
MKDLLRNSLEQSGNLSFQDMILHILVAALLSVVIYVSYAYTHSGTAYSKKFNVSLMTLTVLTATVMTVIGNNVALSLGMVGALSVVRFRTAIKDSRDTVYIFWTIVVGICCGVGDYVVAALGSSVIFILXWVMGRXKNENRMXLIVKCDRTLEVDLEGIFFXYFDGKAVQRVKNSTTNTIEMIFEISRKDYDKQLHVDNQLTEKVYQLGNIDYFNIVSQSDEING

SEQ ID NO: 16369 - protein, 609 aa, Streptococcus agalactiae; identical to SEQ ID NO: 7495

SEQ ID NO: 16370 - protein, 203 aa, Streptococcus agalactiae; identical to SEQ ID NO: 7496

SEQ ID NO: 16371 - protein, 1335 aa, Streptococcus agalactiae
ATGGTAAAAAAAGGCTTTTTAACGGGATTACTCTTATTTGGTATCTTCTTTGGTGCAGGGAACCTCATTTTTCCACCAGCATTAGGTGTAGCATCTGGACAAGATTTCTGGCCAGCGATTTTAGGATTTTGTTTGTCAGGAGTTGGATTAGCTATTATTACCCTCCTACTAGGCACACTAACTAATGGTGGTTATAAGACAGAGATGTCGGAAAAATTTAGTCCGTGGTTTTCTTTAACATTTTTAGTTATACTCTACCTAACTATTGGTCCACTTTTTGCTATTCCTAGAACAGCAACGGTTTCTTTTGAAATTGGGGTTGCTCCAATTGTAGGGCATAGTCCGATTGCTCTTTTGTGTTTTACAGCCTGTTTTTTTGCTGCAGCTTATTATCTCGCTATTAGACCAAATGGTATATTAGATAGTGTTGGAAAAATCTTAACGCCTGTTTTTGCCTTTTTAATTCTCTCTTTGGTTGTTGTTGGAGCTATTGCTTATGGAAACTTGGAGAGTGCTAAGGCGAGTGCTGACTATGCAGGAAAAGCGTTTGGAAGTGGTGTCTTAGCAGGCTATAATACACTTGATGCACTTGCAGCAGTTGCTTTTTGTCTAGTAGCAACAGAAACGCTTAAAAAGTTTGGTTTTAAAACTAAAAAAGAATATTTATCAACCATTTGGATTGTTGGAATTGTTACTAGTTTAGCATTTAGTATTTTATATATTGGCTTAGGTTTTTTAGGGAATAAGTTTCCTGTCCCAGCTGATATTTTAGCTGACCCAAATGTTAATAAAGGAGCTTATGTATTATCACAAGCATCTTATAAATTATTTGGAAATTTTGGTCGTTATTTCTTGAGTATTATGGTAACATTGACATGCTTTACAACAACAGTTGGGCTTATTGTGTCAGTATCTGAATTTTTTGATAAGAACTTTCGTTTTGGGAATTATAAATTATTTGCTACTGTTTTTACTTTGATTGGCTTTTTAATTGCTAATCTTGGTTTAAATGCTGTAATTACTTTTTCAGTTCCTGTGCTAACTTTATTGTATCCGATTGTTATTGTTATTGTCTTAATTATTTTGATTAATAAGTGGTTGCCGCTTTCAAAAAAGGGAATGTCTTTGACAATTGGTCTTGTCACTTTAGTGTCGTTTGTTGAGGTTCTAGCGGGACAATGGCAAGAAAAAACATTAACTCAGTTAGTTGGATTCCTCCCCTTTCATACTATTTCAATGGGGTGGCTAGTTCCAATGTTGATTGGTATAGTATTTTCTTTGGTGCTGTCAGATAAACAAAAAGGCCAAGCATTTGATTTAGAGAAATTTGAAGGA

SEQ ID NO: 16372 - protein, 445 aa, Streptococcus agalactiae
MVKKGFLTGLLLFGIFFGAGNLIFPPALGVASGQDFWPAILGFCLSGVGLAIITLLLGTLTNGGYKTEMSEKFSPWFSLTFLVILYLTIGPLFAIPRTATVSFEIGVAPIVGHSPIALLCFTACFFAAAYYLAIRPNGILDSVGKILTPVFAFLILSLVVVGAIAYGNLESAKASADYAGKAFGSGVLAGYNTLDALAAVAFCLVATETLKKFGFKTKKEYLSTIWIVGIVTSLAFSILYIGLGFLGNKFPVPADILADPNVNKGAYVLSQASYKLFGNFGRYFLSIMVTLTCFTTTVGLIVSVSEFFDKNFRFGNYKLFATVFTLIGFLIANLGLNAVITFSVPVLTLLYPIVIVIVLIILINKWLPLSKKGMSLTIGLVTLVSFVEVLAGQWQEKTLTQLVGFLPFHTISMGWLVPMLIGIVFSLVLSDKQKGQAFDLEKFEG

SEQ ID NO: 16373 - protein, 1995 aa, Streptococcus agalactiae
ATGACAGAAAAAAAATCATTTTACATTACTACCCCAATTTATTACCCATCAGGTAAATTGCACATCGGTTCTGCCTATACAACGATAGCATGTGATGTTTTGGCACGTTACAAACGCATGATGGGCTTTGATGTTCAGTATTTGACTGGTCTTGATGAGCATGGTCAGAAAATTCAACAAAAGGCTGAAGAAGCAGGCATTACACCACAGGAATATGTTGATGGCATGGCTGAAAGTGTCAAAACATTATGGGAACTTTTAGATATTTCCTATGACAAATTCATCCGTACAACAGATACTTACCATGAAGAAGCGGTTGCTAAAATTTTTGAACAATTGTTGGCACAAGGGGACATCTATCTTGATGAGTATACCGGATGGTATTCTGTTTCAGATGAAGAATTTTTTACTGAAAGCCAATTAGCAGAAGTTTATCGTGACGAAAACGGTAATATGATTGGTGGTGTTGCGCCATCTGGTCATGAAGTTGAAAAAGTTTCTGAAGAATCTTATTTCTTCCGCATGAGCAAATATGCAGATCGTTTAAAAGCGTACTACGCTGAGCATCCAGAATTTATTCAGCCAGATGGTCGTATGAATGAAATGCTTAAAAACTTTATAGAACCAGGTTTAGAAGATTTAGCAGTGTCTCGTACAACTTACACATGGGGAGTTCAGGTACCATCAAATCCAAAACATGTTATTTATGTCTGGATTGATGCTTTGATGAACTATATTTCTGCTCTTGGTTATGGTTGGTCTGACGATCTCAGTCAATATCATAAATTTTGGCCAGCAGACATTCATATGATTGGTAAAGATATTCTTCGTTTCCACTCTATTTATTGGCCTATCATGTTGATGGCGCTGGATTTGCCATTACCAAAACGTCTAGTTGCTCATGGTTGGTTTGTGATGCAAGATGGTAAAATGTCTAAATCAAAAGGGAATGTCGTTTATCCAGAAATGTTAGTAGAGCGTTTTGGTCTTGATCCACTCCGTTATTATCTCATGCGTTCATTGCCTGTTGGTTCAGACGGAACTTTTACGCCAGAAGATTATGTTGGACGTATTAACTATGAACTTGCTAATGATTTAGGAAACCTTCTCAACCGCACTATTGCTATGGTTAACAAGTATTTCGATGGAGAAGTACCAAGGTTTGCTGTTGCAACTGACTTTGATGCCGATTTAGCTTCTGTTGCGACAGATAGTATTGAAAACTATCATAAACAAATGGAAGCGGTGGATTTCCCACGTGCCCTTGAAGCTGTATGGAATCTTATTTCACGAACTAACAAATATATTGATGAAACAGCACCGTGGGTACTTGCAAAAGACGAAACAGATCGTGATAAGTTAGCAGCTGTAATGAGTCATTTAGTTGCTAGTCTACGTGTTGTTGCTCACCTCATTCAACCGTTCATGATGGAAACTTCCGATGCCATTATGGAACAACTTGGTTTAGGGGCAACATTCGATCTTGAAAAATTGACTTTTGCTGATCTACCAGAAGGTGTTCGAGTTGTTGCAAAAGGTTCACCAATTTTCCCAAGGTTGGATATGGAAGACGAAATTACTTATATCAAAGAACAAATGAATGCTGGAAAAGCACCAGTGGAAAAGGAGTGGGTTCCTGAAGAAGTTGAATTGACATCAAGCAAAGGTCAAATCAAGTTTGAGGATTTTGACGCTGTTGAAATCCGCGTTGCAGAAGTAATTGAAGTTGAGAAAGTGGAAGGTTCTGATAAACTTCTTCGTTTCCGTCTAGATGCTGGTGATGAGGGCCATCGTCAAATCTTATCAGGGATTGCAAAATTTTACCCAAATGAACAAGAGTTAGTAGGGAAAAAACTCCAAATTGTTGCTAACCTCAAACCACGTAAAATGATGAAAAAATATGTCAGTCAAGGCATGATTCTCTCAGCAGAACATGATGGTAAATTGACAGTGTTGACGGTCGATTCAGCAGTGGCAAATGGATCAATTATTGGT

SEQ ID NO: 16374 - protein, 665 aa, Streptococcus agalactiae
MTEKKSFYITTPIYYPSGKLHIGSAYTTIACDVLARYKRMMGFDVQYLTGLDEHGQKIQQKAEEAGITPQEYVDGMAESVKTLWELLDISYDKFIRTTDTYHEEAVAKIFEQLLAQGDIYLDEYTGWYSVSDEEFFTESQLAEVYRDENGNMIGGVAPSGHEVEKVSEESYFFRMSKYADRLKAYYAEHPEFIQPDGRMNEMLKNFIEPGLEDLAVSRTTYTWGVQVPSNPKHVIYVWIDALMNYISALGYGWSDDLSQYHKFWPADIHMIGKDILRFHSIYWPIMLMALDLPLPKRLVAHGWFVMQDGKMSKSKGNVVYPEMLVERFGLDPLRYYLMRSLPVGSDGTFTPEDYVGRINYELANDLGNLLNRTIAMVNKYFDGEVPRFAVATDFDADLASVATDSIENYHKQMEAVDFPRALEAVWNLISRTNKYIDETAPWVLAKDETDRDKLAAVMSHLVASLRVVAHLIQPFMMETSDAIMEQLGLGATFDLEKLTFADLPEGVRVVAKGSPIFPRLDMEDEITYIKEQMNAGKAPVEKEWVPEEVELTSSKGQIKFEDFDAVEIRVAEVIEVEKVEGSDKLLRFRLDAGDEGHRQILSGIAKFYPNEQELVGKKLQIVANLKPRKMMKKYVSQGMILSAEHDGKLTVLTVDSAVANGSIIG

SEQ ID NO: 16375 - protein, 873 aa, Streptococcus agalactiae
ATGGTTAATACAAAAACACTTCTCCCCTACAAAACTATGCCGGTTTGGACTGCACAGTCTATTCCAAAGGCATTTTTAGAAAAGCATAATACTAAGGAAGGCACCTGGGCAAAACTAACCATTCTAAGTGGTTCTTTAGTATTTTACCAGTTATCTCCTGATGGAGAGGAAATCTCGCGGCATATTTTTGATGCTAGTAGTGATATTCCTTTTGTTGATCCACAAGTCTGGCATAAAGTTTCGCCGAATAGTCCAGACTTAAGTTGCTATCTAACTTTTTACTGCCAAAAAGAAGATTACTTCCATAAAAAATATGGTCTCACGCGCACACATTCTGAGGTTATCGCCAGTGCACCTCTCTTATCTGAGAAGAGTAATATATTAGACCTTGGGTGTGGTCAAGGGCGAAACTCACTTTATTTATCGCTGCTGGGACATCAAGTGACTTCTGTCGATTCAAACGGACAGAGCCTTGTAGCTTTAGAAAATATGGCATTAGAAGAAGAGCTTCCTTACAATATAAAAAGGTATGATATTAATACTACTGCTATTGAAGGGCACTATGATTTTATTTTATCAACTGTGGTATTTATGTTTTTAAATCCCGACTGCATTTCTGATATTATTTTACAAATGCAATCACATACTCAGATTGGAGGATACAATCTTATCGTTTCTGCTATGGATACCGCTGAAAATCCTTGCCCGCTTCCATTCCCTTTTACCTTCAAAGAAGGACAATTGAAATCTTATTACAATGACTGGGAAATCATCAAATATAATGAAAATTTAGGTGAATTGCACAGGGTGGATGAAAACGGTAATCGCTTAAAATTACAGTTTGCGACTTTATTAGCTCGAAAATTAAGATCA

SEQ ID NO: 16376 - protein, 291 aa, Streptococcus agalactiae
MVNTKTLLPYKTMPVWTAQSIPKAFLEKHNTKEGTWAKLTILSGSLVFYQLSPDGEEISRHIFDASSDIPFVDPQVWHKVSPNSPDLSCYLTFYCQKEDYFHKKYGLTRTHSEVIASAPLLSEKSNILDLGCGQGRNSLYLSLLGHQVTSVDSNGQSLVALENMALEEELPYNIKRYDINTTAIEGHYDFILSTVVFMFLNPDCISDIILQMQSHTQIGGYNLIVSAMDTAENPCPLPFPFTFKEGQLKSYYNDWEIIKYNENLGELHRVDENGNRLKLQFATLLARKLRS

SEQ ID NO: 16377 - protein, 693 aa, Streptococcus agalactiae; identical to SEQ ID NO: 7503

SEQ ID NO: 16378 - protein, 231 aa, Streptococcus agalactiae; identical to SEQ ID NO: 2874

SEQ ID NO: 16379 - protein, 1215 aa, Streptococcus agalactiae
ATGCACAGCACTATTTATAAATGTCATCATTGCCGTTATCTAATTTATAAAAGTTTTAAAGATATCTTTCCTTTTGCTCTCATTTTTTCTTGGATTGAAATCCTTCAAAAACTCGTTATATCAGATGATTCTTTTTTAGCTCAAACAACAAAGTCCAGTATTTATAAAAACGAGTGGTTATATACGGTTTCCAATACTCTTTATGATTTATCTCATTTACTAATCTACTTTATGGCTAGTTATTTTGTGGCTAGTTTAGTATGGAGAGGCTTATCTAACCAAACTAAAGAAAGTTTTTCTGCAAGTTTACTTGGCTTTGCCACTGTTTGGTTGCTTCTAACTTCAGTTGTTCCAGGTACAGATTATCACTATCCTAGCCAACCCATTTGGCTTATGCTAGCTTTGATTTCGTATCTTTTTATCTTTTTAACTCGACTGCTTCAAAATCGACATCATATTTTCCAGTATAGTATGTTAGCTATACTACTATTAATCTCTTCTATTTTGTCACATATCTTATATAGTTATCCTAATATTGATTTAGAATACCTTATACAAAATCACTTTTCTCAATGGCTGGGTGATGGGCCACATCAATTAATTCCTATTATGCTTTGGTCTATCTTAGCTATTTTTCTAACCTTATCAGGTCTTTTTGTACCAGATATTTTATTTCGTCCTTACTCCTATTTTTCAGTAGTTAGCGAAAATTTAAATGCTGCCTTGAGCCAACATACAGATAAAATCCCTTATCTGTATACCTTTTATACTGTTAAAAATAGCTTTGCTATGTTTGGCGGTATTGGAATCCTATTATCCTTATTTTTAGCAGTTTTATATGAAAGTAGAAAACTACAATCGAAGAATTACTATAAATTGACATTACTGACCTTAACTCCTCTTATTTTTGATCAAAATTTACCATTTTTAGTAGGTCTACCTGTCATTTTACAACCAATATTATTCATTCCGATGGTATTAACAACTATCTTTGCAGAGGCTTTTGGAGCTCTTATGCTCTACCTAAAATTTGTCGACCCTGCAGTTTATACTGTCCCAAGTGGTACACCTAGTCTACTATTTGGCTTTCTTGCTTCAAATGGGGATTGGCGTTACCTTCCAGTCACTGCAATTATTCTAGTTGTTGGCTTCTTTATTTATCGTCCGTTTGTCAAAATCGCTTTCGCTAAGGAGGAGCAATATGAAAAAATTACT

SEQ ID NO: 16380 - protein, 405 aa, Streptococcus agalactiae
MHSTIYKCHHCRYLIYKSFKDIFPFALIFSWIEILQKLVISDDSFLAQTTKSSIYKNEWLYTVSNTLYDLSHLLIYFMASYFVASLVWRGLSNQTKESFSASLLGFATVWLLLTSVVPGTDYHYPSQPIWLMLALISYLFIFLTRLLQNRHHIFQYSMLAILLLISSILSHILYSYPNIDLEYLIQNHFSQWLGDGPHQLIPIMLWSILAIFLTLSGLFVPDILFRPYSYFSVVSENLNAALSQHTDKIPYLYTFYTVKNSFAMFGGIGILLSLFLAVLYESRKLQSKNYYKLTLLTLTPLIFDQNLPFLVGLPVILQPILFIPMVLTTIFAEAFGALMLYLKFVDPAVYTVPSGTPSLLFGFLASNGDWRYLPVTAIILVVGFFIYRPFVKIAFAKEEQYEKIT

SEQ ID NO: 16381 - protein, 840 aa, Streptococcus agalactiae
ATGAAAAAATTACTTAGATGGCTTCCTCCTGTACTTTTCATTATTATCCTTATAGGAATGACTATCTTAGGTAAGTCCTATATCAATAAAGTAACAGCTCACAAAATAAAACTCTATAACTCTCGAATGACTCCTACTATTTTAATTCCAGGATCCAGTGCTACTCAAGAACGATTTAACAGCATGTTAGCACAGCTCAACCAAATGGGAGAAAAACATAGCGTTTTAAAGTTAACTGTCAAAAAAGACAATAGCATTATCTACAATGGACAAATTAGCGGCAATGACCACAAACCCTACATTGTCATTGGATTTGAAAATAATGAAGATGGTTATAGTAACATCAAAAAACAAACAAAATGGCTACAGATTGCTATGAATGATCTTCAGAAGAAATATAAATTTAAACGTTTTAACGCTATCGGTCATTCAAATGGTGGCTTATCATGGACTATTTTCCTAGAAGATTATTACGACTCTGATGAATTTGATATGAAATCATTGTTAACAATGGGAACACCTTTTAACTTTGAAGAAAGTAACACCTCAAATCATACTCAAATGCTTAAAGATTTAATCAGTAATAAAGGAAATATTCCATCAAGTCTCATGGTATACAATTTGGCAGGAACTAATTCATATGATGGTGATAAAATTGTTCCATTTGCTAGTGTGGAGACTGGTAAATATATTTTCCAAGAAACCGCTAAACACTATACCCAACTAACAGTAACTGGTAATAATGCTACACATTCTGACTTGCCTGATAATCCTGAAGTTATCCAATATGTCGCAGAAAAAATTCTTAAAAATGAGAAAGGTAAATTACCAAAACCTCAC

SEQ ID NO: 16382 - protein, 280 aa, Streptococcus agalactiae; identical to SEQ ID NO: 2878

SEQ ID NO: 16383 - protein, 825 aa, Streptococcus agalactiae
ATGAAACTCATTTCATGGAATATTGATTCCCTCAATGCGGCATTAACAAGTGAATCAACACGTGCTTTAATGTCACGCCAAGTTATTGATACTTTAGTTGCTGAAGATGCCGACATCATTGCGATTCAAGAAACTAAACTGTCTGCCAAAGGACCTACTAAAAAACATTTGGAAGTACTTGAAACTTACTTCCCAGAATATGATTTGGTTTGGCGATCATCAGTCGAACCTGCTCGTAAGGGCTATGCTGGTACAATGTTCTTATATCGTAAAGGGTTAAATCCTATTGTTAGCTTCCCTGAAATCGATGCTCCTACTACAATGGATAATGAAGGTCGCATTATTACTCTCGAATTGGAAAACTGCTATATCACACAGGTCTATACTCCAAATGCAGGTGATGGCCTAAAGCGCTTAGCTGACCGTCAAATATGGGATATTAAATATGCTGAGTATTTAGCAACATTGGATAGTCAAAAACCTGTTCTAGCAACAGGTGACTATAACGTAGCCCACAAGGAAATAGACCTAGCTAATCCTAGCAGTAATCGTCGTTCTGCTGGATTCACAGCTGAAGAGCGCCAAGGCTTTACAAATCTACTAGCCAAAGGTTTTACAGATACTTTTCGTTACCTTCATGGCGATGTTCCAAATGTTTATAGCTGGTGGGCACAACGAAGTCGTACATCCAAAATCAACAATACAGGGTGGAGAATTGATTATTGGCTAACAAGTAACCGTGTCGCAGATAAAATTACCAAGTCAGAAATGATTCATTCTGGTGATCGTCAAGATCATACACCAATTATTTTGGAGATTGAACTA

SEQ ID NO: 16384 - protein, 275 aa, Streptococcus agalactiae; identical to SEQ ID NO: 2880

SEQ ID NO: 16385 - protein, 354 aa, Streptococcus agalactiae
ATGTATACGTTTTATGAATACCCCAAATGTACCACTTGTCGTTCAGCAAAAAAAGAGTTAACTGAACTCGGCTTGACTTTTGAAGCGATTGATATAAAAAGCAATCCTCCCAAAGCTTCGTTATTAAAAGAATTGTTAGAGAATTCGCCTTATGACCTTAAAAAGTTTTTCAATACTTCAGGAAATTCTTACAGAGAATTAGGCTTAAAAGATAAATTTGATGATTTAACTCTTGACCAAGCTTTGGACTTATTGGCATCGGATGGAATGCTTATTAAGCGTCCATTGCTAGTTAAAGATAATAAAATTCTTCAGATTGGCTACCGTACTAAGTATAAAGACCTCAACTTAGTA

SEQ ID NO: 16386 - protein, 118 aa, Streptococcus agalactiae; identical to SEQ ID NO: 7512

SEQ ID NO: 16387 - protein, 474 aa, Streptococcus agalactiae
ATGTTATATCAAGAATTCTATCAGTCCCCTCTTGGAGAAATTCGCCTTCTAGCAGACAATCTAGGTTTATCAGGGCTTTATTTTGTTGGGCAAAAATATGATATGCTAGCAGTCAACCAAGAGGAAATTGTTAATATGTCAAATTCCTATACTTTACTTGGTAAGAAGTGGTTAGATGCTTATTTTTCACAGCAAAATTTACCTAGTATTCCATTATCATTGAGAGGGACAGCATTTCAGACGAGAGTATGGCAGGAATTACAGAAAATCCCTTTTGGAGATACCAAAACTTATGGAGAATTAGCGAAAGAGCTAAATTGTCAATCTGCACAGGCTGTTGGAGGAGCAATAGGTAAAAATCCTATTTCTCTAATTATACCTTGTCACCGTGTTTTAGGAAGATATGGTCAATTAACTGGTTATGCTGGTGGCTTAGAAAGAAAATCTTGGTTATTAGAATACGAAAAGGAAAAA

SEQ ID NO: 16388 - protein, 158 aa, Streptococcus agalactiae; identical to SEQ ID NO: 11754

SEQ ID NO: 16389 - protein, 702 aa, Streptococcus agalactiae
ATGACAGTTCTTGGTTATGATCCCTATATTTCAATTGAAACAGCTTGGAATATTTCAAGCCATGTTCAAAGGGTTAAAGAGATTAAGGATATTTTTGAAACTTGTGACTATATCACAATTCATGTTCCCTTAACAAATGAAACTAAGCATACTTTTGATGCGGAAGCTTTTTCAATCATGAAAAAAGGAACTACGATTATCAACTTTGCTCGTGCAGAATTAGTCAATAACCAAGAGCTATTTGAAGCGATAGAAACTGGTGTTGTCAAGCGCTATATTACTGATTTTGGAGACAAAGAATTATTAAACCAAAAAGGAATTACAGTCTTTCCTCATGTAGGCGGATCAACAGATGAGGCAGAGCTAAATTGTGCTATTATGGCAAGTCAAACCATTCGTTGTTTTATGGAGACAGGAGAAATCACTAATTCAGTTAATTTCCCCAATGTACATCAAATTCAAACCGCACCATTTCGTATTACTTTAATTAACAAGAATGTTCCTAACATTATGGCTAAAATTTCAACTGCTGTATCAGTGTTAGGTATAAATATTGATAACATTATTAACCGTTCAAAGGGTGACTACGCCTACACACTAATAGATTTAGATGAAACGGATAATAACAAGATTTCTACTTTAATTGAAGAATTTGAAGGTGATGAGAATATCGTCCGTGTACGTTTAATTGCAAAACAACAA

SEQ ID NO: 16390 - protein, 234 aa, Streptococcus agalactiae
MTVLGYDPYISIETAWNISSHVQRVKEIKDIFETCDYITIHVPLTNETKHTFDAEAFSIMKKGTTIINFARAELVNNQELFEAIETGVVKRYITDFGDKELLNQKGITVFPHVGGSTDEAELNCAIMASQTIRCFMETGEITNSVNFPNVHQIQTAPFRITLINKNVPNIMAKISTAVSVLGINIDNIINRSKGDYAYTLIDLDETDNNKISTLIEEFEGDENIVRVRLIAKQQ

SEQ ID NO: 16391 - protein, 387 aa, Streptococcus agalactiae
ATGTCAGAAAATCCTGATGCCTATATTATTCGTAGTCAAAATTTGCATAATCAGGATTTCCCAAGTAACTTCAAAGCTATTGCTAGGGCGGGTGCAGGAACAAATAATATTCCTATTGAAGAGGCAAGTGCACAGGGAATAGTCGTGTTTAATACCCCAGGTGCAAATGCTAATGCTGTAAAAGAAGCGGTCATTGCTGCCTTATTACTTTCAGCTCGTGATTATTTAGGAGCTAACCGATGGGTTAATACTCTAACTGGAACAGATATTCCCAAACAAATTGAAGCAGGAAAGAAAGCTTTTGCTGGTAATGAAATTGCAGGAAAAAAATTGGGAGTTATCGGCCTTGGTGCCATTGGAGCTAGAATTGCGAATGTGCTAGACGCT

SEQ ID NO: 16392 - protein, 129 aa, Streptococcus agalactiae
MSENPDAYIIRSQNLHNQDFPSNFKAIARAGAGTNNIPIEEASAQGIVVFNTPGANANAVKEAVIAALLLSARDYLGANRWVNTLTGTDIPKQIEAGKKAFAGNEIAGKKLGVIGLGAIGARIANVLDA

SEQ ID NO: 16393 - protein, 546 aa, Streptococcus agalactiae
ATGCAAATCAGATTAGCTTTTCCAAATGAAATTGACCAAATTATGCTTCTTATTGAGGAAGCGCGTGCCGAAATTGCTAAAACAGGAAGTGATCAATGGCAAAAAGAAGATGGATACCCTAATCGTAACGATATTATTGATGATATCTTGAACGGTTATGCTTGGGTTGGTATTGAAGATGGGATGCTAGCGACTTATGCGGCTGTCATTGATGGTCATGAAGAGGTTTATGATGCTATTTATGAGGGAAAATGGCTCCATGATAACCATCGCTATCTTACATTTCATCGTATTGCGATCTCAAATCAATTTCGTGGTAGAGGACTAGCACAGACATTCCTTCAAGGGTTAATTGAAGGTCATAAAGGACCTGATTTTCGTTGCGATACTCATGAAAAAAATGTCACTATGCAGCATATTCTAAATAAATTAGGCTATCAATATTGTGGTAAAGTACCTCTAGATGGGGTACGATTGGCTTATCAGAAGATAAAAGAAAAGGGAGAAACGAGCATCTATCGTGAGATTGATGAAAGAAATCCCATG

SEQ ID NO: 16394 - protein, 182 aa, Streptococcus agalactiae; identical to SEQ ID NO: 2886

SEQ ID NO: 16395 - protein, 1089 aa, Streptococcus agalactiae
ATGATAATTTATAATTTTTCTGCAGGTCCTGCAGTCTTACCAAAACCAGTGCTTGTAAAAGCCCAATCTGAACTCCTTAATTATCAAGGGTCTAGTATGAGTGTTTTGGAGGTATCGCACCGCTCCAAAGAGTTTGATGATATTATCAAAGGTGCTGAGCGTTACTTAAGAGATTTGATGGGAATTCCGGATAATTATAAAGTAATCTTTTTACAAGGTGGTGCATCCTTACAGTTTAGTATGATTCCCTTGAATATTACCAGAGGGCGTAAAGCTTACTATCATGTTGCTGGTTCGTGGGGGAAAAAAGCTTATACAGAGGCTGTAAAACTATCAAAAACAATTCCTTTTGAACCAATTCTATTAGCTTCATCAGAAGAATCAGTTTATGATTATATTCCAGAGTTTGATGAAAAAGAGATTGATCCTAAAGCTGCCTATGTTCATGTGACAACAAATAATACCATTGAAGGAACATCGCTTTATGATATTCCTAAAACTAATGGAGTGCCTGTTATTGCGGATATGTCTTCTAATATATTAGCTGTAAAATATAAAGTAGAAGATTTTGCAATGATTTATGCAGGAGCTCAAAAAAATATTGGACCTGCTGGTGTAACGGTAGTTATTATCCGTGAAGATATGATTAATGAGGAACCAACTTTATCATCAATGTTGGATTATAAGGTTCAGTCAGATGCTGGTTCTCTTTATAATACGCCGCCTGCTTACAGTATTTACATTGCTAAATTAGTCTTTGAATGGGTGAAAAGTCTAGGTGGTGTTGATGCTATGGAAAAAGCTAACCGTGAAAAATCAGGACTTCTCTATGATTATATTGATTCCTCAGAATTTTATAGTAATCCTGTCAGAGATAAAAAGAGTCGTTCTCTATGTAACATTCCTTTCATAACTATTAATAAAGATTTAGATGAAAAATTTGTAAAGGAAGCGACAGAACGTGGATTTAAAAATATTAAAGGACATCGTTCGGTAGGTGGTATGAGAGCTAGCCTTTATAATGCCTTTCCTAAACAAGGTGTCATCGAATTAATTGATTTTATGAAAACATTTGAAGCAGAAAATACA

SEQ ID NO: 16396 - protein, 363 aa, Streptococcus agalactiae
MIIYNFSAGPAVLPKPVLVKAQSELLNYQGSSMSVLEVSHRSKEFDDIIKGAERYLRDLMGIPDNYKVIFLQGGASLQFSMIPLNITRGRKAYYHVAGSWGKKAYTEAVKLSKTIPFEPILLASSEESVYDYIPEFDEKEIDPKAAYVHVTTNNTIEGTSLYDIPKTNGVPVIADMSSNILAVKYKVEDFAMIYAGAQKNIGPAGVTVVIIREDMINEEPTLSSMLDYKVQSDAGSLYNTPPAYSIYIAKLVFEWVKSLGGVDAMEKANREKSGLLYDYIDSSEFYSNPVRDKKSRSLCNIPFITINKDLDEKFVKEATERGFKNIKGHRSVGGMRASLYNAFPKQGVIELIDFMKTFEAENT

SEQ ID NO: 16397 - protein, 633 aa, Streptococcus agalactiae
ATGATTTTGAGGGAATTTTGTGCAGAGAATTTAACAGACTTAACCAGATTAGATAAAGCTATTATTTCACGTGTCGAGCTTTGTGATAACCTTGCTGTCGGAGGCACTACTCCTAGCTACGGTGTTATCAAAGAAGCTAATCAATATTTACATGAAAAAGGTATTAGTGTCGCTGTTATGATTCGTCCCCGTGGAGGAAATTTTGTATACAATGATTTAGAATTACGTATTATGGAAGAGGATATCCTACGTGCTGTTGAGTTAGAATCAGATGCTCTTGTTTTGGGAATATTAACTTCAAATAATCATATTGATACTGAAGCCATTGAACAACTTCTACCTGCTACCCAAGGTTTGCCACTTGTTTTTCATATGGCATTTGATGTTATCCCGAAATCTGACCAAAAAAAATCAATAGATCAATTAGTTGCTTTAGGCTTTACAAGGATTCTCCTACATGGTTCATCTAATGGCGAACCAATTATAGAAAATATCAAACATATCAAAGCATTAGTTGAATATGCTAATAATCGTATTGAAATTATGGTTGGCGGCGGTGTGACTGCTGAAAACTATCAATATATTTGCCAAGAAACTGGGGTTAAACAAGCCCATGGTACTAGAATAACTCAA

SEQ ID NO: 16398 - protein, 211 aa, Streptococcus agalactiae; identical to SEQ ID NO: 2890

SEQ ID NO: 16399 - protein, 102 aa, Streptococcus agalactiae
TTGAATACCATTGCAAATTGGATTTTATTTCTGAGAGTAGGTTATAAAAGATGGTATGCTCTTATTCCGGTTCTTTCAGGTTTTACAAAACATGAGAGAACT

SEQ ID NO: 16400 - protein, 34 aa, Streptococcus agalactiae
MNTIANWILFLRVGYKRWYALIPVLSGFTKHERT

SEQ ID NO: 16401 - protein, 861 aa, Streptococcus agalactiae
ATGCAAGTTCAAAAAAGTTTTAAATCAAATATACATTACGGAACACTCTATCTAGTCCCAACTCCAATTGGTAATCTAGATGATATGACTTTTCGTGCCATTAGGATTTTAAGAGAAGTTGATTTTATTTGTGCAGAGGATACACGAAATACGGGACTTTTACTCAAGCACTTTGATATTACTACTAAACAAATTAGTTTTCACGAACACAATGCTTACGATAAAATCTCTGGGTTAATTGATTTGTTAAAAGAAGGGAAATCTTTAGCCCAAGTATCTGATGCAGGAATGCCCTCTATTTCTGACCCAGGACATGACCTTGTCAAGGCTGCTATTGAAGGGGATATCCCAGTTGTATCTATACCAGGAGCTAGCGCTGGTATTACTGCTCTCATCGCTTCAGGTTTAGCTCCACAACCTCATATTTTTTATGGCTTCTTACCACGTAAGAAAGGTCAACAAATAACTTTCTTTGAAACAAAGCAAGATTACCCTGAAACACAAATCTTTTATGAGTCACCGTTTCGAGTCTCTGATACGCTAAAACACATGAAAGAGATTTACGGAGATCGCCAAGTTGTTTTAGTACGCGAATTGACGAAACTCTATGAAGAGTATCAAAGAGGAACCATTAGTCAACTTTTAGAGCATATTGAAAAGGTCCCTCTCAAAGGTGAATGCTTAATTATTGTTGATGGTAAGAGAGATACCGAGCGAGTGAAAGACAGTAGCCAACAAGATCCACTAGTATTAGTAAAAGAATATATCGCTAATGGTGATAAAACTAATCAAGCGATAAAAAAAGTAGCAAAAGAATTTAATCTCAATAGACAAGAACTCTATGCTAGTTTCCATGATTTA

SEQ ID NO: 16402 - protein, 287 aa, Streptococcus agalactiae; identical to SEQ ID NO: 2892

SEQ ID NO: 16403 - protein, 324 aa, Streptococcus agalactiae
ATGGATAAAAAAGACTTGTTTGATGCCTTTGATGATTTTTCACAAAATTTATTAGTTGGGTTGTCTGAAATTGAGACTATGAAAAAACAAATCCAAAAATTATTGGAGGAGAATACTGTTCTACGCATTGAAAATGGTAAACTTCGTGAGCGTCTGAGCGTTATTGAAGCAGAAACAGAAACTGCAGTTAAAAATTCTAAACAAGGAAGAGAATTACTCGAAGGCATTTACAATGATGGCTTTCACATTTGTAATACTTTCTATGGTCAACGTCGTGAAAATGACGAAGAATGTGCTTTTTGTATTGAATTATTATATAGAGAT

SEQ ID NO: 16404 - protein, 108 aa, Streptococcus agalactiae; identical to SEQ ID NO: 2894

SEQ ID NO: 16405 - protein, 861 aa, Streptococcus agalactiae
ATGGATTTAAAGCGAACACAACCCAAATTGCTGGAAAAGTTTAATACTATTTTACAGTCAGATAGGATGAGTCATGCCTATCTTTTTTCGGGAAATTTTGCAAGTCTAGATATGGCACTTTATTTAGCACAAAGTCAGTTCTGTGAAAAGCGCCAGAGTGGTTTACCATGTCAAGAGTGTAGAGCCTGTCGTTTAATCGCTAATGGGGAATTTTCAGATGTTAAAATCATAGAACCACAGGGGCAACTTATTAAGATAGAGACTATAAAAGAGCTGACTAAAGATTTTTCAAGATCAGGTTTCGAAGGGAAATCACAGGTCTTTATCATCAAATATTGCGAAAAAATGCATGTCAATGCAGCCAACAGTCTTTTGAAATTTATTGAAGAACCTCAAAGTTCATCTTATGTCATCTTATTGACTAATGATGAAAACAATGTTTTGCCAACAATTAAGAGTAGAACGCAAATTTTTCGTTTTCCAAAACAATTGGACATGTTGGTTCATCAAGCTGAACAAGCAGGATTGCTAAAATCACAAGCTAGCTTATTAGCTCAAGTAGCAGACGATCCTAAACATTTAGAAATATTGTTGACTAACAAAAAGTTATTAGATTACTTGAATTTAAGTCAACAGTTTGTGACGACTTTGGCAAAAGATAGGCAAACTGCTTATTTAGAAGTATCTCGCTTGACATCGCAAGTTGTAGATAAAAATGATCAGGCATTTGTTTTTCAATGGCTGACAATAATGCTGGCTAAAGAAGGCCAACTTTATGATTTAGAAAATACTTATAGAGCTCAGCAAATGTGGAAGAGTAATGTTAGTTTTCAAAATAGTTTAGAGTATATGGTGCTTTCT

SEQ ID NO: 16406 - protein, 287 aa, Streptococcus agalactiae
MDLKRTQPKLLEKFNTILQSDRMSHAYLFSGNFASLDMALYLAQSQFCEKRQSGLPCQECRACRLIANGEFSDVKIIEPQGQLIKIETIKELTKDFSRSGFEGKSQVFIIKYCEKMHVNAANSLLKFIEEPQSSSYVILLTNDENNVLPTIKSRTQIFRFPKQLDMLVHQAEQAGLLKSQASLLAQVADDPKHLEILLTNKKLLDYLNLSQQFVTTLAKDRQTAYLEVSRLTSQVVDKNDQAFVFQWLTIMLAKEGQLYDLENTYRAQQMWKSNVSFQNSLEYMVLS

SEQ ID NO: 16407 - protein, 633 aa, Streptococcus agalactiae
ATGAAAAAAGGACTAATGATTTCTTTTGAGGGCCCAGATGGTGCGGGTAAAACAACCGTTTTAGAAGCTGTTTTACCCTTGCTCAGAGAAAAATTATCACAAGATATTCTCACCACCAGAGAGCCTGGTGGCGTAACTATTTCAGAAGAAATTCGTCATATTATTTTAGATGTTAAACACACGCAAATGGATAAAAAAACAGAGCTATTGCTTTACATGGCTGCTCGACGCCAACATCTAGTGGAAAAGGTACTCCCAGCTCTAGAAGAAGGGAAAATAGTCCTAATGGATCGTTTTATTGATAGTTCTGTTGCCTATCAGGGATCAGGAAGAGGATTAGATAAGTCACATATAAAATGGCTTAATGACTATGCGACTGATAGTCATAAACCTGATTTAACTTTATATTTTGATGTTCCTTCTGAAGTAGGTTTAGAGCGTATTCAAAAAAGTGTTCAAAGGGAGGTAAATCGTCTAGATCTCGAGCAATTAGATATGCATCAACGCGTCCGTCAAGGTTACCTTGAATTGGCGGATTCGGAGCCAAACCGCATTGTGACGATTGATGCCTCCCAACAGCTAGATGAAGTAATAGCTGAGACATTCTCTATTATTTTAGATCGTATCAACCAA

SEQ ID NO: 16408 - protein, 211 aa, Streptococcus agalactiae; identical to SEQ ID NO: 2900

SEQ ID NO: 16409 - protein, 1163 aa, Streptococcus agalactiae
ATGACAAAACACAAACACCTAACTCTCTCAGACCGTAATGACATCCAATCTGGTTTGGATAGAGGAGAAACCTTTAAAGCCATCGGGCTTAATCTACTGAAACACCCTACTACTATCGCAAAAGAAGTCAAACGAAATAAGCAACTAAGAGAATCAACCAAAGACTGCCTAGACTGTCCGCTACTAAGAAAAGCTCCCTATGTTTGTAATGGGTGTCCAAAGAGAAGGATCAACTGTGGTTACAAGAAGACCTTCTATCTTGCTAAGCAAGCTCAAAGAAACTATGAAAAACTTTTAGTTGAATCTAGAGAAGGAATCCCTTTGAACAAAGAGACCTTCTGGAAAATAGATAGAGTGCTTTCTAATGGGGTCAAGAAGGGCCAACGTATCTATCATATCCTCAAAACCAACGATCTAGAAGTGAGTTCTTCAACCGTTTATCGACACATCAAGAAAGGCTACCTATCCATCACACCAATCGACCTACCCAGAGCTGTGAAGTTCAAAAAAAGGCGAAAGAGCACACTCCCTCCTATTCCAAAAGCGATTAAAGAAGGGCGACGGTACGAGGATTTTATAGAACACATGAACCAATCAGAGCTGAACTCCTGGCTTGAAATGGACACGGTTATTGGACGGATTGGTGGAAAGGTCCTTCTCACCTTCAATGTCGCCTTCTGTAACTTCATCTTTGCCAAACTGATGGATTCTAAGACAGCTATCGAAACTGCTAAACACATACAGGTCATTAAGAGGACACTCTATGATAACAAGAGAGACTTCTTCGAACTCTTTCCTGTTATCCTAACGGATAATGGTGGGGAATTCGCTAGAGTGGATGATATTGAGATAGATGTTTGTGGACAGTCTCAACTCTTCTTTTGTGACCCTAATCGGTCTGACCAGAAAGCAAGAATCGAGAAGAATCATACCCTCGTGAGAGACATACTCCTAAGGGGACTTCCTTCGACAACTTGACTCAAGAGGACATTAATCTGGCACTATCTCATATCAACAGCGTTAAGAGACAGGCTCTAAATGGTAAAACGGCTTATGAGCTATTCTCTTTTACTTACGGAAAAGACATCGCAAGTATACTCGGTATTGAGGAAATTACTGCGGAAGACGTCTGCCAATCTCCCAAACTATTAAAAGACAAAATC

SEQ ID NO: 16410 - protein, 388 aa, Streptococcus agalactiae; identical to SEQ ID NO: 16076

SEQ ID NO: 16411 - protein, 656 aa, Streptococcus agalactiae
ATGCCAGTGAAAGATTTTATGACAAAAAAATTAGTTTATGTCTCTCCAGATACTACAGTTGCAGAAGCTGCTGATTTATTGAGAGAACACCACTTAAGGCGTTTGCCAGTTGTTGAAAATGATCAGCTAGTGGGGTTAGTGACAGAAGGGACAATGGCAGAACACAACCTTCTAAAGCAACCAGTCTTTCTATATATGAGATGAACTATCTTCTTAATAAGACAAAAATTCGAGATATTATGATTAAAGATATTGTGACTGTTTCACAGTATGCTAGCCTTGAGGACGCTATTTATTTGATGATGTCTCGAAAGATCGGTGTTTTACCAGTAGTTGATAATGGACAACTTTATGGGATTGTCACGGATAGGGATGTTTTTAAAGCCTTCCTTGAAATTGCGGGGTATGGTCAAGAAGGTTATCGCTTGGTTATATTAGCTGATGAGGGGATAGGGGTACTATCAAAAGTCCTAAATCGTCTTTCTAGTGCAAATTTAAGTGTTAAACGTTTAGTCATTATTGAACGAAAAGCAGGTAAGAAAGCGGTCGAGATACAACTAGAAGGATACGCTGACAAGGATGTTTTAAAACAAGAACTAGTATTTGATGATGTTATTGTGGAAACTTTAGAAAAGACCATGAAAAAACCACTTTCT

SEQ ID NO: 16412 - protein, 219 aa, Streptococcus agalactiae
MPVKDFMTKKLVYVSPDTTVAEAADLLREHHLRRLPVVENDQLVGLVTEGTMAEAQPSKATSLSIYEMNYLLNKTKIRDIMIKDIVTVSQYASLEDAIYLMMSRKIGVLPVVDNGQLYGIVTDRDVFKAFLEIAGYGQEGYRLVILADEGIGVLSKVLNRLSSANLSVKRLVIIERKAGKKAVEIQLEGYADKDVLKQELVFDDVIVETLEKTMKKPLS

SEQ ID NO: 16413 - protein, 1473 aa, Streptococcus agalactiae
ATGGCACTTCTTGAAGTAAAAAATTTAAGTAAACATTTCGGTGGCCTAACTGCTGTAGGTGATGTTTCGATGAAATTACATAAAGGTGAATTAATTGGCTTAATCGGCCCCAACGGTGCGGGTAAGACAACGCTTTTTAATCTCTTAACAGGAGTATACCTTCCTAGTAAAGGGACAATATCACTTGATGGTAAGATATTAAATGGGAGGAAACCAGCTAAAATAGCTTCTTTAGGTTTAGGTAGAACTTTTCAAAATATCCGACTTTTTAAAAATATGACTGTTTTAGACAATGTACTAGTAGGACTCAGTAATCATCACTTATCACATCCTATTGCTAGTTTTTTACGATTACCCAAATACTATCATAGTGAAAAAGCCTTAAGGAAAAAGGCACTGGAGCTATTAGAGATTTTTGGTTTGAAAGCATATCAAGATGCTCTTGCTAAGAACCTCCCTTATGGAAAACAACGGCGTTTAGAAATTGTTCGTGCTTTAGCAACAGAACCAAAAATATTGTTTTTGGATGAGCCCGCGGCAGGAATGAATCCTCAAGAAACTGCAGAATTGACGCAGTTAATTAGTCAAATAAAGAGTGATTTTGATATTACTATTATGCTGATTGAACATGATATGAACTTGGTTATGCAAGTAACAGAGAGAATTTATGTATTGGAATATGGTCGTCTGATTGCTCACGGGACACCTGAAGAAATTAAAAATAATAAACGTGTTATAGAAGCATACTTGGGGGGGGGAGCTATAATGACCATGTTGAAAGTAGAAAATCTATCTATTCACTATGGTGTTATTCAAGCGGTGAATGATGTCTCGTTTGAAGTTAACCAAGGTGAGGTTGTAACCTTAATTGGAGCCAATGGTGCAGGAAAGACATCAATTTTGAGGACAATTTCTGGTTTAGTAAGACCAAGTCAGGGTTCTATTTCTTTTATGGGGAAACCTATACATAAGTTAGCAGCTAGAAAAATTGTTGGCAATGGTTTAGCTCAGGTTCCAGAAGGGCGCCACGTTTTCTCAAGTTTGTCTGTTATGGAAAATTTAGAAATGGGAGCCTTTCTTCAAAAGGATCGTGAACAAAATCAAAAAATGTTAAAAAAAGTGTTTGATCGTTTTCCTCGCTTAGAAGAACGTAAAAACCAAGATGCAGCAACCTTATCAGGTGGTGAGCAGCAAATGCTCGCTATGGGGCGTGCATTGATGAGTCGTCCTAAATTATTACTTTTAGATGAACAGTCAATGGGCCTAGCTCCAATTTTTATTCAAGAAATTTTTAATATCATTGAAGACATCAAAAAACAAGGGACTACAGTTCTTTTAGTTGAACAAAATGCAAATAAAGCTCTGACGATTGCTGATAAAGCATATGTTCTAGAGACTGGGAAGGTTGTTTTATCAGGGACAGGTAAGGAATTACTAGTTTCAGATCAAGTTCGTAAAGCTTACTTAGGTGGA

SEQ ID NO: 16414 - protein, 491 aa, Streptococcus agalactiae
MALLEVKNLSKHFGGLTAVGDVSMKLHKGELIGLIGPNGAGKTTLFNLLTGVYLPSKGTISLDGKILNGRKPAKIASLGLGRTFQNIRLFKNMTVLDNVLVGLSNHHLSHPIASFLRLPKYYHSEKALRKKALELLEIFGLKAYQDALAKNLPYGKQRRLEIVRALATEPKILFLDEPAAGMNPQETAELTQLISQIKSDFDITIMLIEHDMNLVMQVTERIYVLEYGRLIAHGTPEEIKNNKRVIEAYLGGGAIMTMLKVENLSIHYGVIQAVNDVSFEVNQGEVVTLIGANGAGKTSILRTISGLVRPSQGSISFMGKPIHKLAARKIVGNGLAQVPEGRHVFSSLSVMENLEMGAFLQKDREQNQKMLKKVFDRFPRLEERKNQDAATLSGGEQQMLAMGRALMSRPKLLLLDEQSMGLAPIFIQEIFNIIEDIKKQGTTVLLVEQNANKALTIADKAYVLETGKVVLSGTGKELLVSDQVRKAYLGG

SEQ ID NO: 16415 - protein, 951 aa, Streptococcus agalactiae
ATGAAAGAAAATATGAAATCAATTTTATCTTGGTTAGCTATAGTAGTGTTAGGTTATCTCTTGATTAGCGTGCTAATATCTATGGGTATATTTAACCTCTATCATATTCAAATTATTGAAACAATTGGGATTAATGTTATTTTAGCAGTTGGTTTAAACCTAATTGTAGGTTGTTCGGGACAGTTTTCACTAGGACATGCAGGTTTCATGGCTATTGGCGCTTATGCAGTTGCTATTATCGGCGTTAAAATGCCAACTTATGTAGGTTTTTTGATAGCTATACTTGTTGGAACTCTTGTTGCAGGAGGTATTGCCTTAGGTGTAGGAATTCCTACTTTGAGACTAAAAGGTGATTATTTAGCTATAGCTACTTTAGGTGTTGCTGAGATTATCCGTATTTTGTTGGTTAATGGAGGTGATATTACGAATGGTGCTGCGGGTATCATGGGGATTCCGCCTTTTACAACCTGGTCTTTAGTTTATGGGGTGGCAGTTGTGAGCCTTATCCTTGCAATGAATTTTTTGCGTAGTCCCTTAGGGCGTAATACAATTGCTATACGAGAAGATGAAATTGCAGCAGAGTCTATGGGTGTGGATACAACAAAAGTGAAAGTAATTGTTTTTGTTTTTGGAGCTATTTTAGCTTCTATCGCTGGTAGTTTACAGGCTGGCTACGTTGGAACTGTTATGCCAAAAGACTTTTCATTTATGATGTCTGTCAATGTTTTAATTATTGTTGTTTTAGGTGGTTTAGGTTCAATGACAGGGACAGTTTTAGCAGCAATTTTATTAGGATTATTGAATATGTTACTACAAGACTACGCTTCTGTTCGAATGATTATCTATGCTTTAGCCCTGATTTTAATTATGATTTTTAGACCTAGCGGTTTATTAGGAACGAAAGAGTTAACTCTATCTCATCTATTTCGTAAGACGAGTAAGGGAGGCAAT

SEQ ID NO: 16416 - protein, 317 aa, Streptococcus agalactiae; identical to SEQ ID NO: 7546

SEQ ID NO: 16417 - protein, 798 aa, Streptococcus agalactiae
ATGGTATATGGCATTATTAAGCTGATTAATTTTGCTCATGGGGACATCTATATGATGGGCGCTTTCATGGGCTATTATTTGATTAATCATCTTCATCTTAATTTTTTCCTAGCTTTATTAATTGCAATGCTGGGGTCTGCTTTCCTAGGTGTTGTAATTGAATATTTAGCTTATCGTCCACTGAGAAAATCAACTAGAATTGCCGCGTTAATTACAGCTATTGGTGTTTCTTTTCTTTTGGAGTACGGGATGGTATACCTTGTTGGAGCGGATACTAGGGCATTTCCGCAAGCCATTCATACTGTTAAATATAATTTAGGACCGATAACTATAACCAATGTTCAGCTCATCATTTTAGGTATTGCGCTATTACTAATGCTTACTTTACAGTTCATCGTTCAAAAAACTAAAATGGGGAAAGCTATGAGAGCTTTATCAGTGGATAGCGATGCCGCACAATTGATGGGAATTAATGTTAACCGTACCATTAGTTTTACATTTGCGCTGGGGTCTGCTTTAGCTGGAGCAGGTGGAGTACTGATTGGGCTTTATTATAATTCTGTTCAACCTCTTATGGGGGTAACTCCAGGGTTGAAAGCATTTGTTGCAGCTGTCTTAGGTGGTATTGGTATCATTCCGGGAGCGGCTATCGGTGGTTTTGTTATTGGCATTTTAGAAACTTTAGCGACTGCACTTGGTGTGTCAGATTTTCGAGATGGTATCGTTTATGCTATTTTAATTCTCATTTTCTTGATCCGTCCAGCAGGAATTCTTGGAAAAAATATTAAGGAGAAGGTC

SEQ ID NO: 16418 - protein, 266 aa, Streptococcus agalactiae; identical to SEQ ID NO: 2914

SEQ ID NO: 16419 - protein, 1161 aa, Streptococcus agalactiae
ATGGAAAAGAGACTTAGTTTAGGAGCGCTTGTTTTAGCTAGTACAGTTCTTTTAGCAGCATGTGGAAATGTCGGAGGAGGAGCATCTTCGACAGGAACAAAAATAGGGAAAGATATTAAGGTAGGGATAACTGGGAATTATCAGGAAACGTTTCTTCATATGGAAATTCAATGAAGAATGGAGCTGACTTAGCAGTAAAAGAAATTAATGCTGCTGGAGGGGTTGGCGGCAAGAAGTTAAAAGTCCTATCACAGGATAATAAATCAGAAAATGCAGAGGCAGCAACGGTTGCCACAAACTTGGTTACCAAAGGAGCTAATGTCATTATCGGACCAGCAACATCGGGTGCAGCTGCATCTTCAACTCCAAAAGTAAATGCAGCAGCAGTTCCAATGATTGCACCTGCTGCGACACAAGACAATTTAGTCTATGGTTCTGATGGAAAAACCTTAAATCAGTATTTCTTCCGAGCTACTTTTGTCGATAATTATCAAGGAAAGCTATTGTCTCAGTATGCTACAGACAACCTTAAAGCTAAAAAAGTTGTTCTATTTTATGATAATTCATCAGATTACTCAAAGGGGGTAGCAAAATCATTTAAGGAAAGTTATAGTGGAAAAATTGTTGATAGTATGACATTCTCCGCTGGTGATACTGATTTCAGCGTCATTGACTAAGTTGAAAGGGAAAGAATATGATGCTATTGTGATGCCAGGTTACTATACCGAGACAGGATTAATAGTTAAGCAAGCGCGTGATTTAGGTATCTCTAAACCGGTTCTTGGGCCTGATGGTTTTGATAGTCCGAAATTTGTGCAATCGGCAACACCTGTAGGAGCTTCAAACGTTTATTATTTGACAGGTTTCACTACACAAGGATCAACCAAAGCTAAAGCTTTCCATGATCATTACGTTAAGGCATATGGTGAAGAACCATCCATGTTCTCGGCTTTATCATACGACGCTGTGTATATGGCAGCTAAATCTGCTAAAGGAGCTAAAACTTCAATTGATATTAAAAAAGCTTTAGCTAAGCTGAAAGATTTTAAAGGTGTGACAGGGAAAATGTCTATTGATAAAAATCACAATGTTGTTAAATCAGCTTACGTTGTCAAATTAGAGGATGGAAAAACAAGTAGCGTTAACATTATTTCAGCAAAA

SEQ ID NO: 16420 - protein, 388 aa, Streptococcus agalactiae
  VARIANT 43, 222: Xaa = Any Amino Acid
MEKRLSLGALVLASTVLLAACGNVGGGASSTGTKIGKDIKVGXNWELSGNVSSYGNSMKNGADLAVKEINAAGGVGGKKLKVLSQDNKSENAEAATVATNLVTKGANVIIGPATSGAAASSTPKVNAAAVPMIAPAATQDNLVYGSDGKTLNQYFFRATFVDNYQGKLLSQYATDNLKAKKVVLFYDNSSDYSKGVAKSFKESYSGKIVDSMTFSAGDTDFXASLTKLKGKEYDAIVMPGYYTETGLIVKQARDLGISKPVLGPDGFDSPKFVQSATPVGASNVYYLTGFTTQGSTKAKAFHDHYVKAYGEEPSMFSALSYDAVYMAAKSAKGAKTSIDIKKALAKLKDFKGVTGKMSIDKNHNVVKSAYVVKLEDGKTSSVNIISAK

SEQ ID NO: 16421 - protein, 411 aa, Streptococcus agalactiae; identical to SEQ ID NO: 16341

SEQ ID NO: 16422 - protein, 137 aa, Streptococcus agalactiae; identical to SEQ ID NO: 16342

SEQ ID NO: 16423 - protein, 234 aa, Streptococcus agalactiae; identical to SEQ ID NO: 16343

SEQ ID NO: 16424 - protein, 78 aa, Streptococcus agalactiae; identical to SEQ ID NO: 16344

SEQ ID NO: 16425 - protein, 657 aa, Streptococcus agalactiae
TTGGAAGTACTTGAAACTTACTTCCCAGAATATGATTTGGTTTGGCGATCATCAGTCGAACCTGCTCGTAAGGGCTATGCTGGTACAATGTTCTTATATCGTAAAGGGTTAAATCCTATTGTTAGCTTCCCTGAAATCGATGCTCCTACTACAATGGATAATGAAGGTCGCATTATTACTCTCGAATTGGAAAACTGCTATATCACACAGGTCTATACTCCAAATGCAGGTGATGGCCTAAAGCGCTTAGCTGACCGTCAAATATGGGATATTAAATATGCTGAGTATTTAGCAACATTGGATAGTCAAAAACCTGTTCTAGCAACAGGTGACTATAACGTAGCCCACAAGGAAATAGACCTAGCTAATCCTAGCAGTAATCGTCGTTCTGCTGGATTCACAGCTGAAGAGCGCCAAGGCTTTACAAATCTACTAGCCAAAGGTTTTACAGATACTTTTCGTTACCTTCATGGCGATGTTCCAAATGTTTATAGCTGGTGGGCACAACGAAGTCGTACATCCAAAATCAACAATACAGGGTGGAGAATTGATTATTGGCTAACAAGTAACCGTGTCGCAGATAAAATTACCAAGTCAGAAATGATTCATTCTGGTGATCGTCAAGATCATACACCAATTATTTTGGAGATTGAACTA

SEQ ID NO: 16426 - protein, 219 aa, Streptococcus agalactiae
MEVLETYFPEYDLVWRSSVEPARKGYAGTMFLYRKGLNPIVSFPEIDAPTTMDNEGRIITLELENCYITQVYTPNAGDGLKRLADRQIWDIKYAEYLATLDSQKPVLATGDYNVAHKEIDLANPSSNRRSAGFTAEERQGFTNLLAKGFTDTFRYLHGDVPNVYSWWAQRSRTSKINNTGWRIDYWLTSNRVADKITKSEMIHSGDRQDHTPIILEIEL

SEQ ID NO: 16427 - protein, 108 aa, Streptococcus agalactiae
TTGGACTATGGGCATCGGATGAATGCTATTAAGCGTCCATTGCTAGTTAAAGATAATAAAATCTTTCAGATTGGCTACCGTACTAAGTATAAAGACCTCAACTTAGTA

SEQ ID NO: 16428 - protein, 36 aa, Streptococcus agalactiae
MDYGHRMNAIKRPLLVKDNKIFQIGYRTKYKDLNLV

SEQ ID NO: 16429 - protein, 303 aa, Streptococcus agalactiae
TTGTTGGAATTATGTTATAATCTTAGTAATTACAGATATGACGCAGAAAGGAAAAAATTATTGAATAAACAAGAGCGTTTAGGAATGAGCGTTTATCTTTACTATAATCGTGACGCTCGTAAATTATATAAATACGGAGATGTTCATTATCATTCTCGTAGATTAAGATATCTAGTCATTTATGTTAATAAAGAGGATATTGTTAGCGTTAGTAAAGAGATAAAACATTTAAAATTTGTTAAGGATGTTCGGTTATCAGCAATTGATGATATTGATCAGGATTTTGTTGGAAACTTATATCGT

SEQ ID NO: 16430 - protein, 101 aa, Streptococcus agalactiae; identical to SEQ ID NO: 2918

SEQ ID NO: 16431 - protein, 316 aa, Streptococcus agalactiae
ATGGGGATGGCTGCTTCGATGGGAACCATTATGCTCAAGTGGTGCTAAAGGAAAACGTTTTATGTTACCGAATGCAGAATATATGATCCACCAACCAATGGGCGGAACAGGCGGAGGTACACAGCAATCTGATATGGCTATCGCTGCTGAGCATCTTTTAAAAACGCGTCATACTTTAGAAAAAATCTTAGCTGATAATTCTGGTCAATCTATTGAAAAAGTCCATGATGATGCAGAGCGTGATCGTTGGATGAGTGCTCAAGAAACACTTGATTATGGCTTTATTGATGCTATTATGGAAAATAATAATTTACAA

SEQ ID NO: 16432 - protein, 106 aa, Streptococcus agalactiae
MGMAASMGTIIASSGAKGKRFMLPNAEYMIHQPMGGTGGGTQQSDMAIAAEHLLKTRHTLEKILADNSGQSIEKVHDDAERDRWMSAQETLDYGFIDAIMENNNLQ

SEQ ID NO: 16433 - protein, 351 aa, Streptococcus agalactiae
ATGATTCCAGTAGTTATTGAACAAACAAGTCGTGGTGAACGTTCTTATGATATTTACTCACGTCTTTTAAAAGATCGTATTATTATGTTGACAGGCCAAGTTGAGGATAATATGGCCAATAGTATCATTGCACAGTTATTGTTTCTCGATGCACAAGATAATACAAAGGATATTTACCTTTATGTCAATACACCAGGTGGTTCAGTATCGGCTGGACTTGCTATTGTGGACACCATGAACTTCATTAAATCGGACGTACAGACGAGTTATGGGGATGGCTGCTTCGATGGGAACCATTATGCTCAAGTGGTGCTAAAGGAAAACGTTTTATGTTACCGAATGCAGAATATA

SEQ ID NO: 16434 - protein, 118 aa, Streptococcus agalactiae
MIPVVIEQTSRGERSYDIYSRLLKDRIIMLTGQVEDNMANSIIAQLLFLDAQDNTKDIYLYVNTPGGSVSAGLAIVDTMNFIKSDVQTMLWGWLLRWEPLLLQVVLKENVLCYRMQNI

SEQ ID NO: 16435 - protein, 627 aa, Streptococcus agalactiae
ATGGGAAAATTTCAAGTCATTTCACATCCACTTATTCAACATAAACTGTCAATCTTACGTCGCACTACAACATCTACTAAAGATTTTCGTGAGTTAGTTGATGAGATTGCGATGTTAATGGGCTATGAAGTGTCTCGTGATTTGCCTTTAGAAGATGTTGAAATCCAAACACCAGTAGCGACAACTGTACAAAAACAATTAGCTGGGAAAAAGTTAGCAATTGTTCCAATTTTACGTGCAGGTATTGGTATGGTTGATGGTTTCTTAAGCCTTGTGCCAGCTGCTAAAGTTGGTCATATCGGTATGTATCGTGATGAAGAGACTTTCCAACCAGTCGAATATTTAGTTAAGTTACCTGAAGATATTGATCAACGTCAGATTTTTGTAGTTGATCCAATGCTTGCTACAGGTGGGTCTGCTATTTTAGCAGTAGATTCTCTAAAAAAACGTGGCGCAGCTAGTATCAAATTCGTTTGTTTAGTAGCAGCTCCAGAAGGAGTGGCAGCACTTCAAGAAGCACATCCAGATGTAGATATTTATACCGCTGCTTTGGATGAAAAACTCAATGAACATGGCTACATTGTTCCTGGACTCGGAGATGCTGGGGATCGCTTATTTGGTACAAAA

SEQ ID NO: 16436 - protein, 209 aa, Streptococcus agalactiae; identical to SEQ ID NO: 7558

SEQ ID NO: 16437 - protein, 1167 aa, Streptococcus agalactiae
ATGATTACATATGATTTCACAAGTTTACCAGAACGTTTTTCAAGTAATGCCATAAAATGGAAGGCGGTTCAAAAAGATCAAGAAATCCTTCCCCTTTGGATTGCGGATATGGATTTTCCTATCTTTCCAGAAATGTCGGAGGCTATTGAAGATTTTTCACACCAAATGGTTTTTGGCTATGATAGTCCTAAAGACAGTTTATACCAAGCTATCTCTAATTGGGAAGTGCAAGAACATGGTTATCAATTTGATAAAAAATCATTATTATTAATTGATGGGGTTGTACCAGCGATTTCAGTTGCTATACAAGCCTTCACAAAGGAGGGAGATGCTGTTCTAATTAATACCCCAGTCTATCCGCCCTTTGCTAGAACTATAAAATACAATAATCGTCATTTAGTTTCAAATAGTTTACTTAATAATAATCAGTATTTTGAGATTGACTTTAAACAATTAGAAAAAGATATCATTGAAAATAATGTAAAGCTTTATATTTTTTGTAGTCCACACAATCCCGGTGGGCGTGTCTGGACAAAAGGAGAAATTCAAAAAATAGGAGATATCTGTAAACGATATAATGTTATCCTCGTTTCTGACGAAATACATCAAGATTTGGTATTATTTGATAATGTACACCATAGCTTTAATACTGTTGATTCTAGTTTTAAAGAATTGAGTGTTATTTTATCTAGTGCAACTAAAACGTTTAATATTGCAGGGACTAAAAATAGTTTTGCAATAATTGAAAATGAAAAGTTACGCTCGGATTTTAAGAAGAGGCAAATAGCTAACAATCAACAAGAAATTTCTTCATTGGGGTTATTAGCTACAGAAGTTGCCTTTACAAAAGGGAAACAATGGTTAAAGGCCCTAAAAATGGAGTTAGAAGGATCAATAGAATACCTTTATGAGCAATTAACGCAAAAAACTCATATCAAAGTGATGAAACCAGAGGGAACTTATCTTGTTTGGTTAGATTTTTCTGCTTATAATTTAACGCATTTAGAAATTCAAGAAAAACTTCGATATGATGCCAAATTAATATTAAATGATGGTTTAACTTTTGGAAAAGAAGGGAAAAAACATGCTAGAATCAATGTCGCAGCTCCTAGGTCTGTTATTGAGGAGGCAGTTTTGCGATTAGTGACAAACTTTAGAAAAAATGAC

SEQ ID NO: 16438 - protein, 389 aa, Streptococcus agalactiae
MITYDFTSLPERFSSNAIKWKAVQKDQEILPLWIADMDFPIFPEMSEAIEDFSHQMVFGYDSPKDSLYQAISNWEVQEHGYQFDKKSLLLIDGVVPAISVAIQAFTKEGDAVLINTPVYPPFARTIKYNNRHLVSNSLLNNNQYFEIDFKQLEKDIIENNVKLYIFCSPHNPGGRVWTKGEIQKIGDICKRYNVILVSDEIHQDLVLFDNVHHSFNTVDSSFKELSVILSSATKTFNIAGTKNSFAIIENEKLRSDFKKRQIANNQQEISSLGLLATEVAFTKGKQWLKALKMELEGSIEYLYEQLTQKTHIKVMKPEGTYLVWLDFSAYNLTHLEIQEKLRYDAKLILNDGLTFGKEGKKHARINVAAPRSVIEEAVLRLVTNFRKND

SEQ ID NO: 16439 - protein, 546 aa, Streptococcus agalactiae
ATGAATATTGAAACACTAACGCAGAAAAATCATCGTTCCGATAGCGGACGAAATCATATTGTTTTATTTGAACCACAGATTCCAGCAAATACTGGTAATATTGCTAGAACTTGTGCGGCAACAAATGCTCCTTTGCACATCATACGACCGATGGGATTTCCTATTGATGATAAAAAAATGAAACGAGCGGGACTGGATTACTGGGATAAGCTAGATGTTAGTTTCTATGATGGTTTGGAAGAATTTATGTTGTCATGTCGAGGGAAAGTTCACCTAATTAGCAAATTTGCTGACAAGGTTTACTCAGATGAAAATTACAATGATGATCAAGACCATTATTTTATGTTTGGTCGTGAAGATAAAGGATTGCCAGAAACTTTTATGCGCGAGCATGCCGAAAAGGCCTTACGAATTCCCATGAACGATGAGCATGTGCGTAGCTTGAATGTTTCAAACACTGTTTGTATGATTGTTTATGAAGCCCTTAGGCAGCAAAGCTTTCCTAATTTAGAATTAAGCCATACTTATGAAAATGATAAATTAAAA

SEQ ID NO: 16440 - protein, 182 aa, Streptococcus agalactiae
MNIETLTQKNHRSDSGRNHIVLFEPQIPANTGNIARTCAATNAPLHIIRPMGFPIDDKKMKRAGLDYWDKLDVSFYDGLEEFMLSCRGKVHLISKFADKVYSDENYNDDQDHYFMFGREDKGLPETFMREHAEKALRIPMNDEHVRSLNVSNTVCMIVYEALRQQSFPNLELSHTYENDKLK

SEQ ID NO: 16441 - protein, 1350 aa, Streptococcus agalactiae
ATGGAGAATCATAATTCTATTAAACAGACCTATGGATTAATGACTACAATTGCTATGATTGTAGGTGTAGTGATTGGTTCAGGCATTTATTTTAAAGTTGATGACATCCTTAAATTTACTGGTGGAGATGTCTTTTTAGGCATGGTAATTTTAGTACTAGGTTCTTTTTCGATTGTTTTTGGAAGTTTGTCAATTTCTGAGCTAGCTATTAGAACGAGTGAAAGTGGTGGTATTTTTTCTTACTACGAAAAATATGTTAGCCCAGCTTTAGCAGCAACTTTAGGCTTGTTTGCGTCTTTTTTGTATCTTCCAACTTTAACAGCAATCGTTTCATGGGTAGCTGCATTTTATACTTTAGGTGAATCATCAAGTTTGGAATCACAGATTATTTTAGCTGCTGTTTATATTTTAGCGCTTAGTCTCATGAATATCTTTGCTAAGCGTATTGCAGGGGGATTCCAATCTTTAACGACCTTTGTAAAAATGATTCCTTTAGTTCTAATTGCTTTAATTGGTGCTTTTTGGTCTGATAAAGCTCCACAACTTCCACAACATTTAACAGCTATTCAACCGTCAAATGTTGGATGGAGTTGGGTGTCAGGTCTGGTACCATTGTATTTTGCATATGATGGTTGGACAATTTTTGTTAATATTGCACCAGAAGTCAAGAATCCCAAGAAGAATTTACCACTTGCCTTTGTCATTGGTCCAGCGCTTATCTTATTATCATATTTGGCATTTTTCTATGGTTTGACACAAATTTTAGGTGCTAGCTTTATTATGACAACCGGTAATGATGCTATTAATTATGCAGCTAATATTATTTTCGGTCCTAGTGTTGGGCGTTTATTATCTTTCATTGTTATTCTATCTGTATTAGGTGTTGCCAATGGACTTTTACTTGGGACGATGCGTCTACCTCAAGCTTTTGCGGAACGCGGATGGATCAAAAGTGAGAGGATGGCTAACATAAATTTGAAGTATCAAATGTCATTGCCAGCTAGTTTGACGGTGACGGCTGTAGCTATTTTTTGGCTTTTTGTTCATTTTATGGTTACAAAATTTAACTTATTGCCGGGTAGTGATATTAGTGAAATTGCTGTGGTGTTTAATAATACCAGTTTAATCATTCTTTATGTTTTAGTACTCAGCCTTTATCTCAAAAAAGATATTAAAAATAAATTTACCGGCTTAGTTTCACCGATTCTAGCAATTTTAGGCGGTTTGATCCTCCTTATCGGGAGTTTGTTAAGTAATTTCTTTACGGTTTTAATTTTCCAATGTTTTTGCTTATTATTCTGTTTGATTTGTCATTATATCTATCAAAAAAATAACCCAAAAACTCATGAA

SEQ ID NO: 16442 - protein, 450 aa, Streptococcus agalactiae
MENHNSIKQTYGLMTTIAMIVGVVIGSGIYFKVDDILKFTGGDVFLGMVILVLGSFSIVFGSLSISELAIRTSESGGIFSYYEKYVSPALAATLGLFASFLYLPTLTAIVSWVAAFYTLGESSSLESQIILAAVYILALSLMNIFAKRIAGGFQSLTTFVKMIPLVLIALIGAFWSDKAPQLPQHLTAIQPSNVGWSWVSGLVPLYFAYDGWTIFVNIAPEVKNPKKNLPLAFVIGPALILLSYLAFFYGLTQILGASFIMTTGNDAINYAANIIFGPSVGRLLSFIVILSVLGVANGLLLGTMRLPQAFAERGWIKSERMANINLKYQMSLPASLTVTAVAIFWLFVHFMVTKFNLLPGSDISEIAVVFNNTSLIILYVLVLSLYLKKDIKNKFTGLVSPILAILGGLILLIGSLLSNFFTVLIFQCFCLLFCLICHYIYQKNNPKTHE

SEQ ID NO: 16443 - protein, 1344 aa, Streptococcus agalactiae
ATGAGAATAATTGTTGTCGGCGGAGGTAAAGTCGGAACCGCACTTTGTCGCTCACTGTTGCTGAAAAGCACGATGTTGTTTTAATTGAGAAAAAAGAAAACGTCCTTAAACGTGTCACTAAACAGCATGATATTATGGGAATTGTTGGGAATGGAGCAAACTATAAAATTTTAGAACAAGCCGAAGTCAAAAATTGTGATATTTTTATCGCTATCACTGATCGAGATGAAGTTAATATGATTTCAGCAGTTCTTGCCAAAAAAATGGGGGCAAAAGAGACTGTTGTTCGCATGCGTAATCCTGAGTATTCTAATCCTTACTTCAAAGATAAAAACTTTCTTGGCTTCTCTTCAGTTGTCAACCCTGAATTGTTAGCAGCACAATATATCGCTAATACCATAGAATTTCCAAATGCAACTTCAGTTGAACACTTCGCCAACGGGCGTGTGATGTTAATGGAATTTAAAATTTTAGAAGGAAATAAACTCTGTCATACTTCAATGAGTCAAATTCGTAAAAAATTTGGTAATATTGTTATTTGCGCAATTGAACGCGATGGCAAATTGATTATTCCTGATGGCGATGCAACTATCCAAGTCAAAGATAAAATCTTTGTAACTGGAAATCGTATTGAAATGATACTTTTCCATAATTACGTTAAAAATAAAGTTGTCAAAAACTTGATGGTTATCGGTGCAGGACGCATCGCCTACTACCTACTCAATATCCTTAAAAATACCAATACACACGTCAAACTAGTTGAACTCAACCAAGAGCAAGCTGAATATTTTAGTCAAGAATTTCCCAATGTTCCTGTCGTTCATGGGGATGGTACTGCTAAAAATATTTTGTTAGAAGAAAGCGTTACAAATTTTGACGCAGTTGCTACTTTGACTGGTGTTGATGAAGAAAATATCATTACCTCAATGTTCTTAGAAAGTATCGGTATCCCTAAAACATTACCAAAGTTAATCGAACTAGCCTACTAGAAATCATTGACGATAAACACTATCAAGCATTATCACACCCAAGCGTATTGCCGTAGACCATGTGATGCACTTTGTACGCGGGCGTGTAAATGCTCAGGATTCCAACCTAGAAGCTATGCATCATATTGCTAACGATCGCATTGAAACCTTACAATTTGAAATAAAAGAAACTAGCAAATTAGCAAATCGTAGCCTTGCATCTTTAAAATTAAAGCAAAATATTTTAATTGCAGCGATTATTCGCAATAATAAAACGATTTTCCCAACTGGTGAGGATGTTTTAACAGTGGGTGATCGTATCGTTGTTATCACCTTATTAAAAAATATTACTAGAACTAGTGATATGTTAGCGAGG

SEQ ID NO: 16444 - protein, 449 aa, Streptococcus agalactiae
MRIIVVGGGKVGTALCRSLVAEKHDVVLIEKKENVLKRVTKQHDIMGIVGNGANYKILEQAEVKNCDIFIAITDRDEVNMISAVLAKKMGAKETVVRMRNPEYSNPYFKDKNFLGFSSVVNPELLAAQYIANTIEFPNATSVEHFANGRVMLMEFKILEGNKLCHTSMSQIRKKFGNIVICAIERDGKLIIPDGDATIQVKDKIFVTGNRIEMILFHNYVKNKVVKNLMVIGAGRIAYYLLNILKNTNTHVKLVELNQEQAEYFSQEFPNVPVVHGDGTAKNILLEESVTNFDAVATLTGVDEENIITSMFLESIGIPKNITKVNRTSLLEIIDDKQLSSIITPKRIAVDHVMHFVRGRVNAQDSNLEAMHHIANDRIETLQFEIKETSKLANRSLASLKLKQNILIAAIIRNNKTIFPTGEDVLTVGDRIVVITLLKNITRTSDMLAR

SEQ ID NO: 16445 - protein, 1419 aa, Streptococcus agalactiae
ATGATTCGTTTCCTTCTCTCAAAACTTTTGCTAATTGAAGCTGCTCTTCTAGCGATTCCTCTAACTGTTGGACTTATTTACCGTGAACCGCAAAGTGTCATGATGAGTATAGTCATTACCATGATTATTTTAATCATCCTTGGATTACTGGGTTCTCTCTTTAAACCTAAAAATTATCATATCTACACTAAAGAAGGCATGTTAATTGTTGCACTCTGCTGGATACTTTGGTCCTTCTTTGGCGCCCTTCCATTTGTTATTTCAGGGCAAATCCCTAATATTATCGATGCTTTCTTTGAAGTATCTTCTGGTTTTACGACAACAGGAGCAACTATTCTTGATGACGTCAGTGTCTTATCACCCGCGCTCTTATTTTGGCGTAGCTTTACCCATCTTATCGGTGGAATGGGGGTTTTAGTATTTGCCCTTGCCATCATGGAAAATTCTAAAAATAGCCATTTAGAGGTTATGAGAGCTGAAGTTCCTGGACCTGTATTTGGTAAAGTTGTCTCGAAACTTAAAAAAACTGCACAAATTTTGATTTGTATATCTTCTTATGTTGCAGATTTGCAGTAATATTATATTTTGCAGGTATGCCTTTCTTTGATAGTATTATCATAGCGATGGGAACTGCAGGTACAGGTGGTTTTGCAGTTTACAATGATAGCATTGCTCATTATAATAGTCCTCTGATAACTAACTTAGTTTCTATTGGTATGCTTATCTTCGGGGTTAACTTTAATCTTTACTATCTTCTTTTACTCCGAAAAATTAAAGCATTCTTTGGTGATGAGGAACTAAAAACCTATCTCCGCATCGTGGCAATAGCAACTTTCATGATTGCTCTAAACGTCATCGGTATGTATGATAATTTTCGACAAGGCCTCGAACATATTTTCTTTGAAGTATCAGCTATTATTACGACAACTGGTTTTGGCGTGACTGATATCACTCGTTGGCCTTTGTTTTCACAGGTTATTTTGCTATTCTTGATGTTTATCGGTGGTTCTGCTGGCTCTACAGCTGGGGGCTTTAAAGTCATGCGTAGCTTAATCCTAGCAAAGATTGCACGTAACCAAGTATTGTCTACACTCTATCCTAATAGAGTCATGTCACTACACATTAATAAAAGCGTTCTAGATAAAAATACACAACATGGTGTTTTAAAATATCTAACTATCTATTTAGCTATCTTCATGGCACTCGTTCTTGTTTTAACGCTTGATACTAATGATTTTTTGGTTGTTATCAGTGCTGCAGCCTCATGTTTTAACAACATAGGCCCACTCTTAGGTAGCAATGAAACTTTCTCATTCTTTAGTCCATTCTCAAAACTCCTTCTTTCATTTGCTATGATAGCAGGACGTTTAGAAATATACCCTTTTTATTGATGTTATTCCTAAAACATGGTCAAAACTA

SEQ ID NO: 16446 - protein, 475 aa, Streptococcus agalactiae
  VARIANT 183, 188, 190, 467: Xaa = Any Amino Acid
MIRFLLSKLLLIEAALLAIPLTVGLIYREPQSVMMSIVITMIILIILGLLGSLFKPKNYHIYTKEGMLIVALCWILWSFFGALPFVISGQIPNIIDAFFEVSSGFTTTGATILDDVSVLSPALLFWRSFTHLIGGMGVLVFALAIMENSKNSHLEVMRAEVPGPVFGKVVSKLKKTAQILYLXYLLMXAXFAVILYFAGMPFFDSIIIAMGTAGTGGFAVYNDSIAHYNSPLITNLVSIGMLIFGVNFNLYYLLLLRKIKAFFGDEELKTYLRIVAIATFMIALNVIGMYDNFRQGLEHIFFEVSAIITTTGFGVTDITRWPLFSQVILLFLMFIGGSAGSTAGGFKVMRSLILAKIARNQVLSTLYPNRVMSLHINKSVLDKNTQHGVLKYLTIYLAIFMALVLVLTLDTNDFLVVISAAASCFNNIGPLLGSNETFSFFSPFSKLLLSFAMIAGRLEIYPVLLMXIPKTWSKL

SEQ ID NO: 16447 - protein, 249 aa, Streptococcus agalactiae
ATGCTTAAATCTTTTTTGATTTTCTTAGTTCGCTTTTACCAAAAAAATATTTCTCCAGCTTTCCCAGCTAGCTGTCGTTATCGTCCAACTTGCTCTACGTATATGATAGAAGCTATTCAAAAACATGGTCTAAAAGGTGTGTTGATGGGGATTGCACGTATTTTGCGATGTCATCCCTTAGCCCACGGAGGAAATGATCCTGTCCCTGATCATTTTAGCTTAAGACGTAATAAAACGGATATATCAGAT

SEQ ID NO: 16448 - protein, 83 aa, Streptococcus agalactiae; identical to SEQ ID NO: 2936

SEQ ID NO: 16449 - protein, 720 aa, Streptococcus agalactiae
ATGAGAATTAATAAATATATTGCGCATGCAGGGATTGCAAGTCGTAGAAAAGCTGAGGAATTAATCAAGCAAGGAATGGTCACGATTAATGGTCAAGTGGTTAATGAATTGGCGACCCAAGTAAAGGCTGGTGATCTGGTTGAAATTGAAGGAAGTCCAATTTACAACGAAGAGAAGGTATATTATCTCTTAAATAAACCACGTGGTGTTATTTCAAGTGTCTCAGATGATAAAGGACGTAAGACAGTTATTGACTTGTTGCCACAAGTCAAAGAACGGATATATCCTGTTGGTCGCTTGGATTGGGATACAACTGGACTTTTAATTTTGACTAATGATGGTGATTTTACTGATAAAATGATTCATCCTCGTAATGAAATTGATAAAGTTTATTTAGCACGTGTTAAAGGAATAGCTACTAAAGAAAACCTTCGACCATTAACGCGTGGCGTTGTTATCGATGGTAAGAAAACAAAACCTGCTCGCTATACTATCATAAAAGTGGATCATGAAAAAAATCGTTCAGTAGTTGAATTAACTATTCATGAAGGTCGTAATCATCAAGTTAAGAAAATGTTTGAACAAGTTGGGTTATTAGTGGACAAGCTATCTCGTACACAATTCGGTACCTTAGATTTAACGGGTCTCCGTCCTGGGGAAGCACGACGATTAAATAAAAAAGAAATTAGTCAGTTGCATAATGCGGCTATTAATAAATCT

SEQ ID NO: 16450 - protein, 240 aa, Streptococcus agalactiae; identical to SEQ ID NO: 2938

SEQ ID NO: 16451 - protein, 369 aa, Streptococcus agalactiae
ATGACTTTGTTGAGAGATTATGCGAAGGCTCCGATTAATCAGAGTCTATCTCGGGCAAGTTTGGAAGTTCTATCTATTATTGCTTATAAACAACCTATTACTAGGATTGAAATTGATGATATTCGTGGCGTGAATTCCAGTGGAGCTATAACGAGACTGATAGCTTTTGGTTTAATTAAAGAGGCTGGAAAGAAAGAAGTGTTGGGACGTCCTAACCTTTATGAGACAACTAATTATTTCTTAGATTATATGGGAATTAATCAGTTAGATGACTTAATTGACGCCTCTTCAATTGAATTAGTTGACGAAGAAGTATCGTTATTTTCAATGGATTCAATTAATACAGAAGATAAGGAAAACAATGAGAAT

SEQ ID NO: 16452 - protein, 123 aa, Streptococcus agalactiae
MTLLRDYAKAPINQSLSRASLEVLSIIAYKQPITRIEIDDIRGVNSSGAITRLIAFGLIKEAGKKEVLGRPNLYETTNYFLDYMGINQLDDLIDASSIELVDEEVSLFSMDSINTEDKENNEN

SEQ ID NO: 16453 - protein, 652 aa, Streptococcus agalactiae
ATGACTTATTTAGGCTCAATAGAAGCTCTTCTTTTTGTTGCAGGTGAAGATGGACTGAGTTTGCGTCAAATGGCAGAATTATTGTCTTTGACACCATCAGCATTAATACAGCAACTAGAAAAGTTGGCTAAACGATATGAAGAAGATGACGATTCTAGTCTATTATTGCTTGAGACAGCACAAACTTATAAATTGGTAACAAAGGATAGTTATATGACTTTGTTGAGAGATTATGCGAAGGCTCCGATTAATCAGAGTCTATCTCGGGCAAGTTTGGAAGTTCTATCTATTATTGCTTATAAACAACCTATTACTAGGATTGAAATTGATGATATTCGTGGCGTGAATTCCAGTGGAGCTATAACGAGACTGATAGCTTTTGGTTTAATTAAAGAGGCTGGAAAGAAAGAAGTGTTGGGACGTCCTAACCTTTATGAGACAACTAATTATTTCTTAGATTATATGGGAATTAATCAGTTAGATGACTTAATTGACGCCTCTTCATTGAATTAGTTGACGAAGAAGTATCGTTATTTTCAATGATTCATTATACGAAGATGAAAACAATGAGAATTATAAATATATTGCGCATGCAGGGATTTGCAGTCGTAGAAAAGCTGAGGAATTTAATCAGCAGGATGGNNNNNTTAAT

SEQ ID NO: 16454 - protein, 220 aa, Streptococcus agalactiae
  VARIANT 184, 185, 195, 218, 219: Xaa = Any Amino Acid
MTYLGSIEALLFVAGEDGLSLRQMAELLSLTPSALIQQLEKLAKRYEEDDDSSLLLLETAQTYKLVTKDSYMTLLRDYAKAPINQSLSRASLEVLSIIAYKQPITRIEIDDIRGVNSSGAITRLIAFGLIKEAGKKEVLGRPNLYETTNYFLDYMGINQLDDLIDASSIELVDEEVSLFSMDSXXTEDRKTMRIXKYIAHAGICSRRKAEEFNQQDGXXN

SEQ ID NO: 16455 - protein, 705 aa, Streptococcus agalactiae
ATGGATATTAAGTTAAAAGATTTCGAGGGGCCCCTAGACTTACTCTTGCACCTCGTATCTAAATATGAGGTTGATATATACGATGTACCGATTGTGGAAGTTATTGAGCAGTACCTTGCTTATATAGCAACATTACAGGCGATGCGTCTAGAAGTAGCTGGTGAGTATATGCTTATGGCAAGTCAGCTGATGTTGATAAAAAGCCGTAACTTATTACCTAAAGTAGTGGAGTCAAATCCTATTGAAGATGATCCAGAAATGGAATTGTTGAGCCAATTAGAGGAATATAGACGTTTTAAAGTGCTAAGTGAAGAGTTAGCTAATCAGCATCAGGAACGCGCCAAATATTTTTCAAAACCAAAACAAGAAGTTATCTTTGAAGATGCAATTCTTCTACACGATAAATCGGTGATGGATCTTTTTTTGACTTTTTCTCAAATGATGTCCCAAAAACAAAAAGAATTGTCAAATAGTCAAACGGTAATTGAGAAAGAAGACTACCGTATTGAAGATATGATGATCGTTATTGAAAGACATTTTAATCTTAAAAAGAAAACGACATTACAAGAAGTGTTTGCGGATTGCCAAACAAAATCTGAAATGATAACTTTATTTTTGGCAATGTTAGAGTTGATAAAATTACATCAAATCACAGTAGAACAAGACAGTAATTTTAGTCAAGTTATCTTAAGAAAGGAAGAGAAA

SEQ ID NO: 16456 - protein, 235 aa, Streptococcus agalactiae; identical to SEQ ID NO: 11810

SEQ ID NO: 16457 - protein, 777 aa, Streptococcus agalactiae
ATGATTTTACAGACGAATATACTATCACTCCTAAAAACAATGATAAATGATATTAATAATTTTATTGAGAGTAAGAAATTATCTCTCAATTCGCGTAAGTCCTATCACTATGATTTAAAGCAATTTTATAAAATAATTGGTGGACATGTAAATTCTGAAAAACTGGCATTGTATCAACAGTCTCTAAGTGAATTTAAGTTAACAGCTCGTAAGCGAAAGTTATCTGCAGTCAATCAATTTCTTTTCTTTTTATATAATAGAGGAACGCTGAAGGAATTTTACAGACTACAAGAGACTGAAAAAATCACTTTGGCTCAGACAAAGTCTCAAATAATGGATTTATCAAATTTCTATCAAGATACTGATTATCCGAGTGGTCGTTTGATTGCTTTGTTGATTTTATCTTTAGGTTTAACTCCGGCTGAAATTGCTAATTTGAAGAAGGCTGATTTTGATACAACTTTTAATATCTTAAGTATTGAAAAATCGCAGATGAAGCGTATTTTAAAACTTCCAGAAGACTTACTTCCTTTTCTTTTGGAATCTTTAGAGGAAGATGGTGACTTAGTCTTTGAGCATAACGGTAAGCCTTATTCTAGACAATGGTTTTTTAATCAATTAACAGATTTCTTAAATGAGAAGAATGAGCAACAACTAACTGCACAACTTCTGCGAGAACAATTTATTCTAAAGCAAAAAGAAAATGGCAAAACGATGACGGAGCTCAGTCGCCTTCTAGGCTTAAAAACTCCTATCACTTTAGAGAGATATTATAGA

SEQ ID NO: 16458 - protein, 259 aa, Streptococcus agalactiae; identical to SEQ ID NO: 2944

SEQ ID NO: 16459 - protein, 471 aa, Streptococcus agalactiae
ATGATTGCTAAAGAATTTGAGTCGTTTTTGCTAAATCATTTGGACCACTATCTAATTCCAGCTGAAGACGTTGCTATTTTTGTGGATACACACAATGCAGACCACGTTATGTTACTATTAGCAAGTAATGGTTTTTCACGTGTACCAGTTATCACTAAAGAGAAAAAATATGTAGGTACTATTAGTATCTCAGACATTATGGGCTACCAATCTAAAGGTCAATTAACAGATTGGGAGATGGCACAGACTGATATTGTTGAGATGGTTAATACAAAAATCGAGCCGATTAATGAGGCAGCTACTCTGACAGCAATTATGCATAAGATTGTAGATTATCCATTTTTACCTGTTATCAGTGATCAAAATGATTTTAGAGGCATTATAACCCGTAAATCGATTTTAAAAGCTATTAATAGCCTCCTACATGATTTTACAGACGAATATACTATCACTCCTAAAAACAATGATAAA

SEQ ID NO: 16460 - protein, 157 aa, Streptococcus agalactiae; identical to SEQ ID NO: 2946

SEQ ID NO: 16461 - protein, 519 aa, Streptococcus agalactiae
ATGGCAATTAGAAAATTAGTTGTAATGAGTGATTCTCACGGAGATCGTGACATTGTAAAAGATATAAAGAATCATTATTTGGGAAAAGTGGATGCTATTTTTCACAATGGGGATTCCGAACTTCCTAGCTCAGATCCTATATGGGAAGGCATTCATGTGGTCACAGGAAATTGTGATTATGATTCAGGTTATCCGGAAGTTTTGGTTACAAAAATAGATAATGCTGTTATTGTTCAAACCCATGGTCATCTCCATCAGATTAATTTTACCTGGGATAAATTGGATTTATTAGCTCAGCAAGAAGACGCGGATATTTGTTTATATGGTCATCTTCATCGTGCAGATGCTTGGAAAAATGGTAAAACTATTTTTATCAATCCAGGTAGTGTTTTGCAGCCAAGAGGACCAATAAATGAGAAGCTTTACGCTGTTGTAACTATAACAGATAGTAAGGTTTTGGTAGAGTATTATACTCGCCAACACCAACCCTATCCTAACTTGACAAAGGAATTTTCAAGA

SEQ ID NO: 16462 - protein, 173 aa, Streptococcus agalactiae
MAIRKLVVMSDSHGDRDIVKDIKNHYLGKVDAIFHNGDSELPSSDPIWEGIHVVTGNCDYDSGYPEVLVTKIDNAVIVQTHGHLHQINFTWDKLDLLAQQEDADICLYGHLHRADAWKNGKTIFINPGSVLQPRGPINEKLYAVVTITDSKVLVEYYTRQHQPYPNLTKEFSR

SEQ ID NO: 16463 - protein, 970 aa, Streptococcus agalactiae
ATGACAAAAACAATTTTTGAAAGTAAAACTGAAGGCAATTGGTTTTTAGGTAGTTTCCAAGCTTTTAATTATTTTACTTGTTTTGGTAATGATGAATCTTACGAAGCTATCCAAGATGTTTTTCATCGTCTATTATCAACTTTGAAAGTTGAAGGTCTACAGCTTCACGTTGTGCAGATGACTTCGGATTTTCAATTATTAGCATTCCTCGTTGATATGATTAATCAAGAGTATTCAAGGCATATCAAAGTGACTCACATAAAGGGGCCATCTTAGTTAGTGAAGATGATCAGTTGTTCTTAGTTCACTTACCTAAAGAGGGCACTTCTTTAGAAAAATTCTTTGATTTAAAGAATGATAATAATTTTGGGGATACCATATTAATTGCGACTCACAATGAAGGAAAAACGAAGGAATTTAGAGAATTATTTGGGAAATTAGGACTCAAGTTGAAAATTTAAATGATTACCCAGATTTACCAGAAGTTGAAGAGACTGGTATGACCTTTGAAGAAAATGCTCGACTTAAAGCAGAGACTATTTCAAAATTAACTGGAAAAATGGTAATTTCAGATGATTCCGGATTAAAAGTAGATGCTTTAGGTGGTTTGCCAGGGGTATGGTCTGCTCGTTTTTCAGGTCCTGACGCGACAGATGCTCGTAATAATGCCAAATTATTGCATGAATTAGCCATGGTATTTGACAAAGAAAGACGTTCAGCACAGTTTCATACAACCTTAGTCGTGTCAGCTCCAAATAAAGAAAGTTTGGTAGTTGAAGCAGAGTGGCCAGGTTATATTGGTACGGAACCTAAGGGGGAAAATGGCTTTGGTTATGATCCGCTCTTTATTGTCGGAGAAGGTAGTAGGACAGCAGCTGAATTGAGCGCACAAGAAAAAAATAATCTATCACATCGTGGGCAAGCTGTCCGTAAATTGATGGAGGTATTTCCAAAATGGCAATTAGAAAAT

SEQ ID NO: 16464 - protein, 324 aa, Streptococcus agalactiae
  VARIANT 150: Xaa = Any Amino Acid
MTKTIFESKTEGNWFLGSFQAFNYFTCFGNDESYEAIQDVFHRLLSTLKVEGLQLHVVQMTSDFQLLAFLVDMINQEYSRHIKVTQHKGAILVSEDDQLFLVHLPKEGTSLEKFFDLKNDNNFGDTILIATHNEGKTKEFRELFGKLGLXVENLNDYPDLPEVEETGMTFEENARLKAETISKLTGKMVISDDSGLKVDALGGLPGVWSARFSGPDATDARNNAKLLHELAMVFDKERRSAQFHTTLVVSAPNKESLVVEAEWPGYIGTEPKGENGFGYDPLFIVGEGSRTAAELSAQEKNNLSHRGQAVRKLMEVFPKWQLEN

SEQ ID NO: 16465 - protein, 792 aa, Streptococcus agalactiae
ATGGATAGTAGGCCTATTGGCTTTCTAGATTCTGGTGTAGGTGGTTTAACGGTTGTTAAGGAAATGTTCCGTCAACTTCCAGAAGAGGAAGTAATCTTCATTGGAGATCAGGCTAGAGCTCCGTATGGTCCTAGACCTGCTCAACAGATTAGAGAGTTTACCTGGCAGATGGTTAACTTCTTATTGACTAAAAATGTTAAGATGATTGTTATAGCTTGTAATACAGCAACTGCAGTTGCCTGGCAAGAAATTAAAGAAAAACTAGACATCCCTGTTTTAGGCGTTATTTTACCAGGAGCTAGCGCAGCTATCAAATCAACTAATTTAGGGAAAGTTGGTATTATAGGTACTCCCATGACTGTTAAATCAGATGCTTATCGTCAAAAAATTCAAGCTTTGTCTCCAAATACTGCTGTGGTATCCCTTGCTTGTCCGAAATTTGTTCCAATTGTGGAATCAAATCAGATGTCTTCTAGTTTAGCCAAAAAGGTGGTTTATGAAACGTTGTCCCCATTAGTTGGTAAATTAGATACTTTAATTTTAGGTTGCACGCATTATCCCCTATTACGTCCCATCATTCAAAATGTTATGGGGGCTGAGGTTAAATTAATTGATAGTGGCGCAGAAACCGTTCGTGATATTTCTGTTTTATTGAACTATTTTGAGATAAACCATAATTGGCAAAATAAACACGGTGGTCATCACTTTTACACAACCGCCAGCCCAAAAGGTTTTAAAGAAATTGCAGAACAATGGCTTAGTCAAGAAATAAATGTGGAGCGTATCGTATTA

SEQ ID NO: 16466 - protein, 264 aa, Streptococcus agalactiae; identical to SEQ ID NO: 2952

SEQ ID NO: 16467 - protein, 236 aa, Streptococcus agalactiae
ATGTCAACAACTATTGGATTTTATTAATTATCGTCGCTTTGTTTGGTGGTCTCGTGGGAGGCATTTTTATTGCTCGTAAACAAATTGAAAAAGAGATTGGAGAGCACCCTCGTTTAACACCGGATGCTATTCGTGAAATGATGAGTCAAATGGGACAAAAACCTAGTGAAGCTAAAGTTCAACAAACATACCGTAATATTGTAAAACACGCAAAAACAGCTATCAAAACTAAAAAA

SEQ ID NO: 16468 - protein, 79 aa, Streptococcus agalactiae
MSTTIWILLIIVALFGGLVGGIFIARKQIEKEIGEHPRLTPDAIREMMSQMGQKPSEAKVQQTYRNIVKHAKTAIKTKK

SEQ ID NO: 16469 - protein, 540 aa, Streptococcus agalactiae
ATGTCAAAAAAAACAACACAAATGGTTTCTTATACTTCTATTTTAGTAGCTTTTGCAATCATGATTCCTATAATCATGCCTGCTAAAATAATTATTGGGCCTGCTTCTTTCACCTTAGCAAGCCATGTACCTTTATTTTTAAGTATTTTTATATCTGTTCCAGTTGCAATATTGGTAGCTTTAGGGACAGGACTTGGATTTCTACTAGCTGGTTTTCCGATTGTAATCGTTCTTAGAGCTTTATCACATATCGGATTTGCATTAATTGCGGCTTTCTTGATTAAGTCAAAGCCCTCTTTATTGATGAGTAAATGGCAAACATTGTTATTTGCTGTAGCTATTAACATAATTCATGGTCTGCTCGAATTTATTACTGTTTATATAATCACAATGACTTCTAACAGTAGTTCAACTTATTTATGGTCACTATTTTCTTTGATAGGACTAGGCTCTTTGCTACATGGATTGGTAGATTTTTACATAGCTCTCTTCATTTGGAAATGGATGACACAAAAGTTGGGGAAAACACTTAGGATAAGA

SEQ ID NO: 16470 - protein, 180 aa, Streptococcus agalactiae; identical to SEQ ID NO: 2956

SEQ ID NO: 16471 - protein, 519 aa, Streptococcus agalactiae
ATGAAGGCACAGGAGCGTCGAGAAAATATTTTAACGACTTTAAAAGGAACAAAAGAAGCTATATCGGCAAGCACATTAGCAAAGATTTTTAGTGTTAGTAGGCAGGTGATTGTTGGAGATATTGCCTTATTGCGTGCACAACAATGTGATATTATTTCTACCCCAAAAGGATACCTTATGTCCAGTGCTCTAAGTACTCATCAATTCACAGCTAGATTGGTTTGTCAGCATGGCATAGAACAGACAGAAGAAGAACTGGAAATTATTTTGCGGTATCAAGGAATCATTATGAATGTGGAGGTAGAGCACCCTATTTATGGGATGCTGACTGCTCCCTTAAACATTCAAAGCCAAAAAGACATTGATAATTTTACTGCTAAATTAAAAGTTTCCAATGCAGAATTGCTATCCTCTTTGACAGATGGTCTACATACACATATGATTTCTTGTCAAGATCAGTCAGTTTTTGACCAAATATGTGAGGCTCTAAAAAAAGCAGGAATTTTATACATAGACAAA

SEQ ID NO: 16472 - protein, 173 aa, Streptococcus agalactiae; identical to SEQ ID NO: 2958

SEQ ID NO: 16473 - protein, 564 aa, Streptococcus agalactiae
ATGTTTCCACAAAATATGATTGCCATCATGCAAAAAATGCCAGGGTTGTATTTTGGAGCAATCATCTTAGAATTGGTTTTAGTCTTTGTTGCTAGTGGAGCGGCGCGTCGAAACACACCAGCTGCATTACCATTATTTTTGATTTATTCAGCTTTGAATGGGTTTACTTTAAGTTTCATTATCGCAAGGTACACGCAAACTACAGTTCTTCAAGCTTTTATAACATCTGCGGCTGTTTTCTTTGCAATGGCTTTGATTGGAGCTAAGACTAAAAAAGATTTATCAGGTATGCGTAAAGCGTTAATGGCTGCTTTAATTGGGATTTTAATTGCAAGTCTTGTTAATTTATTTATCGGTAGTGGGGGTATGAGTTATATCATTAGTATCGTATGTGTCATCATCTTTTCTGGATTGATTGCTTACGATAACCAAATGATTAAATATGTCTACAATAGCCAAGGCGGCCAAGTCGCAGATGGTTGGGCAGTTTCGATGGCACTAAGCCTTTATCTTGATTTTATTAATCTATTCTTAAATATTCTTCGTCTTTTTGCACGAAATGAT

SEQ ID NO: 16474 - protein, 188 aa, Streptococcus agalactiae; identical to SEQ ID NO: 2960

SEQ ID NO: 16475 - protein, 501 aa, Streptococcus agalactiae
ATGAAAAAGTATCAAGACGATAAGGACTTCATGGATTTGGTCGGTCACCTTATTGACCATCCACGTTTCCAAAAACTCGAAGCTATTGTCCAACATCATCACTCAACTCGCTTAGAGCATTCTATAAATGTTAGTTATACAAGTTATAAAATTGCTAAGAAGTTTGGTTGGGATGCGAGTAGTACTGCTCGAGGTGGTTTACTACATGATTTCTTTTATTATGATTGGCGTGTAACGAAATTTAACAAGAGCCATGCCTGGGTTCATCCAAGGATAGCGGTTCGTAATGCGCGAAAATTAACTGATTTAAACGCTAGAGAAGAAGATATTATTTTGAAGCACATGTGGGGAGCGACTATTGCACCGCCACGTTATAAAGAAAGTTATATTGTGACTATGGTTGATAAGTATTGGGCAGTACGAGAGGCTTCTCGTCCACTCAAACGTATTTTTAAGAAACCTATCCGTTTTAGTCGCAAATTCTTAGGTAGTCATAATCAT

SEQ ID NO: 16476 - protein, 167 aa, Streptococcus agalactiae; identical to SEQ ID NO: 2962

SEQ ID NO: 16477 - protein, 741 aa, Streptococcus agalactiae
ATGACTACTATTATAACTTCAAAATCAAATAATCTCATTAAAAAAACGAAAAAGTTGTTACAAAAAAAATATCGGAAATCTTCATATCTTATTGAAGGCTGGCATTTATTTGAGGAAGCTGAAAAATATGGTGCACAATTTTTAAATATTTTTGTGACAGAAACGGCAATAGATCGTTTGAGAAAACCCGAGAGAGCTATTGTTGTTACAGATGATGTTTTGAAAGAATTAACTGACTCACAGACTCCTCAAGGGATTGTAGCTGAGATTGCCTTTCAAGAGACAAGATGGACAGATATTAAAAAAGGACGTTTTCTTGTATTAGAAGATGTGCAGGATCCAGGAAACCTAGGAACAATGGTTCGAACTGCAGATGCAGCGAATTTTGATGCTGTTTTTTTATCTCAGAAATCTGCTGATTTGTATAACCAAAAAACACTTCGTTCTATGCAAGGCAGTCACTTTCATTTACCAGTATTTAGGGTAGAAATAGAGCAGTTTGTTAACTTTTGTAAAGCAGAAGGGATAACTATGATTGCGACAACTTTATCTGAACAATCGGTAAATTATAAGAATCTCCCTAAATATGATTATTTTGCTTTAATCATGGGAAATGAGGGACAGGGAATTTCCAAAACTATGACAGAAGAAGCAGATGTTTTAGCACATATTGAAATGCCTGGACAAGCAGAAAGTCTTAATGTAGCAGTAGCTGCGGGAGTAGTCATTTTCAGCTTAATT

SEQ ID NO: 16478 - protein, 247 aa, Streptococcus agalactiae; identical to SEQ ID NO: 2964

SEQ ID NO: 16479 - protein, 276 aa, Streptococcus agalactiae
ATGAAAAAAGTTCATTTAATTGTCTCAGGGCGCGTTCAAGGAGTCGGATTTCGCTATGCAACTTATTCCTTAGCTTTAGAAATAGGTGATATTTACGGTCGCGTTTGGAATAACGATGATGGAACTGTTGAAATTTTAGCACAATCCACAGATTCAAATAAAATGACACAATTTATTCAGAAAATTCGAAAAGGACCTTCAAAATGGTCTAAAGTAACTTATGTTGATATTAAACTAGATAACTTCGATGATTTTAATGACTTTAAAATGAGTAAT

SEQ ID NO: 16480 - protein, 92 aa, Streptococcus agalactiae; identical to SEQ ID NO: 2966

SEQ ID NO: 16481 - protein, 798 aa, Streptococcus agalactiae
ATGGCCAACCTCATTACTTATTTCGCTCAACACCAAGGGCTTGGTTTTGGTGTCGCTATCATTATTGTAACCGTCATCGTACGTGTCGTTATCTTACCACTTGGACTTTATCAGTCTTGGAAAGCTAGCTATCAAGCTGAAAAAATGGCGTACTTTAAGCCTTTATTTGAACCTATTAATGAACGACTACGCAATGCTAAAACACAAGAAGAAAAATTAGCAGCTCAGACAGAATTAATGACAGCTCAACGTGAGAATGGCCTTAGCATGTTTGGCGGTATTGGCTGCTTGCCATTACTCATTCAGATGCCATTTTTCTCAGCTATTTTCTTTGCTGCACGCTATACTCCTGGAGTCTCTAGTGCAACCTTCTTGGGACTTAACTTAGGTCAAAAGAGTCTGATACTTACTGTCATTATCGCCATTCTTTATTTTGTACAATCTTGGTTGTCAATGCAAGGTGTTCCAGATGAACAACGTCAGCAAATGAAAACAATGATGTATCTGATGCCAATAATGATGGTATTCATGTCTATTAGTTTACCTGCTAGTGTTGCGCTTTATTGGTTTATTGGTGGTATTTTCAGTATTATCCAGCAGCTAGTTACGACTTATGTACTTAAGCCTAAACTACGCCGAAAAGTAGAAGAAGAATATACTAAAAATCCTCCTAAAGCCTACAAAGCTAATAACGCACGAAAAGATGTTACAAATTCAACTAAAGCCACTGAATCTAATCAAGCAATTATTACATCTAAAAAAACAAATCGTAACGCCGGAAAACAAAAAAGACGGGGA

SEQ ID NO: 16482 - protein, 266 aa, Streptococcus agalactiae
MANLITYFAQHQGLGFGVAIIIVTVIVRVVILPLGLYQSWKASYQAEKMAYFKPLFEPINERLRNAKTQEEKLAAQTELMTAQRENGLSMFGGIGCLPLLIQMPFFSAIFFAARYTPGVSSATFLGLNLGQKSLILTVIIAILYFVQSWLSMQGVPDEQRQQMKTMMYLMPIMMVFMSISLPASVALYWFIGGIFSIIQQLVTTYVLKPKLRRKVEEEYTKNPPKAYKANNARKDVTNSTKATESNQAIITSKKTNRNAGKQKRRG

SEQ ID NO: 16483 - protein, 663 aa, Streptococcus agalactiae; identical to SEQ ID NO: 11843

SEQ ID NO: 16484 - protein, 221 aa, Streptococcus agalactiae; identical to SEQ ID NO: 11844

SEQ ID NO: 16485 - protein, 855 aa, Streptococcus agalactiae
ATGAAAAAGACAATTTTACTTGGTTTAGTCGGTTTATCTGCAATGACATTAGCAGCTTGCTCAAATGGTCAATCTAACAAAGAAACAACATGGGACAATATTAAAAAAGATGGTGTCCTTAAGGTTGCTACCCCTGCAACGCTTTATCCAACAAGTTATTATGATGACCATAAAAAATTGACTGGTTATGAGATTGATATGATGAAAGCGATTGCTAAAAAACTTAAGATAAAAGTTAAGTTTGTTGAAGTTGGAGTTGCTGAATCATTTACTTCTGTAGATAGTGGTAAGGTGGATGTTGCTGTCAATAACTTTGACACAACTCCCGAGCGTTTGAAAAAATACAATTTCTCTCAACCTTATAAATATTCTGTTGGAGGTATGATTGTACGTGCAGATGGTTCTTCAAAGATTACAGCAAAAGATTTATCTGACTGGAAAGGTAAAAAAGCTGGTGGTGGCGCTGGAACGCAATATATGAAAATTGCAAAACAGCAAGGTGCTGAACCTGTTATTTATGACAATGTAACTAATGACGTTTACCTTCGAGATGTATCAACTGGACGTACAGATTTCATTCCGAATGATTACTACACACAAGTCATTGCTGTAAAATATGTAACAAAACAATATCCAGATATCAAAGTAAAAATGGGTGATGTGAAGTATAATCCGACTGAGCAAGGTATTGTGATGAGTAAAAAAGATAAGAGCCTCAAAACAAAAATTGATGCAGCTATCAAGGATATGAAGAAAGACGGTTCTTTGAAAAAAATCTCTGAAAAATATTATGCTGGTCAAGATCTCACAAAAGAACCTGCTGGAACGGATAAAATTCCAGTAATTAAAGTTAAA

SEQ ID NO: 16486 - protein, 285 aa, Streptococcus agalactiae
MKKTILLGLVGLSAMTLAACSNGQSNKETTWDNIKKDGVLKVATPATLYPTSYYDDHKKLTGYEIDMMKAIAKKLKIKVKFVEVGVAESFTSVDSGKVDVAVNNFDTTPERLKKYNFSQPYKYSVGGMIVRADGSSKITAKDLSDWKGKKAGGGAGTQYMKIAKQQGAEPVIYDNVTNDVYLRDVSTGRTDFIPNDYYTQVIAVKYVTKQYPDIKVKMGDVKYNPTEQGIVMSKKDKSLKTKIDAAIKDMKKDGSLKKISEKYYAGQDLTKEPAGTDKIPVIKVK

SEQ ID NO: 16487 - protein, 1458 aa, Streptococcus agalactiae
ATGGTTTTTAAAGATGCTACCGCTATGGTACAAGCGATAAAACAGCATAAGATTTCGTCGCAAGAATTAGTAGAGCAAGCAATCTACAAGATCGAGGAACAGAATGTAAGCGTTAATGCTGTTGTCAGCAAGCAATATAATGAGGCGCGTCAAGCAGCCAAATACGCAAATGAATCAAATGCTCCTTTTGCAGGAGTTCCTATTCTTCTGAAAGATTTGGGACAGAATCAAAAAGGACAACTCTCAACCTCAGGTTCACAATTATTTAAACACTATCATGCTAAACAAACGGACTATTTAGTGCAGTCCTTTGAAAAATTAGGGTTTATTATTTTAGGAAGAACAAATACCCCTGAATTTGGTTTTAAGAATATTAGTGATGGTCAACTTCACGGGAATGTTAATCTTCCATTTGACCATTCAAGAAATGCTGGAGGCTCTAGTGGTGGTGCAGCCGCAGCTGTTAGTTCAGGAATGGTTCCAATTGCAGGAGCTAGTGATGGAGGAGGGTCAATCAGAATTCCAGCAAGTTTTAATGGTTTGATTGGTTTAAAACCGAGTCGAGGACGTATACCAGTTGGACCTTCATCCTATAGAGGTTGGCAAGGGGCTTCTAGTCATTTTGCTTTAACAAAGTCAGTTAGAGATACAAAACGACTATTATATTATTTACAATCATATCAAGTAGAAAGCCCATTTCCCCTGAAAAAACTCAGCAAAGAGAGTCTTTTCGAGTTTAGCGTTAGTAAACCCCTAAAAATAGCAGTATTGATGGATTCTCCCTTAAAAACAAAGGTATCAAGTGAGGCTAAAGCAGCTATTAAAGAAGCCGCAGATTTTCTGTCTCAAAAAGGGAATCATTTAGAATTAGTAGAACAACCTTTAGATGGTATTCATTCTATGAAAACTTATTGTATGATGAATAGCGTTGAAACAGCAGCAATGTTTGATGACATCGAAAAGAGTTTAGGGCGTTCAATGGAATTTAGCGATATGGAATTAATGACCTGGGCTATGTATCAGAGTGGACAAAGGGTATTGGCTAAAGATTACAGTAAACTCTTAGATTCATGGGATCAATTTGCAGCTACCATGGCGAGGTTTCATGAAAATTATGATTTAATTTTAACAGCAGCAACTAATCAACCAGCTCCTTTTCATGGACAATTTGATTTAGACGAGACACTCCAGAAACAATTGAGGCATATGGGAGAATTCTCAGTAAGTGAACAACAGGATTTAATTTGGAAAATGTTTGAAGACTCAATGGCCTGGACACCTTTTACACATCAGCCAAACTTGACAGGGCAACCTTCTTTAGCCATACCAACTCATCTAACTAAAGAGGGGCTACCTTTAGGTGTACAATTGACAGCGGCTAAAGGGAGAGAAGATTTATTGCTTGCTGTTGCAGAGTTGTTTGAAAAAGAGAAGCAATTCAAAGGGCCTGTTTACCAT

SEQ ID NO: 16488 - protein, 486 aa, Streptococcus agalactiae; identical to SEQ ID NO: 2974

SEQ ID NO: 16489 - protein, 480 aa, Streptococcus agalactiae
ATGGCAGAAAAAACTTACCCAATGACACAAGTGGAAAAAGATCAACTTGAAAAAGAACTTGAAGAGTTAAAATTAGTTCGTAGACCAGAAGTTGTAGAGCGTATCAAGATTGCTCGTTCTTATGGTGACTTATCAGAAAATAGCGAATATGATGCAGCAAAAGACGAACAAGCATTTGTTGAGGGTCAAATTCAAATTTTAGAAACAAAAATTCGTTATGCTGAAATTATTGATAGTGATGCAGTTGCTAAAGATGAGGTTGCAATTGGTAAAACTGTCCTTGTCCAAGAAGTTGGTACAAATGATAAAGATACTTACCATATCGTTGGTGCTGCTGGAGCTGACATTTTTTCAGGAAAAATTTCGAATGAAAGCCCAATTGCTCATGCTTTAATTGGTAAAAAAACAGGAGACTTAGCTACAATTGAATCACCTGCTGGTAGCTATCAAGTTGAAATCATTAGTGTTGAAAAAACAAAT

SEQ ID NO: 16490 - protein, 160 aa, Streptococcus agalactiae; identical to SEQ ID NO: 2976

SEQ ID NO: 16491 - protein, 1800 aa, Streptococcus agalactiae
TTGACCGAATTTAATGACGATCAGCATTCTAACCATGATCAGAAAAGTTTTAAAGAACAAATTCTGGCAGAGTTAGAAGAAGCTAACCGTTTGAGAAAGTTGCGTGAAGAAGAACTCTATCAAAAAGAGCAAGAAGCCAAAGAAGCTGCTCGCAGAACAGCACAATTGATGGCAGATTATGAAGCGCAACGTTTGAAAGACGAACAAGAAGCTAGAGCAAAGGCGCTAGAGACTAAGCAACGCTTAGAAGAGCAAGAGAAGGCTCGGATTGAGGCGAAACTTCTGGCAGAAGCTGCTCGAGAAGAAGAAAGACGTCAGGCGGAACAAGCATTAGCTTCCCAAGAAGAACAAGTTATCAATCAAGGGATGGAACCTTCAAGAGAGCTTGATAGCGGCTCCAAATCTAGTGAATTTAGGACAACTGAAAATGTACCTGACATAGATTTAAAAGCAGATAAGACTGATGTTGCAACTGCTGTGCCTAATCAAGAAACGGAAGAAATCTTTCTTGTGAGAGCAACAGATATTCCTACAGAAGGTGAAAATGTAAAACTTGGTGAGACATCAGAGTTAGAGCCCGTAGCAAAGGAACCTATCCGAGTAGAGGATTTGTCAAAAGAAGAAGAGGGTATAGCTTTGTCAGCCAAGAACAAACATAACAAGCGTGAAAGACGTCAGAAAGCAGATAATGTGGCAAAACGAATTGCACGTATTCTGATATCAATTATCATACTTGTATTGCTCTTGACAGCATTTGTAGGTTATCGTTTTGTAGATAGTGCTATTAAACCTGTTGATTCCAATTCAAATAAATTTGTACAAGTTGAAATTCCGATAGGATCTGGGAATAAATTAATTGGTCAAATTTTAGAAAAAGCAGGAGTCATTAAGAGCGCCACAGTCTTTAATTACTATTCCAAGTTCAAAAACTATAGTAATTTTCAAAGTGGATACTACAATCTTAAAAAAAGTATGACTTTAGATCAGATTGCTGCTGAATTGGAAAAAGGCGGAACTGCAGAACCGACAAAACCAGCTTTAGGTAAGATATTAATTACCGAGGGTTACACTATTAAACAGATTGCTAAAGCTATTGAGTCTAATAAAATTGATACAAAGACTACAAGTACACCTTATAAAGCTGATGATTTCTTGAAACTTGTTCAAGATGAAACGTTTATTAAAAAAATGGTAGCTAAATATCCAAATTTACTAGGAAGTTTACCTGATAAATCAAAAGCTATTTATCAATTGGAAGGATATTTATTCCCAGCTACCTACAACTATTATAAAGATACAACCTTAGAAGGACTTGTTGAAGATATGATTTCAACAATGAATACTAAGATAGCACCTTACTATAACACTATTAAAGCGAAGAATATGTCTGTAAATGATGTTTTGACATTATCATCTCTTGTTGAAAAAGAGGGATCAACAGACGAAGATCGCCGTAAAATAGCAAGTGTCTTTTATAACCGATTATCAGCCGGTCAAGCTCTTCAAAGTAACATTGCAATTTTGTATGCTATGGGGAAATTAGGTGATAAAACAAGTTTAGCTGAAGATGCTCAAATTAATACTTCAATTAAATCACCATACAACATCTATACTAATACTGGTTTGATGCCTGGACCAGTTGATAGTCCAAGTATCTCAGCAATTGAAGCGACTATAAAACCTGCTTCAACAGATTACCTTTATTTTGTCGCTGATGTGAAGACCGGAAATGTATACTACGCTAAAGATTTTGAAACACACAAGGCTAACGTTGAAAAATATATCAATAGTCAAATTAAC

SEQ ID NO: 16492 - protein, 600 aa, Streptococcus agalactiae
MTEFNDDQHSNHDQKSFKEQILAELEEANRLRKLREEELYQKEQEAKEAARRTAQLMADYEAQRLKDEQEARAKALETKQRLEEQEKARIEAKLLAEAAREEERRQAEQALASQEEQVINQGMEPSRELDSGSKSSEFRTTENVPDIDLKADKTDVATAVPNQETEEIFLVRATDIPTEGENVKLGETSELEPVAKEPIRVEDLSKEEEGIALSAKNKHNKRERRQKADNVAKRIARILISIIILVLLLTAFVGYRFVDSAIKPVDSNSNKFVQVEIPIGSGNKLIGQILEKAGVIKSATVFNYYSKFKNYSNFQSGYYNLKKSMTLDQIAAELEKGGTAEPTKPALGKILITEGYTIKQIAKAIESNKIDTKTTSTPYKADDFLKLVQDETFIKKMVAKYPNLLGSLPDKSKAIYQLEGYLFPATYNYYKDTTLEGLVEDMISTMNTKIAPYYNTIKAKNMSVNDVLTLSSLVEKEGSTDEDRRKIASVFYNRLSAGQALQSNIAILYAMGKLGDKTSLAEDAQINTSIKSPYNIYTNTGLMPGPVDSPSISAIEATIKPASTDYLYFVADVKTGNVYYAKDFETHKANVEKYINSQIN

SEQ ID NO: 16493 - protein, 501 aa, Streptococcus agalactiae; identical to SEQ ID NO: 11853

SEQ ID NO: 16494 - protein, 167 aa, Streptococcus agalactiae; identical to SEQ ID NO: 11854

SEQ ID NO: 16495 - protein, 1329 aa, Streptococcus agalactiae; identical to SEQ ID NO: 11855

SEQ ID NO: 16496 - protein, 443 aa, Streptococcus agalactiae; identical to SEQ ID NO: 2982

SEQ ID NO: 16497 - protein, 615 aa, Streptococcus agalactiae; identical to SEQ ID NO: 11857

SEQ ID NO: 16498 - protein, 205 aa, Streptococcus agalactiae; identical to SEQ ID NO: 7624

SEQ ID NO: 16499 - protein, 96 aa, Streptococcus agalactiae; identical to SEQ ID NO: 7625

SEQ ID NO: 16500 - protein, 32 aa, Streptococcus agalactiae; identical to SEQ ID NO: 2986

SEQ ID NO: 16501 - protein, 3096 aa, Streptococcus agalactiae
ATGAGTAGAATGATTCCAGGACGTATTCGAAATCAAGGTATAGAACTCTACGAACAAGGTTTGGTGTCCTTGATTTCTCAAGAAGGTAATCTATTAAAAGCTAAAGTTGGGGATTGTCAGATTGAATATTCATTAGTAACAGAAGAAACAAAATGTTCTTGTGATTTTTTTGCAAGAAAAGGCTATTGTCAACATTTAGCTGCTCTGGAGCATTTCTTGAAAAACGATCCAGAAGGTAAAGCAATCTTATCTAAAGTTCAAGTTCAACAAGAAAGTCAACAAGAAACTAAGAAGAAAACCTCTTTTGGTAGTGTTTTTTTAGATAGTCTAATTATTAATGAAGATGATACTATAAAATATCAATTATCGGCTCAAGGAGAACAAAATCCTTATGCTAATGATATCTGGTGGACTTTAAAAATTAGACGACTGCCTGATGATAGAAGTTATGTTATTCGTGACATCAAAGCCTTTTTAAATACTGTTCGAAAAGAAGCTTATTATCAGATTGGAAAACAATACTTTGAAACTTTGTCTTTGATACAGTTTGATGAGACCAGTCAAGAATTGATAGAATTTTTATGGAGGCTCATTCCAAGTCATTCAAGCAAAATTGATCTAGAGTTTATTTTACCAAATCAAGGTCGTCACCTTAGTCTCACTCGTGGTTTTTTTGAAGAGGGTGTTACTTTGATGAATGCTTTAGAAAATTTTTCATTTGAAAGTGATTTTCATCAATTTAATCACCTCTACTTTAAGGAATTAGAAGGTGAGGATCATCTTTATCAATTTAAGGTTATTGTCCATAGGCAATCAATTGAATTAGAAATCAAAGAGAAAGACTTAAAACCACTATTTGCGAATTCTTATTTGTTTTATCGCGATACTTTCTACCATCTTAATTTGAAGCAAGAAAAGATGGTAACGGCTATTCGTAGTCTTCCCATTGAGGGAGATTTAGCAAAACATATCCATTTTGATTTAGATGATCAAGATAAGTTAGCAGCTCATTTACTGGATTTTAAGGAGATTGGACTAGTGGATGCTCCACGGAGCTTCTCTATTCATGATTTTAAGGTAAATTTTGAGTTCGATATTAATAGTCAAAATGAAATTTTATTGCAAATGGTATTTGATTATGGTAATGATTTAACTGTTCATAATCGTCAAGAACTAGAACAGTTAACATTTGCTAGTCACTTCAAACATGAAGAAAAAGTATTTAAACTCTTAGAAAAATATGGCTTTGCACCCCACTTTTCAACCAGCCATCCAGCATACAGTGCACAAGAATTATACGATTTTTATACCTATATGCTTCCACAATTTAAAAAAATGGGAACAGTGAGCTTATCCGCAAAATTGGAAAGTTATCGTCTCATAGAACGACCGCAAATTGATATTGAAGCTAAGGGAAGCCTGCTAGATATTTCTTTTGATTTCTCTGATTTACTGGAAAACGATGTTGATCAAGCTCTGGTAGCTTTGTTTGACAATAATCCTTATTTTGTGAATAAATCAGGGCAATTAGTTATTTTTGATGAAGAAACTAAGAAAGTAAGTGCAACTTTGCAAGGGTTGAGAGCTAGACGAGCAAAGAATGGGCATATTGAATTAGATAATATTGCAGCATTTCAATTATCAGAACTGTTTGCAAATCAAGATAATGTTAGCTTTTCACAACATTTTTACCAATTGATTGAAGATTTGAGACACCCAGAAAAGTTTAAAATACCTGGTCTATCTGTTTCAGCTTCCTTGCGCGATTATCAGCTTACAGGTGTCCGTTGGTTAAGTATGTTAGATCATTATGGCTTTGCAGGGATTTTAGCTGATGATATGGGGCTTGGAAAAACACTTCAAACGATTTCATTTTTAAGTACAAAACTAACTAGAGATTCTCGTGTGCTTATTTTATCACCATCAAGTTTAATTTATAATTGGCAAGATGAATTCCACAAATTTGCGCCAGACGTAGATGTAGCAGTTGCCTATGGTTCTAAGATTCGTAGAGATGAAATTATTGCTGAACGTCATCAAGTAATCATTACAAGTTATTCATCATTTAGGCAGGATTTTGAGACTTATTCTGAAGGAAATTATGATTATTTAATTTTGGATGAAGCACAGGTTATGAAAAATGCTCAAACTAAAATAGCCCATAGCTTGAGATCTTTTGAGGTCAAAAACTGTTTTGCATTATCGGGAACACCTATTGAGAATAAACTGTTAGAAATTTGGTCCATTTTCCAGATCATTTTACCTGGTTTATTACCTGGTAAGAAAGAGTTTTTGAAGTTGAACCCTAAACAAGTTGCTCGTTATATCAAACCATTTGTGATGAGACGTCGAAAAGAAGAAGTTCTCCCAGAATTACCGGATTTGATTGAAATGAACTATCCAAATGAAATGACAGACAGTCAAAAAGTTATCTATTTGGCGCAATTACGCCAAATTCAAGAAAGTATCCAACATTCTAGTGACGCTGACTTAAATCGTCGTAAAATTGAAATTTTATCTGGCATCACACGATTACGTCAAATTTGTGACACTCCACGTCTTTTTATGGATTATGATGGTGAAAGCGGTAAGTTAGAAAGCCTACGTCAACTTTTAACACAAATTAAGGAAAATGGACATCGTGCTCTGATTTTTTCTCAGTTCAGGGGTATGTTAGATATCGCAGAACGTGAGATGGTAGCTATGGGGCTTACAACTTATAAAATTACTGGTTCTACACCAGCAAATGAACGTCATGAAATGACCAGAGCATTTAATGCAGGATCAAAAGATGCTTTCTTGATTTCTTTAAAAGCTGGTGGCGTTGGTCTCAACCTTACAGGAGCTGATACCGTTGTTCTGATTGACTTGTGGTGGAATCCAGCTGTTGAAATGCAGGCGATTAGTCGCGCACATAGGTTGGGGCAAAAAGAGAATGTCGAGGTTTATCGCTTGATTACTAGAGGCACAATCGAAGAAAAAATTCTAGAAATGCAAGAAACTAAAAAACATTTGGTTACAACAGTTCTGGATGGAAATGAAACCCATGCTAGCATGAGCGTAGATGATATTCGAGAGATACTTGGAGTTTCTAAA

SEQ ID NO: 16502 - protein, 1032 aa, Streptococcus agalactiae; identical to SEQ ID NO: 2988

SEQ ID NO: 16503 - protein, 1308 aa, Streptococcus agalactiae
ATGGTATTACCTACAGTTGCTATTGTTGGTCGTCCGAATGTTGGAAAATCAACATTATTTAACAGAATTGCAGGAGAACGTATTTCCATTGTTGAGGACGTTGAAGGAGTCACTCGTGATCGTATCTATACAACGGGTGAGTGGCTAAATCGTAAGTTTTCATTAATTGATACTGGTGGGATTGATGATGTTGATGCACCGTTTATGGAGCAAATTAAGCACCAAGCAGACATTGCTATGACAGAGGCTGATGTTATTGTGTTTGTTGTGTCGGGTAAAGAAGGTGTGACTGATGCAGATGAGTATGTCTCACGTATTCTTTATAAGACCAATAAACCGGTTATTTTAGCTGTTAATAAGGTAGATAATCCTGAGATGCGCAATGATATTTACGATTTCTACTCTCTTGGTTTAGGGGATCCTTATCCCTTGTCATCAGTTCATGGTATTGGTACTGGTGATATATTGGATGCTATTGTGGAAAATCTTCCGGTAGAAGAGGAAAATGAAAATCCAGATATTATTCGTTTTAGTTTGATTGGACGTCCAAATGTTGGGAAATCTAGTTTAATTAATGCCATCCTTGGGGAAGACCGTGTTATTGCTAGCCCAGTTGCTGGTACTACGCGCGATGCTATTGATACTAATTTCGTTGATAGCCAGGGGCAAGAGTATACTATGATTGATACTGCTGGTATGCGTAAATCTGGTAAGGTATATGAAAACACAGAGAAATATTCTGTTATGCGTTCTATGCGCGCCATCGACCGCTCAGATGTTGTTCTTATGGTGATTAATGCAGAGGAAGGTATTCGTGAGTATGACAAGCGTATTGCAGGGTTTGCACATGAAACTGGTAAAGGTATTATTATTGTAGTTAATAAATGGGATACTATCGAAAAAGACAATCATACTGTCAGTCAGTGGGAAGCTGATATACGTGATAACTTCCAATTCTTGTCTTATGCGCCAATTATCTTTGTTTCTGCAGAGACAAAGCAACGTTTGCACAAGTTACCAGATATGATTAAACGTATTAGCGAAAGTCAAAACAAACGTATTCCGTCTGCTGTATTAAATGATGTGATTATGGATGCTATTGCTATTAATCCAACACCAACTGATAAAGGAAAACGACTTAAGATTTTCTACGCAACTCAAGTTGCTGTTAAACCACCAACTTTCGTTGTTTTTGTTAACGAAGAAGAATTGATGCACTTTTCATATCTTCGTTTCTTAGAAAATCAAATCCGTGAAGCATTTGTTTTTGAAGGAACACCAATTAATCTAATAGCACGTAAACGTAAA

SEQ ID NO: 16504 - protein, 436 aa, Streptococcus agalactiae; identical to SEQ ID NO: 2990

SEQ ID NO: 16505 - protein, 828 aa, Streptococcus agalactiae
ATGATTTTAGCAGATGCTCAGGTAGCGGAGTTCATTAAAACCCACCAACTTTCTCAGCGTGAAATAAATATCAGCATGTCTAAATTTAATCAATTTTTGATTGAGCGTCAGAAATTTAAAAATAAGGATAGTCAATATATTGCTAAAGGCTATGAGCCTATTTTGGTTATGAATGAAGGTTATGCAGATGTTTCTTATTTAGAAACACGAGAGTTAATTGAAGCACAAAAAAAACAAGCTATCAGTGATCGTATTAATTTAGTTAATCTACCCAAGTCCTATCGGAATATCAGAATGACTGACTTTGATATTAATAACGAGAGTCGAATGAAAGCTATGTCACAACTGCTTGATTTTGTAGAGACTTATCCTTCATATAATCACAAGGGGCTTTATTTATATGGAGATATGGGGGTTGGGAAATCCTATTTAATGGCAGCAATGGCGAGGGAATTATCAGAGAGAAAGGGTGTGTCAACGACTCTTCTTCATTTCCCTAGTTTTGCTATTGATGTCAAAAATGCTATTTCAAGCGGAACTGTAAAAGATGAAATTGATGCTGTGAAAAGTGTTCCGATTTTGATTTTAGATGATATTGGGGCTGAACAGGCAACGTCCTGGGTTCGTGACGAGATTTTACAAGTTATATTACAACATCGTATGCTAGAAGAGTTGCCCACTTTCTTTACGTCAAATTATAGTTTTAACGATTTGGAAAGAAAATGGGCTAATATAAAAGGAAGCGACGAAACTTGGCAAGCAAAACGAGTTATGGAGCGCGTACGGTATTTAGCGATAGAATTCCACTTAGAAGGACCGAATCGCCGT

SEQ ID NO: 16506 - protein, 276 aa, Streptococcus agalactiae; identical to SEQ ID NO: 2992

SEQ ID NO: 16507 - protein, 1173 aa, Streptococcus agalactiae
ATGAGTCCAATAGATGAGTTTACATATATTAAGCAAAATAAGATTGTTTATGATAGTAATAGTTTAATACAATTGTATTTCCCAATTATGGGAAGTGATGCCATGGCACTCTATGATTATTTTGTTCATTTTTTTGATGACGGAATACGACGTCATAAATTTTCAGAGGTTCTCAATCATCTGCAATACGGGATGCCAAGATTTCAAGATGCATTGGTAATGTTAACAGCTTTGGATTTGTTGACTGTTTACCAAGCCACAGGTACTTACCTTGTTAAGTTGAATCAAGCTATGTCAAATGAGTTATTTTTATCTAATCCCATCTATCGTCGTTTGTTAGAAAAACGTATAGGAGAGGTAGCAGTGGCAGAATTAGATATGAAAATACCTAAAAATGCTAGAGATATCTCTAAAAAATTTACAGATGTTTTCTCGGATTTAGGACAACCAAAACAAGAGGTAAACCGGAGTAAAAATGTTTTTGACTTGGAAAGTTTCAAACGTTTGATGATGCGAGATGGCTTACGTTTTAACAATGAAAAAGATGATGTCTTAGGTATTTATAGTGTATCAGAACTTTATCATTTAAATTGGTATGATACCTATCAATTAGCAAAACAAACAGCTATCAATGGAATGATTGCGCCTCAGCGAATGAAACTTCAACAAAATGAGGGGCAGCATATTAAAGATAATCAGAGTTTTACAAATAATGAAAAGGTCATACTAAGGGAATCTAAAAATGATAGTGCTCTAGTGTTCCTTGAAAAAATCAAGAGAAGCCGTAAGGCAGTGACAACAAGTGGTGAGAAGACTTTACTTGAGGATTTGGCAAAAATGAATTTCCTAGACGAAGTCATTAATGTTATGGTTTTATATACCTTGAATAAGACAAAATCTGCTAACTTAAATAAGGCCTATATCATGAAAGTTGCTAATGATTTTGCCTTTCAGAATGTTATGACGGCCGAAGATGCTGTGCTTAAAATTCGTGATTTTTCAGATCAAAAAGTAAGGACTAAAACAGAAACGAAGAAGAAACAATCGAATGTTCCTGAATGGAGTAATCCTGATTATAAAGATGAGGTTAGCCCAGAAAAAGAAATTGAATTAGAACAGTTTAAAACAGATGCCCTCAAGCGTTTAGAACGATTAGGAAAGGATGGTGAATCA

SEQ ID NO: 16508 - protein, 391 aa, Streptococcus agalactiae
MSPIDEFTYIKQNKIVYDSNSLIQLYFPIMGSDAMALYDYFVHFFDDGIRRHKFSEVLNHLQYGMPRFQDALVMLTALDLLTVYQATGTYLVKLNQAMSNELFLSNPIYRRLLEKRIGEVAVAELDMKIPKNARDISKKFTDVFSDLGQPKQEVNRSKNVFDLESFKRLMMRDGLRFNNEKDDVLGIYSVSELYHLNWYDTYQLAKQTAINGMIAPQRMKLQQNEGQHIKDNQSFTNNEKVILRESKNDSALVFLEKIKRSRKAVTTSGEKTLLEDLAKMNFLDEVINVMVLYTLNKTKSANLNKAYIMKVANDFAFQNVMTAEDAVLKIRDFSDQKVRTKTETKKKQSNVPEWSNPDYKDEVSPEKEIELEQFKTDALKRLERLGKDGES

SEQ ID NO: 16509 - protein, 477 aa, Streptococcus agalactiae; identical to SEQ ID NO: 11869

SEQ ID NO: 16510 - protein, 159 aa, Streptococcus agalactiae; identical to SEQ ID NO: 7636

SEQ ID NO: 16511 - protein, 1503 aa, Streptococcus agalactiae
GTGAAAAATAAAAAAGATCAGTTTATAGGGGTAAAACAACCTCTGTCAAAAAAATTATCGCAATTAGTTTTTATCTTATTTTTTAGCCTATTTACAGTATTTTCTGTTTTAGTTTATACTTCGGCAACAAGATACGTCCTTCACAGGGAAAAAATTAATGTCGGTAGGTCATTAGAAAAAACTAGAGTTCGTTTGTCGCAAGCGAACTCTAGTTTGACATCCGATGATATTTTAGAGATCCTGTACAACCAGGTTTTTGCGGATGACATCTATCCTCATAAGCGTCAAAATGGAATTGTTAGAACGGGCGAGTCAATCGATAGTATTCTTTATGTTAATCAAGAAATGACCCTATACGATGTCAACAGGAAACCAGTTTTTTCTACACTGAGAACGGGTATGCCAACTATTGGTAAATCCATGGGAAAAGTTATCATCTCTAAAGTTGCAGATATGGAAGGTTTTGTTGGTACAAAAGCAATCTACTCTCAAAAAACAGGACAGTTGCTTGGATACGTTCAAATTTTCTATAATTTAGGTCGTTATTATAGTATGAGGCAAAACATCATTGTTTTCTTGATTATGATGGAAGTTTTAGGGACTGTTTTAGCCTTGGTCGTTATTAATAGTGCTACTAAGCGTATTGTTCGTCCGGTTAAAAATTTACACGACTTAATGCATCAGATATCTGAAAATCCTAGTAATTTAGAAATTAGAAGTAAGGTCCGTTCAGAAGACGAAATTGGAGAATTGTCTAGGATTTTTGATGGGATGTTGGATCAGTTGGAAGACTATACTCGTCGACAATCACAATTCATTAGTGATGTTAGTCATGAATTAAGAACGCCTGTCGCTGTTGTAAAGGGTCATATTGGTTTATTACAACGTTGGGGGAAAGATGATCCAGAAATTCTTGAAGAAAGTTTAGCAGCGGCATACCATGAGGCAGATCGTATGTCCTTAATGATTAATGACATGTTAAATATGATTCGCGTCCAAGGAAGCTTGGAACTTCATCAAGATGAAGTGACAGATTTATCAAGCTCTATATCAGTTGTTATTGAAAATTTCCGTATTTTGAGAGAAGATTTTCAATTTATTTTTGAAAATAATATTTCAGATATCGTTTGGGGAAAGATATATAAGATACATTTTGAGCAAGCTCTCATGATCTTAATTGATAACGCTATCAAGTACTCTCCTAGTTATAAAGAAGTCAGTGTTGTTTTATCAGTAGACAATGATTTTGCGACAGTAGTTGTAAAAGATAAAGGAGAAGGTATCTCAGATGAAGATATTGAGTTTATCTTTGATCGTTTTTATCGAACTGATAAATCACGTAACAGAGAAAGTACACAAGCTGGTTTAGGTATCGGGCTTTCAGTGTTTAAACAAATTATGGATGCTTACCATTTAAAGGTGGATATTAAAAGTGAACTAAATCAAGGGACTGAATTCATTGTTCGCATTCCTATAAAAAAATTTGAAGAAACTAAAGAAATA

SEQ ID NO: 16512 - protein, 501 aa, Streptococcus agalactiae; identical to SEQ ID NO: 7638

SEQ ID NO: 16513 - protein, 687 aa, Streptococcus agalactiae
ATGGGTAAAAAGATCTTAATAATCGAAGATGAGAAAAATTTAGCTCGCTTCGTCTCGTTAGAACTACTACATGAAGGATATGATGTTGTTGTTGAAACAAACGGTCGTGAAGGATTGGACACAGCATTAGAAAAAGATTTTGATTTGATTCTACTGGATTTAATGCTTCCAGAGATGGATGGTTTCGAAATCACACGTCGCCTGCAGGCTGAAAAAACAACCTATATCATGATGATGACAGCACGTGATTCTGTTATGGATATTGTAGCTGGTCTTGATCGTGGAGCAGATGATTATATTGTTAAGCCGTTTGCAATCGAAGAATTATTAGCACGTGTTAGAGCGATTTTCCGACGCCAAGAAATTGAAACGAAGACAAAAGAAAAAGGTGATAGTGGTAGTTTCCGTGATTTGTCATTAAATACTCATAATCGTTCAGCGATGCGTGGTGATGAGGAAATTTCACTAACAAAACGTGAATTTGATTTGTTGAATGTCTTGATGACAAATATGAATCGTGTTATGACACGAGAAGAGTTGCTAGAACATGTTTGGAAATACGATGTGGCAGCAGAGACAAACGTTGTTGATGTTTATATCCGTTACCTAAGAGGTAAAATTGATATCCCAGGCCGTGAATCATATATTCAAACTGTTCGCGGAATGGGCTATGTGATTCGTGAAAAA

SEQ ID NO: 16514 - protein, 229 aa, Streptococcus agalactiae; identical to SEQ ID NO: 3000

SEQ ID NO: 16515 - protein, 456 aa, Streptococcus agalactiae
ATGGAGCGTCATTCAGAGATAATGGATATTTCTGATATTCAAGTTTCAGGTCATGTGGTGTATGAAGATGGTCTCTATCTACTTGACTATAATATGGCTTACGATATTACATTACCGTCTAGTCGTTCTATGAAACCAGTTGTTTTATCTGAAAAGCAAACTATTAATGAAGTTTTTATTGAAGCTGAAAATGTTAGCACTAAAAAAGAGCTCGTTGATCAGGAGTTGGTCTTAATATTAGAGGAAGATGATATTAATTTAGAAGAAAGCGTTATCGATAATATCTTGTTAAATATACCTCTTCGTGTTCTGGCAGCTGATGAGGTTGGGGTAGAAGCGGATTTATCAGGTAAAAATTGGTCGTTAATGACTGAAAAGCAGTATGAAGAAAAACAAGCTAAAGAAAAAGAAAAATCTAATCCTTTCGCAGCCTTAGAAGGTATGTTTGATAGTGAT

SEQ ID NO: 16516 - protein, 152 aa, Streptococcus agalactiae; identical to SEQ ID NO: 3002

SEQ ID NO: 16517 - protein, 888 aa, Streptococcus agalactiae; identical to SEQ ID NO: 11877

SEQ ID NO: 16518 - protein, 296 aa, Streptococcus agalactiae; identical to SEQ ID NO: 3004

SEQ ID NO: 16519 - protein, 552 aa, Streptococcus agalactiae; identical to SEQ ID NO: 11879

SEQ ID NO: 16520 - protein, 184 aa, Streptococcus agalactiae; identical to SEQ ID NO: 3006

SEQ ID NO: 16521 - protein, 711 aa, Streptococcus agalactiae; identical to SEQ ID NO: 7649

SEQ ID NO: 16522 - protein, 237 aa, Streptococcus agalactiae; identical to SEQ ID NO: 7650

SEQ ID NO: 16523 - protein, 1377 aa, Streptococcus agalactiae; identical to SEQ ID NO: 11883

SEQ ID NO: 16524 - protein, 459 aa, Streptococcus agalactiae; identical to SEQ ID NO: 11884

SEQ ID NO: 16525 - protein, 669 aa, Streptococcus agalactiae
ATGAAAACAAAAATTATTGGTGTACTTGGTCTAGGAATATTTGGACAAACACTCGCACAAGAACTAAGTAACTTTGAACAAGATGTTATTGCTATTGACAGCAATCCTGAAAATGTACAAGCTGTCGCCGAAGTTGTTACAAAAGCAGCTATCGGAGACATTACTGATTTAGCTTTCCTAAAACACATCGGGATCAGTGACTGTGATACTGTTATTATTGCTACAGGAAACAGTTTAGAGAGCTCAGTATTGGCCGTAATGCACTGTAAAAAGTTAGGCGTCCCACAAGTTATTGCTAAAGCTCGAAACCTTGTATACGAAGAAGTACTTTATGAAATTGGTGCTGATTTGGTTATCTCTCCGGAGCGAGAATCTGGGCAAAATGTTGCTGCAAACCTCATGAGAAATAAAATTACAGATGTCTTCCAGATTGAATCTGATATTTCTGTCATTGAATTTAAAATTCCCAAATCATGGGTAGGGAAAACTGTCGAACAATTAAATATCCGTCACAAGTTTGATCTTAACCTCATAGGTATCAGAAAAGCAAAAAACAAACCTGTCGATACCGAAGTTCCAATCAATACTCCACTTGAAGAAGGTATTATTCTAGTGGCTATCGCTAACTCAGATGCCTTCCAACGCTATGACTATTTAGGATACTTTAAC

SEQ ID NO: 16526 - protein, 223 aa, Streptococcus agalactiae
MKTKIIGVLGLGIFGQTLAQELSNFEQDVIAIDSNPENVQAVAEVVTKAAIGDITDLAFLKHIGISDCDTVIIATGNSLESSVLAVMHCKKLGVPQVIAKARNLVYEEVLYEIGADLVISPERESGQNVAANLMRNKITDVFQIESDISVIEFKIPKSWVGKTVEQLNIRHKFDLNLIGIRKAKNKPVDTEVPINTPLEEGIILVAIANSDAFQRYDYLGYFN

SEQ ID NO: 16527 - protein, 828 aa, Streptococcus agalactiae; identical to SEQ ID NO: 11887

SEQ ID NO: 16528 - protein, 276 aa, Streptococcus agalactiae; identical to SEQ ID NO: 11888

SEQ ID NO: 16529 - protein, 1674 aa, Streptococcus agalactiae
ATGAAAGATTTTATTGAATGGAAGGATTTTACCTTTCAATATGACGTTCAATCTGAACCAACTTTAAAAGGGATTAACTTAAGCATTCCTAAAGGTGAAAAGGTCTTGATATTAGGACCTTCAGGGTCGGGGAAGTCAACGCTTGGTCATTGTTTAAATGGTATTATCCCAAATACTCATAAAGGCCAATATAGTGGTATTTTTACGATTAACCATAAAAATGCTTTTGACTTGTCAATATATGACAAGTCTCATTTAGTTTCTACGGTTTTACAAGATCCAGATGGCCAATTTATAGGATTGACAGTAGCAGAAGATATTGCTTTTGCATTAGAAAATGATGTTGTAGCACAGGAAGAAATGGCCTCTATCGTTGAAATGTGGGCAAAACGTTTAGAAATAGCTCCTCTTTTGTCTAAACGTCCACAAGACTTGTCGGGAGGACAAAAACAACGGGTTAGTTTAGCTGGAGTTTTAGTAGACGATAGCCCAATTCTATTATTTGATGAGCCTTTGGCTAATCTAGATCCACAATCGGGACAAGATATCATGGCATTGGTTGACCGTATTCATCAAGAGCAAGATGCGACCACTATTATTATTGAACATCGATTGGAAGATGTTCTTTATGAGCGAGTAGATCGTGTAGTTCTTTTTAGTGATGGACAAATTATTTATAATGGGGAGCCGGATCAACTTTTAAAAACTAATTTTTTATCTGAATATGGTATTCGAGAACCACTGTATATTTCTGCTCTCAAAAATTTAGGATATGACTTTGAAAAACAAAATACAATGACGTCTATTGATGACTTTGATTTCAGTGAACTATTGATACCTAAAATGCGAGCATTAGATTTAGATAAACATACAGATAAATTATTATCAGTACAGCATTTGTCGGTGTCATATGATTTAGAGAATAATACTTTAGATGATGTTTCGTTTGATTTATATAAAGGTCAGCGGTTAGCTATCGTTGGGAAAAATGGTGCAGGTAAATCTACTTTAGCTAAAGCGTTATGTCAATTTATCCCTAATAATGCTACTCTAATTTATAATAATGAAGATGTCAGTCAAGACTCTATAAAAGAAAGAGCAGAACGAATTGGCTATGTTTTGCAAAATCCCAATCAGATGATAAGTCAAGCGATGGTTTTTGATGAAGTTGCTCTGGGTCTCCGTTTAAGAGGTTTTAGTGATAATGATATAGAAAGTCGTGTCTACGATATATTAAAGGTTTGTGGGCTCTACCAATTTAGGAATTGGCCTATATCGGCTCTATCATTCGGTCAGAAAAAACGTGTTACGATTGCTTCGATACTGATTTTAAATCCAGAAGTTATTATTTTGGATGAACCAACAGCTGGTCAAGATATGAAGCATTATACTGAAATGATGTCTTTCCTTGATAAACTAAGTTGTGATGGACATACCATTGTTATGATTACACATGATATGCAGCTTATGTTAGAGTATACAGATCGTGCAATTGTAATCGACAATGGTCTGATTGTTGCAGATGATCATCCTATTAACATCCTTTCAAATACAGAGCTTTTGAAAAAGACTCATTTAAAGAAAACGAGTTTATTTGCTTTAGCAGACAGATTAGGGATATCTCCACAGAAACTAACACAATGGTACATTGATAATCAAGGAGGTAAGAATGGC

SEQ ID NO: 16530 - protein, 558 aa, Streptococcus agalactiae
MKDFIEWKDFTFQYDVQSEPTLKGINLSIPKGEKVLILGPSGSGKSTLGHCLNGIIPNTHKGQYSGIFTINHKNAFDLSIYDKSHLVSTVLQDPDGQFIGLTVAEDIAFALENDVVAQEEMASIVEMWAKRLEIAPLLSKRPQDLSGGQKQRVSLAGVLVDDSPILLFDEPLANLDPQSGQDIMALVDRIHQEQDATTIIIEHRLEDVLYERVDRVVLFSDGQIIYNGEPDQLLKTNFLSEYGIREPLYISALKNLGYDFEKQNTMTSIDDFDFSELLIPKMRALDLDKHTDKLLSVQHLSVSYDLENNTLDDVSFDLYKGQRLAIVGKNGAGKSTLAKALCQFIPNNATLIYNNEDVSQDSIKERAERIGYVLQNPNQMISQAMVFDEVALGLRLRGFSDNDIESRVYDILKVCGLYQFRNWPISALSFGQKKRVTIASILILNPEVIILDEPTAGQDMKHYTEMMSFLDKLSCDGHTIVMITHDMQLMLEYTDRAIVIDNGLIVADDHPINILSNTELLKKTHLKKTSLFALADRLGISPQKLTQWYIDNQGGKNG

SEQ ID NO: 16531 - protein, 636 aa, Streptococcus agalactiae
TTGTCAATAAGGTTTCAAATCAGCTTGAAATATGATAAAATAAAACAGATTGTAAGTGACTGTTTAAGCTTGTTTTTCAGAGAGGTTTTTATGAATACAAACACAATAAAAAAGGTTGTAGCGACTGGAATTGGAGCTGCACTTTTTATCATTATAGGTATGCTAGTTAATATACCAACACCAATTCCAAATACTAATATTCAATTGCAGTATGCAGTTTTAGCATTATTTGCAGTTATTTATGGACCAGGAGTTGGTTTTTTTACTGGTTTTATCGGACACGCATTGAAAGATTCGATTCAATATGGTTCTCCGTGGTGGACTTGGGTTTTAGTTAGTGGTCTTTTAGGTTTGATGATAGGCTTTTTTGCTAAAAAATTAGCTATTCAATTATCTGGCATGATTAAGAAGGATTTGCTTCTATTTAATGTAGTTCAAGTTATTGCTAACCTTATAGGTTGGTCTGTCGTTGCACCGTATGGTGATATTTTCTTTTATAGCGAACCTGCAAGCAAAGTTTTTGCACAAGGTTTCTTATCAAGCCTTGTGAATTCCATTACTATTGGAGTAGGTGGTACGCTTTTGTTGCTAGCATACGCTAAATCACGACCACAAAAAGGTAGTTTATCCAAAGAT

SEQ ID NO: 16532 - protein, 212 aa, Streptococcus agalactiae
MSIRFQISLKYDKIKQIVSDCLSLFFREVFMNTNTIKKVVATGIGAALFIIIGMLVNIPTPIPNTNIQLQYAVLALFAVIYGPGVGFFTGFIGHALKDSIQYGSPWWTWVLVSGLLGLMIGFFAKKLAIQLSGMIKKDLLLFNVVQVIANLIGWSVVAPYGDIFFYSEPASKVFAQGFLSSLVNSITIGVGGTLLLLAYAKSRPQKGSLSKD

SEQ ID NO: 16533 - protein, 1204 aa, Streptococcus agalactiae
ATGAAACGATTTTTAAAAGCTTGGAGAAAAACAAGCTTGATAAAAAAAATAACAATTGGAGTCGTTATTGGCTTATTCTTGGGTATTTTAGTCCCTAAAGCCTCTGCGATTGGTTTACTTGGTCAACTTTTTGTAGGAGGGTTGAAAGCTATTGCCCCTCTTTTAGTTTTCACTTTAGTTATTAGTGCCTTGTCGCAACACCGTGAGGGCGGTAAGACCAATATGTCAACGATAATTGGTTTGTATATCACTGCAACTTTTGCAGCGGCCCTAATCGCTGTTGTTGTGAACTATATTTTCCCTTTGACACTGATATTGAAAACGCCAGCAAAGACAGACTTATTACCTCCCAAGGGGATTTCAGAAGTCTTTCAATCTCTTTTGTTGAAAATTGTTGATAATCCCATTCATGCCATTACCGAGGCCAATTATATGAGTATTCTATTTTGGGCGGTTATTTTTGGTTTGGCGATGCGAAGCAGTAATCAGCGTACAAAAGATTTAATGCAAACTTTTGCTGATGCTACTTCACAAGTTGTCAAATGGATTATCAATTTGGCCCCAATTGGTATTATGGGGTTGGTTTTCACTAGCATTTCAGAAAACGGTATTGGTATACTAGGTGATTATGGTCTTTTAATATTAGTTTTGGTGGGTACGATGTTATTTGTAGCTCTTGTCGTTAACCCAATCATTGCTTTTGTTATGATGCGTAAAAATCCTTACCCTTTGGTATTACGATGCTTAAAGGATTCAGGTATTACAGCTTTCTTTACACGTAGTTCTGCGGCGAATATTCCTGTTAATATGAGACTATGTGAGGATTTAGGATTAGATAAAGACACTTACTCAGTATCTATCCCGCTTGGTGCAGCTATCAATATGGCTGGTGCAGCTATTACAATTAATATCCTGACTTTAGCAGCAGTAAATACTTTAGGAATTACTGTTGATTTTCCAACAGCATTCTTATTAAGTGTGGTTGCTGCTGTATCAGCATGTGGAGCTTCTGGTGTAACTGGTGGTTCACTTTTATTGATTCCGGTGGCATGTAGCTTATTTGGTATTTCAAATGACGTTGCAATGCAAGTCGTAGGAGTTGGTTTCATTGTAGGGGTGATACAGGATTCGTGTGAGACGCTTTAATTCATCGACAGACGTTCTGTTCACGGCTGTAGCTGAAAAATCAGTTTTTGGAAAAAAA

SEQ ID NO: 16534 - protein, 402 aa, Streptococcus agalactiae
MKRFLKAWRKTSLIKKITIGVVIGLFLGILVPKASAIGLLGQLFVGGLKAIAPLLVFTLVISALSQHREGGKTNMSTIIGLYITATFAAALIAVVVNYIFPLTLILKTPAKTDLLPPKGISEVFQSLLLKIVDNPIHAITEANYMSILFWAVIFGLAMRSSNQRTKDLMQTFADATSQVVKWIINLAPIGIMGLVFTSISENGIGILGDYGLLILVLVGTMLFVALVVNPIIAFVMMRKNPYPLVLRCLKDSGITAFFTRSSAANIPVNMRLCEDLGLDKDTYSVSIPLGAAINMAGAAITINILTLAAVNTLGITVDFPTAFLLSVVAAVSACGASGVTGGSLLLIPVACSLFGISNDVAMQVVGVGFIVGVIQDSCETALNSSTDVLFTAVAEKSVFGKK

SEQ ID NO: 16535 - protein, 705 aa, Streptococcus agalactiae
ATGGTACAAGCGATAAAACAGCATAAGATTTCGTCGCAAGAATTAGTAGAGCAAGCAATCTACAAGATCGAGGAACAGAATGTAAGCGTTAATGCTGTTGTCAGCAAGCAATATAATGAGGCGCGTCAAGCAGCCAAATACGCAAATGAATCAAATGCTCCTTTTGCAGGAGTTCCTATTCTTCTGAAAGATTTGGGACAGAATCAAAAAGGACAACTCTCAACCTCAGGTTCACAATTATTTAAACACTATCATGCTAAACAAACGGACTATTTAGTGCAGTCCTTTGAAAAATTAGGGTTTATTATTTTAGGAAGAACAAATACCCCTGAATTTGGTTTTAAGAATATTAGTGATGGTCAACTTCACGGGAATGTTAATCTTCCATTTGACCATTCAAGAAATGCTGGAGGCTCTAGTGGTGGTGCAGCCGCAGCTGTTAGTTCAGGAATGGTTCCAATTGCAGGAGCTAGTGATGGAGGAGGGTCAATCAGAATTCCAGCAAGTTTTAATGGTTTGATTGGTTTAAAACCGAGTCGAGGACGTATACCAGTTGGACCTTCATCCTATAGAGGTTGGCAAGGGGCTTCTAGTCATTTTGCTTTAACAAAGTCAGTTAGAGATACAAAACGACTATTATATTATTTACAATCATATCAAGTAGAAAGCCCATTTCCCCTGAAAAAACTCAGCAAAGAGNNNNNT

SEQ ID NO: 16536 - protein, 235 aa, Streptococcus agalactiae
  VARIANT 234, 235: Xaa = Any Amino Acid
MVQAIKQHKISSQELVEQAIYKIEEQNVSVNAVVSKQYNEARQAAKYANESNAPFAGVPILLKDLGQNQKGQLSTSGSQLFKHYHAKQTDYLVQSFEKLGFIILGRTNTPEFGFKNISDGQLHGNVNLPFDHSRNAGGSSGGAAAAVSSGMVPIAGASDGGGSIRIPASFNGLIGLKPSRGRIPVGPSSYRGWQGASSHFALTKSVRDTKRLLYYLQSYQVESPFPLKKLSKEXX

SEQ ID NO: 16537 - protein, 189 aa, Streptococcus agalactiae
TTGAAACTTGTTCAAGATGAAACGTTTATTAAAAAAATGGTAGCTAAATATCCAAATTTACTAGGAAGTTTACCTGATAAATCAAAAGTTATTTATCAATTGGAAGGATATTTATTCCCAGCTACATACAACTATTATAAAGATCCATCCTTAGAAGGACTTGTTGAAGATATGATTTCAACACATGAA

SEQ ID NO: 16538 - protein, 63 aa, Streptococcus agalactiae
MKLVQDETFIKKMVAKYPNLLGSLPDKSKVIYQLEGYLFPATYNYYKDPSLEGLVEDMISTHE

SEQ ID NO: 16539 - protein, 213 aa, Streptococcus agalactiae
ATGCAGGTTCTAGCAGAATTGACAATACCTTTTCTTAAAGTTAATGGTCGCTTGATTGCACTGAAAGCTGCAGCTGCTGAAAAGGAAGAGAAAATTTTAATTTTTCTGGGCAGAAAAAAAAGCCTTTTGAAAAAAACACTAAATTTTCCACCAAGTAACTTGGGTAAATTAAAAAATTTATTTAAGTTAACCCTAAAATGGGTGGATNNNNNT

SEQ ID NO: 16540 - protein, 71 aa, Streptococcus agalactiae
  VARIANT 70, 71: Xaa = Any Amino Acid
MQVLAELTIPFLKVNGRLIALKAAAAEKEEKILIFLGRKKSLLKKTLNFPPSNLGKLKNLFKLTLKWVDXX

SEQ ID NO: 16541 - protein, 1322 aa, Streptococcus agalactiae
ATGCTTTTTGCGCTGTTCTTTGGAGCCGGTAATCTTATTTATCCAGCCTACTTAGGTATCTACTCTGGTTCTAATTGGGCGTGGGCTATCATTGGGTTCTGCTTAACAGGCGTAACTTTACCCCTACTTGGTGTTGCAGCTGTGACGTACTCAGGAGCAACCGATGTTGAAAGCTTCACCAAACCTGTCTCTAAAACATATGCTATTTTCTTTGCAGTAGCACTATACCTATCTATTGGACCTTTCTTTGCCATTCCTCGAACAGGGGCAACCTCATTCTCAGTTGGTATTCAACCTATCTTAGGCGACAGCTCCTTAGTCAAAATTATCTATGGTTAATTTTCTTTGGATTTCTTATTTCTTAGCTATTAGACCTAGTCAGATTGTAGATCGTATTGGTAAATATCTAACTCCCTTTTTACTAACTGTTATTAGTATTTTAATTATTGCCTCACTCATCCATCCAGCTGCTATCGTTGGAACACCACATAACGCTTCAACGAATGTCAGCGATGCTTTCAAGGATTTACCATTCCTAGCAGGACTGATTCAGGGGTATGGTACAATGGATGCCCTTGCATCAATTGCTTTTGCTATTATCGTTATTCAAGCAAGTAAACAGTACGGAGCAATTACCAAAAAAGAAATTACTTCTATGACACTTAAATCTGGTGCTATCGCTACATTTCTTTTAGCTTTTATTTATATTTTTGTAGGACGTATTGGTGCAACTTCACAAAGCTTGTTTAATTTGCAATGGTTCCTTCTTACTTCACAATACTCCAATAGACGGTGGGCATGTCTTAGTCAATCAGCTAACTCTATTTAGAATTGTGGGACAAGCTATTTTAGGTACGGCTATTTTTCTTGCTTGCTTAACAACAGCTACTGGATTAATCACTGCTTGTGCGGAATACTTCCACAAATTACTTCCAAAGATTAGTCACATTACTTGGGCTACAATCTTTACTTTAATTGCTATTACGTTCTATTTTGGTGGTTTATCAGAGATTATCCGTTGGTCACTACCAGTTCTCTACCTTCTCTATCCATTAACTATAGTCTTAATTTTCTTAGTCTTTTTTGATCAAAAATTTGAAAGTAGCCGCATTGTCTACCAAACTTCTATTGCCGCCACTGCTGTCGCTGCTTTATACGATGCCTTATCAAAACTCGGCGAAATGACTGGTTTATTTACCATTCCATCCGCTTTGACCACATTCTTTACTAAAGTTGTTCCTTTAGGTGAATATTCTATGGGATGGATTAGTTTTGCAATTTGTGGTGTCTTAGTTGGTCTTATTCTAAAAAAAGTAAAAGCA

SEQ ID NO: 16542 - protein, 443 aa, Streptococcus agalactiae
  VARIANT 269: Xaa = Any Amino Acid
MLFALFFGAGNLIYPAYLGIYSGSNWAWAIIGFCLTGVTLPLLGVAAVTYSGATDVESFTKPVSKTYAIFFAVALYLSIGPFFAIPRTGATSFSVGIQPILGDSSLVKIIYGLIFFGISYFLAIRPSQIVDRIGKYLTPFLLTVISILIIASLIHPAAIVGTPHNASTNVSDAFKDLPFLAGLIQGYGTMDALASIAFAIIVIQASKQYGAITKKEITSMTLKSGAIATFLLAFIYIFVGRIGATSQSLFKFANGSFLLHNTPIDGGHXLSQSANFYLGIVGQAILGTAIFLACLTTATGLITACAEYFHKLLPKISHITWATIFTLIAITFYFGGLSEIIRWSLPVLYLLYPLTIVLIFLVFFDQKFESSRIVYQTSIAATAVAALYDALSKLGEMTGLFTIPSALTTFFTKVVPLGEYSMGWISFAICGVLVGLILKKVKA

SEQ ID NO: 16543 - protein, 1053 aa, Streptococcus agalactiae; identical to SEQ ID NO: 7665

SEQ ID NO: 16544 - protein, 351 aa, Streptococcus agalactiae; identical to SEQ ID NO: 7666

SEQ ID NO: 16545 - protein, 690 aa, Streptococcus agalactiae; identical to SEQ ID NO: 7667

SEQ ID NO: 16546 - protein, 230 aa, Streptococcus agalactiae; identical to SEQ ID NO: 3016

SEQ ID NO: 16547 - protein, 1068 aa, Streptococcus agalactiae
ATGAGTAAAGAACCAATTATTAAATTAGACAACATTGATGTTACTTTCCACCAAAAGAAACGTGAGATTAATGCTGTTAAAGATGTTACTATCCATATTAATCAAGGTGATATATATGGAATTGTCGGTTATTCAGGAGCCGGAAAATCTACCCTTGTTCGTGTTATTAATTTGCTACAAGAACCTTCAGCAGGTAAAATTACTATTGATGACCAAGTTATTTACGACAACAAGGTGACACTGACTAGCACACAATTACGCGAACAGCGCCGTGAAATTGGAATGATTTTTCAACATTTTAACCTAATGTCACAGTTGACAGCAGAACAGAATGTAGCTTTTGCTCTTAAACATTCAGGTTTATCAAAAGAGGCGAAAGCAGCTAAGGTTGCTAAATTATTAGAACTTGTTGGATTATCCGATCGTGCTCAAAACTATCCTTCACAATTATCAGGAGGGCAAAAACAGCGTGTTGCCATTGCGCGTGCATTGGCTAACGATCCTAAAATCTTAATTTCAGATGAGTCTACCTCTGCACTTGACCCTAAAACAACAAAACAAATACTTGCCCTTCTCCAAGATCTGAATAAAAAATTGGGACTTACGATTGTTTTGATTACACATGAGATGCAAATTGTCAAAGACATTGCTAATCGCGTTGCTGTTATGCAAAATGGTAAATTGATTGAAGAAGGATCAGTTTTAGACATTTTTTCACATCCTAGAGAGAGTCTTACACAAGATTTTATAAAAATAGCTACTGGGATTGATGAGGCAATGCTTAAGATTGAGCAACAAGAAGTTGTCAAAAATCTACCAGTAGGTAGCAAATTAGTTCAACTGAAATACGCTGGGCATAGCACGGATGAGCCGCTTTTAAATCAAATTTATAAAGAATTTGAAGTAACTGCTAACATCCTCTATGGGAATATTGAAATTTTAGATGGTATTCCAGTTGGAGAAATGGTAGTTGTCTTATCAGGTGACGAAGAAAAATTAAGACAAGCCTGCCAAGCAATTACAGATTCGCAAGTTCAATTAACGTTATTGAAAGAAGGTGGTAAAGCA

SEQ ID NO: 16548 - protein, 356 aa, Streptococcus agalactiae
MSKEPIIKLDNIDVTFHQKKREINAVKDVTIHINQGDIYGIVGYSGAGKSTLVRVINLLQEPSAGKITIDDQVIYDNKVTLTSTQLREQRREIGMIFQHFNLMSQLTAEQNVAFALKHSGLSKEAKAAKVAKLLELVGLSDRAQNYPSQLSGGQKQRVAIARALANDPKILISDESTSALDPKTTKQILALLQDLNKKLGLTIVLITHEMQIVKDIANRVAVMQNGKLIEEGSVLDIFSHPRESLTQDFIKIATGIDEAMLKIEQQEVVKNLPVGSKLVQLKYAGHSTDEPLLNQIYKEFEVTANILYGNIEILDGIPVGEMVVVLSGDEEKLRQACQAITDSQVQLTLLKEGGKA

SEQ ID NO: 16549 - protein, 1374 aa, Streptococcus agalactiae; identical to SEQ ID NO: 11903

SEQ ID NO: 16550 - protein, 458 aa, Streptococcus agalactiae; identical to SEQ ID NO: 11904

SEQ ID NO: 16551 - protein, 822 aa, Streptococcus agalactiae
ATGAAGTTAAAACATATTGTCTTAGGATTAGCCTTAACAACACTTTTAGGAGTCACATTTAGTAATCAAGAAGTTTCAGCAAGCTCAACTTCAAGTAAAGTTGTTAAAGTTGGTGTTATGACCTTTTCTGACACTGAAAAAGCACGTTGGGATAAAATTGAAAAGCTAGTAGGTGATAAAGCTAAAATCAAATTTACAGAATTTACAGATTATACACAACCAAATCAAGCGACAGCCAATAAGGATGTGGATATTAATGCCTTTCAACATTACAATTTCTTAGAAAACTGGAATAAGGAAAATAAGAAAAACTTAATTCCACTTGAAAAGACTTACTTAGCTCCAATTCGTATCTATTCTGAGAAGGTAAAATCTCTTAAAAAATTGAAAAAAGGAGCCACTATTGCAATTCCAAATGATGCAACAAATGGTAGCCGTGCATTGTATGTACTTCAGTCAGCAGGTTTAATCAAATTGAATGTTTCTGGTAAGAAGGTTGCAACAGTTGCTAATATCACATCTAATAAAAAGGATATTAATATTCAGGAGTTAGATGCGAGTCAAACACCACGTGCACTCAAAGATGTAGATGCAGCTATTATTAATAATACATACATTGAGCAAGCTAATTTAAAACCTTCAGATGCTATCTTTGTTGAGAAATCAGATAAAAATTCAAAACAATGGATTAATATCATTGCGGGACGTAAAAATTGGAAAAAGCAAAAGAACGCTAAAGCTATCCAAGCTATCTTGGATGCTTATCACACAGATGAAGTGAAAAAAGTTATCAAAGATACTTCAGCTGATATTCCACAATGG

SEQ ID NO: 16552 - protein, 274 aa, Streptococcus agalactiae; identical to SEQ ID NO: 7674

SEQ ID NO: 16553 - protein, 831 aa, Streptococcus agalactiae
ATGACAATAAAAAAAGTGTTAAGTGTAACAGGAATTATTTTAGTGACAGTAGCGTCTCTAGCTGCTTGTAGCTCAAAATCTCATACTACTAAGACGGGCAAAAAAGAAGTTAATTTTGCAACTGTTGGAACAACGGCACCTTTTTCTTATGTGAAGGATGGGAAACTGACTGGCTTTGATATTGAAGTAGCCAAAGCTGTTTTTAAAGGTTCAGATAACTATAAAGTCACTTTTAAAAAAACAGAATGGTCATCGGTATTTACCGGCATTGATTCAGGAAAGTTTCAAATGGGTGGAAATAATATTTCTTATTCATCAGAGAGATCTCAAAAATATTTATTTTCATACCCAATAGGCTCTACTCCTTCAGTTTTAGCAGTTCCTAAGAATAGTAATATCAAAGCTTATAATGATATTAGTGGTCATAAAACACAGGTTGTCCAAGGAACGACAACTGCCAAGCAATTAGAAAATTTCAATAAAGAGCATCAGAAAAATCCTGTTACTCTAAAATATACTAATGAAAATATTACACAGATTCTAACGAATTTGAGTGATGGAAAAGCTGATTTTAAACTTTTTGACGGACCAACTGTTAACGCTATCATAAAGAATCAAGGTCTCACGAATTTAAAAACCATCCCTTTGACTATGAGAGATCAGCCTTATATTTATTTCATCTTTGGTCAGGATCAAAAAGACTTGCAAAAGTATGTGAATAATCGCCTTAAACAATTACGTAAAGATGGGACACTTTCAAAAATAGCTAAAGAATACCTTGGAGGTGATTACGTACCAAATGAGAAAGATCTCGTTACTCCTAAGGAGAAG

SEQ ID NO: 16554 - protein, 277 aa, Streptococcus agalactiae; identical to SEQ ID NO: 11908

SEQ ID NO: 16555 - protein, 687 aa, Streptococcus agalactiae; identical to SEQ ID NO: 11909

SEQ ID NO: 16556 - protein, 229 aa, Streptococcus agalactiae; identical to SEQ ID NO: 3026

SEQ ID NO: 16557 - protein, 111 aa, Streptococcus agalactiae; identical to SEQ ID NO: 7679

SEQ ID NO: 16558 - protein, 37 aa, Streptococcus agalactiae; identical to SEQ ID NO: 7680

SEQ ID NO: 16559 - protein, 714 aa, Streptococcus agalactiae
ATGGGACGTAAGTGGGCCAATATTGTTGCCAAAAAGACTGCTAAAGATGGTGCTAACTCAAAAGTATACGCTAAATTCGGTGTTGAAATATATGTTGCTGCAAAGCAAGGTGAACCAGACCCCGAGTCAAACTCAGCTCTAAAATTCGTTTTGGACCGTGCTAAGCAAGCACAAGTTCCAAAGCATGTTATTGATAAAGCGATTGATAAAGCCAAAGGAAACACAGATGAAACTTTCGTAGAGGGACGCTATGAAGGTTTTGGTCCAAATGGTTCAATGATTATTGTGGATACTTTGACATCAAATGTTAACCGTACGGCAGCAAATGTACGTACTGCTTACGGTAAGAACGGTGGCAATATGGGAGCTTCAGGATCGGTATCCTACTTATTTGATAAAAAAGGTGTCATCGTTTTTGCTGGTGATGATGCTGACACTGTCTTCGAACAATTACTTGAAGCGGATGTAGACGTAGATGATGTTGAAGCAGAAGAGGGAACAATAACAGTTTATACCGCCCCAACAGATCTTCATAAAGGTATCCAAGCACTTCGCGATAATGGTGTAGAAGAATTCCAAGTTACTGAACTTGAAATGATTCCTCAATCAGAAGTAGTATTGGAAGGTGATGACCTTGAAACTTTTGAAAAGCTTATTGACGCACTCGAATCAGATGATGATGTTCAAAAAGTTTATCATAATGTAGCAGATTTC

SEQ ID NO: 16560 - protein, 238 aa, Streptococcus agalactiae; identical to SEQ ID NO: 3028

SEQ ID NO: 16561 - protein, 702 aa, Streptococcus agalactiae
GTGCGCCTTGTATGGAAATTTCTATCAGAAAAGTTAGTATGTAAGATCATGGATTCTTCGTACGGTGTGTTGATATTATTTTTTATTTGCCTATCAATAACTGCTGTAGGTGGATATACATTGGTATATAATTTGTCTGGGTATTCCTCAATGGATGCACAGAAAGTTTTTGGAATCATTGTACTAACAATAATTTTACTAGTATTTATTGTAGGAACAATTTTTTATGCAATAGGTTCTGCACAGTTGATAATGTCGATTTTGTCTAAGAAAAAGATTTCGTTTGATGAGAAAGATGCACCACTTGATGGTGCGACTCATGTGGGAGAGACAGTTTTCCAAGGAAAGGAGGTGTCGTTATATAGTAAGCAGGATAAATTTTTCCTATGGAGTAGAAAGTGGCAAAAGGGTTTCAGCAAATATCAATATTATCACATACGACCGGTTGATCAAACTGAAATTAGTGAGGTGTATCAAGTGGAAAGATGTTGCTTCTATTGTGACCATATATTTACACAATTTTTTATTAGAGAAGGAAAAAATAGAGAGAAAATAGTTGAGTTATGCACTATTGATGTACAAATTGGTAATGACAGAGATCTAGGATTTAAACAAGTTAATAGAGGCGAGTTTGAAAAAACGGTTCCTTTTAAGGATGTCGAAATTAAAGAAATAAAGAAATTGATTGATTTGAAACAAATA

SEQ ID NO: 16562 - protein, 234 aa, Streptococcus agalactiae
MRLVWKFLSEKLVCKIMDSSYGVLILFFICLSITAVGGYTLVYNLSGYSSMDAQKVFGIIVLTIILLVFIVGTIFYAIGSAQLIMSILSKKKISFDEKDAPLDGATHVGETVFQGKEVSLYSKQDKFFLWSRKWQKGFSKYQYYHIRPVDQTEISEVYQVERCCFYCDHIFTQFFIREGKNREKIVELCTIDVQIGNDRDLGFKQVNRGEFEKTVPFKDVEIKEIKKLIDLKQI

SEQ ID NO: 16563 - protein, 90 aa, Streptococcus agalactiae
ATGATTATTGACGGACGAATGATGTGGAATCATCTACCTGAAAAAATTAATAGATTAATGGGATATCGTACTACTTTATCAATGAAAAAA

SEQ ID NO: 16564 - protein, 30 aa, Streptococcus agalactiae
MIIDGRMMWNHLPEKINRLMGYRTTLSMKK

SEQ ID NO: 16565 - protein, 951 aa, Streptococcus agalactiae
ATGAAAATATGTATTTTAGGATTAGGCGTAATAGGCACAACTTATGGATATATCTTTCAAAAAGCAGGACATCAGGTTGAACATTTAGTTAGAGAAAGTAAAAAGCAAGATGTTCCATTAAAGCTGGATATAACCATGTTAGATGGGCGATATAACAATAAGGGAGAAGAAAAAACAGATATATATACTGTGAATCTTGCAAAACCAAATACAAATTATGACTTTATCCTTTTAAGTGTTGCAGGCGGGAGGATAAAAGATGCCATAGCAACACTTTCACAAAATAATATTACAGGAAGTTTGTTATTATTTTGTAACTTTTGGAACAGCCGTGAAGAAATCGAAAAAATGGTTGGTGATTTTAAATATATCATTGGATTTCCGACAGCAGGTGGGAATTTGAAGCAGAAAAAGTTGAATTGTGTTCTGTTTGACCATATAATGCTTGAAAGTGAAGAAAAAGCAACTATCACAAACTATAAAGAGTTGTTAGAATTTCTCGAATCTGCCGACATAAAAGTAGAAAATCCTTATGATATGATAGAGTGGATATGGATTCATATGGCAATAAATGCAGGTGTTACTTCTACTGCAGCAAGGGCAGGAAAAATTGATGATCCAAAACAACTTGCGGTTAATCTTATGAGAGATAATCATGGATTGTCTATCGCGGTAAAATCAATAAGAGAAACAATTAAAGTAGTAAAAAATAGAGGGGTCGATTTAAGATTATATAAAAATGAACTTTTTCCTTATAAAATACCTTCTACTATTGCAGGAATAATTATGAAACGAATGTTCGCAAGAAATGAACTTACGAGTAGAATTATGACGTTGCACAATGATGTAAAAGATATTATGTATGGTTGTAAATGTATCTATGATGCTGGAAAACAGGAAAAATTGAACTTACCATTGTTTTATCATAATATGGATAAAATATTTAATAGT

SEQ ID NO: 16566 - protein, 317 aa, Streptococcus agalactiae
MKICILGLGVIGTTYGYIFQKAGHQVEHLVRESKKQDVPLKLDITMLDGRYNNKGEEKTDIYTVNLAKPNTNYDFILLSVAGGRIKDAIATLSQNNITGSLLLFCNFWNSREEIEKMVGDFKYIIGFPTAGGNLKQKKLNCVLFDHIMLESEEKATITNYKELLEFLESADIKVENPYDMIEWIWIHMAINAGVTSTAARAGKIDDPKQLAVNLMRDNHGLSIAVKSIRETIKVVKNRGVDLRLYKNELFPYKIPSTIAGIIMKRMFARNELTSRIMTLHNDVKDIMYGCKCIYDAGKQEKLNLPLFYHNMDKIFNS

SEQ ID NO: 16567 - protein, 198 aa, Streptococcus agalactiae
ATGAATTCAGAAATTCGAAATAGAAAACATGTTTATTTGAATGATGATATTATCTTTCAGTTAGCTGAAATCTCAGAATTTTTAAAGTCAAGTCAGTCAACATTTAAACAGGAGCGTAGTCCATATTCTCAAATAATAGACCTACGAAAAGAAGAAGCACAAGCTAAAAGTGTTAGGAATAGCATAGAAAAATTATTG

SEQ ID NO: 16568 - protein, 66 aa, Streptococcus agalactiae
MNSEIRNRKHVYLNDDIIFQLAEISEFLKSSQSTFKQERSPYSQIIDLRKEEAQAKSVRNSIEKLL

SEQ ID NO: 16569 - protein, 273 aa, Streptococcus agalactiae
ATGAAAAAGAATAGTTTATATAATCAGTTAATAAATAGTGAACCGATAGGCTTTATTGATCCACTAACCGACTTGGGGGAATTTGATATTTTTCAAATGAAGTTCAAAGAACCCGTTAGATACTTGAAAAATAAATATTCAGGAAAGCCTTATTCACCACATTGGCAGAATAAAATTGAAAAAATGAGGTCTCATCAAGAAAGCCTAAGAGAAGAAGTTAAAGAAGAGATTCCGATTACTAGTAGGGCAAGAAATCAAGAAAATAATTTGAGT

SEQ ID NO: 16570 - protein, 91 aa, Streptococcus agalactiae
MKKNSLYNQLINSEPIGFIDPLTDLGEFDIFQMKFKEPVRYLKNKYSGKPYSPHWQNKIEKMRSHQESLREEVKEEIPITSRARNQENNLS

SEQ ID NO: 16571 - protein, 111 aa, Streptococcus agalactiae
ATGGAAGGTATTGAAATAATATTAGATATAGAAACGTTAGGAATTTTTCAAGTCATAGATCATGGTATCTCTCCAGATGATAGAGAAACATATGAACAATTAACTTTGTTT

SEQ ID NO: 16572 - protein, 37 aa, Streptococcus agalactiae
MEGIEIILDIETLGIFQVIDHGISPDDRETYEQLTLF

SEQ ID NO: 16573 - protein, 984 aa, Streptococcus agalactiae
ATGAGAAAAACAGAACATCATAAAATGGAATATGTTTTTGAAACAATAAAAGCAATCACTAAAACTAATCCTAAAGTAGAGCAAATAAAAGATTTGCCCGCTATTCATTATTTAGGGCAATCCGAGCAAGTAATTCCGATTTTATCAGGAGGAGGCAGCGGACATGAGCCGGCTCACTTTGGATATGTTGGTGAGGGAATGCTATCGGCAGCGATTAGTGGTCCTATTTTTGTACCACCATGTGCTAGTGATATTCTAGAGACTATTAGATTTATCAATCGAGGCAAAGGTGTCTTTGTTATTATCAAAAATTTTGAAGCTGATTTGGAAGAATTTTCCCAAGCGATTGAACAGGCTCGTCAAGAAGGCATTCCAATCAAATACATCGTTTCTCATGATGACATCTCTGTTGAAACATCAAATTTTAAAATTCGTCATCGAGGCGTTGCTGGTACTGTGTTGCTACATAAAATTATTGGACAAGCTGCTTTAGAAGGAGCAAGCTTAGATGAATTAGAACAGCTAGGACTATCTTTGACAACTTCAATGGCTACTTTAGGTGTAGCAAGTAAGTCAGCCACTATTTTAGGTCAGCATCAACCTGTTTTTGATTTAGAAGAAGGTTACATCTCATTTGGAATCGGTATTCATGGTGAGCCAGGATACCGGACAATGCCTTTCGTGTCCATGGAACATTTGGCAAACGAACTAGTTAACAAATTGAAAATGAAATTACGTTGGCAAGATGGAGAAGCATTCATTCTATTGATAAATAATCTTGGAGGAAGTTCTAAAATGGAGGAATTACTTTTTACAAATGCTGTCATGGAATTTCTGGCTTTAGACGATTTACAATTACCTTTTATTAAAACAGGCCACCTAATTACAAGTTTAGATATGGCTGGTTTATCAGTTACCTTGTGTCGTGTAAAGGATAGTAGATGGATTGATTACTTAAAACATAAGACAGATGCTAGAGCTTGG

SEQ ID NO: 16574 - protein, 328 aa, Streptococcus agalactiae; identical to SEQ ID NO: 3030

SEQ ID NO: 16575 - protein, 534 aa, Streptococcus agalactiae
ATGACTTCTTCGCTTATTACTAAGAAAAAAATAGCCAAGTCATTTAAACGTTTATTTATTTCGCAAGCTTTTGACAAAATATCGGTGAGTGATATTATGGAAGATGCAGGTATTAGACGTCAAACATTTTATAATCACTTTGTTGATAAATATGCTTTATTAGAATGGATTTTCCAAACAGAATTAAGCGAACAAGTTACGGATAATTTAGACTATATCTCAGGTTTTCAGTTGTTATCAGAGTTGTTGACTTTTTTTAAAATGAATCAAGAATTCTATATTAAATTATTTCAAATTGAAGATCAAAATGATTTTTCTTCGTATTTTGAGTCTTACTGTGAGCAGTTAGTAGATAAGCTTCTTTCTGATTATAGTAAATCTAACTTTAATCAGAAAGAAAGAGTTACATTTATTAATTATCATAGTAAAGCCCTCTCTTATTTTATAAAATATGAGTTAATAAATAACTCAAAAGAAGAATTATTTAATAGGAAAGTCATTGAAAAAATTATCAGAACATCAATAGAAAATTAT

SEQ ID NO: 16576 - protein, 178 aa, Streptococcus agalactiae; identical to SEQ ID NO: 3032

SEQ ID NO: 16577 - protein, 111 aa, Streptococcus agalactiae
ATGATTATTGAAAACCCTAACAAAGCGGACAAACAAGAAAATCTGTCCATTCCAGAAAAGGCTTACAAATTTTATAATAAAAGAGAATTAAACATAAAAGGAGTTTCCAAA

SEQ ID NO: 16578 - protein, 37 aa, Streptococcus agalactiae; identical to SEQ ID NO: 3034

SEQ ID NO: 16579 - protein, 535 aa, Streptococcus agalactiae
ATGAAAAAAATTCTCAATCAACCAACTGATGTTGTTACTGAAATGCTAGATGGATTAGCATATGTTCATAATGATTTAGTACATCGCATAGAAGGTTTTGATATCATTGCTCGCAATGAAGAGAAGTCAGGAAAAGTGGCTCTCATTTCTGGCGGAGGAAGTGGACATGAGCCTTCACATGCTGGTTTCGTAGGCGAAGGAATGTTATCTGCAGCTGTGTGTGGTGCAGTATTTACTTCTCCAACTCCTGACCAAGTTCTTGAAGCAATTAAAGAAGCTGATGAGGGGGCTGGAGTTTTCATGGTTATCAAAAATTATTCAGGGGATATCATGAACTTGAAATGGCACAAGATATGGCTGAAATGGAAGGCATAGAAGTTGCAAGTGTGGTCGTTGATGATGATATTGCAGTCGAAGACAGTCTTTACACACAAGGAAAACGTGGTGTAGCTGGTACGATACTCGTCCATAAAATTCTAGGATGCTGCTCGTCATGGCAAATCACTTCAGGAAATCAAAGCTATTGCTGATGAAT

SEQ ID NO: 16580 - protein, 179 aa, Streptococcus agalactiae
  VARIANT 113: Xaa = Any Amino Acid
MKKILNQPTDVVTEMLDGLAYVHNDLVHRIEGFDIIARNEEKSGKVALISGGGSGHEPSHAGFVGEGMLSAAVCGAVFTSPTPDQVLEAIKEADEGAGVFMVIKNYSGDIMNXEMAQDMAEMEGIEVASVVVDDDIAVEDSLYTQGKRGVAGTILVHKILGMLLVMANHFRKSKLLLMN

SEQ ID NO: 16581 - protein, 306 aa, Streptococcus agalactiae
ATGCAACCTTCAAAGGCTTTAGCGACAGAATTAGTTGATAAGTTAATTGAATCGTTCGATGCTAAATCTGGCGAAAAATATGGTGTCCTTATTAACGGTATGGGTGCAACCCCACTTATGGAACAATATGTCTTTGCTAACGATGTTGCCAAACTCCTTGAGGATAAAGGCATTGAAGTGAATTACAAAAAACTTGGTAACTATATGACTTCAATTGATATGGCTGGTTTATCACTAACCTTGATTAAACTGGAAAATCAAGAGTGGTTAGAAGCACTTAATAGTGACGTTACAACCATTGCTTGG

SEQ ID NO: 16582 - protein, 102 aa, Streptococcus agalactiae
MQPSKALATELVDKLIESFDAKSGEKYGVLINGMGATPLMEQYVFANDVAKLLEDKGIEVNYKKLGNYMTSIDMAGLSLTLIKLENQEWLEALNSDVTTIAW

SEQ ID NO: 16583 - protein, 576 aa, Streptococcus agalactiae
ATGGAAGTAAAAACTGCAATAGAATGGATGCACACTTTTAACCAAAAAATTCAATCCAACAAGGACTATTTATCCGAACTAGATACTCCAATAGGTGATGGCGACCATGGTGGCAATATGGCGCGTGGTATGACTGCTGTTATTGAAAACCTTGATAACAATGAATTTAGTAGTGCTGCCGATGTTTTCAAAACCGTGTCCATGCAACTTTTAAGCAAAGTAGGCGGAGCATCTGGACCACTCTATGGTTCTGCATTTATGGGAATTACAAAAGCTGAACAGAGTGAAAGTACCATTTCAGAGGCACTTGGCGCAGGACTTGAAATGATTCAAAAACGTGGTAAAGCTGAACTTAATGAAAAAACAATGGTTGATGTTTGGCACGGTGTTATTGAAGCGATTGAAAAAAATGAATTGACTGAAGACCGTATCGATTCCTTAGTAGATGCTACAAAAGGGATGAAAGCAACAAAAGGACGCGCTTCTTATGTTGGAGAACGCTCAGTAGGACACATTGATCCAGGATCATTTTCTTCAGGATTATTATTTAAAGCATTACTAGAAGTTGGAGGTGTC

SEQ ID NO: 16584 - protein, 192 aa, Streptococcus agalactiae
MEVKTAIEWMHTFNQKIQSNKDYLSELDTPIGDGDHGGNMARGMTAVIENLDNNEFSSAADVFKTVSMQLLSKVGGASGPLYGSAFMGITKAEQSESTISEALGAGLEMIQKRGKAELNEKTMVDVWHGVIEAIEKNELTEDRIDSLVDATKGMKATKGRASYVGERSVGHIDPGSFSSGLLFKALLEVGGV

SEQ ID NO: 16585 - protein, 372 aa, Streptococcus agalactiae; identical to SEQ ID NO: 7693

SEQ ID NO: 16586 - protein, 124 aa, Streptococcus agalactiae; identical to SEQ ID NO: 3040

SEQ ID NO: 16587 - protein, 711 aa, Streptococcus agalactiae
ATGACTCAATTTCTTGGGGAATTTTTAGGAACATTTATTTTGGTTCTTCTTGGGGATGGCGTAGTTGCAGGAAATGTGCTCAGTAAAACCAAAGAAGAAGGAACTGGATGGACTGCTATTGTTTTTGGCTGGGGAATTGCTTGTACCGTTGCTGTTTATGTTTCTGGATTATTCAGTCCCGCTCATCTAAATCCAGCAGTCACATTAGCAATGGCTTCTATTGGAGCAATTTCTTGGGGACAAGTTATCCCCTTTATCATTGCACAGATGTTAGGAGCAATGGTTGCGGCAACTATTTTATGGTTACACTATTATCCTCATTGGAAAGAAACAAAAGATAGTGGACTTATCCTTGCCAGCTTCTCAACCGGACCTGCTATCCGCCATACACCATCGAATCTCCTTGGTGAAATTATCGGTACTGCTATTCTTGTGATTACAATTATGGCAATTGGTCCTAGTAAAGTTGCAGCAGGTCTTGATCCAATTATCGTTGGTATAGTTATTTTCGCAGTAGGATTCTCTCTTGGTCCAACAACTGGTTATGCTATTAACCCTGCACGTGACCTAGGGCCTCGTCTTATGCATGCTATCTTACCTATTGAAAATAAGGGTAACTCAGATTGGTCATACGCTTGGATTCCAGTTGTAGGTCCAATTATCGGCGGTGTCCTTGGGGCTATCTTATACAATATTGCTTTGACTTTAGTT

SEQ ID NO: 16588 - protein, 237 aa, Streptococcus agalactiae
MTQFLGEFLGTFILVLLGDGVVAGNVLSKTKEEGTGWTAIVFGWGIACTVAVYVSGLFSPAHLNPAVTLAMASIGAISWGQVIPFIIAQMLGAMVAATILWLHYYPHWKETKDSGLILASFSTGPAIRHTPSNLLGEIIGTAILVITIMAIGPSKVAAGLDPIIVGIVIFAVGFSLGPTTGYAINPARDLGPRLMHAILPIENKGNSDWSYAWIPVVGPIIGGVLGAILYNIALTLV

SEQ ID NO: 16589 - protein, 402 aa, Streptococcus agalactiae
ATGAAAGGATTTCATGGGAATATCGAAAAATTGACACTAGGAAATACAAATTTCCGCCAAGTCCTCTATACCGCAGAACATTGTCAACTCGTTTTAATGACACTGCCTGTTGGTGGAGAAATTGGTAGCGAGATTCATGCAGAAAATGATCAGTTTTTCCGTTTTGAAGCTGGTCATGGTAAGGTTGTCATTGATGGTAATGAATATGAAGTTGCAGATGGAGACGCTATAATAGTTCCGGCAGGTGCTGAACATAACGTAATTAACACTTCTGAAACTGAGATGTTAAAACTCTATACAATTTACAGTCCAGCTCATCACAAAGATGGTATTATCCGTGCCACAAGAGAAGAAGCTGAAGAAAATGAAGAAGATTTTGATGGAGTTACTACTGAAACTAAA

SEQ ID NO: 16590 - protein, 134 aa, Streptococcus agalactiae; identical to SEQ ID NO: 3044

SEQ ID NO: 16591 - protein, 171 aa, Streptococcus agalactiae
ATGATTTCACAAGCTATGAGTCAGATTTTTAAAGACTTTGGACAGTTGAAAGAACTTTCTCCGACAGATGAGAAAGTTCAAAAACAAGTTCAGATTTTACAAGATTATATCACAGCTCAGTTTTACAACTGCACTAACGATTTATTAGCAAGTCTTGAAATAATGTACATC

SEQ ID NO: 16592 - protein, 57 aa, Streptococcus agalactiae
MISQAMSQIFKDFGQLKELSPTDEKVQKQVQILQDYITAQFYNCTNDLLASLEIMYI

SEQ ID NO: 16593 - protein, 405 aa, Streptococcus agalactiae
ATGAAAACAGTTAAAGAAATAAGTCACATTTCTGGTATTAGTGTGCGCACACTTCATTATTATGATGAAATAGATTTGTTATCTCCTTCATTTGTAGGAGAGAATGGTTATCGTTACTATGATGATGAATCACTGATTAAGTTACAAGAAATTTTGTTATTTAAGGAACTGGAATTTCCTCTTAAAAAAATAAAAGAGATAATGGAAAGTCCAAATTATGATCGTAATCAAGCACTTCTTGATCAAATTAGGTGGCTGGAACTAAAGAAACAGCGACTAGAAGAAGTAATTGAACATGCAAAGTCTATCCAGAGGGGTAAAAATATGTCAGATTTTACAGCTTATAATCAAGAAGAATTAGAAGTATTTCAAGAGGAAGCTAGAACACGCTGGGGGGGATACAGA

SEQ ID NO: 16594 - protein, 135 aa, Streptococcus agalactiae
MKTVKEISHISGISVRTLHYYDEIDLLSPSFVGENGYRYYDDESLIKLQEILLFKELEFPLKKIKEIMESPNYDRNQALLDQIRWLELKKQRLEEVIEHAKSIQRGKNMSDFTAYNQEELEVFQEEARTRWGGYR

SEQ ID NO: 16595 - protein, 1107 aa, Streptococcus agalactiae
ATGACAGTTACAGGAATTGTTGCCGAATTTAATCCCTTTCATAATGGGCATAAGTACCTTTTAGAACAAGCTCAAGGCATAAAAGTAATAGCCATGTCGGGTAATTTTATGCAACGTGGTGAGCCGGCGATTGTAGATAAATGGACCCGTGCCCAGATGGCACTAGAAAATGGTGCTGATTTAGTGATTGAACTCCCTTTTCTGGTTTCGGTACAGTCAGCGGATTATTTCGCTAGTGGAGCTGTGTCTATCCTGGCACGATTAGGTGTGGATAACTTATGCTTCGGTACCGAAGAAATGCTTGATTATGCCCGTATTGGGGATATTTATGTGAATAAAAAAGAGGAGATGGAAGCTTTTTTGAAAAAACAATCGGATTCTCTTTCCTATCCACAAAAAATGCAAGCTATGTGGCAAGAATTTGCAGGGATTACATTTTCGGGACAAACCCCAAATCACATTTTAGGCTTAGCCTACACCAAAGCAGCTAGCCAAAATGGTATTCGATTAAATCCGATACAACGTCAAGGAGCTGGTTATCATTCATCAGAAAAAACAGAGATATTTGCTTCTGCAACAAGTCTTCGTAAACATCAATCTGATCGTTTCTTTGTAGAAAAAGGTATGCCTAACAGTGACTTGTTTTTGAATAGTCCACAAGTAGTTTGGCAAGATTATTTTAGTTTACTCAAATATCAGATAATGACGCATTCTGATTTGACACAAATTTATCAAGTGAATGAAGAGATAGCCAATCGTATAAAAAGTCAAATTCGTTATGTGGAGACTGTGGATGAGTTAGTTGATAAAGTCGCAACTAAACGGTATACCAAAGCAAGAATTCGACGTTTATTAACCTATATCTTGATAAATGCTGTGGAAAGTCCTATACCAAATGCTATTCATGTCTTAGGTTTTACACAAAAAGGTCAACAGCATTTAAAGTCTGTGAAGAAGTCTGTGGATATCGTGACGAGGATTGGTTCACAAACGTGGGATAGTTTGACGCAACGAGCAGATTCTGTTTATCAGATGGGAAATGCTAATATAGCAGAGCAAACATGGGGACGTATCCCTTTTTATCAACCTGTTAGTCAAAGTGACCTT

SEQ ID NO: 16596 - protein, 369 aa, Streptococcus agalactiae
MTVTGIVAEFNPFHNGHKYLLEQAQGIKVIAMSGNFMQRGEPAIVDKWTRAQMALENGADLVIELPFLVSVQSADYFASGAVSILARLGVDNLCFGTEEMLDYARIGDIYVNKKEEMEAFLKKQSDSLSYPQKMQAMWQEFAGITFSGQTPNHILGLAYTKAASQNGIRLNPIQRQGAGYHSSEKTEIFASATSLRKHQSDRFFVEKGMPNSDLFLNSPQVVWQDYFSLLKYQIMTHSDLTQIYQVNEEIANRIKSQIRYVETVDELVDKVATKRYTKARIRRLLTYILINAVESPIPNAIHVLGFTQKGQQHLKSVKKSVDIVTRIGSQTWDSLTQRADSVYQMGNANIAEQTWGRIPFYQPVSQSDL

SEQ ID NO: 16597 - protein, 249 aa, Streptococcus agalactiae
ATGATAATATTCTTATACGCTTGTCTGATGATATTTGGGATACTTTATATTATTGAACGTCGGGTAAGTCAGAAAAAGTCTAAAGTTATTTTGGAATTATTGATGAACCCTAAACTTCATTTGGATTTATTATCGGCATTAAAACCATTTGAAAAAGAAACAGATCGTCTCATATACCTTCGTAAAACTTATCACCTAGATATTATTGATGCTGTTACTTTAAATAATCAATTGAAAGAGAAAGAAGTA

SEQ ID NO: 16598 - protein, 83 aa, Streptococcus agalactiae; identical to SEQ ID NO: 3050

SEQ ID NO: 16599 - protein, 731 aa, Streptococcus agalactiae
ATGGCAACGTATGAAACTTTTGCAGCTGTTTATGATGCTGTCATGGATGATACTTTATATGATAAATGGACTGATTTTTCACTTCGTCATTTTCCAAAAGGTAAGAAAAAACTTTTGGAATTAGCATGTGGTACGGGAATTCAGTCTGTTCGATTTGCACAAGCTGGTTATGCTGTTACAGGACTTGATCTTAGTGGCGATATGCTGAAACTTGCCAAAAAACGTGCAACTTCTGCTCACCAAAGTATCCAGTTTATTGAAGGAAATATGTTAGATTTATCTAATGTTGGTAAATATGATCTCATCACGTGCTATTCAGACTCTATTTGTATATGCAAGATGAAGTCGAGGTTGGTGATGTTTTTATCGAAGTCTATAAGGCCTTAGAAGAAAATGGCGTCTTTATTTTTGATGTTCATTCGACTTATCAAACAGATAAAGTATTTCCTGGTTATTCTTATCATGAAAATGCAGATGACTTTGCTATGGTGTGGGATACTTATGAAGATGATGCACCTCATTCTATTGTCCATGAATTAACATTTTTTGTTCAAGAAGAAGATGGTCGATTTACACGTCATGATGAAGTTCATGAAGAGCGTACTTATGATATTTTGACTTATGATATTTTACTTGAACAGGCAGGTTTTAAAGATGTTAAGGTGTATGCAGATTTTGAAGATAAAAAACCAACTGCAACTTCTGCTCGCTGGTTTTTTGTAGCTCATAAA

SEQ ID NO: 16600 - protein, 244 aa, Streptococcus agalactiae
MATYETFAAVYDAVMDDTLYDKWTDFSLRHFPKGKKKLLELACGTGIQSVRFAQAGYAVTGLDLSGDMLKLAKKRATSAHQSIQFIEGNMLDLSNVGKYDLITCYSDSICYMQDEVEVGDVFIEVYKALEENGVFIFDVHSTYQTDKVFPGYSYHENADDFAMVWDTYEDDAPHSIVHELTFFVQEEDGRFTRHDEVHEERTYDILTYDILLEQAGFKDVKVYADFEDKKPTATSARWFFVAHK

SEQ ID NO: 16601 - protein, 354 aa, Streptococcus agalactiae
ATGACAGAAAAAGACTTACTACAGCTAGTCGTTAAGGCTGCGGATGAAAAACGAGCAGAAGATATTGTAATTTTAGATTTACAGCCTGTAACGAGTGTTGCAGATTACTTTGTGATTATGAGTGCAAGTAATAGTAGGCAGTTAGAAGCAATCGCAGACAATATCCGTGAACAAGTAAAAGGAAATGGTGGGGATGCTAGCCACCTTGAAGGCGATAGTAAAGCTGGTTGGGTACTTCTTGACCTCAATAGCGTCGTGGTTCATATCTTCTCTGAAGATGAGAGACAGCACTATAACCTTGAAAAACTTTGGCATGAAGCACCATTGCTTGATGCTGAAGTCTTTATGACAGAA

SEQ ID NO: 16602 - protein, 118 aa, Streptococcus agalactiae
MTEKDLLQLVVKAADEKRAEDIVILDLQPVTSVADYFVIMSASNSRQLEAIADNIREQVKGNGGDASHLEGDSKAGWVLLDLNSVVVHIFSEDERQHYNLEKLWHEAPLLDAEVFMTE

SEQ ID NO: 16603 - protein, 519 aa, Streptococcus agalactiae
ATGACTTGTGCACTTTTACTAATTGATATCCAACAAGGTATTATGGATAAGAAACCAAAGCATTTAACAAATTTTGCAGAGCTTTTAGATGATTTACTTTTAAGTGCCAAAGGTTCTAATTGTGAAGTGATATGGATAAGGCATCATGATAAGGAATTGCCTCAAGGTTCTCCACAGTGGGAAATTTGGGAACAGCGACATCTTGTGACGCATCACAAAATAATTGATAAAACTTACAATAGTTGTTTTAAAGATACTCATTTACATGATTACTTGCAAAGTAAGCATATTAGTCAATTAATCATGATGGGACTTCAAACAGAATACTGTTTTGATACATCAGTAAAAGTTGCTTTTGAATATGGTTATGATATCTTTATTCCACAAGGTGGACACCTAACATTTGATACACCAACTTTAAGTGGGGATTCTATTAAAAAACATTACGAGAATATTTGGCATCATCGTTTTGCGACAATGGTAGCAAAAGATAGCTTATTGAAATTAATAAACGAGGAA

SEQ ID NO: 16604 - protein, 173 aa, Streptococcus agalactiae
MTCALLLIDIQQGIMDKKPKHLTNFAELLDDLLLSAKGSNCEVIWIRHHDKELPQGSPQWEIWEQRHLVTHHKIIDKTYNSCFKDTHLHDYLQSKHISQLIMMGLQTEYCFDTSVKVAFEYGYDIFIPQGGHLTFDTPTLSGDSIKKHYENIWHHRFATMVAKDSLLKLINEE

SEQ ID NO: 16605 - protein, 585 aa, Streptococcus agalactiae
ATGACCTACAAAGATTACACAGGTTTAGATCGGACTGAACTTTTGAGTAAAGTGCGTCATATGATGTCCGACAAACGTTTTAATCATGTGTTAGGAGTAGAGCGTGCTGCAATAGAGTTAGCAGAACGGTATGGTTATGACAAGGAAAAAGCGGGTCTAGCTGCTTTATTACATGATTATGCTAAGGAACTATCTGATGATGAATTTCTTAGATTAATTGATAAATACCAACTAGATCCCGACCTAAAAAAATGGGGTAATAATATTTGGCATGGTCTTGTTGGCATTTATAAAATACAAGAGGATCTAGCTATCAAAGATCAAGATATTTTAGCTGCTATTGCAAAACATACTGTTGGTTCAGCCCAAATGTCCACATTGGATAAAATCGTTTATGTAGCAGATTACATTGAACACAATCGAGATTTTCCAGGAGTTGAAGAAGCTCGTGAGTTAGCGAAAGTTGACCTTAATAAAGCAGTAGCTTATGAGACTGCTAGAACAGTTGCGTTTTTAGCAAGTAAGGCTCAGCCTATCTATCCTAAAACGATTGAAACCTATAATGCTTATATACCTTATCTCGAC

SEQ ID NO: 16606 - protein, 195 aa, Streptococcus agalactiae
MTYKDYTGLDRTELLSKVRHMMSDKRFNHVLGVERAAIELAERYGYDKEKAGLAALLHDYAKELSDDEFLRLIDKYQLDPDLKKWGNNIWHGLVGIYKIQEDLAIKDQDILAAIAKHTVGSAQMSTLDKIVYVADYIEHNRDFPGVEEARELAKVDLNKAVAYETARTVAFLASKAQPIYPKTIETYNAYIPYLD

SEQ ID NO: 16607 - protein, 630 aa, Streptococcus agalactiae
ATGGCACTCGAATTGCTAACACCATTTACAAAAGTTGAATTAGAAGAGAAAAAGCGAGATACTAACCGAAAACAAATTGGAATTATGGGAGGAAATTTTAACCCTGTTCATAACGCCCACCTTGTTGTTGCAGATCAAGTACGTCAGCAATTGTGTTTAGACCAAGTTCTGTTGATGCCTGAATTTCAGCCACCACATATTGATAAAAAAGAGACAATTGATGAACAGCATCGTCTCAAGATGCTTGAATTAGCAATAGAAGGCATTGATGGTTTATCTATTGAACCAATTGAAATTGAACGTAAATGTATCAGCTATACATACGATACGATGAAGCTTCTAATTGAAAAAAATCCAGATGTTGATTATTATTTCATTATTGGGGCAGATATGGTGGAATATCTACCTAAGTGGCATCGTATTGATGAACTTGTTAAAATGGTGCAGTTTGTTGGTGTTCAACGTCCAAAATATAAAGCTGGTACATCATATCCCGTTATTTGGGTGGATCTGCCATTGATGGATATCTCATCAAGTATGATTCGTCAATTTATTAAAAGTAATCGTCAGCCCAACTATTTACTGCCTAGAGAGGTATTAGATTATATCAGGAAAGAAGGTCTTTACAAA

SEQ ID NO: 16608 - protein, 210 aa, Streptococcus agalactiae
MALELLTPFTKVELEEKKRDTNRKQIGIMGGNFNPVHNAHLVVADQVRQQLCLDQVLLMPEFQPPHIDKKETIDEQHRLKMLELAIEGIDGLSIEPIEIERKCISYTYDTMKLLIEKNPDVDYYFIIGADMVEYLPKWHRIDELVKMVQFVGVQRPKYKAGTSYPVIWVDLPLMDISSSMIRQFIKSNRQPNYLLPREVLDYIRKEGLYK

SEQ ID NO: 16609 - protein, 315 aa, Streptococcus agalactiae; identical to SEQ ID NO: 11947

SEQ ID NO: 16610 - protein, 105 aa, Streptococcus agalactiae; identical to SEQ ID NO: 7720

SEQ ID NO: 16611 - protein, 1116 aa, Streptococcus agalactiae
ATGGAAGAGTTATTTTGTATTGGCTGCGGAGCCAGGATTCAAACTGAAAATAAAGATGCTGCTGGCTATACACCTCGTGCAGCACTTGAAAAAGGTTTAGAGACAGGAGAATTATACTGTCAGCGTTGTTTCAGATTGCGCCACTATAATGAGATTACTGACGTTCATATCACTGATGATGAATTTTTGAAATTACTACATGAGGTTGGAGATAGTGATGCCCTTGTGGTGAATGTCATTGATATTTTTGATTTCAATGGTTCAATTATTCCTGGTCTTAGTCGTTTCGTTGCAGGAAACGATGTTCTTTTAGTAGGAAATAAAAAAGATATTCTTCCCAAATCGGTTAAAGATGGAAAAGTAACACAATGGTTAACTGAGAGAGCTCATGAAGAGGGGCTTCGTCCTGTTGATGTCATCTTGACAAGTGCCCAAAATCATCATGCTATTAAGGATTTGATTGATACGATTGAAAAGTATCGTCATGGTCGAGATGTTTATGTTGTTGGGGTTACTAATGTTGGAAAGTCAACTCTTATTAACGCTATTATTCGTGAAATTACTGGTAGTCGTGATGTTATTACGACCTCACGTTTCCCAGGTACAACGTTAGATAAAATAGAAATACCTCTTGATGATGGTAGCTATATTTTTGATACCCCGGGTATTATTCATCGTCATCAAATGGCTCATTATTTGACAGCAAAAAATCTTAAATATGTTAGTCCTAAAAAAGAAATAAAACCCAAAACTTATCAGCTTAATTCAGAACAAACATTATTCTTGGCTGGCCTAGCACGTTTTGATTTTATTTCTGGTCAAAAACAAGGTTTTACGGCATATTTTGATAATAACCTGAATTTACACCGCACTAAACTAGTTGGAGCAGATGAATTTTACACTAAACATGTTGGAAAATTATTGACACCACCAACAGGTAAGGAAGTTTCAGATTTTCCTAAATTAGTTCGTCATGAATTTACAATCAAAGATAAAATGGATATTGTTTATTCGGGTCTTGGTTGGATACGTGTGAAATCAGAAGCAGAAAATCCAGTAGTAGTAGCTGCTTGGGCTCCAGAAGGCGTGGCAGTTGTTTTACGCAAAGCTTTAATT

SEQ ID NO: 16612 - protein, 372 aa, Streptococcus agalactiae
MEELFCIGCGARIQTENKDAAGYTPRAALEKGLETGELYCQRCFRLRHYNEITDVHITDDEFLKLLHEVGDSDALVVNVIDIFDFNGSIIPGLSRFVAGNDVLLVGNKKDILPKSVKDGKVTQWLTERAHEEGLRPVDVILTSAQNHHAIKDLIDTIEKYRHGRDVYVVGVTNVGKSTLINAIIREITGSRDVITTSRFPGTTLDKIEIPLDDGSYIFDTPGIIHRHQMAHYLTAKNLKYVSPKKEIKPKTYQLNSEQTLFLAGLARFDFISGQKQGFTAYFDNNLNLHRTKLVGADEFYTKHVGKLLTPPTGKEVSDFPKLVRHEFTIKDKMDIVYSGLGWIRVKSEAENPVVVAAWAPEGVAVVLRKALI

SEQ ID NO: 16613 - protein, 531 aa, Streptococcus agalactiae
ATGAAATTGAGTATAGATGATTATAGGCCGACCTTCGTGGTTGAGGCAGTTTATGATTTAAGAGCAGAAGATTTATTACGTCATGGCATTCGTGCGGTTTTAGTTGATTTAGATAATACACTCATTGCTTGGAATAATCCAGATGGTACTGCTGAGGTGCGTGCATGGTTAGATGAGATGACAACAGCGGATATTTCAGTTGTAGTAGTGTCTAATAACAATCATGCTCGCGTAGAACGTGCAGTATCACGTTTTGGTGTGGATTTTGTAAGTCGTGCGATGAAACCATTTACTCGTGGTATAAACATGGCAATTGAGCGTTATGGCTTTGATCGTGACGAGGTGATTATGGTTGGAGATCAATTGATGACAGATATTCGTGCTAGTTATCGCGCAGGAATAAAGTCCGTATTGGTAAAACCAATTGTTAAATCTGATGCTTGGAATACCAAGTTCAATCGCTTACGTGAACGTCGCGTTTGGAAAAAAATAGAAGAGAATTACGGTAAAATCGTATATCAAAAAGGAATT

SEQ ID NO: 16614 - protein, 177 aa, Streptococcus agalactiae
MKLSIDDYRPTFVVEAVYDLRAEDLLRHGIRAVLVDLDNTLIAWNNPDGTAEVRAWLDEMTTADISVVVVSNNNHARVERAVSRFGVDFVSRAMKPFTRGINMAIERYGFDRDEVIMVGDQLMTDIRASYRAGIKSVLVKPIVKSDAWNTKFNRLRERRVWKKIEENYGKIVYQKGI

SEQ ID NO: 16615 - protein, 885 aa, Streptococcus agalactiae
ATGACCTTAGCTGCCGGACTAGCATGGGGCATTTCTGGAATTAGTGGTCAATACTTGATGTCGCACGGAGTACACGTTAACCTTTTGACTTCTTTACGATTGTTGATAACAGGTATCTTTCTCTTGTCTTTAGCTAGATCAAAACAAAAGGAGCATTTAGTAGCAGCGTGGAAACAGCCAAAATTTTTAAAGCAGGTTTTACTTTTTTCTATATTTGGTTTAGTTTTAAATCAATATGCTTTTCTCAGAGCGATTCATTTAACAAATGCTGGAACTGCAACGGTTTTGCAATATATGGCACCAATACTTATTTTGAGTATTGTTTGTATCCTAAACAGACAAAGACCAACATCTTTTGAAATAATAGCAATTGCTATGGCAATTTTAGGAACCTATATGATTGCAACGCATGGGAAGTTAGGAAGTTTAGCTATCACACCGAAAGGATTAATGTGGGGGCTTGGTTCCGCCATTACTTATTCTATTTATATTTTATTACCTGTGAAACTTATTCATGAATGGGGAAGTACGATTGTTATTGGTTCAGGAATGTTTATAGGTGGGATTTTATTTAGTTTGGTGACAAAAGCGTGGCAATACCCCTTACAAATTAATGTGATGAGTATACTTGCTTATATTGGCATTATTGGTATTGGGACTATTTTTGCTTACACTTTTTTCCTTAAAGGGGTTAGTATTGTAGGTGCTGTCAAGGGTAGCTTATTAGCATCGGTAGAGCCAGTTTCTTCGGTATTTTTGACAGTACTTGTTTTAGGAGAAATTTTTTATCCAATAGATTTACTTGGGATGCTGTTTATTTTTCTTGCTGTAACTCTAATCTCTTACAAAGATTTAATTGCATTGAAGAAAATGAAACGAGTAAGA

SEQ ID NO: 16616 - protein, 295 aa, Streptococcus agalactiae; identical to SEQ ID NO: 11954

SEQ ID NO: 16617 - protein, 1440 aa, Streptococcus agalactiae
ATGAATTTTGAAACAGTCATTGGACTTGAAGTCCATGTTGAATTAAATACGAACTCTAAAATTTTCTCACCTTCTTCCGCTCATTTTGGTCAGGAACAAAATGCTAATACAAATGTAATTGACTGGTCTTTCCCAGGTGTCCTTCCAGTCATGAATAAAGGAGTTATTGATGCAGGAATCAAGGCGGCACTTGCCTTGAATATGGATATCCATCAAAACATGCATTTTGATCGTAAAAATTATTTCTATCCAGATAATCCTAAAGCTTATCAAATTTCACAGTTTGATGAGCCTATTGGTTACAATGGTTGGATTGAAATCGAATTAGAAGATGGTACACGAAAAAAAATTCGTATTGAGCGTGCCCACCTCGAAGAAGATGCAGGAAAAAATACACATGGGACAGATGGTTATTCCTATGTTGACCTTAATAGACAAGGTGTTCCACTGATTGAAATTGTATCAGAAGCTGATATGCGTTCTCCTGAGGAAGCTTATGCTTATTTGACAGCTCTCAAAGAGATTATCCAATATACTGGAATTTCTGACGTTAAAATGGAAGAAGGTTCTATGCGTGTAGATGCCAATATTTCACTTCGTCCTTATGGTCAAGAAGAGTTTGGTACTAAAGCAGAACTTAAGAACCTTAACTCATTCAATAATGTACGTAAAGGTTTGATACATGAAGAAAAACGTCAAGCACAAGTTTTACGATCTGGTGGTCAAATTCAGCAAGAGACTCGTCGTTTTGATGAAACAACAGGTGAGACTATTTTGATGCGTGTCAAGGAAGGCTCATCAGATTATCGCTATTTCCCTGAACCAGATCTACCACTATTTGATATCTCGGATGAATGGATTGATCAAGTTCGTTTAGAATTACCAGAATTTCCACAGGAACGTCGTGCGAAATATGTATCGTCTTTTGGTCTATCATCTTATGATGCTAGCCAATTAACAGCTACAAAAGCAACTTCTGATTTCTTTGAAAAAGCTGTTGCTATTGGGGGTGATGCAAAACAAGTTTCCAATTGGTTACAAGGAGAAGTGGCGCAATTTCTTAACAGTGAATCAAAATCAATCGAAGAAATTGGTCTGACTCCTGAGAATTTGGTTGAGATGATTGGCTTGATTGCTGACGGTACAATTTCATCCAAAATTGCTAAAAAAGTTTTTGTGCATTTAGCTAAAAATGGTGGTTCAGCTGAAGAATTCGTTAAAAAGGCTGGTTTAGTTCAAATTTCAGATCCTGAAGTATTAATCCCAATTATTCATCAAGTCTTTGCAGATAATGAAGCTGCTGTGATTGACTTTAAGTCAGGAAAACGCAATGCTGATAAGGCCTTCACAGGTTATCTAATGAAAGCAACAAAAGGACAAGCTAATCCACAAGTTGCTCTGAAGCTGTTAGCGCAAGAATTAGCAAAATTAAAAGAAGAA

SEQ ID NO: 16618 - protein, 480 aa, Streptococcus agalactiae; identical to SEQ ID NO: 3058

SEQ ID NO: 16619 - protein, 1464 aa, Streptococcus agalactiae
ATGTCGTTTAATAATCAATCAATTGATCAGTTGCATGATTTTCTCGTTAAAAAAGAAATTTCAGCAACTGAATTAACAAAAGCTACATTGGAAGATATTCATGCGCGTGAACAAGCGGTTGGATCTTTTATTACTATTTCTGATGAGATGGCAATAGCTCAAGCCAAAGAAATTGATGATAAAGGAATTGATGCTGATAATGTTATGTCAGGTATTCCCTTAGCAGTTAAAGATAATATTTCAACAAAGGGGATTCTTACAACAGCTGCTTCTAAAATGCTCTATAACTATGAGCCAATCTTTGATGCTACGGCTGTTGAAAAGTTATATGCTAAAGATATGATTGTGATTGGTAAAGCAAACATGGATGAATTTGCCATGGGAGGCTCTACAGAAACATCTTATTTTAAAAAGACAAATAACGCTTGGGACCATAGTAAAGTTCCGGGAGGATCATCAGGTGGTTCTGCAGCAGCAGTAGCTTCAGGACAAGTACGTTTATCATTGGGCTCTGATACAGGTGGTTCAATTCGCCAACCGGCTTCATTTAATGGAATCGTTGGTATGAAGCCAACTTACGGACGTGTATCACGCTTTGGTTTGTTTGCTTTCGGTAGTTCGCTTGACCAGATTGGACCGATGTCTCAAACAGTAAAAGAGAATGCACAGCTTTTGACAGTTATTTCTGGGCATGATGTAAGAGATTCAACTTCTTCTGAGCGTACTGTAGGCGATTTTACTGCTAAAATTGGTCAAGATATTCAAGGAATGAAAATTGCTTTACCAAAAGAATATTTGGGAGAAGGAATAGCGCAAGGAGTTAAAGAAACGATTATTAAGGCCGCAAAACATCTGGAAAAACTAGGTGCAGTTATTGAGGAAGTTAGTTTACCGCATTCTAAATACGGTGTTGCTGTTTATTATATTGTTGCTTCATCGGAAGCTTCTTCAAACTTACAACGTTTTGATGGTATTCGTTATGGATACCGTACAGAAAATTATAAAAACTTGGATGATATCTATGTCAATACACGATCTGAAGGTTTTGGAGACGAAGTTAAGCGTCGCATTATGCTGGGAACGTTCAGTTTATCTTCTGGGTATTACGATGCTTATTATAAAAAAGCAGGTCAAGTTCGTAGTTTGATTATTCAAGATTTTGAAAAAGTTTTCGCAGATTATGACTTGATTTTAGGTCCAACAGCTCCAACAACAGCCTTTGACTTAGATTCTTTAAATCACGATCCAGTTGCAATGTACCTAGCTGATATTCTAACAATACCAGTTAATTTGGCTGGTTTACCAGGTATTTCAATCCCTGCTGGTTTTGATCAAGGTCTACCGGTTGGTATGCAGTTGATTGGTCCGAAATTCAGTGAAGAAACAATATATCAGGTTGCTGCTGCCTTCGAAGCAACGACAGATTATCATAAACAACAACCTAAAATTTTTGGAGGTGAGAAC

SEQ ID NO: 16620 - protein, 488 aa, Streptococcus agalactiae; identical to SEQ ID NO: 3060

SEQ ID NO: 16621 - protein, 300 aa, Streptococcus agalactiae
ATGAAAATTTCTGAAGAAGAAGTGCGTCATGTTGCCCATCTGTCAAAATTGCGCTTTTCTGATCAAGAGACTAAAGAATTTGCGTCAAGTTTGTCAAAGATTGTTGATATGATTGAACTCTTAAATGAAGTTGACACAGAAGGCGTACCAGTAACAACGACCATGGCAGATCGCAAAACTGTGATGCGTGAAGATATTGCTCAACCAGGCCATAATCGTGATGACTTATTTAAAAATGTACCACAGCATCAAGATTATTATATTAAAGTACCTGCAATTCTTGAGGATGGAGGAGATGCC

SEQ ID NO: 16622 - protein, 100 aa, Streptococcus agalactiae
MKISEEEVRHVAHLSKLRFSDQETKEFASSLSKIVDMIELLNEVDTEGVPVTTTMADRKTVMREDIAQPGHNRDDLFKNVPQHQDYYIKVPAILEDGGDA

SEQ ID NO: 16623 - protein, 2643 aa, Streptococcus agalactiae
ATGGAAACTAAGTTTGTGTATCATTTTGATGAAGGTTGTAAGGAAATGAAGGAACTGCTAGGTGGTAAGGGGGCTAATCTAGCTGAAATGACGAGTATTGGGTTACCGGTACCACAAGGTTTTACTATTACAACACAGGCTTGTAATGATTATTATGATAACGCTTGCCATATCCGAGAGAGTATTCTTAGTCAAATTGATCAAGCAATGGCACAATTGGAGGTTGAACAGAACAAGCAATTAGGAAGTGTTGATGATCCTTTGTTGGTGTCAGTTCGGTCAGGATCAGTTTTTTCAATGCCTGGTATGATGGACACAGTTTTAAATTTAGGGTTAAATGATCGTAGTGTCCAAGGTTTAGTGAAAAAGACAGAAGACGAGCGTTTTGCTTATGACAGTTATCGTCGTTTTATCCAAATGTTTGCAGATGTGGTTACAGGCATTCCAAAATATAAATTTGATACCATTTTAGATCGACTTAAGACAGATAAATGTTATCAAGATGACACAGAACTAACTGGTTCAGATTTAAAGAGACTTGTTGAATTTTACAAGGAACTATATCAAAAAGAAGCAGGAGAAAAATTTCCGCAAGATCCTAAAAGGCAGCTTTTGTTAGCAATTGAGGCAGTTTTTAAATCATGGAATAATCCAAGAGCTAAGATTTATCGTAAATTAAATGATATTCCGGAGACGCTTGGGACAGCCGTTAATATCCAAGCTATGGTTTTTGGGAATATGGGAAATAACAGCGGAACGGGAGTTGCTTTTACACGAAACCCATCAACTGGAGCAGCAAATTTATTTGGTGAGTATTTGATTAATGCACAAGGAGAAGATGTTGTTGCAGGTATCAGAACACCACAATCCATATCAAAATTGGCAGAACAAATGCCTATTATTTACCAAGAGTTTGTAAGCGTTACCCAAAAGTTAGAAGCTCATTATCGCGATATGCAAGATATGGAGTTTACAATTGAAAATGGTAATCTTTATATGCTTCAGACGAGAAGCGGTAAGCGTACAGCGAAGGCAGCTATCAAAATAGCAGTAGATCAAGTAAATGAAGGCCTAATTAGTAAAGAAGAAGCTATACTACGTATCGAGCCCAAACAATTAGATCAGTTATTACACCCTTCTTTTGACTTGAAAAGTTTAAAGAAAGCTATTATTTTGACGACAGGACTTCCAGCTTCTCCTGGAGCTGCTTATGGGAAAGTTTATTTCCATGCAGAAGATGTTGTTAAAGAGATGAAAAAGGGAAATCCAGTGCTATTGGTCAGACAAGAGACATCACCTGAAGATATCGAGGGGATGGTTAGTGCAAACGGGATTATAACAGCAAGAGGCGGAATGACTTCCCATGCGGCAGTAGTAGCCAGAGGAATGGGGAAACCATGCGTTGCAGGCTGTAGTCAATTATTGGTTGATGAAGTAAGACGAGAAATTTCTATTGGGCATCAAACGATAAAAGAAGGTGAGATGTTATCAATCGATGGTGCTACAGGAAATGTTTATATAGGACAAGTTCCGATGGCAGAGACTAGCGTAGATCGTGATTTTGAGATATTTATGAAATGGGTAGATGAAAATCGAGATATGATGGTGTGTTCAAATGCAGATAATCCGAGAGATGCTCAAAAGGCCTTGGACTTTGGAGCAGAAGGAATAGGTCTTTGTCGCACGGAACATATGTTTTTTGACGATGAACGTATTCCAGTCGTTAGAGAAATGATTTTAGCGGATGAAATATTGAGCCGAAGGAAGGCTCTAGAAAGGCTTTTATCTTTCCAAAGAGACGATTTTTATCAAATTTTTAAAGTATTGAAAGGTAAAGCTTGTACGATTCGTTTGCTTGACCCTCCTTTACATGAATTCTTACCCCATGATAAAGAGTCTATAGAATCTATGGCAAGACAAATGGGGATATCTACTTTAGCTATTGAAAAACGGATTCAAACATTAGAAGAATTCAACCCTATGTTAGGTCATCGTGGTTGTAGACTTGCGATTACCTATCCGGAAATTTACCAAATGCAGGTGAGAGCTCTTGTACAAGGCGCTATACTTGCAATGAAAGAGGGATATGAGGCAAAGCCAGAAATTATGATTCCTTTAGTGACAGCGCATGAAGAAATCTCTATAATACGTGATCTGATTGAAGAGACAATTGTTGAGGAGAGTAAATCTAAAAAAATTAACTTATCATTCCCTATTGGGACAATGATTGAAACACCAAGAGCTTGTATGATAGCGGATGATATTGCAAAGTTTGCGGATTTCTTTAGTTTTGGGACCAATGATTTAACACAAATGAGCTTTGGATTTTCACGAGATGATGCTGGAAAATTCTTAGGAGAATACGTTGATAAAGGACTTCTAAAAAAAGACCCTTTCCAAGTTTTAGATCAAAAAGGAATAGGAAGGTTTATTGAGCAGGCAGTGAGGTTAGGAAAAGAAGTTAAGCCAAACCTTAAAATAGGTATCTGTGGAGAGCATGGTGGAGAACCATCATCTATTGAGTTCTGTTACCAACAGGGGTTACATTATGTATCGTGTTCGCCGTTTAGGATTCCTATTGCTAAATTAGCGGCTGCACAGGCTAAAATCAAACAAAGCAGAAATGATATAACAATAGATAAA

SEQ ID NO: 16624 - protein, 881 aa, Streptococcus agalactiae
METKFVYHFDEGCKEMKELLGGKGANLAEMTSIGLPVPQGFTITTQACNDYYDNACHIRESILSQIDQAMAQLEVEQNKQLGSVDDPLLVSVRSGSVFSMPGMMDTVLNLGLNDRSVQGLVKKTEDERFAYDSYRRFIQMFADVVTGIPKYKFDTILDRLKTDKCYQDDTELTGSDLKRLVEFYKELYQKEAGEKFPQDPKRQLLLAIEAVFKSWNNPRAKIYRKLNDIPETLGTAVNIQAMVFGNMGNNSGTGVAFTRNPSTGAANLFGEYLINAQGEDVVAGIRTPQSISKLAEQMPIIYQEFVSVTQKLEAHYRDMQDMEFTIENGNLYMLQTRSGKRTAKAAIKIAVDQVNEGLISKEEAILRIEPKQLDQLLHPSFDLKSLKKAIILTTGLPASPGAAYGKVYFHAEDVVKEMKKGNPVLLVRQETSPEDIEGMVSANGIITARGGMTSHAAVVARGMGKPCVAGCSQLLVDEVRREISIGHQTIKEGEMLSIDGATGNVYIGQVPMAETSVDRDFEIFMKWVDENRDMMVCSNADNPRDAQKALDFGAEGIGLCRTEHMFFDDERIPVVREMILADEILSRRKALERLLSFQRDDFYQIFKVLKGKACTIRLLDPPLHEFLPHDKESIESMARQMGISTLAIEKRIQTLEEFNPMLGHRGCRLAITYPEIYQMQVRALVQGAILAMKEGYEAKPEIMIPLVTAHEEISIIRDLIEETIVEESKSKKINLSFPIGTMIETPRACMIADDIAKFADFFSFGTNDLTQMSFGFSRDDAGKFLGEYVDKGLLKKDPFQVLDQKGIGRFIEQAVRLGKEVKPNLKIGICGEHGGEPSSIEFCYQQGLHYVSCSPFRIPIAKLAAAQAKIKQSRNDITIDK

SEQ ID NO: 16625 - protein, 828 aa, Streptococcus agalactiae
ATGGAAGATCAACTCACTATATTTATTATTTCAGATTCTTTAGGGGAAACAGCCAAAGCTATTGCGAAAGCATGTTTGTCACAATTTCCAGGACATGATGATTGGCATTTTCAACGTTTTTCCTATATTAACAGTCAGGAACGCTTAGAACAAGTTTTTGAAGAGGCTAGCCAGAAGACAGTATTTATGATGTTTAGTTTAGTTGATGTTGCTTTGGCTTCCTATGCACAGAAACGATGTGAAAGTGAACATTATGCTTATGTTGACTTATTAACAAATGTTATTCAAGGAATATCAAGGATATCGGGTATAGATCCTTTGGGAGAACCAGGGATTTTACGACGCTTAGACAATGATTATTTCAAAAGAGTAGAATCAATAGAATTTGCAGTAAAATATGATGATGGGAGAGATCCGCGAGGTATTTTACAAGCAGATTTAGTTATTATAGGAATTTCAAGAACTTCTAAAACACCATTAAGTATGTTTTTAGCAGATAAAAATATTAAAGTTATTAATATTCCTTTGGTTCCAGAGGTTCCTGTTCCTAAAGAATTACGTATGATTGATTCTAGAAGGATTATCGGACTAACTAATTCGGTTGATCATCTTAATCAAGTCCGAAAAGTTCGATTAAAGTCCCTAGGTCTTTCTAGTACGGCAAATTATGCCAGTTTAGAACGGATTTTGGAGGAGACGAGGTATGCTGAAGAAGTTATGAAAAATTTAGGTTGCCCAATCATTAATGTATCTGATAAAGCAATCGAAGAAACAGCAACGATTATTTTAGAAATCTTAAAAACAAATGGACAAGTAGCTAAAAATCTG

SEQ ID NO: 16626 - protein, 276 aa, Streptococcus agalactiae; identical to SEQ ID NO: 3066

SEQ ID NO: 16627 - protein, 495 aa, Streptococcus agalactiae; identical to SEQ ID NO: 11967

SEQ ID NO: 16628 - protein, 165 aa, Streptococcus agalactiae; identical to SEQ ID NO: 7738

SEQ ID NO: 16629 - protein, 1130 aa, Streptococcus agalactiae
TTGTATACTATTTATTTTATATGTTATATTATATATCTTTTTTTACTGAAATCAAGTAAAAAAAGATACTATTTTAAAAATAATCATACTATATATTTGCTTTTAGACATATCTTTTGTTAAACTTTCTTCGAAAACGTTTTCGAATATAAGTATCGGAGGTTGTAATATGACAATTAAAAATCTCACTGTTGCAGGAAGTGGCGTTCTAGGTAGTCAAATCGCCTTTCAAGCAGCTTACAAAGGAATGTCTGTCACCATATATGACATTAACGATGAAGCTTTAAATAAGGGAAAAGAACGCATCAAAAAATTAGCTAAAGTCTATCAATCAGAAATTGAAACAGCAAAAGAAGCATATAGTGATAAAGCTAAAAGTATCAAGTATAATAAAAACTTATTGCCTAGCTTAGACCATATTTTTCTTTCAAAAGTTGCCGATTCATTAGACTTGATTGCTGATTTACCAAACCAAATTACTTTTTCAAAAAACTTAGACCAAGCTGTAAGTGACGCCGATTTAGTAATCGAAGCTGTCCCAGAAACAGTTAGTATAAAAGAAGATTTTTACAAACAATTAGCTAAAGTGGCACCTTCAAAGACAATCTTTGCAACAAATTCTTCAACACTTGTTCCAAGTCAGTTTGCTGATATAACAGGACGGCCTGACAAATTTTTAGCAATGCATTTCGCTAACAATATTTGGCAAAATAATATTGTTGAAATTATGGGACATAAGGGAACTGACGACGAGGTTGTCAAAGAAGCTTTGGCATTCTCAAAAGATATTGGTATGGTACCTTTATATATTCATAAAGAACAACCTGGCTATATTCTTAATTCAATACTAGTTCCATTCTTAGAGAGTGCATTAGCATTGTACTATAATAAGGTTTCTGATTCTGAAACTATTGATAAAACCTGGAAGTTAGGAACAGGAGCACCGATGGGACCTTTAGAAATTTTAGATATTATTGGCATCGATACCGCTTATAATATCATGAAGAATTATTCAGATACCACCAGCGATCTAATAGTTTACATGCTCACCTTGCAAAAATGCTTAAAGAAGAATTCATTGATAAAGGACGTACCGGTAAAGCTGCTGGACACGGCTTTTATGATTACGAC

SEQ ID NO: 16630 - protein, 377 aa, Streptococcus agalactiae
MYTIYFICYIIYLFLLKSSKKRYYFKNNHTIYLLLDISFVKLSSKTFSNISIGGCNMTIKNLTVAGSGVLGSQIAFQAAYKGMSVTIYDINDEALNKGKERIKKLAKVYQSEIETAKEAYSDKAKSIKYNKNLLPSLDHIFLSKVADSLDLIADLPNQITFSKNLDQAVSDADLVIEAVPETVSIKEDFYKQLAKVAPSKTIFATNSSTLVPSQFADITGRPDKFLAMHFANNIWQNNIVEIMGHKGTDDEVVKEALAFSKDIGMVPLYIHKEQPGYILNSILVPFLESALALYYNKVSDSETIDKTWKLGTGAPMGPLEILDIIGIDTAYNIMKNYSDTTSDPNSLHAHLAKMLKEEFIDKGRTGKAAGHGFYDYD

SEQ ID NO: 16631 - protein, 546 aa, Streptococcus agalactiae
ATGACAAAAGCACTCATCTCAATAGACTACACATATGATTTTGTGGCAGATGATGGGAAATTAACGGCAGGTAAACCAGCGCAATCTATCGCTTCAGCTATAGCTGACGTTACAGAGAAAGCATACCGGTCAGGGGATTATATTTTTTTTGCGATTGATAATCATGATATTGGAGATGTTTTTCATCCAGAGACCAATCTTTTTCCTGAGCATAATATTAAAGGGACTTCTGGTAGAAACCTATATGGTCCTTTGGGAACTCTATATGAAACTATTAAGGAAGATAGTCGTGTTTTTTGGATAGATAAGCGCCATTATTCTGCCTTTTCTGGTACTGATTTAGATATTCGTCTACGTGAAAGACGAGTAGATACTTTGATATTGACAGGAGTACTGACAGATATTTGTGTATTACACACAGCAATTGATGCTTATAACTTAGGTTATAAAATTGAGGTCCCAGCAGCTGCTGTAGCCAGCTTAAATGATAGTAATCATCAATGGGCTTTAAATCATTTTAAAACTGTTCTTGGTGCAACTATTCTT

SEQ ID NO: 16632 - protein, 182 aa, Streptococcus agalactiae
MTKALISIDYTYDFVADDGKLTAGKPAQSIASAIADVTEKAYRSGDYIFFAIDNHDIGDVFHPETNLFPEHNIKGTSGRNLYGPLGTLYETIKEDSRVFWIDKRHYSAFSGTDLDIRLRERRVDTLILTGVLTDICVLHTAIDAYNLGYKIEVPAAAVASLNDSNHQWALNHFKTVLGATIL

SEQ ID NO: 16633 - protein, 783 aa, Streptococcus agalactiae
ATGCCGAATTTATTAGAAAAAACTAGAAAAATTACATCCATCTTACAGCGTTCCGTAGATAGCTTAGATGCCGAATTACCATATAATACAATGGCGGCTCAATTAGCTGATATTATTGACTGTAACGCATGTATTATTAATGGTGGTGGTAACTTACTTGGCTATGCCATGAAATATAAAACAAACACTGACCGTGTGGAAGAATTTTTTGAAACAAAACAATTCCCAGATTACTATGTTAAATCTGCTAGTCGTGTTTATGATACAGAAGCTAACTTATCAGTAGATAATGATTTGTCAATTTTCCCAGTTGAGACAAAGGAAAACTTCCAAGATGGTATTACAACAATCGCTCCAATTTATGGTGGTGGAATGCGCTTGGGAACATTTATTATCTGGCGTAATGATAAAGAATTTAGCGACGATGATTTGATTTTAGTTGAAATTGCAAGCACCGTTGTTGGTATTCAATTACTTAACCTTCAAACAGAAAATCTAGAAGAAAATATTCGTAAACAAACAGCGGTGACAATGGCTATCAACACTTTATCTTATTCAGAAATGAAAGCTGTAGCTGCTATCTTAGGAGAATTAGATGGACTTGAAGGACGCCTAACGGCATCTGTTATTGCAGACCGTATTGGAATTACACGTTCCGTTATTGTAAATGCTCTTCGTAAATTGGAGTCTGCGGGAATCATTGAGAGCCGCTCACTCGGTATGAAGGGAACATACCTCAAAGTTATTAACGAAGGTATTTTTGACAAATTAAAAGAATATAAT

SEQ ID NO: 16634 - protein, 261 aa, Streptococcus agalactiae; identical to SEQ ID NO: 7744

SEQ ID NO: 16635 - protein, 1123 aa, Streptococcus agalactiae
ATGAGGGCAAATGGTGAAAAGATATTGCGGTTAAATACTGGAAATCCAGCTGCCTTTGGCTTCGAAGCGCCAGATGAAGTCATTCGTGATTTAATTACGAATGCGCGTGAATCAGAAGGTTACTCTGATTCGAAAGGTATTTTTTCAGCTCGTAAGGCTGTTATGCAGTATTACCAGTTACAAAACATCCATGTTGACATGGATGATATATACATTGTTAATGGTGTTAGTGAGGGAATCTCTATGTCAATGCAAGCTTTGCTTGATAATGATGACGAGGTTCTAGTTCCAATGCCAGATTACCCGTTATGGACAGCTTGTGTTAGCCTTGCTGGAGGAAATGCTGTGCATTATATTTGTGATGAGGAAGCTAATTGGTATCCTGATATTGATGATATCAAATCAAAAATCACATCCAAAACAAAAGCAATCGTCCTCATTAATCCAAATAATCCAACTGGAGCAGTCTATCCGCGTGAAATTCTGCAAGAGATTGTGGATATCGCTAGACAAAATGACTTGATTATTTTTTCAGACGAGGTTTATGACCGTTTAGTTATGGATGGAATGGAGCATATCCCAATTGCTTCTATTGCAGAGGATATTTTTACAGTTACTTTATCTGGCTTATCTAAATCACATCGCATCTGTGGTTTCCGCGTTGGTTGGATGGTATTGTCTGGTCCGCGACAACATGTTAAAGGTTATATTGAAGGTTTGAATATGTTAGCTAACATGAGGCTGTGTTCAAATGTTCTTGCTCAACAGGTTATTCAAACATCGTTAGGCGGACAGCAATCTATTGATAGTATGTTGTTGCCAGGAGGTCGTATCTACGAGCAACGTAATTATATCCATAAAGCAATTAATGAAATACGGTTTATCTGCTGTAAAACCAAATGCTGGACTGTATCTTTCCCTAAAATGATACAGATATGTACCGTATTGATAATGATGAAGAGTTTGTGCTTAATTTCTTAAAACAAGAAAAAGTATTACTAACACACGGTAGAGGATTTAATATGAATACCGCTGACCATTTTAGAATTGTTTACTTACCACGTGTTGATGAATTGACTGAACTACAAGAAAAAATGGCTCGCTTTTAAGCCAATACAAGCGC

SEQ ID NO: 16636 - protein, 376 aa, Streptococcus agalactiae
  VARIANT 293: Xaa = Any Amino Acid
MRANGEKILRLNTGNPAAFGFEAPDEVIRDLITNARESEGYSDSKGIFSARKAVMQYYQLQNIHVDMDDIYIVNGVSEGISMSMQALLDNDDEVLVPMPDYPLWTACVSLAGGNAVHYICDEEANWYPDIDDIKSKITSKTKAIVLINPNNPTGAVYPREILQEIVDIARQNDLIIFSDEVYDRLVMDGMEHIPIASIAEDIFTVTLSGLSKSHRICGFRVGWMVLSGPRQHVKGYIEGLNMLANMRLCSNVLAQQVIQTSLGGQQSIDSMLLPGGRIYEQRNYIHKAINEIXGLSAVKPNAGLYLFPKIDTDMYRIDNDEEFVLNFLKQEKVLLTHGRGFNMNTADHFRIVYLPRVDELTELQEKMARFLSQYKR

SEQ ID NO: 16637 - protein, 234 aa, Streptococcus agalactiae
TTGAGTGCAAGAGGTTATCTCTTTTGGTTATATTTAGAGGAGGACAGGCTTATGTCACAAAAATATGAACGCATCCTTGTCGCTATTGATGGATCAACAGAATCTGAACTTGCTTTTGAAAAGGCAGTTAACGTTGCTCTTCGCAATGATTCTGAATTAATCTTGACACATGTTATAGATACACGTGCTCTACAAAGCTTTGCGACATTTGATACTTATATCTATGAAAAATTA

SEQ ID NO: 16638 - protein, 78 aa, Streptococcus agalactiae
MSARGYLFWLYLEEDRLMSQKYERILVAIDGSTESELAFEKAVNVALRNDSELILTHVIDTRALQSFATFDTYIYEKL

SEQ ID NO: 16639 - protein, 342 aa, Streptococcus agalactiae
ATGAAATATAAAACAAACACTGACCGTGTGGAAGAATTTTTTGAAACAAAACAATTCCCAGATTACTATGTTAAATCTGCTAGTCGTGTTTATGATACAGAAGCTAACTTATCAGTAGATAATGATTTGTCAATTTTCCCAGTTGAGACAAAGGAAAACTTCCAAGATGGTATTACAACAATCGCTCCAATTTATGGTGGTGGAATGCGCTTGGGAACATTTATTATCTGGCGTAATGATAAAGAATTTAGCGACGATGATTTCAAAAAAGGAACTGAAAGCTACTCCCAGTCCCATGCTATGATTAATTATATTCTTTTAATTTGTCAAAAATACCTTCGT

SEQ ID NO: 16640 - protein, 114 aa, Streptococcus agalactiae
MKYKTNTDRVEEFFETKQFPDYYVKSASRVYDTEANLSVDNDLSIFPVETKENFQDGITTIAPIYGGGMRLGTFIIWRNDKEFSDDDFKKGTESYSQSHAMINYILLICQKYLR

SEQ ID NO: 16641 - protein, 222 aa, Streptococcus agalactiae
ATGAAAGCTGTAGCTGCTATCTTAGGAGAATTAGATGGACTTGAAGGACGCCTAACGGCATCTGTTATTGCAGACCGTATTGGAATTACACGTTCCGTTATTGTAAATGCTCTTCGTAAATTGGAGTCTGCGGGAATCATTGAGAGCCGCTCACTCGGTATGAAGGGAACATACCTCAAAGTTATTAACGAAGGTATTTTTGACAAATTAAAAGAATATAAT

SEQ ID NO: 16642 - protein, 74 aa, Streptococcus agalactiae
MKAVAAILGELDGLEGRLTASVIADRIGITRSVIVNALRKLESAGIIESRSLGMKGTYLKVINEGIFDKLKEYN

SEQ ID NO: 16643 - protein, 120 aa, Streptococcus agalactiae
ATGGTTGGTGCAACAGGTCTTAATACCTTTGAACGTTTCCTTATCGGATCTTCCTCAGAATACATCCTTCGTCACGCTAAAGTAGATTTACTCATTGTACGTGACCCTAATAAAACAATG

SEQ ID NO: 16644 - protein, 40 aa, Streptococcus agalactiae
MVGATGLNTFERFLIGSSSEYILRHAKVDLLIVRDPNKTM

SEQ ID NO: 16645 - protein, 1380 aa, Streptococcus agalactiae
GTGGCAATTAAGGCAGTATTTTTTGATATTGATGGTACACTTCTTAATGATCGTAAGAATGTACAAAAGTCAACAATTAAAGCAATTCGAAATTTGAAAGACCAAGGAATACTAGTCGGTTTAGCAACGGGGCGAGGTCCTAGTTTTGTACAACCTTTTTTAGAAAACCTTGGTTTAGATTTTGCTGTAACCTATAATGGTCAATATATCTATAGTAGAAGTGAAATTATTTATACCAATCAATTATCTAAGACAACTGTCTATCGTCTGATTCGTTATGCTGGAGCAAGAAGAAGAGAAATTTCATTAGGAACAGCCTCAGGATTACTCGGTTCAGGTATTATTGGTCTAGGAACTAGCCGTTTGGGGCAGATTGTATCTAGCCTTGTTCCGAGAAAATGGGCAAAAGCGATTGAACGAAGCTTTAAGCATTTTATTCGTCGGATTAAACCTCAAAATATTGATAGCCTCATGGTTATCTTACGAGAACCTATTTATCAGGTCGTTTTAGTTGCAACAGAGGGCGAATCAGAGCGAATTCAAAAACAATTTCCTCGTGTTAAATTAACAAGAAGCAGTCCTTACTCAATGGATGTCATTTCTGAAGGGCAGTCAAAAGTTAAGGGAATTGAACGTGTTGGTCAATGCTATGGTTTTGATTTATCAGAAGTGATAGCATTTGGAGATTCTGATAATGATATTGAGATGTTATCTCAAGTTGGTATTGGTGTTGCCATGGGGAACGCTAGTCAGCAAGTGAAAGAAAATGCACGTTATACAACTGCTGACAATAATGATGATGGTATCTCTAAGGCATTAGCCCATTATGGACTTATCCAATTTGAGATTGAAAAAACATTCAGTAGTCGTGACGAGAATTTCAATAAAGTAAAATCTTTCCATCTATTAATGGATGGTGAAACTATTGAAACGCCACGCTTATATGACAGTAAGGAAGCTGGTTTTAGGTCGGACTTTAAAGTAGAAGAAATCGTTGAGTTCTTGTATGCTGCTAGTCAAGGTAACCAAGAAGTATTTGACCAATCTATCCGTAATTTACACTTAGCTATTGATAAAGCAAGAGATAAGGTTATTTCTAAAGACCATCCAGAAACACCATTAGTGGGAGAAGTGGATGCCTTAACAGATTTACTTTATCTGACTTATGGCTCCTTTGTTCTTATGGGAGTCGACCCAAAACCTCTTTTTGATACAGTACATGAGGCCAATATGGGTAAAATCTTTCCAGATGGCAAAGCTCATTTTGATCCTGTTACTCATAAAATTTTAAAACCAGACGACTGGGAAGAACATTTCGCTCCTGAGCCATCAATTCGACGTGAATTAGATAGCCAAATTCAGAAATCCTTAAATCGAAAA

SEQ ID NO: 16646 - protein, 460 aa, Streptococcus agalactiae
MAIKAVFFDIDGTLLNDRKNVQKSTIKAIRNLKDQGILVGLATGRGPSFVQPFLENLGLDFAVTYNGQYIYSRSEIIYTNQLSKTTVYRLIRYAGARRREISLGTASGLLGSGIIGLGTSRLGQIVSSLVPRKWAKAIERSFKHFIRRIKPQNIDSLMVILREPIYQVVLVATEGESERIQKQFPRVKLTRSSPYSMDVISEGQSKVKGIERVGQCYGFDLSEVIAFGDSDNDIEMLSQVGIGVAMGNASQQVKENARYTTADNNDDGISKALAHYGLIQFEIEKTFSSRDENFNKVKSFHLLMDGETIETPRLYDSKEAGFRSDFKVEEIVEFLYAASQGNQEVFDQSIRNLHLAIDKARDKVISKDHPETPLVGEVDALTDLLYLTYGSFVLMGVDPKPLFDTVHEANMGKIFPDGKAHFDPVTHKILKPDDWEEHFAPEPSIRRELDSQIQKSLNRK

SEQ ID NO: 16647 - protein, 891 aa, Streptococcus agalactiae
ATGTCCAGCGCCGATAACCCAATGAAATACGTTGATTTATCATTAGATGACCTTGATTTGACTGTTGTAGATTTTCTAAATCTTCCCAGTCCTCAAATCACCCCTCATCATATGCTTGATATCTATCACTATCTGAAGCAACATGCCAGTAATTTTGATGGAGTTGTCATTACGCATGGGACTGACACTTTAGAAGAAACAGCATATTTTTTAGACACAATGATACTCCCTAAAATCCCAATCATCATTACCGGTGCTATGAGAAGCACAAATGAACTTGGTAGCGATGGCGTTTATAATTACCTATCAGCCCTCCGTGTCGCTAATAGTACTAAAGCTGCCGACAAGGGGGTGCTAGTTGTCATGAATGATGAGATACATGCTGCTAAATATGTCACAAAAACACATACAACAAACGTTTCGACATTCCAAACCCCTACACATGGCCCCCTTGGGATTATTATGAAACAAGACCTGCTTTTCTTTAAAGCAACTGAAGAGAGAGTTCGTTTTGATTTAGATAAAATTACAGGAACTGTTCCTATCGTGAAAGCATATGCTGGCATGGGTGATAGTGGTATCATTAGCTTTTTAAATTCTCAAAATATTAGCGGATTAGTTATTGAAGCACTCGGTGCAGGGAATATGCCCCCAAAAGCTGCACAAGAAATCGAAGAATTAATTGAGCAAGGTGTCCCTGTTGTTCTAGTGTCTCGCTGTTTTAATGGTATTGCTGAGCCAGTTTACGGATATGAAGGTGGCGGAGCAAAATTACAAGAATCTGGTGTCATGTTTGTTAAAGAACTAAACGCTCCCAAAGCCAGACTCAAATTACTCATTGCACTCAATGCAGGTCTCACAGGGCAAAATCTAAAAGACTATATTGAAGGT

SEQ ID NO: 16648 - protein, 297 aa, Streptococcus agalactiae
MSSADNPMKYVDLSLDDLDLTVVDFLNLPSPQITPHHMLDIYHYLKQHASNFDGVVITHGTDTLEETAYFLDTMILPKIPIIITGAMRSTNELGSDGVYNYLSALRVANSTKAADKGVLVVMNDEIHAAKYVTKTHTTNVSTFQTPTHGPLGIIMKQDLLFFKATEERVRFDLDKITGTVPIVKAYAGMGDSGIISFLNSQNISGLVIEALGAGNMPPKAAQEIEELIEQGVPVVLVSRCFNGIAEPVYGYEGGGAKLQESGVMFVKELNAPKARLKLLIALNAGLTGQNLKDYIEG

SEQ ID NO: 16649 - protein, 876 aa, Streptococcus agalactiae
ATGAATTCATTAAATGGGGAAACTTTACTAACTGGTCTAATTGCCAATCCTGCACGCCACTCTCTATCCCCGTTAATGTGGAATACCTCTTTTCAAGAAAAAAACATGAATTATGCCTATCTGACATTTGAAGTAGAAGAGGGTAAATTAACAGAAGCTGTTCGAGGTGTCAGGGCATTGAGTATTCGTGGTGTTAATGTTTCAATGCCATTTAAACAGAGTGTTATCCCTTTGCTAGATGATTTATCTCCTCAAGCTAAATTAGTGGGTGCTGTAAATACTATCGTTAATCAAGGTGGAACCGGACGTTTAGTAGGCCATATGACAGATGGCATTGGTTGTTTTAAAGCTTTAGCAGCTCAAGGTTTCAGTGCTAAAAATAAAATAATTACAATAGCTGGTATTGGTGGTTCAGGTAAAGCAGTTGCAGTTCAAGCAGCTATGGAGGGAGTTGCGGAAATTAGATTATTTAATCGTAACAGCTCAAATTACGATAAGGTCATTGACTTATCAGATAAAATTAAAAAACAGTTTCAAATAAAGGTAGTCGTTGATTATCTAGAAAATAAGACAGCATTTAAAGACGCTATTAGAACTAGTCATTTTTATATTGATGCTACTAGTTTAGGAATGAGGCCATTAGATAATTATAGTTTAATTAACGATCCAGAAATTTTAACACCGAATTTAGTAGTTGTCGACTTGGTTTACAAGCCTAAAGAAACAGCATTGTTACGATTTGTTAGACAAAATGGAGTGAAACATGCTTATAATGGTCTAGGGATGCTGATTTATCAAGGAGCAGAAGCATTTCAATTAATAACGAATCAAGAAATGCCTATTAGCAGTGTTGAGAGAGTATTACAAACTGAAAAT

SEQ ID NO: 16650 - protein, 292 aa, Streptococcus agalactiae
MNSLNGETLLTGLIANPARHSLSPLMWNTSFQEKNMNYAYLTFEVEEGKLTEAVRGVRALSIRGVNVSMPFKQSVIPLLDDLSPQAKLVGAVNTIVNQGGTGRLVGHMTDGIGCFKALAAQGFSAKNKIITIAGIGGSGKAVAVQAAMEGVAEIRLFNRNSSNYDKVIDLSDKIKKQFQIKVVVDYLENKTAFKDAIRTSHFYIDATSLGMRPLDNYSLINDPEILTPNLVVVDLVYKPKETALLRFVRQNGVKHAYNGLGMLIYQGAEAFQLITNQEMPISSVERVLQTEN

SEQ ID NO: 16651 - protein, 912 aa, Streptococcus agalactiae
ATGTTACAAAACATTGGACAAACAGGCATTCAAGCAACTCGAATTGCTTTAGGTTGTATGAGAATGAGTGACTTGAAAGGAAAACAAGCTGAAGAAGTAGTTGGAACAGCATTAGATTTGGGTATTAATTTTTTTGATCATGCTGATATTTATGGGGGAGGGCTATCTGAATTACGCTTTCGAGATGCAATCAAACATTTAAATGTCAATCGTGACAAAATGATTATTCAATCTAAATGTGGGATACGAGAAGGTTACTTTGATTTTTCTAAAGAGTATATTTTATCATCAGTAGATGGTATTTTAGAAAGATTAGGGACAGAATATTTAGATTTTCTCATTCTTCATCGTCCAGATGTATTAGTTGAGCCTGAAGAAGTAGCAGAAGCATTTACCAAACTGAGGGCAGAAGGTAAAGTAAAACACTTTGGTGTTAGCAATCAAAACCGGTTTCAAATGGAGTTGTTACAATCCTACCTTGACGAGCCCTTAGCAGTGAATCAACTTCAGTTATCGCCAGCACATACACCAATGTTTGATGCAGGGTTAAATGTTAACATGTTAAATAAAGCTTCAATTGAACATGATGATGGCATTGTTGATTATTGTCGTCTTAAAAGAGTTACCATTCAAGCTTGGTCTCCATTTCAAATTGATTTATCTCGTGGTTTATTTGTTAATCATCCGGATTATAAGGAATTAAATGAAACCATAGCTAAACTGGCAAAAAACTACAATGTTAGCAGCGAAGCTATTGTGATTGCATGGATTTTACGTCATCCTGCCAAAATGCAGGCGATTGTTGGTTCAATGAATCCATCTCGTTTAAAGGCGATTGATAAGGCTAATGATATCGCTTTAACCCGTAAAGAATGGTATGATATTTACCGTAGTGCAGGTAATATATTGCCT

SEQ ID NO: 16652 - protein, 304 aa, Streptococcus agalactiae; identical to SEQ ID NO: 11990

SEQ ID NO: 16653 - protein, 2013 aa, Streptococcus agalactiae
ATGCTATTACAATCACCAATTTCTAATCTTAAGGGATTTGGACCAAAATCAGCAGAAAAATTTCAGAAATTAGATATTTATACAGTAGAAGATTTACTTCTTTATTATCCGTTTCGCTATGAAGATTTTAAATCAAAATCTGTTTTTGATTTAGTGGATGGTGAAAAAGCAGTCATTACAGGCTTAGTCGTTACTCCAGCTAATGTACAATATTATGGTTTTAAACGTAACCGTTTAAGTTTCAAATTGCGTCAAGGGGAAGCTGTCTTAAATGTTAGTTTTTTTAATCAACCCTATTTAGCTGATAAAATAGAACTTGGTCAAGAGGTAGCTGTCTTTGGTAAATGGGATGCAACTAAATCAGCTATTACTGGGATGAAGGTTTTAGCTCAAGTTGAAGATGACATGCAACCTGTTTATCGCGTATCTCAGGGAATTTCACAGTCTACTTTGATTAAAGCTATTAAGTCAGCTTTTGAAATCAATGCGCATTTGGAATTGAAGGAAAATTTACCAGCTACTTTATTGGGAAAATACCGATTGATGGGTCGTAGTCAGGCTTGTTTAGCTATGCATTTCCCAAAAGATATCACAGAGTATAAGCAAGCGCTCCGTCGGATTAAATTTGAAGAATTATTTTACTTTCAAATGAACCTTCAAGTTTTGAAAGCCGAAAATAAATCTGAAACAAATGGTTTGTCTATTCTTTATAGTAAACATGCTATGGAGACAAAGATTTCATCTTTACCTTTTATTCTAACGAATGCTCAAAAGCGCTCTTTAGATGAAATATTATCTGATATGTCATCGGGAGCTCATATGAATCGTTTATTGCAAGGAGATGTAGGATCAGGAAAGACAGTCATTGCTGGTCTATCAATGTATGCAGCTTATACAGCAGGTTTTCAATCGGCTTTGATGGTTCCAACGGAAATCCTAGCTGAACAACACTACATTAGTCTGCAAGAGTTATTTCCAGATTTATCAATCGCTATATTAACTTCGGGTATGAAAGCAGCTGTTAAGCGTACGGTTTTAGCAGCTATTGCAAATGGCTCGGTTGATATGATTGTAGGAACTCATGCTCTTATCCAGGACTCGGTACAGTACCATAAACTGGGGCTTGTAATTACAGACGAGCAACATCGTTTTGGTGTTAAACAGCGTAGAATTTTCCGTGAAAAGGGAGAAAATCCTGATGTTTTAATGATGACAGCCACCCCAATTCCCCGAACTCTAGCAATCACAGCTTTTGGAGAAATGGATGTTTCTATTATTGATGAATTACCTGCCGGTCGTAAACCTATTATTACACGCTGGGTGAAACACGAGCAGCTAGGTACTGTGTTGGAATGGGTAAAAGGTGAATTGCAAAAAGATGCTCAAGTGTATGTCATTTCACCGTTGATTGAAGAGTCAGAAGCTTTAGATTTAAAGAATGCAGTAGCATTGCATGCTGAATTATCTACTTATTTTGAAGGAATTGCTAAGGTTGCTCTTGTACATGGACGTATGAAAAATGATGAAAAAGATGCTATAATGCAAGATTTCAAGGATAAAAAAAGTCATATTTTAGTATCTACAACAGTTATTGAAGTAGGGGTAAATGTCCCAAATGCAACGATCATGATTATTATGGATGCCGATCGTTTTGGATTAAGCCAGCTACATCAACTTCGTGGGCGTGTTGGTCGTGGATATAAACAATCATACGCTGTTTTAGTGGCTAATCCCAAAACTGATTCTGGGAAAAAACGAATGACAATCATGACAGAAACGACAGATGGTTTCGTTTTAGCTGAGTCGGATTTAAAAATGCGTGGTTCTGGTGAAATCTTTGGTACTCGTCAGTCTGGAATTCCAGAATTTCAAGTAGCTGATATCGTTGAGGATTATCCTATTTTAGAAGAAGCCAGACGTGTTGCTAGTGATATTGTCAAAGATAATAATTGGAAAGAAAATACAGAATGGGCACTTATTCTAGATAATTTACGCCAACATTCAGATTTTGAT

SEQ ID NO: 16654 - protein, 671 aa, Streptococcus agalactiae
MLLQSPISNLKGFGPKSAEKFQKLDIYTVEDLLLYYPFRYEDFKSKSVFDLVDGEKAVITGLVVTPANVQYYGFKRNRLSFKLRQGEAVLNVSFFNQPYLADKIELGQEVAVFGKWDATKSAITGMKVLAQVEDDMQPVYRVSQGISQSTLIKAIKSAFEINAHLELKENLPATLLGKYRLMGRSQACLAMHFPKDITEYKQALRRIKFEELFYFQMNLQVLKAENKSETNGLSILYSKHAMETKISSLPFILTNAQKRSLDEILSDMSSGAHMNRLLQGDVGSGKTVIAGLSMYAAYTAGFQSALMVPTEILAEQHYISLQELFPDLSIAILTSGMKAAVKRTVLAAIANGSVDMIVGTHALIQDSVQYHKLGLVITDEQHRFGVKQRRIFREKGENPDVLMMTATPIPRTLAITAFGEMDVSIIDELPAGRKPIITRWVKHEQLGTVLEWVKGELQKDAQVYVISPLIEESEALDLKNAVALHAELSTYFEGIAKVALVHGRMKNDEKDAIMQDFKDKKSHILVSTTVIEVGVNVPNATIMIIMDADRFGLSQLHQLRGRVGRGYKQSYAVLVANPKTDSGKKRMTIMTETTDGFVLAESDLKMRGSGEIFGTRQSGIPEFQVADIVEDYPILEEARRVASDIVKDNNWKENTEWALILDNLRQHSDFD

SEQ ID NO: 16655 - protein, 1536 aa, Streptococcus agalactiae
ATGTCAAAACAAAAAGTAACGGCAACTTTGTTGTTATCCACTTTAGTCTTATCGCTATCATCACCTTTAGTGACCTTAGCAGAAACTATTAATCCAGAAACAAGCCTGACAATGGCAACAGCATCAACAGAAAGTTCTTCTGAAGCAGAGAAACAGGAAAAAACACAACCTACAGATTCAGAAACTGCTTCACCTTCAGCCGAAGGAAGTATCTCAACAGAAAAAACAGAGATTGGTACGACAGAGACATCATCAAGCAATGAATCATCATCAAGTTCATCACATCAATCTTCTTCCAACGAAGATGCTAAAACATCTGATTCTGCTTCAACAGCATCTACTCCTAGCACTAATACTACAAACAGTAGTCAAGCAGACAGTAAGCCAGGTCAATCAACAAAGACTGAATTAAAACCTGAGCCTACCTTACCATTAGTAGAGCCTAAAATAACTCCCGCTCCGTCTCAGATAGAAAGTGTTCAGACAAATCAGAATGCTTCTGTTCCTGCTTTATCCTTTGATGATAACTTATTATCAACACCGATTTCACCAGTGACAGCAACGCCATTCTACGTAGAACACTGGTCTGGTCAGGATGCCTACTCTCACTATTTATTGTCACATCGTTACGGTATCAAAGCTGAACAATTAGATGGGTACTTAAAATCTTTAGGGATTCAATATGATTCTAATCGTATCAATGGTGCTAAGTTATTACAATGGGAAAAAGATAGTGGTTTAGATGTCCGTGCTATTGTAGCTATTGCTGTCCTTGAAAGTTCATTGGGAACTCAAGGAGTGGCTAAGATGCCAGGTGCTAATATGTTTGGTTATGGTGCCTTTGATCATGACTCTAGCCATGCTAGTGCTTATAATGATGAAGAAGCAATTATGTTGTTGACAAAAAATACAATTATTAAAAACAACAACTCTAGCTTTGAAATCCAAGATTTGAAAGCACAGAAATTATCTTCTGGACAACTTAATACAGTTACTGAGGGTGGTGTTTATTATACAGATAACTCTGGAACTGGTAAACGTCGTGCCCAGATTATGGAAGATTTAGACCGCTGGATTGATCAACATGGAGGGACACCAGAAATTCCTGCTGCCTTGAAAGCTTTATCGACAGCAAGTTTAGCAGATTTACCAAGTGGTTTTAGCTTATCAACAGCGGTTAACACAGCTAGCTATATTGCATCAACTTATCCATGGGGTGAATGTACATGGTATGTCTTTAACCGCGCTAAAGAGTTAGGTTATACATTTGATCCATTTATGGGTAATGGTGGAGATTGGCAACATAAGGCTGGCTTTGAAACAACACATTCACCAAAAGTAGGCTATGCTGTATCATTTTCACCAGGACAAGCTGGTGCTGATGGCACTTACGGTCACGTAGCTATTGTTGAAGAAGTTAAAAAAGATGGTTCAGTTCTCATTTCAGAATCTAATGCAATGGGACGTGGTATTGTCTCTTACCGTACTTTTAGTTCAGCACAAGCTGCACAATTAACTTATGTTATTGGCCATAAA

SEQ ID NO: 16656 - protein, 512 aa, Streptococcus agalactiae
MSKQKVTATLLLSTLVLSLSSPLVTLAETINPETSLTMATASTESSSEAEKQEKTQPTDSETASPSAEGSISTEKTEIGTTETSSSNESSSSSSHQSSSNEDAKTSDSASTASTPSTNTTNSSQADSKPGQSTKTELKPEPTLPLVEPKITPAPSQIESVQTNQNASVPALSFDDNLLSTPISPVTATPFYVEHWSGQDAYSHYLLSHRYGIKAEQLDGYLKSLGIQYDSNRINGAKLLQWEKDSGLDVRAIVAIAVLESSLGTQGVAKMPGANMFGYGAFDHDSSHASAYNDEEAIMLLTKNTIIKNNNSSFEIQDLKAQKLSSGQLNTVTEGGVYYTDNSGTGKRRAQIMEDLDRWIDQHGGTPEIPAALKALSTASLADLPSGFSLSTAVNTASYIASTYPWGECTWYVFNRAKELGYTFDPFMGNGGDWQHKAGFETTHSPKVGYAVSFSPGQAGADGTYGHVAIVEEVKKDGSVLISESNAMGRGIVSYRTFSSAQAAQLTYVIGHK

SEQ ID NO: 16657 - protein, 1098 aa, Streptococcus agalactiae
ATGATTTCAAGTTATCATAGACCAACCAGAGCCTTGATAGATTTAGAGGCGATTGCAAATAACGTTAAATCTGTACAAGAGCACATTCCAAGTGATAAAAAAACATTTGCTGTAGTTAAGGCTAATGCTTATGGGCATGGTGCTGTTGAAGTTTCAAAATACATTGAGTCTATTGTAGATGGTTTTTGCGTATCCAATTTAGATGAGGCTATTGAGCTACGTCAAGCAGGAATTGTAAAAATGATATTGGTATTAGGTGTTGTTATGCCTGAGCAGGTTATACTAGCCAAAAATGAAAATATTACTCTAACAGTTACTAGCTTGGAGTGGTTACGTTTATGTCAGACATCAGCAGTAGATTTATCTGGTCTAGAAGTACATATCAAAGTTGATAGTGGAATGGGACGTATAGGTGTTCGCCAGTTAGATGAAGGAAATAAGCTAATTTCTGAATTGGGGGAAAGTGGTGCCTCTGTCAAGGGGATTTTCACCCATTTTGCAACAGCTGATGAAGCCGATAACTGTAAATTCAATCAACAACTTACTTTTTTTAAAGACTTTATTTCAGGATTAGATAATTGTCCGGACCTTGTTCATGCTAGTAATTCTGCTACAAGCCTTTGGCATAGTGAGACAATTTTTAATGCCGTTAGATTGGGTGTTGTTATGTACGGCTTAAATCCAAGTGGAACTGATTTAGACTTACCTTACCCTATAAACCCTGCTTTAAGTTTAGAGTCTGAGCTAGTACATGTTAAACAACTACACGATGGTTCTCAAGTTGGCTATGGCGCAACCTATCAAGTTACTGGAGACGAATTTGTTGGAACAGTACCGATTGGCTACGCTGATGGATGGACACGAGATATGCAAGGATTTTCAGTTATAGTAAATGGAGAACTTTGTGAAATTATTGGGCGTGTCTCGATGGATCAAATGACTATCCGTTTACCTCAAAAATATACTATCGGAACTAAAGTAACCTTGATTGGTCAACAAGGTAGTTGTAACATTACAACTACGGACGTCGCTCAAAAAAGACAGACGATTAATTATGAAGTACTTTGTCTTTTAAGCGATCGTATTCCGAGATATTAT

SEQ ID NO: 16658 - protein, 366 aa, Streptococcus agalactiae
MISSYHRPTRALIDLEAIANNVKSVQEHIPSDKKTFAVVKANAYGHGAVEVSKYIESIVDGFCVSNLDEAIELRQAGIVKMILVLGVVMPEQVILAKNENITLTVTSLEWLRLCQTSAVDLSGLEVHIKVDSGMGRIGVRQLDEGNKLISELGESGASVKGIFTHFATADEADNCKFNQQLTFFKDFISGLDNCPDLVHASNSATSLWHSETIFNAVRLGVVMYGLNPSGTDLDLPYPINPALSLESELVHVKQLHDGSQVGYGATYQVTGDEFVGTVPIGYADGWTRDMQGFSVIVNGELCEIIGRVSMDQMTIRLPQKYTIGTKVTLIGQQGSCNITTTDVAQKRQTINYEVLCLLSDRIPRYY

SEQ ID NO: 16659 - protein, 357 aa, Streptococcus agalactiae; identical to SEQ ID NO: 7765

SEQ ID NO: 16660 - protein, 119 aa, Streptococcus agalactiae; identical to SEQ ID NO: 7766

SEQ ID NO: 16661 - protein, 1005 aa, Streptococcus agalactiae; identical to SEQ ID NO: 12001

SEQ ID NO: 16662 - protein, 335 aa, Streptococcus agalactiae; identical to SEQ ID NO: 3080

SEQ ID NO: 16663 - protein, 2526 aa, Streptococcus agalactiae
ATGGCAAATATTCTACGCACTGTTATTGAAAATGACAAGGGTGAATTAAAAAAATTAGATAAAATAGCTAAGAAAGTTGACTCTTACGCAGATCATATGGCTACGTTATCAGATGAAGCTTTACAAGCAAAAACTCCAGAATTTAAAGAACGTTATCAAAATGGTGAAACTTTAGATCAATTGTTACCGGAAGCGTTTGCGGTAGTTCGTGAAGCTTCTAAACGTGTATTAGGTTTATACCCATACCACGTCCAAATTATGGGTGGTATCGTTCTTCACCATGGTGATATTCCAGAAATGCGTACTGGTGAGGGAAAAACTTTAACAGCGACAATGCCTGTTTATCTAAATGCTATCTCAGGATTAGGTGTTCATGTTATTACTGTTAATGAGTACTTATCAACACGTGATGCGACCGAAATGGGTGAGGTTTATAGTTGGCTTGGATTATCTGTAGGGATTAACTTAGCAGCTAAGTCACCATTTGAAAAACGCGAAGCTTACAATTGTGATATCACATACTCAACTAACGCAGAAGTCGGATTTGACTACCTTCGAGACAATATGGTTGTTCGCCAAGAAGATATGGTGCAACGCCCACTCAACTATGCTTTGGTTGATGAGGTTGACTCTGTATTAATCGATGAAGCTAGGACGCCATTGATTGTTTCAGGTCCTGTAAGCTCTGAGATGAACCAACTGTATACACGTGCGGACATGTTTGTAAAAACGCTTAATAGCGATGATTATATCATTGATGTTCCAACAAAAACAATTGGTTTATCAGATACAGGTATTGACAAGGCTGAAAACTATTTCCATCTAAATAACTTGTATGATCTCGAAAATGTTGCCTTAACTCACTACATTGATAACGCTCTTCGAGCTAACTATATTATGTTGTTAAATATTGATTATGTGGTTAGTGAAGAACAAGAGATTTTAATTGTGGACCAATTTACCGGTCGTACGATGGAAGGACGTCGTTTCTCAGATGGCTTACACCAAGCTATTGAAGCAAAAGAGTCAGTGCCAATCCAAGAAGAATCAAAAACGAGCGCTTCAATTACTTACCAAAATATGTTCCGTATGTACCATAAATTAGCAGGAATGACTGGTACTGGTAAGACTGAGGAAGAAGAGTTTCGTGAAATTTATAATATGCGCGTTATTCCTATCCCAACAAATCGTCCTGTTCAACGTATAGATCATTCAGATCTACTTTATCCAACTCTTGACTCTAAATTTAGAGCGGTGGTAGCAGATGTCAAAGAACGTTATGAACAAGGACAACCTGTACTGGTTGGTACAGTAGCTGTTGAAACGTCAGACTTAATTTCTAGAAAATTAGTTGCTGCTGGAGTACCACATGAAGTTTTGAATGCTAAAAATCACTTTAAAGAAGCTCAAATCATTATGAATGCTGGGCAACGTGGTGCTGTTACAATCGCAACCAACATGGCTGGTCGTGGTACTGATATCAAGCTTGGTGAAGGGGTTCGTGAACTTGGTGGTTTATGTGTTATTGGTACAGAGCGTCATGAAAGCCGTCGTATTGATAACCAGCTTCGTGGTCGTTCGGGTCGTCAAGGAGATCCAGGTGAATCACAATTCTATCTTTCGTTAGAAGATGATTTGATGCGTCGCTTTGGTACAGATCGTATTAAAGTGGTTCTTGAGCGAATGAATTTAGCTGAAGATGATACAGTTATTAAATCAAAAATGTTGACACGACAAGTTGAATCAGCTCAACGCCGCGTTGAAGGTAATAACTATGACACACGTAAACAAGTCTTGCAATACGATGATGTTATGCGTGAACAACGTGAGATTATTTATGCTAACCGTAGAGAAGTGATTACTGCTGAGCGTGATTTAGGATCAGAGCTCAAAGGGATGATTAAACGTACGATTAAAAGAGCAGTTGATGCACATAGCAGAAGCGATAAAAATACTGCAGCAGAAGCTATTGTTAATTTTGCAAGATCGGCGTTATTAGATGAAGAAGCTATCACAGTTTCAGAACTTCGTGGTCTAAAAGAGGCTGAAATTAAAGAACTTCTTTATGAACGTGCCTTAGCTGTTTATGAGCAACAAATTGCTAAATTAAAAGATCCAGAAGCTATTATCGAATTCCAAAAAGTCTTAATCTTGATGGTAGTGGATAATCAATGGACAGAGCATATTGATGCCTTAGATCAATTACGTAACTCCGTTGGACTTCGTGGTTATGCTCAAAATAACCCAATCGTTGAGTATCAATCAGAAGGTTTCCGTATGTTCCAAGATATGATTGGTTCGATTGAGTTTGATGTGACACGTACATTGATGAAAGCTCAAATTCATGAACAAGAGCGTGAACGTGCTTCTCAACATGCTACGACAACAGCAGAGCAAAATATCTCGGCACAACATGTACCTATGAATAATGAATCACCAGAATACCAAGGGATTAAACGTAATGATAAATGTCCTTGTGGCTCTGGCATGAAGTTTAAAAATTGTCATGGTCTGAGATGTTTACAA

SEQ ID NO: 16664 - protein, 842 aa, Streptococcus agalactiae
MANILRTVIENDKGELKKLDKIAKKVDSYADHMATLSDEALQAKTPEFKERYQNGETLDQLLPEAFAVVREASKRVLGLYPYHVQIMGGIVLHHGDIPEMRTGEGKTLTATMPVYLNAISGLGVHVITVNEYLSTRDATEMGEVYSWLGLSVGINLAAKSPFEKREAYNCDITYSTNAEVGFDYLRDNMVVRQEDMVQRPLNYALVDEVDSVLIDEARTPLIVSGPVSSEMNQLYTRADMFVKTLNSDDYIIDVPTKTIGLSDTGIDKAENYFHLNNLYDLENVALTHYIDNALRANYIMLLNIDYVVSEEQEILIVDQFTGRTMEGRRFSDGLHQAIEAKESVPIQEESKTSASITYQNMFRMYHKLAGMTGTGKTEEEEFREIYNMRVIPIPTNRPVQRIDHSDLLYPTLDSKFRAVVADVKERYEQGQPVLVGTVAVETSDLISRKLVAAGVPHEVLNAKNHFKEAQIIMNAGQRGAVTIATNMAGRGTDIKLGEGVRELGGLCVIGTERHESRRIDNQLRGRSGRQGDPGESQFYLSLEDDLMRRFGTDRIKVVLERMNLAEDDTVIKSKMLTRQVESAQRRVEGNNYDTRKQVLQYDDVMREQREIIYANRREVITAERDLGSELKGMIKRTIKRAVDAHSRSDKNTAAEAIVNFARSALLDEEAITVSELRGLKEAEIKELLYERALAVYEQQIAKLKDPEAIIEFQKVLILMVVDNQWTEHIDALDQLRNSVGLRGYAQNNPIVEYQSEGFRMFQDMIGSIEFDVTRTLMKAQIHEQERERASQHATTTAEQNISAQHVPMNNESPEYQGIKRNDKCPCGSGMKFKNCHGLRCLQ

SEQ ID NO: 16665 - protein, 945 aa, Streptococcus agalactiae
ATGTCGGAACCATTATTTTTAGAAGCAAGCATGCACGATAAAATCTGGGGTGGAACAAAGTTAAGGGATGAATTTGGCTATGATATTCCAAGTGAAACAACAGGAGAATATTGGGCTATTTCAGCTCATCCTAACGGTGTCTCAAGAGTTAAGAATGGTCGCTTTAAAGGTTGTTTTTTAGATAAGCTGTATCAAGGTGAAAAAAGCTTATTTGGCAACCCTGATGATACTGTCTTTCCTTTACTAACTAAAATCTTAGATGCTAATGACTGGCTTAGTGTACAGGTTCATCCGGATGATGCTTATGCTCTTAAACATGAAGGTGAACTTGGTAAAACAGAATGTTGGTATATTATTTCTGCTGATGAAGGATCTGAAATTATCTATGGTCATAATGCTAAAACTAAAGAAGAACTTCGCCAAATGATTGAATCTGGAGATTGGGAACATCTTTTAACCCGAATTCCTGTTAAATCAGGGGATTTTTACTACGTTCCAAGTGGGACAATGCATGCTATAGGTAAAGGGATATTAATTTTAGAAACACAGCAATCTAGTGATACTACTTATCGTGTTTATGATTTTGATCGTCCAGATGCTTCAGGAAAATTACGTGATTTACGCATTGAACAATCAATAGATGTTCTCACGATTGGTAAACCTGCCAATACTGTTCCTGCCAATATGAAGTTAAAACATCTATCTTCAACTTTATTAGTTTCAAATGATTTCTTTACAGTTTATAAATGGGAAATTTCTGGTGTTACCAACTTTAAACAATTTGCACCCTACCTTTTGGTTAGTGTCTTAGACGGAGCGGGTCACATTACAGTAGATAACAAAGTTTATACACTTAAAAAAGGTGACCACTTTATCTTGCCAAATGATGTTGTCAAATGGGATATTGATGGACAGTTAGAAATTATAGCAAGTCATGTTAAAAAA

SEQ ID NO: 16666 - protein, 315 aa, Streptococcus agalactiae
MSEPLFLEASMHDKIWGGTKLRDEFGYDIPSETTGEYWAISAHPNGVSRVKNGRFKGCFLDKLYQGEKSLFGNPDDTVFPLLTKILDANDWLSVQVHPDDAYALKHEGELGKTECWYIISADEGSEIIYGHNAKTKEELRQMIESGDWEHLLTRIPVKSGDFYYVPSGTMHAIGKGILILETQQSSDTTYRVYDFDRPDASGKLRDLRIEQSIDVLTIGKPANTVPANMKLKHLSSTLLVSNDFFTVYKWEISGVTNFKQFAPYLLVSVLDGAGHITVDNKVYTLKKGDHFILPNDVVKWDIDGQLEIIASHVKK

SEQ ID NO: 16667 - protein, 879 aa, Streptococcus agalactiae
ATGACAAAGTTATATGGTAGTATTGAAGCAGGTGGGACAAAGTTTGTTTGTGCAGTTGGTGATGAGGAATTAAAAGTTGTAGAAAAAATGCAATTTCCAACAACGACGCCTCAAGAAACGATTAAAAAGACTGTTGATTTCTTTAAAAGATTTGAAAAGAAGTTAGAGGCAGTTGCTATTGGTTCTTTTGGTCCCATTGATATTGATAAAAAATCAAAGACATACGGTTATATCACAACGACCCCAAAGTTACATTGGGCTAATGTTGATTTACTCGGCTTAATTTCTAAAGATTTCAATGTTCCATTTTATTTCACAACAGATGTTAATAGCTCTGCCTATGGTGAAGTTATAGCTCGTAACAATATTGATTCACTTGTTTATTACACCATTGGTACGGGAATTGGTGCAGGAGCTATACAAAAGGGTGAATTTATAGGAGGAACTGGTCATACTGAAGCAGGTCATACTTATATGGCGATGCATCCGCAGGACCAAGCAAATGATTTTAAAGGTATCTGTCCGTTTCATAATAGCTGTTTAGAAGGTTTGGCATCTGGTCCAACTCTAGAAGCTAGGACTGGTATTCGTGGTGAATTGATTGAAGAAAATTCAATGGTTTGGGATGTTCAAGCCTATTATATTGCTCAGGCTGCAATACAAGCAACTGTATTATATCGTCCACAAGTCATTGTATTTGGTGGAGGCGTCATGGCACAAGAGCACATGTTAAGACGTGTTCGCCAGACATTTGCAACTTTATTAAATGGGTATTTACCAGTTCCCGATTTGTCTGATTATATTGTGACACCAGCTATAGAAGAAAATGGTTCTGCAACGTTAGGAAATTTTGCTTTAGCAAAGAAAATATCAAAAGGT

SEQ ID NO: 16668 - protein, 293 aa, Streptococcus agalactiae; identical to SEQ ID NO: 3086

SEQ ID NO: 16669 - protein, 1917 aa, Streptococcus agalactiae
ATGGCTTCAAATACAGAAATTGCTAAACAAGTCATTAATGCGATTGGTGGTGCTAGTAATGTGCGTAGCGTAGCACACTGTGCCACTCGTCTTCGCATTATGGTAAAAGATGAGACAGTCATTGATAAAAATACTGTTGAAAATATCGAAAAAGTTCAGGGAGCATTTTTCAATTCAGGTCAATATCAAATTATTTTTGGAACTGGTACTGTTAATAAGATTTATGATGAAGTAGTGGCTCAAGGTTTGCCAACTTTGTCAACCTCTGATCAAAAGGCAGAAGCGGCTAAACAAGGGAATGCTTTCCAACGAGCTATTCGTACTTTCGGTGATGTTTTTGTTCCATTGTTGCCAGCCATTGTTGCTACTGGTTTATTTATGGGGATTCGCGGTGCGATTAATAATGATACAGTTTTAGCTTTATTTGGGACGACTTCAAAAGCATTTTCAAGTTCTAATTTTTATACCTATACTGTCGTTTTGACTGACACGGCCTTTGCTTTTTTTCCTGCCTTGATTTCTTGGTCAGCTTTTAGAGTTTTTGGTGGAAATCCTGTTATCGGTCTCGTATTAGGATTGATGATGGTCAACTCTGCCCTTCCAAACGCTTGGGCAGTGGCCTCAGGTGATGCCCATCCCATAAAATTTTTCGGCTTTATTCCAGTAGTTGGTTATCAAAATTCAGTATTGCCGGCATTCTTTGTAGGTTTACTTGGTGCTAAACTTGAAAAATGGTTGCATAAGAAAATCCCAGATGTTCTTGATTTACTATTAGTGCCGTTCCTAACTTTTACAGTTATGTCAATTTTAGCACTTTTTGTCATTGGTCCTATTTTCCATTCAGTTGAAAACTATGTTTTAGCAGGGACAAAATTTGTCCTTAATTTACCTCTTGGCCTATCAGGTCTTATTTTAGGTGGTGTTCATCAGATAATCGTTGTTACAGGTGTTCATCATATCTTTAATTTACTTGAAGCTCAGTTAATTGCTGCTGATGGGAAAGATCCATTTAATGCTATTATTACAGCTGCTATGACAGCACAAGCAGGTGCCACGTTGGCAGTTGGTGTTAAAACAAAAAATAAAAAATTAAAAGCCCTTGCTTTTCCGGCAGCGCTTTCAGCTGGACTTGGTATTACAGAACCGGCTATATTTGGAGTAAACTTACGTTTTGGTAAGCCATTTATTATGGGATTAATTGCAGGAGCAGCAGGTGGCTGGTTAGCTTCAATATTGAAATTAGCAGGAACTGGTTTTGGTATTACCATTATCCCAGGAACATTACTTTATTTAAATGGTCAAATTGTTAAGTACCTTATTATGGTAATTGGAACTACGTCTTTGGCTTTTGTATTAACTTATATGTTTGGATATGAAGATAAAGATGAAAAAGCAGTAGCTGAAGTTAGTCCTTTGGTTGAAGAAACAGATGACGATCCAACAATTACTCAAACTAGCCAATTAAGGGCAGAAACGATTGTTAGCCCTCTTGATGGACAGGTTATTGCTCTTGATACAGTAAGTGACCCAGTTTTTTCATCAGGTATTATGGGAGATGGCCTTGCTATTAAACCAAGAGGTAATACAATTTACTCACCTGTTGATGGTTTTGTCCAAATTGCTTTTGAAACAGGTCATGCTTACGGTATCAAATCAGATAAAGGTGCAGAAATTTTGATTCATATAGGTATTGATACTGTCACCATGAATGGCACAGGGTTTACTTCTAAAGTCAAGGCAGACCAAAAAGTGAAAAAAGGTGATATTCTTGGCACCTTTGATTCAGCCAAGATTGCAGAAGCAGGTCTGGATAATACAGCTATGATTATTGTGACTAATACAGCTGATTTTGCTGATGTTATACCATTGGTAAAAGAGGGTGTTGTTACTACAGGTGACATGATTATTGATGTTAAG

SEQ ID NO: 16670 - protein, 639 aa, Streptococcus agalactiae
MASNTEIAKQVINAIGGASNVRSVAHCATRLRIMVKDETVIDKNTVENIEKVQGAFFNSGQYQIIFGTGTVNKIYDEVVAQGLPTLSTSDQKAEAAKQGNAFQRAIRTFGDVFVPLLPAIVATGLFMGIRGAINNDTVLALFGTTSKAFSSSNFYTYTVVLTDTAFAFFPALISWSAFRVFGGNPVIGLVLGLMMVNSALPNAWAVASGDAHPIKFFGFIPVVGYQNSVLPAFFVGLLGAKLEKWLHKKIPDVLDLLLVPFLTFTVMSILALFVIGPIFHSVENYVLAGTKFVLNLPLGLSGLILGGVHQIIVVTGVHHIFNLLEAQLIAADGKDPFNAIITAAMTAQAGATLAVGVKTKNKKLKALAFPAALSAGLGITEPAIFGVNLRFGKPFIMGLIAGAAGGWLASILKLAGTGFGITIIPGTLLYLNGQIVKYLIMVIGTTSLAFVLTYMFGYEDKDEKAVAEVSPLVEETDDDPTITQTSQLRAETIVSPLDGQVIALDTVSDPVFSSGIMGDGLAIKPRGNTIYSPVDGFVQIAFETGHAYGIKSDKGAEILIHIGIDTVTMNGTGFTSKVKADQKVKKGDILGTFDSAKIAEAGLDNTAMIIVTNTADFADVIPLVKEGVVTTGDMIIDVK

SEQ ID NO: 16671 - protein, 1437 aa, Streptococcus agalactiae
ATGAATTTACCCACTGAAATCCGCTATCGTCCTTATGATGAATGGACTGAAGAAGATAAGGAAAATATTTTAAAGAATGTCTCAAAATCCCCTTGGAGAGCAACTTATCACTTAGAAGCTAAAACAGGGCTTTTAAATGACCCAAATGGCTTCTCTTACTTTAATGGAAAATTCCATCTTTTTTATCAAAATTGGCCCTTTGGAGCTGCACATGGTTTAAAACAATGGGTACATACAGAATCAGATGATTTAGTTCATTTCAAAGAAACAGGAATCAAGCTTAAACCTGACCATGTCAATGATAGCCATGGTGCATACTCCGGTTCTGCATTAGCCATTGACGATAAGCTTTTTCTTTTTTATACTGGTAATGTCCGTGACATGAAATGGAACCGTGACCCCCGCCAAATTGGAGCATGGATGACAAGTGATGGCAAGATTACAAAATTTGATAAAGTCCTTATTTCACAACCAAATGATGTCACTGAGCATTTTCGTGATCCTCAGATTTTCAATTATGATAATCAATTCTATGCTGTTATCGGGGCGCAAAATAGTAAAAAATGCGGATTCATTAAATTATATAAAGCACTTAATAATGACATCCATCATTGGGAGTTTGTGGGAGATTTAGATTTTGGTGGTACTGGATCTGAGTATATGATTGAATGTCCAAATATTATTTTTGTCAAAGGAAAACCTGTATTACTTTATAGTCCTCAAGGACTAGATAAAAACGAATTGGACTACCAAAACATTTATCCAAATACCTACAAAATCGGACAATATTTCGATGCTAACTCATCTAAGATAGTTGAACCATCCCCTATCTATAATTTAGATTATGGTTTTGAAGCCTATGCTACTCAAGGATTTAATACTTCTGATGGTCGTGCCTTTATCGTGAGTTGGATAGGCTTGCCAGATATTGATTATCCTAGCGATCAATTTGATTATCAAGGAGCTATGAGTTTAGTTAAAGAGTTAAGCATAAAAAATGGGAACCTTTATCAATATCCCGTTCCTGCTATGAAAAATCTTCGTCAACATCAAGCAGAATTTAAAACACAACTTCAAACTAACAACACCTATGAATTAGAATTACTAGTTCCTAGAAACGATCTTTCTTCATTTGTTCTCTTTGCTAATCCGAAAGGACAAGGACTATCCATTACTATTGATACTGCAAAGGGGAAAGTTATCGTTGACCGCTCACAAGCCGGACAGCAGTACGCCACAGAATTTGGTACTAGTCGCCAGTGTGACATTCCAAAAGATGCTACTAGTATCAATATTTTTATCGATAAGTCCATCTTTGAAATCTTTATAAATAAAGGAGAAAAAGTATTTACGGGACGAGTCTTTCCAGATGCAGAACAATCAGGAATTCAACTAAAAGAAGGACACGTTCATGGTAAATATTTTGAATTAAAATAT

SEQ ID NO: 16672 - protein, 479 aa, Streptococcus agalactiae
MNLPTEIRYRPYDEWTEEDKENILKNVSKSPWRATYHLEAKTGLLNDPNGFSYFNGKFHLFYQNWPFGAAHGLKQWVHTESDDLVHFKETGIKLKPDHVNDSHGAYSGSALAIDDKLFLFYTGNVRDMKWNRDPRQIGAWMTSDGKITKFDKVLISQPNDVTEHFRDPQIFNYDNQFYAVIGAQNSKKCGFIKLYKALNNDIHHWEFVGDLDFGGTGSEYMIECPNIIFVKGKPVLLYSPQGLDKNELDYQNIYPNTYKIGQYFDANSSKIVEPSPIYNLDYGFEAYATQGFNTSDGRAFIVSWIGLPDIDYPSDQFDYQGAMSLVKELSIKNGNLYQYPVPAMKNLRQHQAEFKTQLQTNNTYELELLVPRNDLSSFVLFANPKGQGLSITIDTAKGKVIVDRSQAGQQYATEFGTSRQCDIPKDATSINIFIDKSIFEIFINKGEKVFTGRVFPDAEQSGIQLKEGHVHGKYFELKY

SEQ ID NO: 16673 - protein, 474 aa, Streptococcus agalactiae
ATGGCTGCTCAAACCCTTAAAAAACATGGCTGTCAAAAGATGATTATGATTACAGGGAATGATAATTCAGATTCTCCTACTGGACTTAGGCGGCTAGGTTTTTCCTATGAATCAAAGGAATCCAAAGTTATCACAGTCACAAATGGGCTATCTAACATGAGACGTGAGATGGAATTAAAATCAATTATCTCGACTCACAAACCAGATGGTATTTTTACATCAGACGACTTAACTGCTTTATTAGTAATCAAACTTATCAGCCAACTAGGGTTGTCCATCCCAGAAGATATCAAAGTGATTGGATATGATGGTACAAGTTTCATTCAAGATTACGTCCCACATCTAACCACTATTAAACAACCTATTCGAGAAATTGCGCAATTGATGGTTGAAATACTCCTAGCTAAGATTGAGGGGCAAAAGACAAATAAGGATTATATTTTACCAGTCAGTCTCATCCCTGGTAGTAGTGTT

SEQ ID NO: 16674 - protein, 158 aa, Streptococcus agalactiae
MAAQTLKKHGCQKMIMITGNDNSDSPTGLRRLGFSYESKESKVITVTNGLSNMRREMELKSIISTHKPDGIFTSDDLTALLVIKLISQLGLSIPEDIKVIGYDGTSFIQDYVPHLTTIKQPIREIAQLMVEILLAKIEGQKTNKDYILPVSLIPGSSV

SEQ ID NO: 16675 - protein, 432 aa, Streptococcus agalactiae; identical to SEQ ID NO: 12015

SEQ ID NO: 16676 - protein, 144 aa, Streptococcus agalactiae; identical to SEQ ID NO: 3094

SEQ ID NO: 16677 - protein, 385 aa, Streptococcus agalactiae
ATGACAACTGAAAATCTTGGAGAAATTGTCATTTCCCACGTTACTTGAGGTAATTACAGGTATTGCTGCAACTAAAGTTGATGGTGTTCATTCGTTACGTAACAAAGCGGTAACGGATAGCCTTAGTAAGAAATCTCTAGGTAGAGGTGTCTACCTTAAAAATGAAGAAGATGATACAGTAGCTGCAGATATTTATGTTTACTTGCAGTATGGTGTAAATGTACCAGCAGTTTCAATTGCTATTCAACAAGCTGTCAAAACAGCTGTATATGACATGGCAGAAGTAAAAATTTCTTCGGTCAATATCCATGTTGAAGGTATTGTTCCAGAGAAAACACCAAAACCAGACTTGAAGTCATTGTTTGATGAGGATTTCTTAGATGAC

SEQ ID NO: 16678 - protein, 129 aa, Streptococcus agalactiae; identical to SEQ ID NO: 3096

SEQ ID NO: 16679 - protein, 556 aa, Streptococcus agalactiae
ATGATTGAAGCAAGTAAGCTTAAAGCAGGCATGACTTTTGAAACGGCTGATGGGAAATTAATCCGTGTTCTTGAAGCTAGCCACCACAAACCAGGTAAAGGTAACACAATCATGCGTATGAAATTGCGTGATGTTCGTACTGGTTCAACTTTTGATACAAGTTACCGTCCTGAAGAAAAATTTGAGCAAGCTATTATTGAAACTGTACCTGCTCAATACCTTTATAAGATGGATGATACAGCTTACTTCATGAATAATGAAACTTACGATCAATATGAAATTCCAACTGTTAACATTGAAAATGAATTACTCTACATTCTTGAAAACTCAGAAGTAAAAATTCAATTCTATGGAACAGAAGTTATTGGTGTTCAAATTCCAACAACTGTTGAATTGACAGTTGCTGAAACTCAACCATCAATCAAAGGTGCTACTGTAACTGGTTCAGGAAAACCTGCAACTATGGAAACAGGACTTGTGTTAACGTTCCAGACTTTATTGAAGCTGGACAAAAGTTAGTAATCAATACAGCAGAAGGAACTTACGTTTCACGCGC

SEQ ID NO: 16680 - protein, 186 aa, Streptococcus agalactiae
  VARIANT 160: Xaa = Any Amino Acid
MIEASKLKAGMTFETADGKLIRVLEASHHKPGKGNTIMRMKLRDVRTGSTFDTSYRPEEKFEQAIIETVPAQYLYKMDDTAYFMNNETYDQYEIPTVNIENELLYILENSEVKIQFYGTEVIGVQIPTTVELTVAETQPSIKGATVTGSGKPATMETGLXVNVPDFIEAGQKLVINTAEGTYVSRA

SEQ ID NO: 16681 - protein, 144 aa, Streptococcus agalactiae
GTGAATATGCTATTGATAGATGTCATGATACACTTATCAGAAGAAAACGAAAAAGGCTTTACTAAATTACAATTCTTTACTCGACAAATTGTGGTTGGTGTAAACTGGTATGTACTTCCCAAAATTGATAACTATTTCAACCCC

SEQ ID NO: 16682 - protein, 48 aa, Streptococcus agalactiae
MNMLLIDVMIHLSEENEKGFTKLQFFTRQIVVGVNWYVLPKIDNYFNP

SEQ ID NO: 16683 - protein, 296 aa, Streptococcus agalactiae
ATGTTATTACCAGTAGGGAGTGTTGTCTATCTTATTGATGGCAATCAAAAATTAGTTATTGTAAATAGAGGTGCAATTGTTGAGCAAGAAGGACAAGAAGTTTATTTTGATTACCTAGGTGGAATTTTTCCTGAGGGTTTAAATCTTGAACAAGTTTACTATTTTAATCAAGAAGATATTGATGAGGTTGTTTTTGAAGGTTACCATGATGAGGAGGAAGAAAGAGTTTCTCGTCTCATTGAAAAATGGAAAATACAGAGGGAAAGAATCTTCCAAAGGGAAAGACTAGTGTAGAA

SEQ ID NO: 16684 - protein, 99 aa, Streptococcus agalactiae
MLLPVGSVVYLIDGNQKLVIVNRGAIVEQEGQEVYFDYLGGIFPEGLNLEQVYYFNQEDIDEVVFEGYHDEEEERVSRLIEKWKNTEGKNLPKGKTSVE

SEQ ID NO: 16685 - protein, 90 aa, Streptococcus agalactiae; identical to SEQ ID NO: 12023

SEQ ID NO: 16686 - protein, 30 aa, Streptococcus agalactiae; identical to SEQ ID NO: 12024

SEQ ID NO: 16687 - protein, 228 aa, Streptococcus agalactiae
ATGGGAATAAAAAGTTATAGACGGGTTGAGCTTGTAGCAAAACTTAATTTTAGATATTATCTAGTTAGTATTAGTGGACGTTATTACATTATTGATTATGCCAATCCTAGTGATATAAAAGATTATTTTATAGGTATTTTTCCAGAAAGAGTAGAAAAATATCAAATTTATGATGTGACTGCGGATTATAAGAATTTTTTAGTAAACAAAAAAAGTCGCCTTTATCTT

SEQ ID NO: 16688 - protein, 76 aa, Streptococcus agalactiae
MGIKSYRRVELVAKLNFRYYLVSISGRYYIIDYANPSDIKDYFIGIFPERVEKYQIYDVTADYKNFLVNKKSRLYL

SEQ ID NO: 16689 - protein, 162 aa, Streptococcus agalactiae
TTGTTGCTGACCTCAATAGATGTAAATCCAGTTTATGCTAATATGGCATTTGATTGGGTGTATGATAACTATAAAGATGATATCATCAATTATGGACAAGAAACTATCAAAAATATTGGTAAATCCATTTCAGCTAATAATAGTTTAGGTACTTTATATAAT

SEQ ID NO: 16690 - protein, 54 aa, Streptococcus agalactiae; identical to SEQ ID NO: 3102

SEQ ID NO: 16691 - protein, 450 aa, Streptococcus agalactiae; identical to SEQ ID NO: 7817

SEQ ID NO: 16692 - protein, 150 aa, Streptococcus agalactiae; identical to SEQ ID NO: 7818

SEQ ID NO: 16693 - protein, 1065 aa, Streptococcus agalactiae
ATGGGTTTTGAACAACGTCTAACTAGATGTCAAACAGCAATTTCACAATTATCATGTGACGCACTCTTAATAACAAATTTAACAAATATTTTTTATTTGACTGGTTTTTCAGGAACTAATGCAACGGTACTCATTAGTCCAAAACACCGGATTTTTGTTACAGATTCACGATATGCCTTGATAGCAAAGAATACTGTAAGAGAGTTTGATATTATCATTAGCAGAGAACCACTTGCGGCTATTTTGAAAATTATTCGCGATGACGCATTGATAGCGATTGGTTTTGAAACTGATATTTCTTATCATATGTACAAACATATGGTGGAAGTTTTTGAAGATTATCGCTTGATAGAAGCTCCATCTGTTGTTGAAAAGTTACGTATGATTAAAGATGTAACAGAACTTGCGATCATCCGTCAAGCCTGTCGTATTTCGGACCAAGCTTTTTTAGATGTGTTGGATTTTATAAAGCCTGATCGAACAACTGAATTGCAAGTTGCTAATTTTTTAGACTTTCGCATGAGAGAATTAGGAGCAACTGGTCCTTCATTTGATTTTATTGTAGCATCTGGATATCGGTCAGCGATGCCACATGGGGTTGCGAGTCAGAAGACTATTCAATCGGGAGAAACTCTGACTTTAGATTTTGGTTGTTACTATCAGCACTATGTTAGTGATATGACACGTACGATTCATATCGGTCATGTCACTGATCAGGAACGCGAGATTTACGATATCGTTTTGAAAAGTAATCAAGCTATTATTGATAATGTAAAATCAGGAATGAAGCGTTGTGATTATGATTACTTGGCGCGACAAGTCATTGAAAATTCTGGATACGGTAATCATTTTACCCACGGTATAGGGCATGGTATGGGGCTTGATGTTCATGAAATTCCTTATTTTGGTAAGTCAGAGGGAGTGATTGCATCTGGGATGGTAGTGACTGACGAGCCAGGAATATATCTCGATAATAAATACGGTGTTCGTATTGAAGATGATTTATTAATAACGGAAACAGGTTGCGAAGTATTGACATCTGCACCGAAAGAATTAATTGTACTT

SEQ ID NO: 16694 - protein, 355 aa, Streptococcus agalactiae
MGFEQRLTRCQTAISQLSCDALLITNLTNIFYLTGFSGTNATVLISPKHRIFVTDSRYALIAKNTVREFDIIISREPLAAILKIIRDDALIAIGFETDISYHMYKHMVEVFEDYRLIEAPSVVEKLRMIKDVTELAIIRQACRISDQAFLDVLDFIKPDRTTELQVANFLDFRMRELGATGPSFDFIVASGYRSAMPHGVASQKTIQSGETLTLDFGCYYQHYVSDMTRTIHIGHVTDQEREIYDIVLKSNQAIIDNVKSGMKRCDYDYLARQVIENSGYGNHFTHGIGHGMGLDVHEIPYFGKSEGVIASGMVVTDEPGIYLDNKYGVRIEDDLLITETGCEVLTSAPKELIVL

SEQ ID NO: 16695 - protein, 714 aa, Streptococcus agalactiae
ATGATTATTTTGATTATTGCACTGGCAACTATTTTGACATTTGTCACATGGATGTTGATTCGTCCAAAAGCTCTACGGTATATTCTAGGTCTTCTCTCATTAGCTTTGTTGTTTGCCTCAGTTTGGATGTTAACGGATCACTTTATTAATCATACAGGTATGACTATTGAAACTAAGACAAAGACACGTGAGATTTATAGTGCGGGTGATAGTAAGGCTCCATTTGGTCTCATGATTTATAAAGAGATTGGTACTCATTCGAGTAATAATGTTTTAGTTTATCGAACAGATTTAAATCAAAAAGAAGCAAAAGCTCACTTTGTTCCAAATACAAAAGAAGTGACAAGTGCTGTGAAAAAATCTGCTAGCTACCAATTAGCTGATGTGAAAAAAGCCACAGTAACAACAAAGACTAAACGTTATGTGTGGAAAGATAGTCTTTCGAAACTACTTTATGGCTTTGCAGGTGAAAATGGAGAATTGATTTCTCAGAAATCAGTTGCTAAAATACCACGAAAAACTTGGCTAGTTTTGACTAAAGAGCAGTCCGAACACTTAGAATCGGCTGCGGCTAAACTAAAAGAACAAATGACTTCGCAAGCAAAAGTAAACCCAGTGAAAGCTATGGAGATAAAGACATTAGCTAAGACAAATCCAGAAGCTTATGCTGAGATGCAAGTTAAAGCATTAAAAGAAGCTCTTAATATAAAAGAA

SEQ ID NO: 16696 - protein, 238 aa, Streptococcus agalactiae
MIILIIALATILTFVTWMLIRPKALRYILGLLSLALLFASVWMLTDHFINHTGMTIETKTKTREIYSAGDSKAPFGLMIYKEIGTHSSNNVLVYRTDLNQKEAKAHFVPNTKEVTSAVKKSASYQLADVKKATVTTKTKRYVWKDSLSKLLYGFAGENGELISQKSVAKIPRKTWLVLTKEQSEHLESAAAKLKEQMTSQAKVNPVKAMEIKTLAKTNPEAYAEMQVKALKEALNIKE

SEQ ID NO: 16697 - protein, 1243 aa, Streptococcus agalactiae
ATTGTATGTGACATCCTACGTTGTTTTACTTATTGGACTGTTAATGACGACGTTAGCACCTACATCTAACTGGAACCTTTTTTTAGTAGGACGTATTATTCAAGCGATTTCTGTAGGGATTTCTATGCCTTTGATGCAGGTTGTTATGGAGAATGTTTTTCCTCCAGAGCAGCGTGGTGCCGCTATGGACTTAATGGTTTGGTGGTTGGTCTTGCCCCAGCTATTGGGCCTACATTAGCAGGGTGGATTTTAAAACAAGAATTTCATTTTGCAGGGCATGATTTAACATGGCGTGCAATTTTCCTTCTTCCTTTACTAATTTTAACGGTCACTACAATTTTATCCCCCTTTGTCTAAAAGATGTGGTTGATAATAAGTCAGTTAAATGGAAGTGCCTTCCCTTATCCTTTCAATAATTGGCTTTGGTAGCTTTTTGTGGGGCTTCACAAATGTGGCAACTTATGGATGGGGAGATATTGGATATGTTATTTCTCCTATTATGGTTGGTATTATTTTTATCGCCTTATTCATTCATCGTCAATTAAAACTAGAAACACCGTTCTTAGATATCCGTGTTTTCAAAAATAAACAATTCTCAGTAACAACAGCAGCTATTGCACTTTCAATGATGGCGATGATGGGTGTTGAAATGATGCTACCGCTTTACTTGCAAAATGTTCATGGTCTCTCTGCACTTGATTCTGGTTTAGCTTTATTACCAGGTGCCTTGATGATGGGGATAGTTAGTCCAATTTCTGGAGCTGTATATGATAAAGTTGGTGCAAGACGTATGGCTATGATTGGTTTTACCATACTAGGTGTAGCGACGTTACCTTTTGTTTTCTTAACGACTACAACACCAGATCATTTTATTACCCTCTTATATGCAGTACGTATGTTTGGTATTGCTATGGTTATGATGCCATTGACAGCAAGTGCGATGAGCGCACTTCCACCACATGAGGCCGCACATGGAACAGCAGCTAATAATACTGCTCGTCAAATTGCTTCAGCAGTTGTAGTTGCATTGCTTTCAAGTGTTGCTCAAAATATTATCACCAACAATAAACCATCAAAAGATTTGCTAACAATGAATCCTTTAAAATATGCAAATCAGATGTTGAATGCTAGTCTTGATGGCTTCCATGTTTCTTTTGCCATTGGTTTTGTATTTGCGGTTCTTGGTTTACTGGTATCTCTTTTCCTGAGAAAAGGGAAAATTATTGAGACGGAAAAGGAGGTA

SEQ ID NO: 16698 - protein, 416 aa, Streptococcus agalactiae
  VARIANT 1, 64, 119: Xaa = Any Amino Acid
XLYVTSYVVLLIGLLMTTLAPTSNWNLFLVGRIIQAISVGISMPLMQVVMENVFPPEQRGAAMXLNGLVVGLAPAIGPTLAGWILKQEFHFAGHDLTWRAIFLLPLLILTVTTILSPFXLKDVVDNKSVKLEVPSLILSIIGFGSFLWGFTNVATYGWGDIGYVISPIMVGIIFIALFIHRQLKLETPFLDIRVFKNKQFSVTTAAIALSMMAMMGVEMMLPLYLQNVHGLSALDSGLALLPGALMMGIVSPISGAVYDKVGARRMAMIGFTILGVATLPFVFLTTTTPDHFITLLYAVRMFGIAMVMMPLTASAMSALPPHEAAHGTAANNTARQIASAVVVALLSSVAQNIITNNKPSKDLLTMNPLKYANQMLNASLDGFHVSFAIGFVFAVLGLLVSLFLRKGKIIETEKEV

SEQ ID NO: 16699 - protein, 256 aa, Streptococcus agalactiae
ATGACTACAAAAGCAAAACATGATATTCATGGCAAACCATATAATCGTACAGCCATGATCACCTTATTGTTGATTGCTACATTTGCAGGGGTATTAAATCAGACAAGTTTGGGAACGGCTATCCCAACTTTGATGAATAGCTTTAACATTTCGTTGTCAACGGCTCAACAAGCAACAACATGGTTTTTATTAGCGAATGGGATTATGATTCCTGTTTCAGCTTATTTAGCGACACGTTTTTCAACAAAATTGTATG

SEQ ID NO: 16700 - protein, 86 aa, Streptococcus agalactiae
  VARIANT 84: Xaa = Any Amino Acid
MTTKAKHDIHGKPYNRTAMITLLLIATFAGVLNQTSLGTAIPTLMNSFNISLSTAQQATTWFLLANGIMIPVSAYLATRFSTKXCM

SEQ ID NO: 16701 - protein, 2811 aa, Streptococcus agalactiae
ATGATAAGAGGAGCAAGAGCTCACAATTTAAAAAATATAAGTGTCGACATTCCACGAGACAAGTTAGTTGTCGTTACGGGACTATCAGGATCAGGTAAGTCTAGTTTGGCCTTTGACACTATCTATGCAGAAGGACAACGTCGTTACGTTGAAAGTCTTTCTGCTTACGCGCGCCAATTTTTGGGAAATATGGAAAAGCCTGATGTAGATTCTATTGATGGCCTTAGTCCAGCTATTTCTATTGATCAGAAAACAACAAGTAAGAATCCTCGCTCTACTGTTGGGACTGTAACAGAAATTAACGATTATTTACGTTTGCTTTATGCTCGTGTTGGAACCCCATATTGTATCAATGGTCACGGAGCCATCACAGCATCTTCTGTAGAGCAAATTGTGGATAAGGTACTAGCGCTTCCAGAGCGAACAAAGATGCAAATTTTAGCCCCAATTATACGTCGAAAAAAAGGACAACACAAATCAACATTTGAGAAAATACAAAAAGATGGTTACGTTCGTGTTCGTATTGATGGTGATATTCACGATGTTACTGAGGTGCCTGAATTATCAAAAAGTAAGATGCACAATATTGATATTGTAGTAGATCGATTAATTAATAAAGAGGGCATTCGTTCCCGCTTATTTGATTCCGTTGAAGCGGCTCTACGTTTGTCGGATGGTTATGTCGTTATTGATACAATGGATGGCAATGAGTTATTGTTTTCAGAGCATTATTCTTGTCCTGAATGTGGTTTTACTGTTCCTGAATTAGAGCCACGCCTTTTTTCTTTTAATGCTCCCTTTGGTTCTTGTCCGACCTGTGATGGCTTAGGAATTAAGTTAGAAGTAGATATAGATTTGGTTATTCCAGATAGAAGTAAGACCCTTAGAGAAGGGGCCTTAGTTCCTTGGAATCCAATTTCATCAAATTATTATCCAACGATGCTAGAGCAAGCTATGACTCAATTTGGTGTTGATGTGGATACGCCATTTGAAAAATTAAGCAAGGCGGAGCAGGACCTAGCCCTATATGGTTCAGGCGAACGAGAGTTCCATTTCCATTATATTAACGATTTTGGAGGCGAGAGAAATATTGATTTGCCTTTTGAAGGGGTTGTCAATAATATTAATCGTCGTTACCATGAAACTAATAGCGATTACACACGCAATGTTATGCGAGAATATATGAACGAGCTAAAATGTAACACTTGTCATGGCTATCGTCTCAATGATCAAGCACTTTGCGTAAGAGTTGGGGGAGAAGAAGGTCTTAATATTGGGCAAGTCTCAGATTTATCGATAGCAGACCATTTAGAACTTTTAGAAACATTGCGTTTATCTTCAAATGAACAATTAATTGCTCGACCAATTATCAAAGAAATCCATGACCGTCTAAGTTTCTTAAATAATGTTGGACTTAATTATTTAAATCTGTCACGTTCTGCAGGAACACTTTCCGGGGGCGAGAGTCAACGTATTCGTTTGGCTACTCAAATTGGGTCTAATTTATCAGGTGTCCTTTATGTACTTGATGAGCCGTCCATTGGACTTCATCAGCGAGACAATGACCGTTTGATTGATAGTCTTAAGAAAATGCGTGATTTGGGTAATACGCTTATTGTTGTTGAACATGATGAAGATACAATGATGGCAGCTGATTGGTTAATCGATGTGGGACCTGGCGCTGGTGCGTTTGGTGGTGAGATTGTGGCCTCTGGTACACCGAAGCAAGTAGCTAAAAATACTAAATCTATTACAGGACAATATTTGTCAGGTAAGAAAGTGATTCCTGTGCCATCTGAACGAAGAGTAGGTAATGGTCGCTTTTTAGAAATCAAAGGTGCGGCAGAAAACAACCTACAAAATTTAGATGTCAAGTTCCCTCTCGGTAAATTTATTGCCGTAACTGGTGTCTCAGGTTCTGGAAAATCAACCTTAATTAATAGTATTTTGAAAAAAGCTGTTGCGCAGAAGCTTAACCGTAACTCAGATAAACCAGGTAAATATGTTTCTTTAGAAGGCATTGAATATGTTGATCGATTGATTGATATTGATCAAAGTCCAATTGGTCGGACTCCACGTTCTAATCCCGCAACCTATACAGGTGTTTTTGATGATATTCGTGATCTTTTTGCTCAAACTAATGAGGCAAAGATTCGAGGTTATAAAAAAGGACGCTTCTCATTTAACGTCAAAGGTGGACGTTGTGAGTCTTGTTCTGGCGATGGTATCATCAAAATTGAGATGCATTTTTTACCAGATGTCTACGTTCCTTGTGAAGTATGCCACGGCACGCGCTATAATAGTGAGACTCTGGAAGTACATTACAAAGAAAAAAATATTGCACAAATTCTTGATATGACAGTGAATGATGCAGTTACATTTTTTGCAGCTATTCCTAAAATTGCTCGTAAGTTACAGACTATTAAGGATGTTGGTTTGGGATATGTCACTTTGGGGCAACCAGCTACAACCTTATCAGGAGGAGAAGCTCAGCGAATGAAGCTGGCAAGTGAATTACATAAGCGTTCGACAGGTAAGAGTCTTTACATATTAGACGAACCAACAACGGGGCTTCATGCAGATGATATTGCTCGTTTACTTAAGGTTTTGGATCGTTTTGTAGATGATGGTAATACAGTGCTTGTTATTGAGCATAACCTTGATGTTATTAAAACTGCTGACCACATTATTGATCTTGGCCCTGAAGGAGGTATTGGTGGCGGACAAATTGTAGCTATCGGAACACCAGAAGAAGTTGCTGAAAATCCTAAATCCTATACAGGATATTATTTAAAAGAGAAGTTAGCAAGA

SEQ ID NO: 16702 - protein, 937 aa, Streptococcus agalactiae
MIRGARAHNLKNISVDIPRDKLVVVTGLSGSGKSSLAFDTIYAEGQRRYVESLSAYARQFLGNMEKPDVDSIDGLSPAISIDQKTTSKNPRSTVGTVTEINDYLRLLYARVGTPYCINGHGAITASSVEQIVDKVLALPERTKMQILAPIIRRKKGQHKSTFEKIQKDGYVRVRIDGDIHDVTEVPELSKSKMHNIDIVVDRLINKEGIRSRLFDSVEAALRLSDGYVVIDTMDGNELLFSEHYSCPECGFTVPELEPRLFSFNAPFGSCPTCDGLGIKLEVDIDLVIPDRSKTLREGALVPWNPISSNYYPTMLEQAMTQFGVDVDTPFEKLSKAEQDLALYGSGEREFHFHYINDFGGERNIDLPFEGVVNNINRRYHETNSDYTRNVMREYMNELKCNTCHGYRLNDQALCVRVGGEEGLNIGQVSDLSIADHLELLETLRLSSNEQLIARPIIKEIHDRLSFLNNVGLNYLNLSRSAGTLSGGESQRIRLATQIGSNLSGVLYVLDEPSIGLHQRDNDRLIDSLKKMRDLGNTLIVVEHDEDTMMAADWLIDVGPGAGAFGGEIVASGTPKQVAKNTKSITGQYLSGKKVIPVPSERRVGNGRFLEIKGAAENNLQNLDVKFPLGKFIAVTGVSGSGKSTLINSILKKAVAQKLNRNSDKPGKYVSLEGIEYVDRLIDIDQSPIGRTPRSNPATYTGVFDDIRDLFAQTNEAKIRGYKKGRFSFNVKGGRCESCSGDGIIKIEMHFLPDVYVPCEVCHGTRYNSETLEVHYKEKNIAQILDMTVNDAVTFFAAIPKIARKLQTIKDVGLGYVTLGQPATTLSGGEAQRMKLASELHKRSTGKSLYILDEPTTGLHADDIARLLKVLDRFVDDGNTVLVIEHNLDVIKTADHIIDLGPEGGIGGGQIVAIGTPEEVAENPKSYTGYYLKEKLAR

SEQ ID NO: 16703 - protein, 669 aa, Streptococcus agalactiae; identical to SEQ ID NO: 7827

SEQ ID NO: 16704 - protein, 223 aa, Streptococcus agalactiae; identical to SEQ ID NO: 3116

SEQ ID NO: 16705 - protein, 867 aa, Streptococcus agalactiae
NTGGTTAATCCCTCCCAGGAAGAATCTGAACAAGTAGCTGATCAATTTGGTATTGATATTGATGATTTACGTGCTCCCCTCGATGTGGAAGAAACTTCCCGTATCTCGGTTGAAGATGATTATACTTTAGTTATTGTTGACGTTCCTACCTATGAAGAACGCAATAACAAAAGTTATTATATGACTATTCCTATGGGCATTATCGTTACTGACAACGCTGTTATTACTACTTGCCTAGAACATTTGACGCTGTTTGATCACTTTTATAGACGACGTGTCAAAAATTTTTATACCTTTATGAAGACACGTTTTGTTTTCCAATTGCTTTATCGCAATGCCGAATTATACTTACAGGCTTTGCGTACTATCGATAGGCAGAGCGATAAAATTGAAGCACAACTAGAGAGTGCAACTCGAAATGAGCAATTGATCGATATGATGGAATTGGAAAAATCTATTGTCTATCTAAAGGCCTCTTTAAAATTTAATGAGCGAATCGTCAAAAAATTGACCAGTAGTACCAGTAGTTTAAAAAAATACATTGAAGATGAAGATCTGCTTGAAGATACATTGATCGAAACTCAGCAGGCTATTGAAATGGCAAATATCTATGAAAATGTCTTAAATGCCATGACAGAAACGACTGCTTCAATCATCGGTAATAATCAGAATACCATTATGAAAACCTTAGCCCTAGTAACTATGACATTGGATATTCCAACGGTTATTTTTTCGGCGTATGGGATGAACTTTAAAAATAATTGGATGCCTTTGAATGGTCTCGCACATGGCTTTATCTATGTTGTTCTTTTGGCCTTTTTGATGAGTTCATTTGTTGTATTTTATTTTATTCGTAAAAAATGGTTT

SEQ ID NO: 16706 - protein, 289 aa, Streptococcus agalactiae
  VARIANT 1: Xaa = Any Amino Acid
XVNPSQEESEQVADQFGIDIDDLRAPLDVEETSRISVEDDYTLVIVDVPTYEERNNKSYYMTIPMGIIVTDNAVITTCLEHLTLFDHFYRRRVKNFYTFMKTRFVFQLLYRNAELYLQALRTIDRQSDKIEAQLESATRNEQLIDMMELEKSIVYLKASLKFNERIVKKLTSSTSSLKKYIEDEDLLEDTLIETQQAIEMANIYENVLNAMTETTASIIGNNQNTIMKTLALVTMTLDIPTVIFSAYGMNFKNNWMPLNGLAHGFIYVVLLAFLMSSFVVFYFIRKKWF

SEQ ID NO: 16707 - protein, 168 aa, Streptococcus agalactiae
ATGATTTATAACGAGATTGGTACTCATTGGAGTAATAATGTTTTAGTCTATCGATCAGATTTAAATCAAAAAGAAGCAAAAGCTCTCTTTGTTCCAAATACAAAAGAAGTGCCAAGTCCTGTGAAAAAATATGCTAGCTACCAATTACCTGATGTGAAAAAANNNNNT

SEQ ID NO: 16708 - protein, 56 aa, Streptococcus agalactiae
  VARIANT 55, 56: Xaa = Any Amino Acid
MIYNEIGTHWSNNVLVYRSDLNQKEAKALFVPNTKEVPSPVKKYASYQLPDVKKXX

SEQ ID NO: 16709 - protein, 138 aa, Streptococcus agalactiae
TTGGATCGTTTTGTAGATGATGGTAATACAGTGCTTGTTATTGAGCATAACCTTGATGTTATTAAAACTGCTGACCACATTATTGATCTTGGCCCTGAAGGAGGTATTGGTGGCGGACAAATTGTAGCTACCNNNNNT

SEQ ID NO: 16710 - protein, 46 aa, Streptococcus agalactiae
  VARIANT 45, 46: Xaa = Any Amino Acid
MDRFVDDGNTVLVIEHNLDVIKTADHIIDLGPEGGIGGGQIVATXX

SEQ ID NO: 16711 - protein, 684 aa, Streptococcus agalactiae
ATGACTTTACAAGACTTAACTAAAAAGAATCAAGAGTTTGTTCATATTGCAACTAATCAACTTTTAGCTGATGGAAAATCAGATGCAGAAATCAAAGCTATTTTAGAAGAACATCTCCCAGAGATTATAGATAATCAGAAAAAAGGAATTACCGCACGCTCACTCTTAGGAGCACCAACTACTTGGGCAGCCTCATTCACTGAGCGACCTGAGGATAAAGCTAGAGTATCTGTACAAAAAAATACCAATCCTTGGTTGATGTGGTTAGATACTTCCTTACTATTTCTTGGCTTAGTAACTGCTTTGAATGGTTTAATGTTGCTATTTGGTCAATCTAATGTCAATACAGGGCTTATTTCAATTTTAACTCTTGGTTTTGGTGGTGGTGCGGCCATGTACGTTACTTATTACTATATTTATCGCCATATGGGTAAACCAAAATCTGAAAGACCAGGCTGGCTTAAATCTTTCGCAGTACTGGCACTAGTTATGTTAGTTTGGTTTGCCTTATTTGCAGTAGTACCTCTTCTACCTGCAACTATTAATCCTAAACTTCCTGAGGTTGTTTTGTTTATTATTGCTTTAGCATCGTTTGGTTTGCGCTTTTATTTACAACGTAAATATAATATTCAAAGCTCAATGGCACCAGTGGGCCCACCCACAAGAAGATATTTACCAAGAGTA

SEQ ID NO: 16712 - protein, 228 aa, Streptococcus agalactiae
MTLQDLTKKNQEFVHIATNQLLADGKSDAEIKAILEEHLPEIIDNQKKGITARSLLGAPTTWAASFTERPEDKARVSVQKNTNPWLMWLDTSLLFLGLVTALNGLMLLFGQSNVNTGLISILTLGFGGGAAMYVTYYYIYRHMGKPKSERPGWLKSFAVLALVMLVWFALFAVVPLLPATINPKLPEVVLFIIALASFGLRFYLQRKYNIQSSMAPVGPPTRRYLPRV

SEQ ID NO: 16713 - protein, 237 aa, Streptococcus agalactiae
ATGACAGAAACGACTGCTTCAATCATCGGTAATAATCAGAATACCATTATGAAAACCTTAGCCCTAGTAACTATGACATTGGATATTCCAACGGTTATTTTTTCGGCGTATGGGATGAACTTTAAAAATAATTGGATGCCTTTGAATGGTCTCGCACATGGCTTTATCTATGTTGTTCTTTTGGCCTTTTTGATGAGTTCATTTGTTGTATTTTATTTTATTCGTAAAAAATGGTTT

SEQ ID NO: 16714 - protein, 79 aa, Streptococcus agalactiae
MTETTASIIGNNQNTIMKTLALVTMTLDIPTVIFSAYGMNFKNNWMPLNGLAHGFIYVVLLAFLMSSFVVFYFIRKKWF

SEQ ID NO: 16715 - protein, 1122 aa, Streptococcus agalactiae
ATGTGGCCTGAAGATAGAATCGCTTCTTTTCGTCGCACACTTTTAGGGTGGTATGACCAAGAAAAACGTGATCTCCCTTGGCGAAGAACTACTAATCCATACTATATTTGGGTTTCTGAAATCATGTTGCAACAAACACAAGTTAATACGGTAATCCCTTATTATAAACGTTTTCTAGAGTGGTTTCCTCAAATAAAAGATTTGGCAGACGCTCCTGAAGAACAATTACTAAAGGCATGGGAGGGACTAGGCTATTATTCTCGGGTGCGTAATATGCAAAAGGCTGCACAGCAAGTGATGGTTGATTTTGGTGGCATATTTCCTCACACTTATGATGATATTGCTTCATTAAAAGGGATTGGTCCTTATACTGCAGGTGCTATCGCCAGCATCTCATTCAACTTACCAGAGCCTGCTGTTGATGGCAATGTGATGCGTGTCATGGCTCGTTTGTTTGAAGTTAATTATGACATCGGTGACCCTAAAAATCGTAAAATTTTTCAAGCTATTATGGAAATACTAATTGACCCTGACAGACCCGGTGATTTTAACCAAGCACTTATGGATCTGGGTACAGACATCGAATCCGCTAAGACACCTAGACCTGATGAAAGCCCTATTCGTTTCTTTAATGCTGCTTATTTGAATGGTACTTATAGTAAATATCCCATAAAAAATCCTAAGAAAAAGCCTAAACCAATGCGAATTCAGGCTTTTGTCATTCGTAACCAAAATGGTCAATATCTACTGGAGAAAAATACTAAAGGGAGACTTCTAGGGGGTTTTTGGTCATTTCCTATTATCGAAACGTCACCTCTTTCTCAACAATTAGATTTATTTGATGACAATCAATCCAACCCCATAATCTGGCAAACCCAAAATGAAACTTTCCAAAGAGAATATCAATTAAAGCCCCAATGGACTGATAATCACTTTCCAAATATTAAGCACACTTTTAGTCACCAGAAGTGGACAATAGAACTCATAGAGGGGGGGGTCAAAGCAACAGATTTACCTAATGCTCCTCACCTAAAGTGGGTAGCAATTGAGGACTTTTCTCTGTATCCCTTTGCAACACCACAAAAGAAAATGCTAGAGACCTACTTAAAACAGAAAAATGCT

SEQ ID NO: 16716 - protein, 374 aa, Streptococcus agalactiae
MWPEDRIASFRRTLLGWYDQEKRDLPWRRTTNPYYIWVSEIMLQQTQVNTVIPYYKRFLEWFPQIKDLADAPEEQLLKAWEGLGYYSRVRNMQKAAQQVMVDFGGIFPHTYDDIASLKGIGPYTAGAIASISFNLPEPAVDGNVMRVMARLFEVNYDIGDPKNRKIFQAIMEILIDPDRPGDFNQALMDLGTDIESAKTPRPDESPIRFFNAAYLNGTYSKYPIKNPKKKPKPMRIQAFVIRNQNGQYLLEKNTKGRLLGGFWSFPIIETSPLSQQLDLFDDNQSNPIIWQTQNETFQREYQLKPQWTDNHFPNIKHTFSHQKWTIELIEGGVKATDLPNAPHLKWVAIEDFSLYPFATPQKKMLETYLKQKNA

SEQ ID NO: 16717 - protein, 591 aa, Streptococcus agalactiae
ATGGAAATTGGTCAGCAAATTATTCGCTACCGTAAACAACAAGCGCTCTCGCAAGAAGAATTAGCCGAGAAAGTCTATGTAAGCCGTCAGAGCATATCTAACTGGGAAAATGACAAAACTTACCCAGACATCCATAGCCTCTTACTCCTAAGTCAAATTTTTCAAGTGAGCTTAGACCAACTAATTAAAGGAGACATTGAGAAAATGAAATATACCATCACTCAGGTTGATAAAAAGAATTTTGAACGAGATACCAAAGTAATGGTGACATTGATGATACTATTAATGATTTCAAGTTATCCATTAGTCTATTTCTTAGAGTGGCTAGGACTTGGCATTTTTGTTTTATTATCGATAATTACTATGACTTATGCTAATCGTGTGGAACGTTTTAAGAAAAAATATGATGTGCAAACTTATAAGGAAATCCTAGCTGTTTCAAGTGGAAAATTATTAGACGAAATCGAAAAACGGGAAGAAAGAGCAAAACTTCCTTATCAGAAACCCCTTATTGTCACTGTATTTTTCCTCATTACTGTTGCCACCTTTTTTGCAAGTCGTTTTATTTTCACATGGTTGTTCCATTTAAGT

SEQ ID NO: 16718 - protein, 197 aa, Streptococcus agalactiae; identical to SEQ ID NO: 3128

SEQ ID NO: 16719 - protein, 312 aa, Streptococcus agalactiae
ATGGCATTAGAAGTAACAGATGCTACATTTGTAGAAGAAACTAAAGAAGGTTTAGTACTCATTGATTTTTGGGCAACTTGGTGTGGTCCATGTCGTATGCAAGCACCAATCTTAGAACAGTTATCTCAAGAAATCGATGAAGATGAACTCAAAATTTTGAAAATGGATGTTGATGAGAATCCGGAAACTGCCCGTCAGTTTGGTATTATGTCAATTCCAACATTGATGTTTAAAAAAGACGGAGAAGTGGTTAAACAAGTTGCAGGTGTTCATACTAAAGACCAACTGAAAGCTATTATTGCTGAATTGAGT

SEQ ID NO: 16720 - protein, 104 aa, Streptococcus agalactiae; identical to SEQ ID NO: 3130

SEQ ID NO: 16721 - protein, 498 aa, Streptococcus agalactiae; identical to SEQ ID NO: 7843

SEQ ID NO: 16722 - protein, 166 aa, Streptococcus agalactiae; identical to SEQ ID NO: 7844

SEQ ID NO: 16723 - protein, 2346 aa, Streptococcus agalactiae
ATGAAGAGTATGAATAACAAGATTTTAGAACAGTTAGAATTTAACAAAGTTAAGGAATTGATATTACCTTATCTCAAGACAGAACAATCACAAGAAGAATTATCAGAGCTGGAGCCGATGACAGAGGCTCCTAAAATAGAAAAAAGTTTTAATGAAATTTCTGACATGGAACAGATTTTTGTTGAACATCACTCATTTGGCATAGTCAGCCTAAGTTCAATCTCTGAGAGTTTAAAACGCTTAGAGCTTTCAGCTGATCTTAATATTCAAGAACTTTTGGCTATCAAAAAAGTTTTACAGAGTTCTTCGGATATGATTCACTTTTATTCTGATTTGGATAATGTTTCTTTCCAATCTTTGGATCGTTTGTTTGAAAATTTGGAACAATTCCCTAATCTGCAAGGGTCTTTTCAAGCTATCAATGATGGTGGTTTTTTAGAACATTTTGCGAGTCCAGAATTAGAGCGTATCCGTCGTCAATTAACAAACAGTGAACGACGGGTTCGTCAGATTTTACAGGATATGCTTAAGGAAAAAGCAGAGCTTTTATCAGAGAATCTAATCGCTAGTCGTAGTGGACGAAGTGTCCTACCAGTAAAAAATACTTATCGGAATCGTATTTCTGGTGTGGTTCATGACATCTCTTCTTCAGGAAGTACTGTTTATATTGAGCCTCGTGCTGTAGTTACACTAAACGAAGAGATAACGCAGCTTAGAGCTGACGAACGTCATGAAGAAAGTCGTATTTTACACGCATTTTCAGACTTGTTAAGACCCCATGTCGCCACTATTAGAAATAATGCATGGATTCTTGGGCATCTTGATTTTGTAAGGGCTAAATATCTTTTTATGTCTGATAATAAGGCGACGATACCTGAGATTTCTAATGACAGCACGTTAGCATTAATCAATGTTCGTCATCCTCTGTTAAGTAACCCTGTGGCTAATGACTTACATTTTGATCAAGATTTAACTGCAATTGTCATCACTGGTCCCAATACTGGTGGTAAGACGATTATGCTAAAAACACTCGGTTTAGCACAATTAATGGGACAGTCTGGTTTGCCAGTATTAGCGGATAAAGGTAGTAAAATTGCAGTATTTAACAATATCTTTGCAGATATTGGCGATGAGCAATCTATTGAACAAAGTCTATCAACTTTTTCTAGTCATATGACGCACATAGTCAGTATTTTAAACGAGGCTGACCACAATAGTTTAGTCCTCTTTGATGAACTGGGAGCAGGAACGGATCCTCAAGAAGGTGCTAGTTTGGCTATGGCTATTTTAGAACACCTTAGGTTAAGTAATATCAAAACGATGGCGACCACGCACTATCCAGAATTAAAAGCTTATGGGATTGAGACAAATTTTGTAGAGAATGCGAGCATGGAATTTGATGCCGAAACGCTTAGCCCTACGTATCGCTTTATGCAAGGAGTTCCTGGACGATCAAATGCATTTGAAATTGCTTCTCGCCTTGGTTTAGCTCCATTTATTGTTAAACAAGCTAAGCAGATGACAGATTCTGACTCAGATGTTAACCGTATTATTGAACAGTTAGAGGCACAGACACTTGAGACACGTAGAAGACTGGATCATATTAAAGAAGTTGAACAAGAAAACCTCAAATTCAATCGTGCGGTTAAGAAACTCTATAATGAATTTTCACATGAGCGCGATAAAGAGTTAGAAAAAATCTATCAAGAAGCTCAAGAAATTGTAGATATGGCTTTGAATGAGAGTGATACTATCTTAAAAAAACTCAATGATAAGAGCCAATTAAAACCTCACGAAATTATAGATGCTAAGGCACAAATAAAAAAATTAGCACCTCAAGTTGATTTATCAAAAAATAAAGTCTTAAATAAGGCTAAAAAAATTAAAGCAGCTCGTGCTCCTAGAATTGGTGATGATATTATAGTGACTAGCTATGGACAGCGAGGTACCTTAACTAGTCAATTAAAAGATGGACGTTGGGAAGCACAAGTGGGAATTATCAAAATGACATTAACACAAGATGAATTTACCCTTGTTAGAGTCCAAGAAGAACAGAAAGTCAAAAGTAAACAGATTAATGTGGTTAAAAAGGCTGATAGTTCTGGACCAAGAGCTCGACTTGATCTTAGAGGTAAAAGATACGAAGAAGCTATGCAAGAGTTAGATAATTTTATTGATCAAGCATTGCTTAACAATATGGGACAAGTTGATATCATTCATGGTATTGGTACAGGCGTTATCCGTGAGGGAGTGACAAAATATCTTCGTCGTAATAAGCACGTTAAGCATTTTGCTTATGCCCCACAAAATGCAGGGGGATCTGGCGCCACAATTGTAACGTTAGGG

SEQ ID NO: 16724 - protein, 782 aa, Streptococcus agalactiae; identical to SEQ ID NO: 3134

SEQ ID NO: 16725 - protein, 540 aa, Streptococcus agalactiae
ATGCTATCATTGCTTTTGCTGATTATTGTTATTTGGCATTTTTATATTGGCTACAGTAGAGGTATTTTTTTACAAGTCTTTTACGTGTTAATGTCAATGGTATCTTTGATGATTGCTAGTCAATTTTACCAAGAATTAGCTAGTCAGATTACGTTATGGGTACCGTATTCTAATCCTGTACAAGGAGTAGAAGTTTACTTTTTTAAAGATATTAGCAAATTTCAATTGAGTCATGTTTATTATGCAGGTGTTGCCTTTGTTTTTATCTACAGTTTATCTTACTTAGTAGGTCGCTTGTTAGGTGTTTTACTACATTTAGCACCAGTTGAACATTTTGATAGCTTGCAAAATAATATTATTAGTGGTTTTTTAGCCGTTCTGGTTTGTCTCTTATTTATGAGTATGTGTTTGACTATTCTGGCAACAGTCCCTATGTCATTTGTTCAAGAAAAGTTATGGAATAGTCTGTTTGTTAGATTTTTAATTAACGACTTACCATTCTTCTCACAGTTTTTGGTAAGGACTTGGGCGGTAGGTCTT

SEQ ID NO: 16726 - protein, 180 aa, Streptococcus agalactiae; identical to SEQ ID NO: 3136

SEQ ID NO: 16727 - protein, 309 aa, Streptococcus agalactiae; identical to SEQ ID NO: 7849

SEQ ID NO: 16728 - protein, 103 aa, Streptococcus agalactiae; identical to SEQ ID NO: 3138

SEQ ID NO: 16729 - protein, 891 aa, Streptococcus agalactiae
ATGAACACAATCGTCATGCAAGCAGATAAAAAATTGCAAGAAAAGATAAGAACCGATTTAGCTCAACATCATATAAGTAATAACAATCCTTATGTGGTATTTTCAGCTAAAATATCAGGAGCTACTGTTCTTTTATATACTTCTGGAAAACTTGTCTTCCAGGGTTCTAACGCTTCACATATCGCCCAAAAGTATGGTTTTATTGAGCAAAAAGAAAGTTGTTCCTCTGAGAGTCAAGATATTCCCATAATTGGTACTGATGAAGTGGGAAATGGCTCTTACTTTGGTGGACTGGCAGTGGTAGCTAGTTTTGTAACTCCTAAGGACCATGCTTACCTCAAAAAATTAGGTGTTGGTGATTCAAAAACACTTACTGATCAAAAAATTAAGCAAATCGCGCCTCTTTTGGAAAAAGCAATTCCACACAAAGCATTATTGTTATCGCCTCAAAAATATAATCAAGTGGTTAGTCCAAATAACAAACATAATGCTGTCTCCGTAAAAGTTGCTTTACACAATCAAGCTATCTTCCTTCTTCTTCAAGATGGTTTTGAACCAGAAAAAATCGTTATTGATGCTTTTACTAGCTCCAAAAACTATCAAAATTATTTGAAAAATGAAAAGAATCAATTTAAACAAACGATTACTCTGGAAGAAAAAGCTGAAAATAAATATCTAGCTGTAGCGGTCAGTTCTATTATTGCACGTAATCTATTCTTAGAAAACCTTAACAAATTAAGCGACGACGTAGGATATAAACTTCCAAGTGGAGCTGGTCACCAATCTGATAAGGTCGCTAGCCAATTACTCAAAGCTTATGGTATCTCTTCGCTTGAACACTGCGCAAAACTTCATTTTGCCAACACCAAAAAAGCACAAGCATTATTAAAA

SEQ ID NO: 16730 - protein, 297 aa, Streptococcus agalactiae
MNTIVMQADKKLQEKIRTDLAQHHISNNNPYVVFSAKISGATVLLYTSGKLVFQGSNASHIAQKYGFIEQKESCSSESQDIPIIGTDEVGNGSYFGGLAVVASFVTPKDHAYLKKLGVGDSKTLTDQKIKQIAPLLEKAIPHKALLLSPQKYNQVVSPNNKHNAVSVKVALHNQAIFLLLQDGFEPEKIVIDAFTSSKNYQNYLKNEKNQFKQTITLEEKAENKYLAVAVSSIIARNLFLENLNKLSDDVGYKLPSGAGHQSDKVASQLLKAYGISSLEHCAKLHFANTKKAQALLK

SEQ ID NO: 16731 - protein, 591 aa, Streptococcus agalactiae
ATGAAAGAATTTATTAAAGAATGGGGTGTCTTTATCCTCATCCTCTCACTTTTTTTACTATCGCGTATCTTTTTATGGCAATTCGTTAAAGTTGACGGACACTCCATGGATCCAACTTTAGCTGACAAGGAACAGCTAGTAGTTCTCAAACAAACAAAAATCAATCGATTCGATATTGTAGTGGCTAACGAAGAAGAAGGCGGCCAAAAGAAAAAAATTGTTAAACGTGTCATTGGTATGCCAGGTGATGTCATCAAATATAAAAATGACACCTTAACTATTAACAATAAAAAAACAGAAGAACCTTACCTCAAGGAATATACTAAATTATTTAAAAAGGATAAATTACAGGAAAAATATTCGTATAACCCACTTTTCCAAGACCTAGCACAAAGCTCTACCGCTTTCACCACTGACAGCAATGGCAGCAGCGAATTTACTACTGTCGTGCCTAAAGGCCACTACTATCTTGTTGGTGATGACCGAATTGTCTCTAAAGATAGTCGTGCCGTCGGTTCCTTCAAAAAATCAACGATTGTGGGAGAGGTTAAATTCCGCTTCTGGCCAATTCGTCGTTTTGGAACTATCAAC

SEQ ID NO: 16732 - protein, 197 aa, Streptococcus agalactiae
MKEFIKEWGVFILILSLFLLSRIFLWQFVKVDGHSMDPTLADKEQLVVLKQTKINRFDIVVANEEEGGQKKKIVKRVIGMPGDVIKYKNDTLTINNKKTEEPYLKEYTKLFKKDKLQEKYSYNPLFQDLAQSSTAFTTDSNGSSEFTTVVPKGHYYLVGDDRIVSKDSRAVGSFKKSTIVGEVKFRFWPIRRFGTIN

SEQ ID NO: 16733 - protein, 2304 aa, Streptococcus agalactiae
ATGGAAGTATTTTTTACAGGAACCATTGAACGCATTATATTTGAAAATGCCAGCAATTTTTTTAAAATATTACTTCTGGAAATCGAAGATACGGATAGCGATTTTGATGATGTAGAAGTAATTATTACTGGTACTATGGCCGACGTTATAGAGGGAGAAGAATATACTTTTTGGGGAACACTAACCCAACATCCAAAATACGGCGAGCAACTACAAAGTGTACGCTATGAAAGAGCCAAGCCTACTTCAGGTGGCCTTGTGAAATACTTTTCTAGCGAACAATTTAAAGGAATTGGTAAAAAGACTGCCCAACGCATCGTAGAACTCTATGGAGATAATACCATTGATAAAATCCTTGAATCCCCTGAACAGTTAAGTACAATCTCAGGACTATCAAAAATTAATAGAGAAGCATTCATCGCTAAACTGAAACTCAATTATGGAACAGAGCAAGTTTTAGCTAAACTCGCTGAATATGGGTTAAGCAATCGTGCTGCTATTCAAATATTTGATCACTATAAAGAAGAATCACTTGAAGTGATAAACGAAAATCCTTATCAACTTGTTGAGGATATCCAAGGTATCGGTTTTAAAATAGCTGACCAACTTGCTGAACAAGTCGGTATTGAAAGTGATTCTCCTAAACGCTTTCGTGCTGCTATTATTCATACTTTAGTTGAGTCTTCTATGGAGCAAGGAGATACCTATATTGAGGCTCGTACTCTCTTGGAAAAAACCATTACTCTCCTTGAAGAAGCTCGTCAAATCGAACTAGATCCTTCAATTGTTGCTAAGGAATTGACAAATTTAATTGCAGAAGATAAAGTTCAACATATTGGAACTAAAATTTTTAGTAATACTCTATTTTTTGCCGAAGAAGGCATCAAAAAAAACTTACAACGAATACTAAATCAGCCTCTTGATAAACAACTAAATCACAAAGATATTGACCGTGAAATCAGAGATATTCAAAAATCTTTAAATATCCACTACGATAATATCCAAGAAAAAGCTATTAGAGAAGCTTTACTAAGTAAGGTATTTATCTTGACTGGTGGCCCAGGAACAGGTAAAACAACAGTTATAAATGGTATTATTGAAGCCTATTCCGAGTTACATCATATTGATTTAAACAAAAATGATATTCCTATTGTACTTGCTGCTCCTACAGGTCGTGCTGCTAGACGCATGAATGAACTTACCGGTTTACCGAGTGCTACTATTCATAGGCATTTGGGATTAAACGGAGATAGTGACTATCAAAGTCTAGATGACTATCTAGATTGTTCCTTAATTATCATTGATGAATTTTCAATGGTTGACACTTGGCTTGCTAATCAATTATTTGACGCTTTGGACTCGCACACACAAGTTATTATTGTCGGAGATAGTGATCAATTACCGTCTGTAGGTCCAGGACAAGTTCTAGCAGATCTTTTAAATATAAATGCACTTCCACACGTTAAACTTGAAAAGATTTTTAGACAATCAGAAGAATCAACTATTGTGACTTTAGCTAATCAAATGAGACAGGGCTTTTTGCCAGAGGACTTTACAGCTAAAAAAGCCGATCGCTCATACTTTGAAGCATCTGCTAATATCATCCCAAATATGATTTCTAAAATTGTTCAATCTGCACTTAAGAGCGGTATTGAAGCTCATGAAATTCAAATTTTAGCTCCTATGTATCGCGGCCAAGCAGGTATTAATAATCTTAACCTTATCATGCAAAATCTCCTCAATCCATTAAAAGATAATAACCAATTTACTTTTAATGATATAAATTTCCGAATAGGAGATAAAGTGTTACATTTAGTCAACGATACAGAGCTTAATGTTTTTAATGGGGATATTGGTTACATAACGGACCTTATACCAGCCAAATATACTGAGAGCAAGCAAGATGAGATTTATATGACTTTTGACGGTCAAGAAGTTATCTATCAACGCAAAGAATGGCTTAAAATAACACTAGCCTATGCTATGAGTATTCATAAATCACAGGGTTCTGAATTTCAAGTTGTTATTCTGCCAATAACGAGACAGAGTGGTCGAATGTTACAGCGAAACCTTATTTATACAGCTATTACGAGATCTAAAAGTAAACTAATACTTTTAGGAGAAATTGGTGCATTTGATTTCGCTGTTAAAAACGAGGGGGCAAAGCGCAATACTTATCTGATAGAAAGATTTGAAAACAAGCAAGAAATAGCTAATTCTCAAAAAATTGAAGATAGCTCAATAGATCAAAAGATTGACAACACAATAATTAATACGTCCATTCCAAAAANNNNNTTAATTAAT

SEQ ID NO: 16734 - protein, 768 aa, Streptococcus agalactiae
  VARIANT 764, 765: Xaa = Any Amino Acid
MEVFFTGTIERIIFENASNFFKILLLEIEDTDSDFDDVEVIITGTMADVIEGEEYTFWGTLTQHPKYGEQLQSVRYERAKPTSGGLVKYFSSEQFKGIGKKTAQRIVELYGDNTIDKILESPEQLSTISGLSKINREAFIAKLKLNYGTEQVLAKLAEYGLSNRAAIQIFDHYKEESLEVINENPYQLVEDIQGIGFKIADQLAEQVGIESDSPKRFRAAIIHTLVESSMEQGDTYIEARTLLEKTITLLEEARQIELDPSIVAKELTNLIAEDKVQHIGTKIFSNTLFFAEEGIKKNLQRILNQPLDKQLNHKDIDREIRDIQKSLNIHYDNIQEKAIREALLSKVFILTGGPGTGKTTVINGIIEAYSELHHIDLNKNDIPIVLAAPTGRAARRMNELTGLPSATIHRHLGLNGDSDYQSLDDYLDCSLIIIDEFSMVDTWLANQLFDALDSHTQVIIVGDSDQLPSVGPGQVLADLLNINALPHVKLEKIFRQSEESTIVTLANQMRQGFLPEDFTAKKADRSYFEASANIIPNMISKIVQSALKSGIEAHEIQILAPMYRGQAGINNLNLIMQNLLNPLKDNNQFTFNDINFRIGDKVLHLVNDTELNVFNGDIGYITDLIPAKYTESKQDEIYMTFDGQEVIYQRKEWLKITLAYAMSIHKSQGSEFQVVILPITRQSGRMLQRNLIYTAITRSKSKLILLGEIGAFDFAVKNEGAKRNTYLIERFENKQEIANSQKIEDSSIDQKIDNTIINTSIPKXXLIN

SEQ ID NO: 16735 - protein, 669 aa, Streptococcus agalactiae
TTGGATAATGTTTCTTTCCAATCTTTGGATCGTTTGTTTGAAAATTTGGAACAATTCCCTAATCTGCAAGGGTCTTTTCAAGCTATCAATGATGGTGGTTTTTTAGAACATTTTGCGAGTCCAGAATTAGAGCGTATCCGTCGTCAATTAACAAACAGTGAACGACGGGTTCGTCAGATTTTACAGGATATGCTTAAGGAAAAAGCAGAGCTTTTATCAGAGAATCTAATCGCTAGTCGTAGTGGACGAAGTGTCCTACCAGTAAAAAATACTTATCGGAATCGTATTTCTGGTGTGGTTCATGACATCTCTTCTTCAGGAAGTACTGTTTATATTGAGCCTCGTGCTGTAGTTACACTAAACGAAGAGATAACGCAGCTTAGAGCTGACGAACGTCATGAAGAAAGTCGTATTTTACACGCATTTTCAGACTTGTTAAGACCCCATGTCGCCACTATTAGAAATAATGCATGGATTCTTGGGCATCTTGATTTTGTAAGGGCTAAATATCTTTTTATGTCTGATAATAAGGCGACGATACCTGAGATTTCTAATGACAGCACGTTAGCATTAATCAATGTTCGTCATCCTCTGTTAAGTAACCCTGTGGCTAATGACTTACATTTTGATCAAGATTTAACTGCAAATGCATCACNNNNNTTAATTAAT

SEQ ID NO: 16736 - protein, 223 aa, Streptococcus agalactiae
  VARIANT 219, 220: Xaa = Any Amino Acid
MDNVSFQSLDRLFENLEQFPNLQGSFQAINDGGFLEHFASPELERIRRQLTNSERRVRQILQDMLKEKAELLSENLIASRSGRSVLPVKNTYRNRISGVVHDISSSGSTVYIEPRAVVTLNEEITQLRADERHEESRILHAFSDLLRPHVATIRNNAWILGHLDFVRAKYLFMSDNKATIPEISNDSTLALINVRHPLLSNPVANDLHFDQDLTANASXXLIN

SEQ ID NO: 16737 - protein, 480 aa, Streptococcus agalactiae; identical to SEQ ID NO: 12073

SEQ ID NO: 16738 - protein, 160 aa, Streptococcus agalactiae; identical to SEQ ID NO: 3146

SEQ ID NO: 16739 - protein, 1092 aa, Streptococcus agalactiae
ATGTTAATTTTTCCTTTAATAAATGATACGTCGCGTAAAATTATCCACATTGATATGGATGCTTTTTTTGCATCTGTGGAAGAGCGTGACAATCCCTCTCTTAAAGGAAAGCCTGTTATTATTGGTTCTGATCCCAGAAAAACCGGCGGCAGAGGGGTTGTTTCTACTTGTAATTATGAGGCTCGAAAGTTTGGAGTTCATTCAGCTATGTCTTCAAAAGAAGCGTATGAACGATGCCCTCAAGCTATCTTTATTTCGGGAAATTACCAAAAATATCGCCAAGTAGGAATGGAAGTACGAGATATATTTAAAAAGTATACGGATTTGGTTGAACCGATGAGTATAGACGAAGCTTATTTAGATGTAACTGAAAATAAAATGGGAATAAAATCAGCTGTTAAACTTGCTAAAATGATACAATACGATATTTGGAATGATGTCCATTTGACCTGTTCAGCGGGTATTTCCTACAATAAATTTTTGGCAAAATTGGCTTCTGACTTTGAGAAACCAAAAGGACTTACCTTCATCCTACCAGATCAAGCTCAAGATTTCTTGAAGCCCTTACCAATAGAGAAATTTCATGGTGTTGGTAAACGCTCCGTCGAAAAATTACATGCTTTAGGGGTTTATACTGGTGAGGACCTCCTTTCCTTATCTGAAATTTCTTTAATTGATATGTTTGGTCGTTTCGGGTATGACCTTTATCGTAAGGCAAGAGGGATTAATGCTTCCCCGGTAAAACCTAATAGAGTTCGTAAATCAATAGGAAGTGAGAAAACCTATGGGAAATTACTATATAACGAAGCAGATATCAAAGCTGAGATTTCAAAGAACGTTCAGAGAGTTGTTGCTTCTCTGGAGAAAAATAAGAAAGTTGGTAAGACAATCGTTTTAAAAGTTAGATATGCGGATTTTGAAACATTGACGAAACGTATGACATTAGAAGAGTATACTCAAGATTTTCAAATCATTGATCAAGTTGCTAAAGCGATATTTGATACCTTAGAAGAGTCAGTTTTTGGCATACGACTCTTAGGTGTTACAGTAACGACCCTGGAAAATGAACATGAAGCTATCTATTTAGATTTT

SEQ ID NO: 16740 - protein, 364 aa, Streptococcus agalactiae
MLIFPLINDTSRKIIHIDMDAFFASVEERDNPSLKGKPVIIGSDPRKTGGRGVVSTCNYEARKFGVHSAMSSKEAYERCPQAIFISGNYQKYRQVGMEVRDIFKKYTDLVEPMSIDEAYLDVTENKMGIKSAVKLAKMIQYDIWNDVHLTCSAGISYNKFLAKLASDFEKPKGLTFILPDQAQDFLKPLPIEKFHGVGKRSVEKLHALGVYTGEDLLSLSEISLIDMFGRFGYDLYRKARGINASPVKPNRVRKSIGSEKTYGKLLYNEADIKAEISKNVQRVVASLEKNKKVGKTIVLKVRYADFETLTKRMTLEEYTQDFQIIDQVAKAIFDTLEESVFGIRLLGVTVTTLENEHEAIYLDF

SEQ ID NO: 16741 - protein, 2310 aa, Streptococcus agalactiae
ATGGCAACAGTTAAAACAAACACAGATATCTTTGAACAAGCTTGGGAAGGCTTTAAAGGTGTTGATTGGAAAGAAAAAGCAAGTATTGCTCGCTTCGTTCAAGCAAACTATGCACCTTACGATGGAGATGAAAGCTTCTTAGCTGGAGCAACTGAACGTTCACTTCACATCAAAAAAGTGATTGAAGAAACAAAAGCTCACTATGAAGAAACTCGCTTCCCAATGGATACTCGTGTTGCTTCAATTTCTGAATTACCAGCTGGTTTTATCGACAAAGATAACGAGCTTATCTTTGGTATTCAAAACGACGAGCTTTTCAAATTGAATTTCATGCCTAAAGGTGGTATCCGTATGGCGGAAACTACACTTAAAGAAAATGGTTATGAACCTGATCCAGCTGTTCACGAAATCTTCACTAAGTACGCTACAACAGTAAATGATGGTATCTTCCGCGCTTATACTTCTAACATTCGTCGTGCTCGCCATGCACACACTGTTACTGGTCTTCCAGACGCTTATTCACGCGGACGTATCATTGGTGTATATGCTCGTCTAGCTGTTTACGGTGCTGACTACTTGATGCAAGAAAAAGTTAATGACTGGAATGCATTGAATGATATTGATGAAGAGTCAATTCGTCTTCGTGAAGAAATCAACCTTCAATACCAAGCTCTTGGTGAAGTTGTAAAACTTGGTGACCTTTACGGCGTAGATGTTCGTAAACCAGCCATGAACACTAAAGAAGCCATTCAATGGGTGAACATTGCTTTCATGGCTGTATGTCGTGTTATCAATGGTGCTGCAACATCACTTGGACGTGTTCCTATTGTCCTTGATATCTTTGCAGAACGTGACCTCGCTCGCGGTACATTCACAGAATCAGAAATCCAAGAATTTGTTGATGATTTTGTCCTTAAACTCCGTACTGTAAAATTTGCTCGTACTAAAGCTTATGATGCCCTTTACTCAGGTGACCCAACCTTTATCACAACTTCAATGGCAGGTATGGGAGCTGATGGACGTCATCGTGTTACCAAAATGGACTATCGTTTCTTAAATACACTTGACAATATCGGTAACTCACCAGAACCAAACTTAACTGTTCTTTGGTCAGATCAATTACCATATGCTTTCCGTCGCTACTGTATGTCAATGAGTCATAAACACTCTTCAATCCAATATGAAGGTGTATCAACAATGGCTAAAGAAGGCTACGGTGAAATGTCATGTATTTCATGTTGTGTATCTCCACTTGATCCAGAAAACGAAGACAAACGTCACAACCTTCAATATTTTGGTGCTCGTGTTAACGTTATGAAAGCACTTCTTACTGGTCTTAACGGTGGTTATGATGATGTTCATAAAGATTACAAAGTATTTGACATCGACCCAATTCGTGACGAAGTACTCAACTTTGACACTGTAAAAGCTAACTTTGAAAAATCTCTTGACTGGTTGACTGATACTTATGTTGATGCGATGAATATCATCCACTACATGACTGATAAATACAACTATGAAGCTGTACAAATGGCATTCTTACCTTCACATGTACGTGCTAATATGGGATTTGGTATCTGTGGTTTTGCAAATACTGTCGATTCATTATCTGCGATTAAATACGCTACTGTTAAACCAATCCGTGACGAAGATGGTTACATCTACGACTACGAAACAGTTGGTGACTTCCCACGTTATGGTGAAGATGATGATCGTGTTGACTCAATCGCTGAATGGTTACTTGAAGCCTTCCATGGACGCCTTGCTAAACACAAACTTTATAAAGATGCTGAAGCAACTGTTTCTCTTCTTACAATCACATCAAACGTTGCTTACTCTAAACAAACTGGTAACTCACCGGTACATAAAGGAGTATATCTCAATGAAGATGGTAGTGTAAACCTTTCTAAAGTAGAATTCTTCTCACCAGGTGCTAACCCTTCTAACAAAGCTAAAGGTGGCTGGTTACAAAACTTGAATTCACTTTCTAAACTTGATTTCGCTCATGCAAATGATGGTATTTCATTGACAACTCAAGTTTCTCCACGCGCTCTTGGTAAAACATTTGATGAACAAGTTGATAACTTGGTAACAGTCCTTGATGGTTACTTTGAAAACGGTGGTCAACACGTTAACTTGAATGTCATGGACCTTAAAGATGTCTATGACAAGATTATGAATGGTGAAGATGTTATCGTTCGTATCTCAGGTTACTGTGTCAATACTAAATATCTAACTCCTGAGCAAAAAACTGAGTTAACACAACGTGTCTTCCATGAAGTACTTTCAATGGACGATGCATTAACTAAC

SEQ ID NO: 16742 - protein, 770 aa, Streptococcus agalactiae; identical to SEQ ID NO: 3150

SEQ ID NO: 16743 - protein, 177 aa, Streptococcus agalactiae
ATGACTCTGGGCAGCCGTGAAGTCGAGGGTCGTGATGGTTATCAAGGTACAGGCTTTAGAATTGAAGGAACTGCTAAGCTATTAGAAGCAGGAAGCGATTTTGAAATTGTTAAAGAAAAATACCCTTTTCTGCGTAAAGTATTGGAAGTAACTCCCATAAATGTTATCCAACTTTTA

SEQ ID NO: 16744 - protein, 59 aa, Streptococcus agalactiae
MTLGSREVEGRDGYQGTGFRIEGTAKLLEAGSDFEIVKEKYPFLRKVLEVTPINVIQLL

SEQ ID NO: 16745 - protein, 942 aa, Streptococcus agalactiae
TTGGATTTCAAAAGAATGATTAAAACTAATACCGTTTTAGAACTCATTAAGGAGCAAATCAAAGATAATCTTTATCATGGTGCAAGCTTAGCTATTTATGAAAATGGAGAGTGGCACGAACATTACTTGGGGACAATTGATGGCAATGAGAAAGTTAAAGCGGGATTGGTCTATGATCTAGCCAGTGTATCAAAAGTTGTCGGCGTGGGAACTTTACTAGCAAAGTTAGTTTATCAAGGGACTATTGATATTGATAAGCCATTAAGGTATTATTACCCTACGTTTCATCATCAGACGTTAACTGTAAGGCAATTAGCTACACATAGCAGTGGAATTGACCCTTTTATTCCAAATCGTGATCAGTTGAATGCTACTCAGCTGAAAGATGCCATTAATCATATCAAGGTTTTGGAAGATAAATCGTTTAAATACACTGATATTAATTTTCTTTTACTTGGTTTTATGTTAGAAGAGGTATTAGGGGATAGTTTGGATAAACTTTTCAAACGTTATATTTTCACTCCTTTTCAGATGAAAGAAACCTCTTTTGGTCCTAGAGTAGAAGCTGTTCCAACTGTAGCCGGTATTAACGATGGTATTGTACACGATCCTAAAGCTAAGGTATTAGGAAAGCATACTGGTTCTGCAGGTTTATTTTCAACTATTGATGATTTACAAAGATTTTCTATTCATTATTTAAAAGATGATTTTGCGAAGCCTTTGTGGAATAATTATAGTTTGAGTAAATCAAGATCATTAGCTTGGGATATAGATAAGGATTGGATAAACCATACTGGTTATACTGGTCCTTTTATTGCACTAAATTATCAAAAGCAGGCAGCAGCTATTTTTTTGACAAACAGAACCTTTTCCTATGATGACCGTCCACTTTGGATTAAGAAACGACGACATGTACAAGAGGCGATAACATCGTACTTTGAA

SEQ ID NO: 16746 - protein, 314 aa, Streptococcus agalactiae; identical to SEQ ID NO: 3154

SEQ ID NO: 16747 - protein, 753 aa, Streptococcus agalactiae
ATGACGTTATTTCATTCATTGACATTTAAACACCCAGTATTACGTGTTAATAATAGAGACTTGAATATTGCATTTTATCAGGAGTCTCTTGGATTTAAATTGATAAGTGAAGAAAATGCAATCGCAGTTTTCTCAGCATGGCAGAACAAAGAGGCTAGCTTTATTATTGAGGAATCCCCAACTTATCGTACTCGTGCGGTGAATGGTACTAAGAAGTTAGCAAAGATTATTGTTAAGTCTCAAGATGCAAAAGATATTGAAAAGCTTTTGGCAAATGGTGCGCAAGCCATTCAAGTATATCAAGGTCAAAATGGTTATGCCTATGAAACAGTTTCGCCCGAGGGAGACCTTTTCTTACTTCATGCTGAAGATGATTTGTCACAATTAGTGGCAATTGAGCGCCCAGAGTTAGAAAAAAAAGATGACACTACAGGTCTATCAAACTTTGCTTTCCAATCTATTAGTTTGAATGTACCTGATGCCGTGAAAGCTGAAGCTTTTTACGATAAAGTATTTGCTGGGAAGTTCCCAATTAATTTATCTTTCAAAGAAGCACAGGGACAAGATTTGCAAATTGCTCCAAATGAAACTTGGGATATTGAGATACTAGAATGCTGTGTTAATGAAGATACTAATTTAAATGACTTGAAATCAACTTTTGAATCATGGGGACTTGATGTTTACCTTGATTCTAAAGAAAAGATTTTAGTCATCTCTGACACTAGTAATATTGAGATTTGGATTTCAAAAGAA

SEQ ID NO: 16748 - protein, 251 aa, Streptococcus agalactiae
MTLFHSLTFKHPVLRVNNRDLNIAFYQESLGFKLISEENAIAVFSAWQNKEASFIIEESPTYRTRAVNGTKKLAKIIVKSQDAKDIEKLLANGAQAIQVYQGQNGYAYETVSPEGDLFLLHAEDDLSQLVAIERPELEKKDDTTGLSNFAFQSISLNVPDAVKAEAFYDKVFAGKFPINLSFKEAQGQDLQIAPNETWDIEILECCVNEDTNLNDLKSTFESWGLDVYLDSKEKILVISDTSNIEIWISKE

SEQ ID NO: 16749 - protein, 950 aa, Streptococcus agalactiae
TTGTGCTCTCAATACCATAAAGTCAAATTGACAGTTTCACTATTTTTTTGTAGACTGGATATTATGAATGAAACACTACTATTACATGGGATTCAGCTTATTCTGATTATCGCCATGATTATCACTTTTTATCAGATTGTTAGACATATTAGGTCTCAAAAAATAAATCCTTAAACGATTTTCACTGGTTGGGATCGGTTTTGTAACTGATGCTCTCATACTCTTGGTATCGGCTCTTTTGCAACAACGACCACATTTTTTAAACTAACTAAGCTTGTTGAAGACGATCGTAAGATACCCGCAACAATGACAGCTGCACACGTACTCCAGTTTTGTTGCAGTCACTCTGTTTTATTTTTGTTGTAAAAGTAGAGGCTTTAACACTAATAACAATGGCTGGTGCAGCTTTTATTGGGGCTTTTGTTGGAGCTAAAATGACTAAAAATTGGCACGCTCCTACTGTTCAACGTATTCTAGGAACACTGCTCATCACAGCTGCTATTATTATGCTCTATCGTATGATCACTAACCCTGGCGCTGGTATTTCAGATTCAGTGCATGGTCTACACGGCATTTGGTTATTTGTTGGTATCGTCTTCAATTTTATTATTGGTGTATTAATGACTATGGGACTAGGTAATTATGCTCCCGAACTTATCTTCTTCTCCCTAATGGGACTGAGTCCTGCAGTTGCTATGCCTGTCATGATGCTAGATGCAGCTATGATAATGACAGCTTCTAGTACACAATTTATCAAGAGTGGTCGTGTTAATTGGAACGGCTTTGCCGGTCTGGTTACTGGGGGAATATTAGGCGTTATTGTCGCTGTTCTCTTCTTAACTAACCTTGATCTTAACAGCTTGAAAACACTGGTTGTAGGTATTGTTTTATTTACTGGAGCAATGTTAATACGTTCTTCCTTTAAAAAAACTATGCCCAAAAGTCATCAT

SEQ ID NO: 16750 - protein, 319 aa, Streptococcus agalactiae; identical to SEQ ID NO: 7870

SEQ ID NO: 16751 - protein, 825 aa, Streptococcus agalactiae
GTGAAGTATATCACAGAATTTATCGCAACCGCTTTTCTTATCATCTTAGGAAATGGGGCTGTAGCTAACGTTGACTTAAAAGGCACAAAAGGAAATAATTCAGGTTGGATTATTATTGCAATTGGTTATGGTTTAGGTGTTATGATGCCAGCGCTTATGTTTGGTAATGTCTCTGGAAACCATATTAACCCAGCTTTCACACTTGGATTGGCATTTTCAGGTCTTTTCCCTTGGGCACACGTTGGACAATACATTCTTGCACAAATTTTAGGAGCAATATTTGGACAGTTAGTTGTCGTTATGGTTTATCAACCTTACTTTGTTAAGACAGAAAATCCAAATCATGTTCTTGGATCATTTTCAACTATTTCTGCATTAGATGATGGACAGAAATCAAGTCGTAAAGCGGCTTACATTAATGGTTTCTTAAATGAATTCGTTGGTTCTTTTGTTCTTTTCTTTGGAGCTTTGGCTTTAACGAAGAACTATTTTGGTGTAGAACTTGTTGGTAAACTTGTTCAAGCTGGTTATGACCAAACGACAGCAGCGACAAGGATTTCACCATACGTAACTGGTTCACTTGCTGTAGCTCACTTAGGTATTGGTTTCTTGGTAATGACTCTAGTTGCTTCTTTAGGTGGATCGACTGGACCTGCATTGAACCCTGCGCGTGACCTTGGTCCACGTATTGTTCACCGCTTATTACCAAAACAAATTCTTGGACAAGCTAAAGAAGATTCAAAATGGTGGTATGCATGGGTGCCAGTTTTAGCACCAATCGTAGCAAGTATACTCGCTGTAGCCTTGTTCAAACTATTATATCTT

SEQ ID NO: 16752 - protein, 275 aa, Streptococcus agalactiae
MKYITEFIATAFLIILGNGAVANVDLKGTKGNNSGWIIIAIGYGLGVMMPALMFGNVSGNHINPAFTLGLAFSGLFPWAHVGQYILAQILGAIFGQLVVVMVYQPYFVKTENPNHVLGSFSTISALDDGQKSSRKAAYINGFLNEFVGSFVLFFGALALTKNYFGVELVGKLVQAGYDQTTAATRISPYVTGSLAVAHLGIGFLVMTLVASLGGSTGPALNPARDLGPRIVHRLLPKQILGQAKEDSKWWYAWVPVLAPIVASILAVALFKLLYL

SEQ ID NO: 16753 - protein, 450 aa, Streptococcus agalactiae
ATGACACAAAAATATGAGCGTATTCTTATTGCTATTGATGGGTCTTACGAGTCAGAATTGGCGGTAGAAAAAGGGATAAATGTTGCTCTTCGTAATGATGCTGAATTACTGCTAACGCATGTTATAGATGCTCACGCTTACCAAAGTGAGGGAGTCTTTAGTGACTATGTTTTTGATAGGCAAGAACAAGAGTCAGCAGATGTGCTAGCCTATTTTGAGAAATTAGCACATTCAAAAGGCCTTACAAAGATTAAAAAAATTACTGAAATCGGAAATCCTAAGACTCTTTTGGCAAAGGATATCCCCATAAGGGAAAAAGCAGATTTAATTATGGTAGGCGCAACAGGATTAAACACTTTTGAAAGCCTATTGATCGGCTCAACTTCAGAATACATTTTACGTCATTCGAAAGTTGATATGCTAGTCGTTCGTGATAGTAAGAAAACCTTA

SEQ ID NO: 16754 - protein, 150 aa, Streptococcus agalactiae
MTQKYERILIAIDGSYESELAVEKGINVALRNDAELLLTHVIDAHAYQSEGVFSDYVFDRQEQESADVLAYFEKLAHSKGLTKIKKITEIGNPKTLLAKDIPIREKADLIMVGATGLNTFESLLIGSTSEYILRHSKVDMLVVRDSKKTL

SEQ ID NO: 16755 - protein, 1200 aa, Streptococcus agalactiae
TTGGAAGACAAATTATTCAACAAACATTTTATAGGCATTACTATTTTAAACTTTATTGTTTATATGGTCTATTATTTGTTTACCGTTATCATAGCTTTTATTGCGACTAAAGAGTTAGGTGTTAGCACTAGCCAAGCAGGATTAGCAACGGGGATTTATATTGTAGGGACTTTGATTGCTCGTCTTATATTTGGTAAGCAATTAGAAGTTCTAGGACGTAAGTTAGTTTTACGTGGAGGGGCTATTTTTTACTTACTAACAACTTTAGCTTATTTTTATATGCCAAGTATCGGAGTAATGTATTTAGTTCGTTTCCTAAATGGTTTTGGTTATGGCGTCGTGTCAACAGCAACTAATACTATTGTAACAGCCTATATACCAGCTGATAAAAGAGGTGAGGGGATTAACTTTTACGGTCTATCAACAAGTTTAGCCGCAGCTATTGGTCCTTTTGTAGGAACATTTATGCTAGACAACCTTCATATTAACTTTAAAATGGTTATTGTATTATGTAGTATTTTAATTGCGATTGTAGTGTTGGGAGCATTTGTTTTCCCAGTCAAAAATATTACTTTAAATCCAGAACAGTTAGCTAAATCAAAATCATGGACTATTGATAGTTTCATTGAGAAAAAAGCAATTTTTATCACAATTATTGCATTTTTGATGGGTATCTCCTATGCTTCCGTGTTAGGTTTCCAAAAATTATATACAACAGAAATTAATTTGATGACAGTAGGAGCTTATTTCTTTATTGTTTATGCACTTGTCATCACTTTAACCAGACCATCTATGGGAAGATTAATGGACGCTAAGGGAGATAAGTGGGTGCTTTATCCAAGTTATCTGTTCTTAACTTTGGGACTTGCTTTATTAGGGAGTGCTATGGGAAGTGTTACCTACCTTCTATCAGGTGCTTTGATTGGTTTTGGTTATGGCACCTTTATGTCTTGTGGCCAAGCAGCATCAATCAAAGGTGTTGAGGAACATCGTTTCAATACAGCCATGTCAACTTACATGATAGGTCTTGATTTAGGGTTAGGTGCTGGACCTTACATTTTGGGACTTGTTAAAGATGGTTTTCTTGGAGCTGGTGTGCAATCCTTTAGAGAATTATTCTGGATAGCAGCGATTATTCCTGTTGTTTGTGGTATTCTATATTTCTTAAAATCATCTAGACAAGTTGAAACTAAAACTATA

SEQ ID NO: 16756 - protein, 400 aa, Streptococcus agalactiae; identical to SEQ ID NO: 7876

SEQ ID NO: 16757 - protein, 657 aa, Streptococcus agalactiae
ATGAATCATCAAATTTTACAAAATTACATTAATAGTCATAATCTTCCAATTATCGAAAAAGACTACCATAAATACCTTACATTTGAAAGTTTAGAAGAAGACTATACTTATATCCTAAAAGATGGTATTGTTAAACAAAGTGTTCTCTCTAAATATGGTACTGAGTTCAATCTGCGTTATGTGACAGGCTTAGAAATCACTTCTATCCTAAATACAGACTACTCCCAACACATGGGAGAACCTTACAACGTTCGAATCGAATCCGAAACTGCCCACTTTTACAAAGTACGTCGCTCTACCTTCCTAAAAGATATCAATAATGATATTGAACTGCAAGGATATGTGAAAGATTTCTATCATAACCGCCTTGAAAAATCTATGAAAAAAATGCAATGTATGCTCACTAATGGTCGAATTGGTGCTATCTCCACACAATTATATGACCTCAGTAAGATGTTTGGTGAAGAACGAGATAACGGTGATATCTATATTAATTTTGTTATCACGAACGAAGAACTTGGTAAATTTTGCGGAATATCCACAGGAAGTAGCGTGAGCCGCATTTTGAAACAACTAAAAGACGATCATATTATTCGTATTGAAAAACAACATATCATTATTACAAATGTTGAGAAATTAAAAGATCATATTGTATTT

SEQ ID NO: 16758 - protein, 219 aa, Streptococcus agalactiae; identical to SEQ ID NO: 3170

SEQ ID NO: 16759 - protein, 2281 aa, Streptococcus agalactiae
ATGCGTTATAATCAATTCAGCTACATTCCAACTAAACCTAACGAAGCTTTTGAAGAGCTCAAAGGACTAGGTTTTCCATTAAACAAAAAGAATTCTGATAAAGCTAATTTGGAAGCTTTTCTCAGACATTCTTTTTTAAATCAAACTGATACTGATTACGCTCTTAGTCTCCTTATCGTTGATGCAAAAACCGATGCTCTAACCTTTTTTAAATCAAATAGTGACTTAACACTAGAAAATTTACAATGGATTTATTTACAGTTATTAGGCTTTATCCCTTTTGTAGACTTTAAGACCCTAAAGCATTCTTACAAGATATTAACTTCCCAGTCTCATATGACAATATTTTTCAAAGTCTACATCACTTACTCGCCTGTCGTGGAAAATCTGGCAATACATTAATCGACCAATTAGTTGCTGATGGTTTACTTCATGCAGATAATCACTACCATTTTTTCAATGGGAAGTCTCTGGCCACTTTCAATACTAACCAATTGATTCGCGAAGTTGTCTATGTTGAAACATCCTTAGATACTATGTCTAGTGGTGAACATGATTTAGTAAAAGTTAACATTATCAGACCCACTACCGAGCATACTATCCCTACGATGATGACAGCTAGCCCCTATCATCAAGGTATCAATGATCCTGCCGCAGACCAAAAAACATACCAAATGGAGGGTGCGCTAGCAGTTAAACAACCTAAACACATACAAGTTGACACAAAACCATTTAAAGAAGAAGTAAAACATCCTTCAAAATTACCCATCAGCCCTGCAACTGAAAGCTTCACACACATTGACAGTTATAGTCTCAATGACTATTTTCTTTCTCGGGGTTTTGCTAATATATACGTTTCAGGTGTGGGTACTGCTGGCTCTACGGGTTTCATGACCAGTGGGGATTACCAACAAATACAAAGCTTTAAAGCAGTCATTGATTGGTTAAATGGTAAGGTTACTGCATTCACAAGTCATAAACGAGATAAACAAGTCAAGGCTAATTGGTCAAATGGCCTTGTAGCAACCACAGGTAAATCTTATCTTGGTACCATGTCAACTGGTTTAGCAACAACTGGCGTTGAGGGGCTGAAAGTCATTATCGCTGAAGCCGCAATCTCCACATGGTATGATTATTATCGAGAAAATGGGCTTGTGTGTAGTCCAGGCGGCTACCCCGGTGAAGATTTAGACGTTTTAACAGAATTAACATACTCACGAAACCTCTTAGCTGGTGATTACATCAAAAACAACGATTGCTATCAAGCATTGTTAAATGAACAATCAAAAGCAATTGACCGTCAAAGTGGGGATTACAACCAATACTGGCATGACCGTAATTACCTAACTCACGTCAATAATGTCAAAAGTCGAGTAGTTTACACTCATGGACTACAGGATTGGAATGTTAAGCCAAGACATGTCTATAAAGTTTTCAATGCATTGCCTCAAACCATCAAAAAACACCTTTTTTTACATCAAGGTCAACATGTGTATATGCATAATTGGCAGTCGATTGATTTTCGTGAAAGCATGAATGCCTTACTAAGCCAAGAACTACTTGGCATTGACAATCATTTCCAATTAGAAGAGGTCATTTGGCAAGATAATACTACTGAGCAAACTTGGCAAGTTTTAGATGCTTTCGGAGGAAACCATCAAGAGCAAATTGGTTTAGGTGATAGTAAAAAACTTATTGATAACCATTATGACAAAGAAGCCTTTGATACTTATTGTAAAGACTTCAATGTGTTCAAAAATGATCTTTTCAAGGGAAATAATAAAACCAATCAAATCACTATTAATCTTCCTCTAAAGAAAAATTATCTCCTGAATGGACAGTGCAAACTCCATCTACGTGTTAAAACTAGTGACAAAAAGGCCATTTTATCAGCCCAAATCTTAGACTATGGTCCTAAAAAACGATTCAAAGATACACCAACCATCACATTCTTAAACAGCCTTGATAATGGTAAAATTTTGCCAGAGAAGCTTTACGTGAACTCCCGTTTACTAAAGATCATTATCGTGTCATCAGTAAAGGTGTCTTGAACCTTCAAAATCGTACAGACTTACTTACAATTGAGGCTATCGAGCCAGAACAATGGTTTGATATCGAGTTTAGCCTCCAACCAAGTATATATCAATTGAGTAAAGGTGATAATCTAAGGATTATCCTTTATACAACTGATTTTGAACATACCATTCGAGATAATGCTAGTTACTCTATAACAGTAGATTTAAGTCAATCTTATTTAACTATCCCAACTAATCAAGGAAAT

SEQ ID NO: 16760 - protein, 761 aa, Streptococcus agalactiae
MRYNQFSYIPTKPNEAFEELKGLGFPLNKKNSDKANLEAFLRHSFLNQTDTDYALSLLIVDAKTDALTFFKSNSDLTLENLQWIYLQLLGFIPFVDFKDPKAFLQDINFPVSYDNIFQSLHHLLACRGKSGNTLIDQLVADGLLHADNHYHFFNGKSLATFNTNQLIREVVYVETSLDTMSSGEHDLVKVNIIRPTTEHTIPTMMTASPYHQGINDPAADQKTYQMEGALAVKQPKHIQVDTKPFKEEVKHPSKLPISPATESFTHIDSYSLNDYFLSRGFANIYVSGVGTAGSTGFMTSGDYQQIQSFKAVIDWLNGKVTAFTSHKRDKQVKANWSNGLVATTGKSYLGTMSTGLATTGVEGLKVIIAEAAISTWYDYYRENGLVCSPGGYPGEDLDVLTELTYSRNLLAGDYIKNNDCYQALLNEQSKAIDRQSGDYNQYWHDRNYLTHVNNVKSRVVYTHGLQDWNVKPRHVYKVFNALPQTIKKHLFLHQGQHVYMHNWQSIDFRESMNALLSQELLGIDNHFQLEEVIWQDNTTEQTWQVLDAFGGNHQEQIGLGDSKKLIDNHYDKEAFDTYCKDFNVFKNDLFKGNNKTNQITINLPLKKNYLLNGQCKLHLRVKTSDKKAILSAQILDYGPKKRFKDTPTITFLNSLDNGKNFAREALRELPFTKDHYRVISKGVLNLQNRTDLLTIEAIEPEQWFDIEFSLQPSIYQLSKGDNLRIILYTTDFEHTIRDNASYSITVDLSQSYLTIPTNQGN

SEQ ID NO: 16761 - protein, 357 aa, Streptococcus agalactiae
ATGAAACTTCTCACTAAAGAACGGTTTGATGATTCTCAACACTTTTGGTACCAGATCAATTTATTACAAGAGAGTAACTTCGGAGCAGTTTTTGACCATGATAATAAAAACATTCCACAGGTTGTTGCAACTATTGTTGATGATTTACAAGGTTCCGGAAGTTCGAATTATTTCTGGTATTTTGGCAATACTACTGATACTTCCATCCTTATGATTGCTCATTTAAATCGAAAATTCTATATTCAGGTTAATTTAAAGAACTTTGACTTTGCACTCAATTTAATAGCTATAAATAATTGGAAGAGTCTCCTCCAAACTCAACTCGAAGCTCTAAACGATACCCTAGCAATATTTCAA

SEQ ID NO: 16762 - protein, 119 aa, Streptococcus agalactiae
MKLLTKERFDDSQHFWYQINLLQESNFGAVFDHDNKNIPQVVATIVDDLQGSGSSNYFWYFGNTTDTSILMIAHLNRKFYIQVNLKNFDFALNLIAINNWKSLLQTQLEALNDTLAIFQ

SEQ ID NO: 16763 - protein, 978 aa, Streptococcus agalactiae
ATGTCATCTTATTGGAATAACTATCCTGAACTTAAAAAAAATATTGATGAAACCAATCAACTAATTCAAGAAAGAATACAGGTCAGAAATAAAGATATTGAAGCGGCGCTAAGCCAACTCACAGCTGCGGGAGGAAAACAGCTCAGACCAGCATTCTTTTACCTTTTTTCTCAACTTGGTAATAAGGAGAATCAAGATACTCAGCAACTAAAGAAAATCGCTGCTTCTTTAGAAATCCTTCACGTTGCTACATTAATCCATGATGATGTCATTGATGACTCACCACTAAGACGTGGAAATATGACCATTCAAAGCAAGTTTGGCAAAGACATCGCAGTTTACACTGGGGATTTACTTTTCACAGTCTTTTTCGATCTTATTTTAGAATCTATGGCTGATACACCATTTATGAGGATTAATGCAAAATCTATGCGTAAAATTCTCATGGGAGAATTGGACCAGATGCACCTTCGTTACAATCAACAACAAGGTATCCATCACTATTTACGTGCGATTTCAGGTAAGACAGCCGAACTCTTTAAATTAGCTAGCAAAGAAGGAGCTTACTTTGGTGGTGCAGAGAAGGAGGTTGTTCGTCTAGCAGGCCATATCGGATTTAACATTGGTATGACATTCCAAATTTTGGATGATATCCTGGATTATACTGCAGATAAAAAAACATTTAACAAGCCTGTCTTAGAGGATTTAGCACAAGGCATTTACAGCCTTCCTCTACTTCTTGCCATTGAAGAAAATCCTGATATTTTCAAACCTATTTTAGATAAAAAAACAGATATGGCTACTGAAGACATGGAAAAAATTGCTTATCTCGTCGTTTCCCATAGAGGTGTTGACAAAGCTCGCCATCTAGCTCGTAAATTTACTGAAAAAGCTATTAGTGACATAAATAAGCTACCCCAGAGCTCTGCAAAAAAACAGTTGCTACAATTAACTAATTACCTTTTAAAACGCAAAATT

SEQ ID NO: 16764 - protein, 326 aa, Streptococcus agalactiae; identical to SEQ ID NO: 3176

SEQ ID NO: 16765 - protein, 1746 aa, Streptococcus agalactiae
ATGTTTAAAATCCCTTTGTTTAAAGAATTAAAGACAGATCAATGGATAAAACCATTTTTCAAACAATATAAAGTTTCCTTAGTAATTGCTCTTTTCCTTGGTTTTATGACTTTCTTTTCTGCCAGTGCTCTTATGTTTAATTCGGGCTATCTGATTAGTAAGTCAGCTTCACTACCGAGTAATATTCTTCTAGTATATGTTCCAATTGTACTAACACGTGCTTTTGGCATTGGACGTCCTGTTTTTCGTTATATAGAACGCCTAACGAGTCACAATTGGGTATTACGAATGACTTCACAGCTGCGCTTGAAGCTTTACCATTCCTTAGAAAGCAATGCTATCTTTATGAAGCGTGATTTTCGTTTAGGAGATGTTATGGGGCTTTTAGCGGAGGATATTAATTATTTGCAAAATTTGTATCTTAGGACAATATTTCCAACGATTATAGCGTGGATATTATATAGCTTTATTATTATTGCAACAGGCTTCTTTTCTCTATGGTTTGCTTTAATGATGTTGCTTTATTTAGCTATTATGATTTTTCTTTTTCCACTTTGGTCGATTTTAGCTAATGGTGCTCGTCAGACTCGTGAAAAAGAATTAAAAAATCATCTTTATACTGATTTGACGGATAATGTCTTAGGTATTTCAGACTGGATTTTTAGTCAACGTGGTCAAGAGTACGTCGCCTTGCATGAGCGTTCGGAAAGTGAACTCATGGCTGTTCAGAAAAAAATTCGTTCCTTTGATAATCGTAGAGCTCTTATTGTGGAATTAGTTTTTGGCTTTCTAGCTATTTTGGTTATTATTTGGGCTAGTAATCAGTTTATTGGTCACAGAGGTGGCGAAGCTAACTGGATTGCAGCATTTGTTCTAACAGTATTTCCCTTGTCAGAGGCATTTGCTGGTTTGTCTGCTGCTGCTCAAGAAACAAATAAATATTCTGATTCAATTCATCGTCTTAATGAATTATCAGAAACGTATTTTGAAACAACTCAAAATCAGTTGCCTAATAAGCCATACGATTTTTCCGTCAAGAATTTAAGTTTCCAGTATAAGCCACAAGAGAAATGGGTTTTGCATCATTTAGATTTGGATATTAAAGAAGGAGAAAAAATTGCTATTTTAGGGCGTAGTGGTTCTGGCAAGAGTACCTTAGCCAGTCTACTTCGTGGCGACTTGAAAGCAAGTCAAGGGGAGATTACCCTAGGCGGTGCTGATGTTTCAATAGTTGGTGATTGCATTTCTAACTATATTGGAGTGATACAACAAGCGCCCTACCTTTTTAATACAACCCTGCTAAATAACATTCGCATTGGAAACCAAGATGCTAGTGAAGAAGATGTATGGAAAGTTCTTGAACGAGTTGGATTGAAAGAGATGGTCACTGATTTATCAGATGGTCTCTATACAATGGTTGATGAAGCTGGACTTAGGTTTTCAGGTGGCGAAAGGCATAGAATTGCTTTGGCTAGAATCTTACTAAAAGATGTCCCAATTGTTATCTTAGATGAGCCAACTGTTGGACTTGATCCTATTACTGAACAAGCCTTACTAAGGGTATTTATGAAAGAATTGGAAGGTAAGACCTTAGTTTGGATTACACATCACTTAAAAGGTATTGAACATGCTGATCGTATCTTATTTATAGAAAATGGGCAATTAGAGTTGGAAGGTTCTCCTCAAGAATTGTCTCAAAGTAGCCAACGTTACCGTCAGCTGAAAGCCGCTGATGATGGTGATCTA

SEQ ID NO: 16766 - protein, 582 aa, Streptococcus agalactiae
MFKIPLFKELKTDQWIKPFFKQYKVSLVIALFLGFMTFFSASALMFNSGYLISKSASLPSNILLVYVPIVLTRAFGIGRPVFRYIERLTSHNWVLRMTSQLRLKLYHSLESNAIFMKRDFRLGDVMGLLAEDINYLQNLYLRTIFPTIIAWILYSFIIIATGFFSLWFALMMLLYLAIMIFLFPLWSILANGARQTREKELKNHLYTDLTDNVLGISDWIFSQRGQEYVALHERSESELMAVQKKIRSFDNRRALIVELVFGFLAILVIIWASNQFIGHRGGEANWIAAFVLTVFPLSEAFAGLSAAAQETNKYSDSIHRLNELSETYFETTQNQLPNKPYDFSVKNLSFQYKPQEKWVLHHLDLDIKEGEKIAILGRSGSGKSTLASLLRGDLKASQGEITLGGADVSIVGDCISNYIGVIQQAPYLFNTTLLNNIRIGNQDASEEDVWKVLERVGLKEMVTDLSDGLYTMVDEAGLRFSGGERHRIALARILLKDVPIVILDEPTVGLDPITEQALLRVFMKELEGKTLVWITHHLKGIEHADRILFIENGQLELEGSPQELSQSSQRYRQLKAADDGDL

SEQ ID NO: 16767 - protein, 1716 aa, Streptococcus agalactiae
ATGCTAGATAAAGCGGTTATGCGCTTGTCAGGTATTCATAAGTTGTTAGGATTGCTTGCGGGACTTGATGTTCTTCAAGCAATCTTTATTATCGGACAAGCTTATTATTTGAGTCTTTCTATAACTGGTTTGTGGGAAGGGCAAAAACTTTCTTCTCAAACGGTTTATGTTTTGTTATTTATGGTCTCATATTTAGGCCGTCATGTTATTGATTACATCAAAAATAGAAAACTTGATGACTTTTCAACAGCACAATCTAGTCTTTTGAGACGTCAATTATTAGATAAGTTATTTGATCTAGGTCCTAAAGTCGTTCAAGAACAAGGAACTGGTAATGTTGTTACAATGGCATTAGATGGCGTTTCTTTAGTTGAAAATTATTTACGTTTAGTCTTGAATAAGATGATTAACATGTCTATTATCCCATGGATTATTCTAGCTTATATTTTCTATTTAGATATTGAATCAGGTGCAATTTTACTTATCGTTTTTCCTTTAATTATCATCTTTATGATTATTTTAGGCTATGCGGCTCAAGCTAAAGCAGATAAACAATATGAATCCTATCAAGTACTTTCTAATCATTTTTTAGATTCATTACGAGGCATTGATACTCTCAAATATTTTGGTCTTAGTAAACGTTATGGTAAAAGCATTTATCAAACTAGTGAATCTTTTCGTAAAGCAACAATGAGTACTTTGAAAATTGGTATTTTATCAACGTTTGCTTTAGACTTTTTTACAACTTTATCCATTGCTATCGTTGCTGTTTTTCTAGGTTTACGATTATTAAATGAGCAGATTTACCTTTTACCGGCTTTAACAATTTTGATTTTATCCCCTGAATACTTTTTACCCGTAAGAGATTTTTCTAGTGATTATCATGCAACGTTAGACGGGAAAAATGCATTTCAAGCGATTCAAAAAGTTCTAAACAAAACTGGTATTAAAGGTGAGCAATTAGTCATAGATGATTGGTCTAAAGAGAGTCGTTTGGATTTAGAAAACATTGCTATTGCGTACGACCAAAAACGTGTTGTTGAGGATGTAACCTTACGATTTAGAGGACATCAAAAGGTTGCTTTAGTAGGAGTTAGTGGTTCAGGTAAGTCTAGCTTAATTAACCTTCTGAGTGGTTTTTTAGGGCCTGATAATGGTTCTTTAAAAGTGGATGGTAGAGAAGTGACTAACCTTGATCAAGAAGATTGGCATAAACAGATGATCTATATTCCTCAAACTCCTTATGTTTTTGAAATGTCATTACGTGATAATATTACCTTCTATACTCCCAATGCTAGTGACGAAGAGGTGGTAAGAGCGATTCATATGGTAGGTTTAGATAGCTTGCTAAGCGAGTTACCTGACGGTTTAGAAACGCGTATTGGTAATGGAGCGCGTCCGCTTAGTGGAGGACAAGCCCAGCGTATAGCTCTGGCTCGTGCTTTTCTTGATCAAAATCGTCGTATTATGGTTTTTGATGAACCAACTGCTCATTTAGATATTGAAACAGAGTTAGAATTAAAAGAGAAAATGTTGCCACTGATGTCAGATCGTTTAGTTATCTTTGCAACTCATCGTCTTCACTGGTTGAACCAAATGGATGTTATAGTCGTTATGGAGAAGGGGAGAGTTGCAGAAGTAGGCTCTTATCAGGAATTATTAGCTAAAAAAGGATATCTCTATCAACTGAAGCATGCTATGGGAGGAAATGATGTT

SEQ ID NO: 16768 - protein, 572 aa, Streptococcus agalactiae
MLDKAVMRLSGIHKLLGLLAGLDVLQAIFIIGQAYYLSLSITGLWEGQKLSSQTVYVLLFMVSYLGRHVIDYIKNRKLDDFSTAQSSLLRRQLLDKLFDLGPKVVQEQGTGNVVTMALDGVSLVENYLRLVLNKMINMSIIPWIILAYIFYLDIESGAILLIVFPLIIIFMIILGYAAQAKADKQYESYQVLSNHFLDSLRGIDTLKYFGLSKRYGKSIYQTSESFRKATMSTLKIGILSTFALDFFTTLSIAIVAVFLGLRLLNEQIYLLPALTILILSPEYFLPVRDFSSDYHATLDGKNAFQAIQKVLNKTGIKGEQLVIDDWSKESRLDLENIAIAYDQKRVVEDVTLRFRGHQKVALVGVSGSGKSSLINLLSGFLGPDNGSLKVDGREVTNLDQEDWHKQMIYIPQTPYVFEMSLRDNITFYTPNASDEEVVRAIHMVGLDSLLSELPDGLETRIGNGARPLSGGQAQRIALARAFLDQNRRIMVFDEPTAHLDIETELELKEKMLPLMSDRLVIFATHRLHWLNQMDVIVVMEKGRVAEVGSYQELLAKKGYLYQLKHAMGGNDV

SEQ ID NO: 16769 - protein, 1017 aa, Streptococcus agalactiae
ATGAGTGCTTTACAATTCTTTTGGTTTTTCCTAATCGGCCTCCTATTTTCAGGATTCTTCTTCCTTGAAGGATTCGACTTTGGGGTTGGGATGGCTGTTCAAACTTTAACACATAATGAGCATGAAAAAGATCAAGTAGTAGAAACCATTGGCCCAGTTTGGGATGGTAATGAAGTTTGGCTTCTTACCGGTGGTGGAGCAATGTTTGCTTCTTTTCCATACTGGTATGCTTCACTATTTAGTGGTTACTATTTGATTCTCCTTACGATTCTCTTTGGATTAATTATTCGTGGTGTTTCCTTCGAATTTAGACATAAAGTTCCTGCAGAGAAAAAGCAGTTTTGGAACTGGACCTTAACAATTGGTTCCGCTATTGTTCCATTCTTCTTTGGGATTATGTTTATAAGTTTGATTCAAGGTATGCCACTTGATGCCAGTGGTAACTTATCAGCTCAATTCAGTGATTACTTTAATATATTCTCGTTGGTGGGTGGAGTTGCAATGGTATTGCTAGCCTATCTTCATGGTTTAAATTACATTGCATTGAAGACAGAAGGGCCAATTAGAGAGCGTGCCCGTAATTATGCTCAGTTGCTTTATTGGGTACTCTATCTTGGTTTAGCCTTGTTTGCAGTTCTCTTGTATTTCAAGACAGATTTCTTTAGCAATCATCCGATAGTTACGACAATTATGGTTTTGGTTATTGTTGTATTAGCTGTATTAGCGCATGCTTCAACTTTTAAAGGAGCAGAGATGACAGCATTTTTAGCGAGTGGTCTCAGTCTTGTTTCAGTGGTTGTTCTGTTGTTCCAAGGTCTATTCCCACGAGTTATGATTTCATCAATTAGCCCTAAATATGATTTGCTGATTCAAAATGCATCCTCAACGCCATATACTTTAAAAGTAATGTCGATTGTCGCAATTACTCTAGTTCCCTTTGTTCTAGCTTATACAGCATGGGCATATTATATCTTTAGAAAACGTATTACCTTGCCAGTGATTGTGACAGGAGAAAAA

SEQ ID NO: 16770 - protein, 339 aa, Streptococcus agalactiae; identical to SEQ ID NO: 3184

SEQ ID NO: 16771 - protein, 1425 aa, Streptococcus agalactiae
ATGACAATTGAAACTTTAGCTCGTTTTCAATTTGCGATGACTACAGTTTTCCACTTTTTCTTTGTACCATTTACAATTGGTACATGCCTAGTGGTTGCTATTATGGAGACAATGTATGTTATCACAAAAAATGAAGAGTATAAAAAATTGACAAAATTTTGGGGTAATATCATGCTCCTTAGTTTTGCGGTTGGTGTTGTGACAGGTATCATTCAAGAGTTCCAATTTGGAATGAACTGGTCAGACTATTCACGTTTCGTAGGTGATATTTTTGGAGCTCCATTGGCTATTGAAGCTTTATTAGCTTTCTTTATGGAATCTACTTTCCTTGGTTTATGGATGTTTACATGGGATAACAAAAAAATTAGTAAAAAATTACATGTGACATTCATTTGGCTAGTGGTTTTTGGCTCATTAATGTCAGCGATGTGGATTCTTACTGCTAATAGCTTCATGCAACATCCTGTTGGTTATGAAGTTGTAAACGGTAGAGCGCAAATGACTGATTTTCTTGCACTTGTAAAAAATCCACAGTTCTTCTATGAATTTACCCATGTTATTTTTGGTGCCATTACGATGGGTGGTACAGTGGTTGCTGGTATGTCAGCCTTCCGCCTCTTAAAATCAGAACAGCTGAAAGATACAACGGTTGAACTTTATAAGAAATCGGTTCGTATTGGTTTAGTAGTAGCACTTCTTGGTTCAATTTCAGTTATGGGAGTTGGGGATTTACAAATGAAAGCCTTGATTCACGATCAACCAATGAAATTTGCTGCTATGGAAGGTGATTATGAAGATTCGGGTGATCCTGCAGCTTGGAGTGTAGTTGCTTGGGCAAATGAAGCAGAACACAAACAAGTTTTTGGGATTAAGATTCCTTATATGTTGAGTATTTTATCTTACGGGAAACCATCTGGTTCTGTGAAAGGTATGGATACAGCTAATAAAGAATTGGTTGCTAAGTATGGTAAAGATAACTACTATCCAATGGTTAACCTACTTTTCTATGGTTTCCGTACAATGGCGGCGATGGGAACAGCTATTATGGGTGTTTCTGTTTTAGGACTCTTTTTAACTCGTAAGAAAAAACCAATTCTTTATAAACACAAATGGATGCTTTGGATTGTTGCTTTAACAACCTTTGCACCATTCTTAGCCAATACATTTGGTTGGATTGTGACAGAACAAGGACGATACCCTTGGACTGTCTATGGTCTTTTCAAGATTAAGGACTCTGTCTCTCCAAACGTTTCAGTTGCATCATTATTTGTTTCCAATACTGTGTATTTCTTGTTGTTTGGTGGTTTAGCGGTGATGATGATAAGCCTAACAATAAGAGAATTGAAGAAAGGGCCAGAGTATGAAGATGAACACGGACATCATGGTGCATATACTTCAATTGATCCCTTTGAGAAAGGAGCATAC

SEQ ID NO: 16772 - protein, 475 aa, Streptococcus agalactiae; identical to SEQ ID NO: 7900

SEQ ID NO: 16773 - protein, 1206 aa, Streptococcus agalactiae
ATGAAAGAAATCCTAGTTTTAGGTGCTGGTTATGCCGGTTTGAAAGCAGTTCGTAATTTACAAAAACAATCAGGTGATTTTCATATTACCCTTGTTGACATGAATGATTATCACTACGAAGCTACAGAATTACATGAAGTAGCTGCAGGCTCTCAGCCAAAAGAAAAAATTACATTCCCAATTAAGGATGTTATCAACACTAATAAGGTTAACTTCATGCAAGATGAGGTGCTTAGAGTCGATGCTGAAAATAAAACAGTAACAGTTAAAAATAACGGTGAACTCCATTATGATTATGTCGTAGTTGCCTTAGGCTTTGTATCTGAAACTTTTGGCATCAAGGGTGCTATGGAGAATGCTTTGCAGATGACCAATATTTCGCAAGCAGAAAACATCCATAATCACATTGTTAATACAATGAAGTTGTACCGTGAGACAAAAGATGAAAATCTTCTCAAACTCTTAGTATGTGGTGCTGGTTTTACAGGTATTGAGTTAGCCGGAGCTATGGTTGATGAGCGACCAAAATATGCTGCTTTAGCGGGTGTAAAACCTGAACAAATTGAAATTATTTGTGTAGAGGCAGCAACTCGCATCCTACCAATGTTTGATGATGAATTAGCGCAATATGGTGTCAACTTAATTAAGGATTTAGGTATTAATTTGATGCTTGGAAGTATGATTAAGGAAATCAAACCGGGTGAAGTTGTTTATGGTACTAGTAAAGAGGATGAAGAACTCAAATCTATTACCGCAGGTACTATCATTTGGACAACAGGTGTTAGTGGAAGTCCGGTTATGGGAGAATCAGGATTTGATCAACGTCGTGGACGTGTAATGGTCAACAGTGATTTGCGTGATCCAAAATACGATAATGTTTATGTTATCGGTGATGTGTCTGCATTTATGGACACTGAGTCTGGTCGCCCATTCCCAACAACAGCTCAAATTGCAACTCGTATGGGAGCTCATGTTGCTAAAAACCTTTTACATCAAATCAAAGGTGAAGCTACAGAAGACTTTTCGTATAGTCCGCAAGGCACAGTTGCTTCAGTAGGAAATACGCATGGACTTGGTGTTGTTGGAAAAACTAAAATTAAAAAATACCCTGCGTCGGTTATGAAGAAGATTATCATGAACAAATCACTTGTTGATATGGGTGGACTTAAAGAACTTCTAGCTAAGGGACGTTTTGATTTATATCAT

SEQ ID NO: 16774 - protein, 402 aa, Streptococcus agalactiae
MKEILVLGAGYAGLKAVRNLQKQSGDFHITLVDMNDYHYEATELHEVAAGSQPKEKITFPIKDVINTNKVNFMQDEVLRVDAENKTVTVKNNGELHYDYVVVALGFVSETFGIKGAMENALQMTNISQAENIHNHIVNTMKLYRETKDENLLKLLVCGAGFTGIELAGAMVDERPKYAALAGVKPEQIEIICVEAATRILPMFDDELAQYGVNLIKDLGINLMLGSMIKEIKPGEVVYGTSKEDEELKSITAGTIIWTTGVSGSPVMGESGFDQRRGRVMVNSDLRDPKYDNVYVIGDVSAFMDTESGRPFPTTAQIATRMGAHVAKNLLHQIKGEATEDFSYSPQGTVASVGNTHGLGVVGKTKIKKYPASVMKKIIMNKSLVDMGGLKELLAKGRFDLYH

SEQ ID NO: 16775 - protein, 897 aa, Streptococcus agalactiae; identical to SEQ ID NO: 12113

SEQ ID NO: 16776 - protein, 299 aa, Streptococcus agalactiae; identical to SEQ ID NO: 12114

SEQ ID NO: 16777 - protein, 603 aa, Streptococcus agalactiae
ATGAACAAACTTATTACAGAAAAAAAAGTCAACAACGTCTCAACTGCTAACTATTTGAAACTTGGTCTTGTCTCAGCAATGTTTGCTGGAGGAGCATTCGTAGCTCTTGGTTCTACACAAGGTGTTTCAGCTTCAACTTTCACAGCACCGCAAGCAACACCTCCAAAAGCAGAACGTCAGTTAACAGATTCAGAACTTTATGAACGTGCCCAAAAACAAGTATTGCCAAGATATATCCAAGGTTCTCTCTCAGGTATCCTTAACCAGCATTCAACACTTTACAAACAACAAAATGCAGCAGTGACACCGCAAGTATCAAGCCCCAAATCAGAACGTCAGTTAACAGATTCAGAACTTTATGAAAGTGCCCAAAAACAAGTATTACCAAAATATATCCAAGGTTCTCTCTCAGGTATCCTTAACCAGCATTCAACACTTTACAAACAACAAAATGCAGCAGTGACACCGCAAGTATCAAGCCCCAAATCAGAACGTCAGTTAACAGATTCAGAAATCTATGAACGTGCTCAAAAACAAGTATTGCCAAATTATATTCAAGGTTCTCTCTCAGGTATCCTCAACCAACATTCAACTTTAAATGCT

SEQ ID NO: 16778 - protein, 201 aa, Streptococcus agalactiae
MNKLITEKKVNNVSTANYLKLGLVSAMFAGGAFVALGSTQGVSASTFTAPQATPPKAERQLTDSELYERAQKQVLPRYIQGSLSGILNQHSTLYKQQNAAVTPQVSSPKSERQLTDSELYESAQKQVLPKYIQGSLSGILNQHSTLYKQQNAAVTPQVSSPKSERQLTDSEIYERAQKQVLPNYIQGSLSGILNQHSTLNA

SEQ ID NO: 16779 - protein, 105 aa, Streptococcus agalactiae
ATGCTTGTTTTATTAAGTGTTTATACTAAAGATAATGGTATGGGATATCAAGAAGAATTATGTATGCATAAAAGGTTAAAATGGTTAGTGGCAGCTATGTGTTTA

SEQ ID NO: 16780 - protein, 35 aa, Streptococcus agalactiae; identical to SEQ ID NO: 3194

SEQ ID NO: 16781 - protein, 297 aa, Streptococcus agalactiae
ATGATGAATATGCAAAATATGATGCGTCAAGCACAAAAGCTTCAAAAACAAATGGAACAAACGCAAGCTGATTTAGCAGCTAGCCAGTTTACTGGAAAATCTGCTCAAGAGCTCGTTACCGTGACATTTACAGGCGATAAAAAGCTAATTTCAATTGATTACAAAGAAGCTGTGGTAGACCCTGAAGATATTGAAACACTACAAGACATGACAACTCAAGCTATCAATGACGCTTTAAGCCAAGTTGACGATGCTACAAAAAAAATTATGGGAGCATTTGCGGGTAAAATGCCATTC

SEQ ID NO: 16782 - protein, 99 aa, Streptococcus agalactiae
MMNMQNMMRQAQKLQKQMEQTQADLAASQFTGKSAQELVTVTFTGDKKLISIDYKEAVVDPEDIETLQDMTTQAINDALSQVDDATKKIMGAFAGKMPF

SEQ ID NO: 16783 - protein, 1188 aa, Streptococcus agalactiae
ATGGTTATGGATAGTCTAATCATAAAACAGTTGATTAAGAGTACATTTGATATACCCTTACAAGTCACTTATCCAAATGGGAATATTGAAACTTATAATGGTAGCAATCCCCACGTCAAACTTAAACTAAACAAAAATTTCTCCGTCTCGGAGCTATCAAAAGACCCTTCCATAGTATTGGGTGAAGCTGTTATGGATGGAGACATTGAAATTTATGGTTCTATACAAGAATTAATTTTATCAGCTTACCGCTGTGGAGACAGCTTTCTACGTAATAGTAAATTTAGCAAATTGATTCCTAAACAATTTCATGATAAAAAACACAGTAAATCCGACATTCAAAAGCATTATGACATCGGAAATGATTTCTATAAACTGTGGCTTGATGATACCATGACTTATTCATGCGCCTATTTTAAACATGAAAATGATAGTCTAGAGCAAGCTCAACTAAACAAAGTACACCATATTCTTAATAAATTAAATGCTCAGCCGGGAGGGAAATTACTAGACATCGGTTGTGGCTGGGGGACACTTATCATTACTGCTGCTAAAGAATATGGCTTAAATGCGACAGGTATCACCTTAAGTGAAGAGCAGGCTTCTTTCATTACTAAGCGTATCAAGGAAGAAGGGTTGGAAAATAAAGTAACAGTCCTCATTAAAGATTATCGTGACATTCGTGAAACATACGATTATATCACTAGTGTTGGTATGTTTGAACATGTAGGAAAAGAAAATTTATCTCAATACTTCCAAACCATTTCTAAAAGACTCAACATCAATGGTCTAGCTCTTATTCATGGTATTACTGGACAAGTGGGTGGTAATCATGGTAGTGGAACTAATTCTTGGATTAATAAGTATATCTTCCCAGGAGGATATATCCCTCGTTTAACTGAAAATTTAAATCATATAGCTAGTGCTGGACTTCAAATTGCTGACTTAGAACCGCTTCGTCGTCACTATCAAAAGACTCTCGAATTATGGACAAAAAATTTCCACAATGCCCTTCCTGAAGTTCAGAAAACTCATGATAAGCGTTTTATCAATATGTGGGACCTCTATCTTCAATCTTGTGCGGCCTCTTTTGAATCTGGCAATATTGATATTTTTCAATACTTGCTTTCAAAAGGTGTTTCAAAAGACACTATGCCTATGACACGCGATTATATGTATTCTGCTAAT

SEQ ID NO: 16784 - protein, 396 aa, Streptococcus agalactiae
MVMDSLIIKQLIKSTFDIPLQVTYPNGNIETYNGSNPHVKLKLNKNFSVSELSKDPSIVLGEAVMDGDIEIYGSIQELILSAYRCGDSFLRNSKFSKLIPKQFHDKKHSKSDIQKHYDIGNDFYKLWLDDTMTYSCAYFKHENDSLEQAQLNKVHHILNKLNAQPGGKLLDIGCGWGTLIITAAKEYGLNATGITLSEEQASFITKRIKEEGLENKVTVLIKDYRDIRETYDYITSVGMFEHVGKENLSQYFQTISKRLNINGLALIHGITGQVGGNHGSGTNSWINKYIFPGGYIPRLTENLNHIASAGLQIADLEPLRRHYQKTLELWTKNFHNALPEVQKTHDKRFINMWDLYLQSCAASFESGNIDIFQYLLSKGVSKDTMPMTRDYMYSAN

SEQ ID NO: 16785 - protein, 345 aa, Streptococcus agalactiae
GTGCTTATGGAAGAAAACAAAAGAAAATGGGGTATACTACAAAAAAGCATAGTGCTACAAGTCGTTATGATTATTATGGTCTATATTACGTTAATAATAGCAGCAGTTTCTCTAAATCAAAGATGGCTTATGTGGATAGCAGTAACAGTATTCTTAATAGCTATGAATGGTATGGTTTGGTATTTTAAACAACAGGTTGTTTATCTTTGTCCAAATTGTCATCAAACCTTTACACCGACATATCAAGCATTTAATCTAGCGAAACATACCCCTAAGACGCGAAAAGTATTCTGTCCACATTGTCACCAAAAGTCACATTGTATAGAGTTAGCCAGAGAAGAACGT

SEQ ID NO: 16786 - protein, 115 aa, Streptococcus agalactiae
MLMEENKRKWGILQKSIVLQVVMIIMVYITLIIAAVSLNQRWLMWIAVTVFLIAMNGMVWYFKQQVVYLCPNCHQTFTPTYQAFNLAKHTPKTRKVFCPHCHQKSHCIELAREER

SEQ ID NO: 16787 - protein, 258 aa, Streptococcus agalactiae
ATGTCAGAAAAATATTCCACTGGTGACTTAGCTAAAGAAGCAGGAGTTACTGTTCGTACTGTTCAGTACTATGACAAAAGAGGAATTTTATCCCCATCAGAACTATCTGAAGGAGGTAGGAGGGTTTATAGTATTGCTGATTTAGAAAAGCTTAGACAAATTATTTATTTACGAGATTTAGATTTTTCAATTGATAATATCAAAAATCTATTTACTGAAGACAATGCTAGCCAGATTTTAGAGCTTTTTTTACAAGTG

SEQ ID NO: 16788 - protein, 86 aa, Streptococcus agalactiae
MSEKYSTGDLAKEAGVTVRTVQYYDKRGILSPSELSEGGRRVYSIADLEKLRQIIYLRDLDFSIDNIKNLFTEDNASQILELFLQV

SEQ ID NO: 16789 - protein, 585 aa, Streptococcus agalactiae
ATGAAACAATTACAAGAATATATAGCTTTTGATTTAGAGTTTAACACGGTTGGTGAGCATAGCCATATTATTCAAGTGTCGGCCGTTAAATATTCTAATCATCAAGAGATTGCTTTATTTGATACTTATGTTCACACAAAAGTTCCATTACAAAGCTTTATTAATGGTTTAACAGGTATTACAGCTAGAGATATTATAGGGGCTCCTAAAATTGAGATAGTTTTGACAGACTTTCAGAGTTTTGTTGGAGATACACCACTGATTGGTTATAATGGGTATAAATCGGATTTACCCCTTTTAGTTGAAAATGGTTTGGATCTAACTAGTCAATATCAGGTGGACTTATATGATGAAGCTTTTGTGAGACGCAGTACAGATTTAAATGGTATTGTCAACCTTAAATTGACTACTGTTGCTGACTTTTTAGGAATAAAGGGTAAAGCACATAATAGCTTAGAGGATGCCCGTATGACTGCGCGTGTTTATGAAAAATTTCTGGACTTGGATGAAAATAAAATCTATTTAAAACAGCAAAAAGAGGTAGCAGTTGATAGCCCATTTGCGACTTTAGGAAATTTGTTTGAT

SEQ ID NO: 16790 - protein, 195 aa, Streptococcus agalactiae; identical to SEQ ID NO: 3202

SEQ ID NO: 16791 - protein, 534 aa, Streptococcus agalactiae
ATGACAGTTGAAAAGACGGTTAGTGAATTAGCTGAAATTTTAGGGGTTAGTCGTCAAGCGATGAATAACAGAGTTAAAACACTCCCTGAAGAATGTGTGGAAAAGAATAGTAAAGGCGTTACAGTTGTTAATCGTGATGGCTTGATTAAATTGGAAGAAATCTATAAAAAAACTATTTTGGAAGAGGAACCAATTGACGAAGAAGCATCAAGACGAGAACTTTTAGAAATTCTCGTTGATGAGAAGAATACTGAAATCACACGTTTATATGAACAGTTAAAAGCAAAAGATATTCAGATTGCTTCAAAAGACGAGCAGTTACATGTAAAAGATATTCAAATAGCAGAGAAAGATAAGCAATTAGATCAACAACAGCAATTGACTTTAACTGCTATGGAAGATACGCAACGTCTGCAACTTGAGTTAAATGAAGCTAAAGCAGAGGTTGAGGAGATTCAAGAAGCCAAAGAAGAAAAAATTCAAGAATTAGAAGCTGTTAAAAAAAGTTTCTTTGGACGTTTCTTCAATAAAAAA

SEQ ID NO: 16792 - protein, 178 aa, Streptococcus agalactiae; identical to SEQ ID NO: 3204

SEQ ID NO: 16793 - protein, 355 aa, Streptococcus agalactiae
ATGAAGCATTATGACACAATAATTATAGGTGGTGGACCTGCTGGAATGATGGCAGCTATTTCCTCAAATTTTTACGGCAACAAAACACTTCTTATTGAGAAAAATAAACGTTTAGGCAAAAAACTAGCTGGAACAGGTGGTGGCCGCTGTAATGTTACCAATAATGGAAACCTTGATGAGCTCTTAGCTGGTATACCTGGAAATGGCCGTTTCCTATATAGCGTCTTCTCACAATTTGATAACCATGATATTATTAACTTCTTTCAAGACAACGGCGTCACACTTAAAGAAGAGATCATGGGCGTATGTCCCTACTACTGATAAATCTCGTACTATCATTAACGCCCTTNNNNNT

SEQ ID NO: 16794 - protein, 119 aa, Streptococcus agalactiae
  VARIANT 104, 118, 119: Xaa = Any Amino Acid
MKHYDTIIIGGGPAGMMAAISSNFYGNKTLLIEKNKRLGKKLAGTGGGRCNVTNNGNLDELLAGIPGNGRFLYSVFSQFDNHDIINFFQDNGVTLKEEDHGRMXPTTDKSRTIINALXX

SEQ ID NO: 16795 - protein, 204 aa, Streptococcus agalactiae
TTGTTGGCAGTTCTCTCGTATTTCAAGACAGATTTCTTTAGCAATCATCCGATAGTTCCGACAATTATGGTTTTGGTTATTGTTGTATTAGCTGTATTAGCGCATGCTTCAGCTTTTAAAGGAGCAGAGATGACAGCATTTGTAGCGAGTGGTCTCAGTCTTGTTTCAGTGGTTGTTGTGTTGTTCCAAGNNNNNTTAATTAAT

SEQ ID NO: 16796 - protein, 68 aa, Streptococcus agalactiae
  VARIANT 64, 65: Xaa = Any Amino Acid
MLAVLSYFKTDFFSNHPIVPTIMVLVIVVLAVLAHASAFKGAEMTAFVASGLSLVSVVVVLFQXXLIN

SEQ ID NO: 16797 - protein, 783 aa, Streptococcus agalactiae
ATGACTGACACAGAAGTTGTCTCTGTCAAAAAGATAGGAGATTCATTCTATATCAAAACTAAAGATACACAGTTCGCATCCGATAAACTTATCGTAACCTGTGGTAAATCCTATCCGTCTACAGGTTCTACTGGTTTCGGTCATGACATTGCTCGTCACTTTAAATTAGAAGTCACAGATATGGAAGCCGCCGAAAGCCCTCTTTTAACTGATTTTCCCCATAAAAAACTACAAGGTATCTCCTTAGATGATGTCACTTTGTCATTTGAAAAGCATATTATTACACACGATCTTCTCTTTACTCATTTTGGATTATCAGGACCAGCAGCCTTGCGAATTTCTAGCTTTGTCAAAGGCGGAGAAACTATATACCTAGATGTTTTGCCCAATATCTCTGTTAAAGAATTGGAAATACACTTCCAAAATGAAAGAGAAAAATCTTTGAAAAACGCTCTTAAAATACTTCTTCCTGAGCGTTTAGCTGAATTTTACGCTGAAGACTTACCCGAAAAAGTAAAACAAGTATCTGTAAAAGACTTAGAAATGTTAATTCAAAAACTTAAAAAACTTCCTATTTTAGTAACTGGCAAGATGTCTCTAGCAAAATCCTTTGTAACAAAAGGGGGAGTTGATCTTAAAGAAATAAACCCCAAAACACTTGAAAGTAAAAAGGTAGCTGGTTTACATTTTGCTGGTGAAGTCCTAGACATCAATGCTCATACGGGAGGGTTTAACATTACTTCTGCCTTATGTACAGGCTGGGTAGCTGGTAGCTTACACTAT

SEQ ID NO: 16798 - protein, 262 aa, Streptococcus agalactiae
MTDTEVVSVKKIGDSFYIKTKDTQFASDKLIVTTGGKSYPSTGSTGFGHDIARHFKLEVTDMEAAESPLLTDFPHKKLQGISLDDVTLSFEKHIITHDLLFTHFGLSGPAALRISSFVKGGETIYLDVLPNISVKELEIHFQNEREKSLKNALKILLPERLAEFYAEDLPEKVKQVSVKDLEMLIQKLKKLPILVTGKMSLAKSFVTKGGVDLKEINPKTLESKKVAGLHFAGEVLDINAHTGGFNITSALCTGWVAGSLHY

SEQ ID NO: 16799 - protein, 780 aa, Streptococcus agalactiae
ATGTGTTACAATAACAGTATGAATGAAAGATATATCCGATTTAACCCTAATATCGCGAAACAAAAACCCAGCAATAAAGACAAATGTCCATTTTGTGATAAAAGCCAATTAGGAAAAATCCTAGACGTGAAAGACGATATGATCTGGGTAGAAAATAAATACCCAACTTTAGAAGAAACCTATCAAACATTGGTGATTGAATCAAATGATCACAATGGGGATATTTCAGTTTATAGTGAGTCAAAGATGCGCCAATTGTTAGATTATCTTTTGTCAAAATGGCAATTAATGGAAGAAAGTGGTCATTACCGTTCGGTCGTTCTTTATCGAAATTTTGGGCCCTTATCTGGCGGAAGTTTACGACATCCTCATAGCCAAATTGTTGGCTTAAAAAACGTAGATGCTTATGAAACGTTGAACTTAGATTGGTTTGATGGTATCGAGGTTTGTTCGGAAACGAGTCAACAAGCAGAGATTAGTATTGCCAATCGTCCTATGCTTGATTTCACAGAGTTCACAATTAAAGTATCCAAATTGGAAAACGCTATTTTGATTGCAGATAGTTTACCAATTTTGTGTCATTATATTTTAAATGAATTCTTGGGAGGGCGCTGTAAATCTTATAATCTCTTTTTCTATAAGCATGATGGGGGTCTTATTTGTAAAATTGTTCCTCGTTTTATAGTATCCCCTTATCAGATTGGGTATGCTATTCATCAGGTAAATTTACCAGATGAATTGGAAAAAATCAAAGAAGCCTTAAGAGCCAAATATTATCTT

SEQ ID NO: 16800 - protein, 260 aa, Streptococcus agalactiae; identical to SEQ ID NO: 6298

SEQ ID NO: 16801 - protein, 267 aa, Streptococcus agalactiae; identical to SEQ ID NO: 12167

SEQ ID NO: 16802 - protein, 89 aa, Streptococcus agalactiae; identical to SEQ ID NO: 12168

SEQ ID NO: 16803 - protein, 1023 aa, Streptococcus agalactiae
ATGTTACATTTTGAAAATGATTATAATAAAGGAGCTCATCCAGAGCTTTTAAATGCCCTTATTGAAACTAATGATCAAGGTCTATCGGGATATGGGACAGATAGTTACTGTCAACAAGCGGCAGATAAAATTCGAGAAGTCTGTTCCTGTCCACAAGCTGAAGTTGAGTTTTTAGTGGGTGGTACTCAAACAAATCAAGTAGTTATCAGTAGTATGCTTGCTTCTTATGAAGGAGTTATTGCTGCAGAAACAGGTCATGTGAGTAGTCATGAAGCAGGAGCCATAGAATTTTCAGGGCATAAGGTATTGACTTTACCTTCTCATAATGGGAAATTACTCGCAAGCGAAGTCGCAACTTATATTGAGACTTTTTATGCTGATGGTAATTACCAACACATGGTTTTTCCAGGAATGGTTTATATATCACATCCAACAGAATATGGAACACTTTATAGTAAAGCAGAACTAGAAGAGTTATCGAAGATTTGTAAACATTATCAAATCCCCTTATTTATTGACGGTGCTCGTCTGGGGTATGGTTTGGCTGCGAAAGATACAGATGTTGATTTCCCAACGATTGCAGCCTTATCAGATGTTTTTTATATTGGTGGAACCAAAATGGGGGCTCTTGCTGGGGAAGCAGTTGTTTTCACAAAGAAAAATCGTCCAAAACAGTTTACTACAATTGTAAAGCAGCATGGTGCGTTATTAGCCAAGGGAAGATTGCTGGGGCTTGCTTTTGATCGTTTCTTTACGGATAACCTTTACTTAAAAATTGGAAAGCATGCGATCGACTTAGCAGAGGAATTAAAAATCATTTTAGAAGAAAAAGGTTACTCATTCTATTTAAAATCACCAACTAATCAACAATTTATTATTGTAGAAAATACAAAACTAGCAGATTTAGCAAAGAATGTAGCTTATAGTTTTTGGGAAAAATATGATGACCATCATACTGTAATACGTCTAGCAACTAGTTGGTCAACTAGTCGCGAAGATGTAACTGCTTTAAGAAATGTCTTG

SEQ ID NO: 16804 - protein, 341 aa, Streptococcus agalactiae; identical to SEQ ID NO: 3208

SEQ ID NO: 16805 - protein, 1008 aa, Streptococcus agalactiae
ATGAAAGATAGATATATTTTAGCAGTGGAAAGTTCATGTGATGAAACTAGTGTTGCTATTTTAAAAAATGATAAAGAGTTACTAGCTAATATTATTGCAAGTCAAGTTGAAAGTCACAAACGTTTTGGTGGTGTTGTTCCTGAAGTGGCAAGCCGTCATCACGTTGAAGTAGTAACAACCTGTTTTGAGGATGCTCTTCAAGAAGCAGGTATTGTTGCTAGCGATTTGGATGCTGTTGCTGTAACATATGGTCCGGGATTAGTAGGAGCCTTATTGGTAGGTATGGCTGCAGCAAAAGCTTTCGCTTGGGCAAATAAATTACCTCTAATTCCTATAAACCACATGGCAGGTCATTTAATGGCAGCACGTGACGTTAAGGAACTTCAATACCCATTGTTAGCTTTGCTTGTCAGTGGGGGACATACAGAATTAGTATATGTTTCTGAACCGGGAGATTACAAAATAGTAGGAGAAACTCGGGATGATGCTGTTGGAGAAGCTTATGATAAAGTAGGCCGTGTTATGGGCTTAACTTATCCAGCAGGTCGCGAGATTGATCAGTTAGCTCATAAGGGTCAAGATACTTACCATTTTCCTAGAGCGATGATCAAAGAAGATCATCTTGAATTTTCTTTTTCTGGATTAAAATCTGCATTTATCAATTTACATCATAATGCAGAACAAAAGGGTGAAGCATTGGTTCTTGAAGATTTATGTGCTTCCTTTCAGGCGGCTGTTTTGGATATTTTATTGGCCAAAACTCAAAAAGCTTTGTTAAAGTATCCAGTGAAAACTTTAGTCGTTGCTGGTGGAGTTGCAGCTAATCAAGGACTTCGGGAACGCTTGGCTACTGATATTTCTCCTGATATTGATGTGGTTATTCCTCCTCTTAGATTATGTGGGGATAATGCAGGAATGATTGCATTAGCAGCAGCGATAGAGTTTGAAAAAGAGAATTTTGCTTCTTTAAAATTGAATGCCAAACCTAGTTTAGCTTTTGAGAGTTTA

SEQ ID NO: 16806 - protein, 336 aa, Streptococcus agalactiae
MKDRYILAVESSCDETSVAILKNDKELLANIIASQVESHKRFGGVVPEVASRHHVEVVTTCFEDALQEAGIVASDLDAVAVTYGPGLVGALLVGMAAAKAFAWANKLPLIPINHMAGHLMAARDVKELQYPLLALLVSGGHTELVYVSEPGDYKIVGETRDDAVGEAYDKVGRVMGLTYPAGREIDQLAHKGQDTYHFPRAMIKEDHLEFSFSGLKSAFINLHHNAEQKGEALVLEDLCASFQAAVLDILLAKTQKALLKYPVKTLVVAGGVAANQGLRERLATDISPDIDVVIPPLRLCGDNAGMIALAAAIEFEKENFASLKLNAKPSLAFESL

SEQ ID NO: 16807 - protein, 405 aa, Streptococcus agalactiae
ATGGAATCATCAGAACAAGCACTGGCTATATGGAGCGTACTATCTGATGTCTATGACAAATCTCCGTGGAGTTTATCGCAGATTTCAGAAGATTTAAAAAAAGATTCAACAGATTATTTTTTTGTTTATAATGACGGTGAAGTCATTGGTTTTTTGGCTCTTCAACAATTGGTAGGTGAAGTAGAAATTACTAATATTGCTGTTAAAAAAAATTATCAAGGTAAAGGTTATGCTTACCAGTTAATGTCAATGATCGCCGATATAGAGGTGCCAGTTTTTCTTGAGGTTCGTTATTCAAATATCGTAGCACAAAAACTTTATGAGAGGTGTGGTTTTGTAGTTTTAAGAAAGCGCAAAAATTATTACCATGATCCAATTGAAGATGCTATAGTGATGCGCAAGGGA

SEQ ID NO: 16808 - protein, 135 aa, Streptococcus agalactiae; identical to SEQ ID NO: 3214

SEQ ID NO: 16809 - protein, 252 aa, Streptococcus agalactiae
GTGGGGAATAAAGCCAATGTTCATTTTGTCGGAGAGGTTGCAGCATTTTTTGATCAGATTAAGAAAGCCTTACCACATGCTAAAATTACAGAAACTTTACCTTGTGCAGTAGCAATTGGGCGCAAAGGACAAAAAATGAAAAGCGTTAATGTAGATGCGTTTGTTCCACGATACTTAAAACGTGTTGAAGCTGAGGAAAATTGGTTAAAAAACCACTGTGAAACGAATACAGAAGAATATATTAAGAGAGTT

SEQ ID NO: 16810 - protein, 84 aa, Streptococcus agalactiae
MGNKANVHFVGEVAAFFDQIKKALPHAKITETLPCAVAIGRKGQKMKSVNVDAFVPRYLKRVEAEENWLKNHCETNTEEYIKRV

SEQ ID NO: 16811 - protein, 546 aa, Streptococcus agalactiae
ATGATGAAAGTTTTAGCCTTTGATACTTCAAGCAAAGCACTATCAGTGGCTGTACTAAACAATATGGAATGTTTAGCGACTGTCACTATCAATATCAAAAAGAATCATAGCATTAATTTGATGCCAGCCATTGATTTTTTAATGCAATCAATTGATTTAGAACCTCAAGATTTGGACCGTATCGTAGTAGCAGAGGGTCCAGGATCTTATACGGGCTTACGTGTAGCTGTTGCTACAGCAAAAATGCTAGCTTATACGCTTAAGATTGACTTAGTTGGAGTATCTAGCCTGTACGCTTTAACAAATGGATTTTCAGAAAATGATTTATTGGTACCACTTATAGATGCACGACGTAACAATGTTTATGTGGTTTCTATCAAAATGGTGATACTGTTAAACCAGACTGTCACACTTCTCTTGAAGAAGTCTTACAAGAGGTGGGGAATAAAGCCAATGTTCATTTTGTCGGAGAGGTTGCAGCATTTTTTGATCAGATTAAGAAAGCCTTACCACATGCTAAAATTACAGAAACTTTACCTTGTGCAG

SEQ ID NO: 16812 - protein, 182 aa, Streptococcus agalactiae
MMKVLAFDTSSKALSVAVLNNMECLATVTINIKKNHSINLMPAIDFLMQSIDLEPQDLDRIVVAEGPGSYTGLRVAVATAKMLAYTLKIDLVGVSSLYALTNGFSENDLLVPLIDARRNNVYVVSIKMVILLNQTVTLLLKKSYKRWGIKPMFILSERLQHFLIRLRKPYHMLKLQKLYLVQ

SEQ ID NO: 16813 - protein, 228 aa, Streptococcus agalactiae; identical to SEQ ID NO: 6309

SEQ ID NO: 16814 - protein, 76 aa, Streptococcus agalactiae; identical to SEQ ID NO: 3218

SEQ ID NO: 16815 - protein, 1677 aa, Streptococcus agalactiae
ATGTCAAATATCAACTTAAAACCCGAAGAAGTTGGGGTTTATGCGATTGGTGGTCTCGGTGAAATCGGAAAAAATACTTACGGTATCGAATATCAAGACGAAATTATTATTGTAGACGCTGGTATTAAATTCCCTGAAGATGATCTTTTGGGAATAGATTATGTTATCCCAGACTATTCATATATCGTTGAAAACATTGACCGTATCAAGGCCCTTGTTATAACTCATGGGCACGAGGACCACATCGGTGGTATTCCTTTTCTATTAAAACAAGCTAATTTACCGATTTATGCAGGTCCTCTCGCTCTTGCTCTAATCAAAGGTAAGTTAGAAGAACATGGTTTACTTCGTGACGCTACATTATACGAAATCCACGCTAATACAGAGCTGACTTTTAAAAACTTAAGCGTTACATTTTTCCGCACTACTCACTCCATTCCTGAACCATTAGGTATTGTTATTCATACCCCTCAAGGTAAGGTTATTTGTACAGGTGACTTCAAATTTGACTTTACACCTGTTGGGGAGCCCGCTGACTTACATCGTATGGCTGCTCTAGGTGAAGATGGTGTCCTCTGCCTTTTATCAGACTCGACAAATGCTGAAGTTCCAACCTTCACTAATTCCGAAAAAATTGTTGGGCAATCTATTATGAAGATTATCGAAGGTATCGAGGGACGTATTATTTTCGCCTCTTTTGCTTCAAACATCTTCCGACTCCAACAGGCTGCTGAAGCTGCTGTTAAAACTGGTCGTAAAATTGCTGTTTTTGGACGGTCAATGGAAAAGGCAATTGTTAACGGTATTGAACTTGGCTATATTAAAGTTCCAAAAGGTACCTTCATTGAGCCAAGCGAACTTAAAAATCTTCATGCTAGTGAAGTTTTAATTATGTGTACAGGTAGTCAAGGTGAGTCTATGGCAGCACTTGCTCGTATCGCTAATGGTACTCATCGTCAAGTTACTTTGCAGCCTGGTGATACTGTGATTTTCTCATCAAGCCCAATCCCTGGTAATACAACAAGTGTCAATAAATTAATCAATACCATTCAAGAAGCTGGTGTCGATGTTATTCATGGTAAAATTAACAATATCCATACCTCCGGCCATGGTGGTCAACAAGAACAAAAATTAATGTTACGCTTGATTAAACCAAAGTATTTCATGCCCGTACACGGTGAGTATCGCATGCAAAAAGTCCATGCTGGTTTAGCAGTTGACACAGGTATTCCTAAAGAGAATATCTTCATTATGGAAAACGGTGATGTTTTAGCTTTAACGAGCGACTCTGCTCGTATTGCTGGACATTTCAATGCTCAAGATATCTACGTTGATGGGAATGGTATTGGCGATATTGGTGCGGCAGTTCTACGTGACCGCCACGACTTATCTGAAGATGGTGTTGTCCTTGCCGTTGCTACCGTTGATTTCGATTCAAAAATGATTTTAGCTGGACCAGACATCCTTAGCCGAGGCTTTATCTATATGAGAGAATCTGGGGACCTTATTCGCGAAAGCCAACATATCTTATTCAATGCTATTCGTATTGCACTGAAAAATAAAGATGCAAGTATCCAATCAGTAAATGGAGCTATTGTTAATGCCTTACGCCCATTCTTATATGAAAAAACTGAGCGTGAGCCTATCATTATTCCTATGGTCCTTACCCCTGATAAA

SEQ ID NO: 16816 - protein, 559 aa, Streptococcus agalactiae; identical to SEQ ID NO: 3220

SEQ ID NO: 16817 - protein, 507 aa, Streptococcus agalactiae
ATGGAGGAAAACATGAACATAAAACAATTAAAGTCTAAAACAATGCTTGGAACAGTGGCTTTGGTGTCCGCTTTTTCATTTGCTTCAACAAATGCAGATGCGAATACATATAACTATGCAGTAGATGTAGACTACCTAGCAAGTGCGGAGGAAATTGCTCAAGCACATCCAGCTAGTAATACGTTTCCACTAGGTCAATGCACATGGGGTGTAAAGGAGATGGCAACATGGGCAGGTAACTGGTGGGGAAACGGTGGTGATTGGGCTGCGAGCGCCGCATCAGCTGGTTATACAGTAGGGACACAACCGCGCGTGGGTTCTATCGTATGTTGGACTGATGGTAGTTATGGACATGTGGCTTATGTTACAGCTGTAGATCCTGTCACTAATAAAATTCAGGTTTTAGAATCTAATTATGCAGGTCATCAATGGATTGATAATTATCGTGGTTGGTTTGATCCACAAAATACAGTAACACCAGGGGTAGTTAGCTACATTTATCCGAAT

SEQ ID NO: 16818 - protein, 169 aa, Streptococcus agalactiae; identical to SEQ ID NO: 3222

SEQ ID NO: 16819 - protein, 1344 aa, Streptococcus agalactiae
ATGACTATCACAGCAGAAGATATTCGTCGCGAAGTTAAGGAAAAAAATGTTACCTTCCTCCGTTTGATGTTCACAGATATCTTAGGAGTAATGAAAAATGTCGAAATTCCGGCTACAGATGAACAATTAGACAAAGTTTTATCAAATAAAGCAATGTTTGATGGATCTTCTATTGAGGGCTTTGTTCGTATCAATGAATCTGATATGTATTTATATCCTGATTTAGATACTTGGATTGTCTTTCCTTGGGGAGATGAAAATGGAGCTGTTGCAGGTCTAATCTGTGATATCTATACAGCAGAAGGAGAACCTTTTGCCGGAGATCCACGTGGAAATCTTAAGCGTAATATGAAACGTATGCAAGAGATGGGCTATAAGTCATTTAACTTAGGACCAGAACCTGAATTTTTCCTATTTAAAATGGATGAAAATGGTAACCCAACACTTGATGTTAATGACAAAGGAGGCTACTTTGACTTAGCTCCAACAGACTTAGCAGATAATACACGTCGTGAAATTGTTAATGTCTTAACACAAATGGGCTTTGAAGTTGAAGCTAGTCATCATGAAGTAGCAGTTGGACAGCATGAAATTGACTTTAAATATGATGATGTTTTAAAAGCCTGTGACAACATTCAATTATTTAAATTGGTTGTTAAAACAATTGCTCGTAAGCATGGTTTATATGCTACTTTTATGGCAAAACCTAAGTTTGGTATCAATGGTTCAGGTATGCATTGTAATATGTCTCTTTTTGATAATGAAGGGAACAATGCTTTCTTTGATCCAGAAGATCCACGTGGAATGCAATTATCAGAGGATGCCTACTACTTTTTAGGTGGGTTAATGAAACACGCTTACAATTACACAGCTATCATTAATCCAACTGTTAATTCTTATAAACGTTTGGTACCAGGATACGAAGCACCAGTTTACATTGCTTGGGCAGGTCGCAATCGTTCGCCACTTATTCGTGTACCTGCATCTCGAGGTATGGGAACACGCCTAGAATTGCGCTCGGTTGACCCAACAGCAAATCCTTATCTTGCTTTATCAGTACTTTTGGGATCAGGACTTGAGGGAATCGAGAATAAAATTGAAGCACCAGAACCAATTGAGACAAATATCTATGCTATGACTGTAGAAGAACGTCGTCAAGCAGGTATTGTTGATTTACCATCTACTCTTCATAATGCTCTTAAAGCACTTGAAGAAGATGAAGTGGTAAAAGCGGCCCTAGGAACTCATATCTATACTAATTTCTTAGACGCTAAGCGTATTGAATGGGCAAGTTATGCGACTTATGTTTCACAATGGGAAATTGATAATTACCTAGATTTATAT

SEQ ID NO: 16820 - protein, 448 aa, Streptococcus agalactiae; identical to SEQ ID NO: 12184

SEQ ID NO: 16821 - protein, 369 aa, Streptococcus agalactiae
ATGAAAGAAAGAGAACTTAGGCGTACAATGGCTGTATTCCCGATTGGAGCTGTTATGAAGTTGACAGATTTGACTGCCAGACAAATTCGCTATTATGAGGATCAAGGGTTAATCACACCTGAACGTACTGAAGGTAACCGCCGCATGTTTTCACTGAATGATATGGACCGCTTACTGGAAATAAAAGACTTCATTAGCGATGGTTTGCATATTTCTGATATTAAAAATGAATACATGCAAAGACAACATAAGTCCAAAGAGAAACAAAAGTCATTATCAGATGCCGAGGTTCGTCGACTTTTACAAGATGAGCTCCGTAATCAAGGGCGTTTTTCAAGTCCTTCACAGCACATTGGAAATATGCATTTG

SEQ ID NO: 16822 - protein, 123 aa, Streptococcus agalactiae; identical to SEQ ID NO: 3226

SEQ ID NO: 16823 - protein, 537 aa, Streptococcus agalactiae
ATGAAAACGTTAAAAAAATTATTATCTAATTACAAGTTTGATATTAAAAAGTTTAAATTTGGAATGAGAACATTTAAAACAGGCTTATCGGTCTTTTTAGTTTTATTGGTTTTTCATTTATTTGGTTGGAACGGGCTTCAAATTGGTGCTCTAACTGCTGTATTTAGTTTAAGAGAAGACTTTGATAAAAGCGTGCACTTTGGTTTTTCTAGAATTATTGGTAATAGTATAGGTGGCTTACTCTCCTTAGTATTTTTTGCATTCAATGAGATATTTCATCAAGCTTTTTGGGTCACTTTATTAATTGTTCCTATTTGTACCATGTTATGTATCATGATTAATGTTGCTTGTAATAATAAATCAGGTATTATTGGGGGAACAGCCGCATTACTTATTATAACTTTATCTATCCCAAGCGGAGAGACAATTCTATATGTTTTTGCACGTATTTTTGAAACTTTTTGTGGTGTTTTTATTGCAATGATGGTTAATACAGATATTGAAATACTTCGGAAAAAACTAAAAAATAACAAATTA

SEQ ID NO: 16824 - protein, 179 aa, Streptococcus agalactiae
MKTLKKLLSNYKFDIKKFKFGMRTFKTGLSVFLVLLVFHLFGWNGLQIGALTAVFSLREDFDKSVHFGFSRIIGNSIGGLLSLVFFAFNEIFHQAFWVTLLIVPICTMLCIMINVACNNKSGIIGGTAALLIITLSIPSGETILYVFARIFETFCGVFIAMMVNTDIEILRKKLKNNKL

SEQ ID NO: 16825 - protein, 876 aa, Streptococcus agalactiae
TTGGAAGATGGACAAGTTCTTTTGGTTGAAAACACTCGTTTTGAAGATGTTGACGGTAAGAAAGAATCTAAGAATGACGAAGAACTTGGTAAATACTGGGCTTCACTTGGAGATGGAATCTTCGTTAACGATGCATTTGGTACAGCACACCGTGCTCATGCATCAAACGTAGGTATTTCAGCAAACGTTGAAAAAGCTGTAGCTGGTTTCCTTCTTGAAAACGAAATTGCTTACATCCAAGAAGCAGTTGAAACTCCAGAACGCCCATTCGTAGCTATTCTTGGTGGCTCAAAAGTTTCTGATAAGATTGGTGTTATCGAAAACCTTCTTGAAAAAGCTGATAAAGTTCTTATCGGTGGTGGTATGACTTACACATTCTACAAAGCTCAAGGTATCGAAATCGGTAACTCACTTGTAGAAGAAGACAAATTGGATGTTGCTAAAGACCTCCTTGAAAAATCAAACGGTAAATTGATCTTGCCAGTTGACTCAAAAGAAGCAAACGCATTTGCTGGTTATACTGAAGTTCGCGACACTGAAGGTGAAGCAGTTTCAGAAGGGTTCCTTGGTCTTGACATCGGTCCTAAATCAATCGCTAAATTTGATGAAGCACTTACTGGTGCTAAAACAGTTGTATGGAACGGACCTATGGGTGTCTTTGAAAACCCTGACTTCCAAGCTGGTACAATCGGTGTAATGGACGCTATCGTTAAACAACCAGGCGTTAAATCAATCATCGGTGGTGGTGATTCAGCAGCAGCTGCTATCAACCTTGGTCGTGCTGACAAATTCTCATGGATCTCTACTGGTGGTGGAGCAAGCATGGAATTGCTCGAAGGTAAAGTATTACCAGGTTTGGCAGCATTGACTGAAAAA

SEQ ID NO: 16826 - protein, 292 aa, Streptococcus agalactiae
MEDGQVLLVENTRFEDVDGKKESKNDEELGKYWASLGDGIFVNDAFGTAHRAHASNVGISANVEKAVAGFLLENEIAYIQEAVETPERPFVAILGGSKVSDKIGVIENLLEKADKVLIGGGMTYTFYKAQGIEIGNSLVEEDKLDVAKDLLEKSNGKLILPVDSKEANAFAGYTEVRDTEGEAVSEGFLGLDIGPKSIAKFDEALTGAKTVVWNGPMGVFENPDFQAGTIGVMDAIVKQPGVKSIIGGGDSAAAAINLGRADKFSWISTGGGASMELLEGKVLPGLAALTEK

SEQ ID NO: 16827 - protein, 627 aa, Streptococcus agalactiae
ATGGCTGCAGCAAAAGCTTTCGCTTGGGCAAATAAATTACCTCTAATTCCTATAAACCACATGGCAGGTCATTTAATGGCAGCACGTGACGTTAAGGAACTTCAATACCCATTGTTAGCTTTGCTTGTCAGTGGGGGACATACAGAATTAGTATATGTTTCTGAACCGGGAGATTACAAAATAGTAGGAGAAACTCGGGATGATGCTGTTGGAGAAGCTTATGATAAAGTAGGCCGTGTTATGGGCTTAACTTATCCAGCAGGTCGCGAGATTGATCAGTTAGCTCATAAGGGTCAAGATACTTACCATTTTCCTAGAGCGATGATCAAAGAAGATCATCTTGAATTTTCTTTTTCTGGATTAAAATCTGCATTTATCAATTTACATCATAATGCAGAACAAAAGGGTGAAGCATTGGTTCTTGAAGATTTATGTGCTTCCTTTCAGGCGGCTGTTTTGGATATTTTATTGGCCAAAACTCAAAAAGCTTTGTTAAAGTATCCAGTGAAAACTTTAGTCGTTGCTGGTGGAGTTGCAGCTAATCAAGGACTTCGGGAACGCTTGGCTACTGATATTCTCCTGATATTGATGTGGTTATTCCTCCTCTTAGATTATGTNNNNNTTAAT

SEQ ID NO: 16828 - protein, 209 aa, Streptococcus agalactiae
  VARIANT 207, 208: Xaa = Any Amino Acid
MAAAKAFAWANKLPLIPINHMAGHLMAARDVKELQYPLLALLVSGGHTELVYVSEPGDYKIVGETRDDAVGEAYDKVGRVMGLTYPAGREIDQLAHKGQDTYHFPRAMIKEDHLEFSFSGLKSAFINLHHNAEQKGEALVLEDLCASFQAAVLDILLAKTQKALLKYPVKTLVVAGGVAANQGLRERLATDILLILMWLFLLLDYVXXN

SEQ ID NO: 16829 - protein, 301 aa, Streptococcus agalactiae
ATGGCTAAATTGACTGTTAAAGACGTTGATTTGAAAGGTAAAAAAGTCCTCGTTCGTGTTGACTTTAATGTGCTTTGAAGACGGCGTTATCACTAACGACAACCGTATCACTGCGGCTCTTCCAACAATCAAGTATATCATCGAACAAGGTGGTCGTGCTATCCTCTTCTCTCACCTTGGACGTGTTAAAGAAGAAGCTGACAAAGAAGGAAAATCACTTGCACCGGTAGCTGCTGATTTAGCTGCTAAACTTTGGTCAGATGTTGTATTCCCAGGGGTACTCGTGGTGCANNNNNTTAAT

SEQ ID NO: 16830 - protein, 101 aa, Streptococcus agalactiae
  VARIANT 98, 99, 100: Xaa = Any Amino Acid
MAKLTVKDVDLKGKKVLVRVDFNVPLKDGVITNDNRITAALPTIKYIIEQGGRAILFSHLGRVKEEADKEGKSLAPVAADLAAKLWSDVVFPGVLVVXXXN

SEQ ID NO: 16831 - protein, 867 aa, Streptococcus agalactiae
ATGAAGACTACAAAAGTTTTTTCAGTTTTATCGTTATCTGTTGCTGTATTTATGATGACAGCATGTCAGTCAAACCACAGTACTAAAAAAGCTGATATGTCTCCAGATAAGGTGGAGCAAAAGACGAAATTTAAAAATATTTCTCTAAGTTCTAATAAACTGTTGGCTAAGGAAAACACTATGTCTGTCCTTTGGTATCAAAATTCTGCAGAAGCCAAGGCTTTATATTTACAAGGTTATAATGTTGCTAAAATGAAGTTAGATGATTGGTTACAAAAGCCCAGTGAAAAACCATATTCAATTATCTTAGATTTAGATGAAACAGTTTTAGATAATAGCCCATATCAAGCAAAGAATATTAAAGATGGCTCTAGTTTCACGCCAGAGAGTTGGGATAAATGGGTGCAAAAGAAATCAGCTAAGGCTGTTGCGGGTGCCAAAGAATTTTTGAAGTATGCTAATGAAAAGGGAATAAAAATTTATTATGTCTCAGATCGTACAGATGCTCAAGTTGATGCGACTAAAGAAAATTTAGAGAAGGAAGGTATACCTGTTCAAGGGAAAGACCACTTGCTTTTCCTTAAAAAAGGAATGAAATCTAAAGAGAGTCGCCGTCAGGCAGTTCAAAAAGATACCAATTTAATTATGCTTTTTGGAGATAATTTAGTTGATTTTGCTGATTTTTCTAAATCATCTAGTACAGATAGAGAACAACTACTAACTAAACTTCAAAGTGAGTTTGGTAGTAAATTTATTGTTTTCCCAAATCCTATGTACGGTTCTTGGGAAAGTGCTATTTATCAAGGAAAACATCTGGATGTTCAAAAACAATTGAAAGAACGACAAAAAATGTTGCATTCGTATGAT

SEQ ID NO: 16832 - protein, 289 aa, Streptococcus agalactiae; identical to SEQ ID NO: 3232

SEQ ID NO: 16833 - protein, 1000 aa, Streptococcus agalactiae
ATGGTAGTTAAAGTTGGTATTAACGGTTTCGGTCGTATCGGTCGTCTTGCATTCCGTCGCATCCAAAACGTAGAAGGTGTTGAAGTTACTCGTATCAACGACCTTACAGATCCAAACATGCTTGCACACTTGTTGAAATATGACACAACTCAAGGTCGTTTCGACGGTACTGTGAAGTTAAAGAAGGTGGATTCGAAGTTAACGGTCAATTTGTTAAAGTTTCTGCTGAACGCGAACCAGCAAACATTGACTGGGCTACTGATGGCGTAGAAATCGTTCTTGAAGCAACTGGTTTCTTTGCATCAAAAGAAAAAGCTGAACAACACATCCATGAAAATGGTGCTAAAAAAGTTGTTATCACAGCTCCTGGTGGAAACGACGTTAAAACAGTTGTTTTCAACACTAACCACGATATCCTTGATGGAACTGAAACAGTTATCTCAGGTGCTTCATGTACTACAAACTGTCTTGCTCCAATGGCTAAAGCTTTACAAGACAACTTTGGTGTTAAACAAGGTTTGATGACTACTATCCACGCATACACTGGTGACCAAATGATCCTTGACGGACCACACCGTGGTGGTGACCTTCGTCGTGCTCGTGCAGGTGCTGCAAACATCGTTCCTAACTCAACTGGTGCTGCAAAAGCTATCGGACTTGTTATCCCAGAATTGAACGGTAAACTTGATGGTGCTGCACAACGTGTTCCTGTTCCAACTGGATCAGTAACTGAATTGGTTGCAACTCTTGAAAAAGACGTAACTGTCGAAGAAGTAAATGCAGCTATGAAAGCAGCAGCTAACGATTCATACGGTTATACTGAAGATCCAATCGTATCATCTGATATCGTTGGTATTTCATACGGTTCATTGTTTGATGCTACTCAAACTAAATCAAACTGTTGACGTACCATTGGTAAAGTTGTTTCATGGTACGAAACGAAATGTCATACACTTCACAACTTGTTCGTACACTTGAATACTTTGCAAAAATTGCAAAA

SEQ ID NO: 16834 - protein, 336 aa, Streptococcus agalactiae
  VARIANT 305: Xaa = Any Amino Acid
MVVKVGINGFGRIGRLAFRRIQNVEGVEVTRINDLTDPNMLAHLLKYDTTQGRFDGTVEVKEGGFEVNGQFVKVSAEREPANIDWATDGVEIVLEATGFFASKEKAEQHIHENGAKKVVITAPGGNDVKTVVFNTNHDILDGTETVISGASCTTNCLAPMAKALQDNFGVKQGLMTTIHAYTGDQMILDGPHRGGDLRRARAGAANIVPNSTGAAKAIGLVIPELNGKLDGAAQRVPVPTGSVTELVATLEKDVTVEEVNAAMKAAANDSYGYTEDPIVSSDIVGISYGSLFDATQTKVQTVDGXQLVKVVSWYDNEMSYTSQLVRTLEYFAKIAK

SEQ ID NO: 16835 - protein, 1353 aa, Streptococcus agalactiae
ATGGCTGCTATTCGTAAAGCAACTATCAATGTTGAATTCTACCCTGTATTGTGTGGTTCAGCCTTCAAGAATAAAGGTGTTCAATTGATGCTTGATGCTGTTATTGATTACCTTCCAAGCCCACTTGATATTCCTGCAATCAAAGGTATTAACCCTGATACTGACGAAGAAGAAACACGTCCTGCTTCAGATGAAGAGCCATTTGCAGCGCTTGCCTTCAAGATCATGACAGATCCTTTCGTGGGTCGCTTAACATTCTTCCGTGTGTACTCAGGTGTTCTTAATTCAGGTTCATACGTGTTGAATACATCTAAAGGTAAACGTGAACGTATCGGACGTATCTTACAAATGCACGCAAATAGTCGTCAAGAAATTGAAACTGTTTATGCTGGGGATATCGCAGCGGCTGTTGGTTTGAAAGATACAACTACAGGTGATTCATTGACTGATGAAAAATCAAAAGTTATTCTGAATCATTGAAGTTCCAGAACCAGTTATCCAATTGATGGTTGAGCCAAAATCTAAAGCTGACCAAGATAAAATGGGTATCGCCCTTCAAAAACTTGCTGAAGAAGATCCAACGTTCCGCGTTGAAACTAACGTTGAAACTGGTGAAACAGTTATCTCAGGAATGGGTGAACTTCACCTTGATGTCCTTGTTGACCGTATGAAACGTGAATTCAAAGTTGAAGCAAACGTTGGTGCACCTCAAGTATCATACCGCGAAACATTCCGCGCTTCTACACAAGCACGTGGATTCTTCAAACGCCAATCTGGTGGTAAAGGTCAATTTGGTGATGTTTGGATTGAATTTACACCAAACGAAGAAGGTAAAGGATTCGAATTCGAAAATGCTATCGTCGGTGGTGTGGTTCCTCGTGAATTTATTCCAGCCGTTGAAAAAGGACTTGTAGAATCTATGGCAAACGGTGTTCTTGCTGGATATCCAATGGTTGACGTAAAAGCTAAACTTTACGATGGTTCATACCATGATGTTGACTCATCTGAGACAGCCTTCAAGATTGCTGCATCACTTGCACTTAAAGAAGCTGCTAAATCAGCGCAACCAGCTATCCTTGAGCCAATGATGCTTGTTACAATTACAGCTCCAGAAGACAATCTTGGTGACGTTATGGGTCACGTGACTGCACGTCGCGGTCGTGTTGATGGTATGGAAGCACGTGGTAATACACAAGTGTTCGTGCCTTTGTTCCACTTGCTGAAATGTTTGGTTATGCAACAGTTCTTCGTTCTGCAACACAAGGACGTGGCACATTCATGATGGTATTTGACCACTACGAAGATGTTCCTAAGTCAGTTCAAGAAGAAATCATCAAGAAAAACTCTGGTGAA

SEQ ID NO: 16836 - protein, 452 aa, Streptococcus agalactiae
MAAIRKATINVEFYPVLCGSAFKNKGVQLMLDAVIDYLPSPLDIPAIKGINPDTDEEETRPASDEEPFAALAFKIMTDPFVGRLTFFRVYSGVLNSGSYVLNTSKGKRERIGRILQMHANSRQEIETVYAGDIAAAVGLKDTTTGDSLTDEKSKVILESIEVPEPVIQLMVEPKSKADQDKMGIALQKLAEEDPTFRVETNVETGETVISGMGELHLDVLVDRMKREFKVEANVGAPQVSYRETFRASTQARGFFKRQSGGKGQFGDVWIEFTPNEEGKGFEFENAIVGGVVPREFIPAVEKGLVESMANGVLAGYPMVDVKAKLYDGSYHDVDSSETAFKIAASLALKEAAKSAQPAILEPMMLVTITAPEDNLGDVMGHVTARRGRVDGMEARGNTQVVRAFVPLAEMFGYATVLRSATQGRGTFMMVFDHYEDVPKSVQEEIIKKNSGE

SEQ ID NO: 16837 - protein, 601 aa, Streptococcus agalactiae
TGGCTCGCGAATTTTCACTTGAAAAAACTCGTAATATCGGTATCATGGCTCACGTCGATGCTGGTAAAACAACAACAACTGAGCGTATTCTTTACTATACTGGTAAAATCCACAAAATCGGTGAAACACACGAAGGTGCTTCACAAATGGACTGGATGGAACAAGAACAAGAACGTGGTATCACAATTACATCAGCTGCAACAACAGCACAATGGGATGGTCACCGTGTTAACATCATCGATACACCAGGACACGTGGACTTCACAATTGAAGTTCAACGTTCACTTCGCGTACTTGATGGTGCGGTAACAGTTCTTGATGCTCAATCAGGTGTAGAACCTCAAACTGAAACAGTTTGGCGTCAAGCAACAGAATACGGAGTTCCACGTATCGTTTTTGCTAATAAAATGGATAAAATCGGTGCTGACTTCCTCTATTCAGTACAATCACTTCATGACCGTCTTCAAGCGAATGCACACCCAATCAATTGCCAATTGGTTCAGAAGACGATTTCCGTGGTATTATTGACTTAATCAAAATGAAAGCTGAAATCTATACTAATGACCTTGGTACAGATATCCTTGAAGAAGANNNNNTTAAT

SEQ ID NO: 16838 - protein, 201 aa, Streptococcus agalactiae
  VARIANT 162, 198, 199, 200: Xaa = Any Amino Acid
MAREFSLEKTRNIGIMAHVDAGKTTTTERILYYTGKIHKIGETHEGASQMDWMEQEQERGITITSAATTAQWDGHRVNIIDTPGHVDFTIEVQRSLRVLDGAVTVLDAQSGVEPQTETVWRQATEYGVPRIVFANKMDKIGADFLYSVQSLHDRLQANAHPXQLPIGSEDDFRGIIDLIKMKAEIYTNDLGTDILEEXXXN

SEQ ID NO: 16839 - protein, 96 aa, Streptococcus agalactiae
ATGGATGCTGCAAACAACACAGGAGCATCAGTTAAGAAACGTGAAGATACTCACAAAATGGCTGAAGCTAACCGTGCCTTTGCACACTTCCGTTGG

SEQ ID NO: 16840 - protein, 32 aa, Streptococcus agalactiae
MDAANNTGASVKKREDTHKMAEANRAFAHFRW

SEQ ID NO: 16841 - protein, 237 aa, Streptococcus agalactiae
ATGAGTCGTAAAAATCAAGCGCCTAAACGCGAAGTATTGCCAGATCCATTGTATAACTCAAAAATCGTTACACGTCTTATCAACCGTGTAATGCTTGATGGTAAACGTGGTACTGCTGCAACTATCGTATATGATGCTTTTGAAGCAATTAAAGAAGCTACTGGAACAGATGCTCTTGAAGTGTTCGAAACAGCTATGGAAAACATCATGCCTGTACTTGAAGTACGTGCANNNNNT

SEQ ID NO: 16842 - protein, 79 aa, Streptococcus agalactiae
  VARIANT 78, 79: Xaa = Any Amino Acid
MSRKNQAPKREVLPDPLYNSKIVTRLINRVMLDGKRGTAATIVYDAFEAIKEATGTDALEVFETAMENIMPVLEVRAXX

SEQ ID NO: 16843 - protein, 411 aa, Streptococcus agalactiae; identical to SEQ ID NO: 12205

SEQ ID NO: 16844 - protein, 137 aa, Streptococcus agalactiae; identical to SEQ ID NO: 3240

SEQ ID NO: 16845 - protein, 810 aa, Streptococcus agalactiae; identical to SEQ ID NO: 12207

SEQ ID NO: 16846 - protein, 270 aa, Streptococcus agalactiae; identical to SEQ ID NO: 3242

SEQ ID NO: 16847 - protein, 939 aa, Streptococcus agalactiae
ATGAAAATTAACCAAATGAAAAAAGACGAGCTTTTTGAGGGGTTTTACCTTATAAAGAAAGCAGAAGTTCGTAAAACGCGTGCAGGTAAAGACTTTATTGCCTTTACCTTTCAAGATGATACTGGCGAAATTTCAGGAAATATGTGGGATGCACAGACCTATAATGTAGAAGAGTTTGTAGCCGGTAAAATTGTTCATATGAAAGGGCGTCGTGAAGTTTATAATGGAACTCCCCAAGTCAACCAAATTACATTAAGAAACATCAAAGATGGTGAACCTAATGATCCTAGAGATTTTAAAGAAAAACCTCCAATCAATGTTGACAACGTGAGAGAGTACATGGAACAAATGCTCTTTAAAATTGAAAATGCAACCTGGCAGCGTGTGGTAAGAGCACTTTATCGTAAATACAATAAGGAATTTTTTACCTATCCAGCCGCCAAAACAAACCACCACGCTTTTGAATCAGGATTGGCATATCACACGGCAACAATGGTTCGTTTGGCAGATAGTATCGGAGATATCTATCCAGAACTTAATAAAAGTTTGATGTTTGCTGGTATTATGCTACATGATTTAGCCAAGGTCATTGAGTTATCGGGTCCTGATAATACAGAATATACTATTCGAGGTAATCTTATCGGTCATATTTCACTTATTGATGAGGAATTAACAAAAATACTAGCAGAGCTTAATATTGATGATACAAAAGAAGAGGTTACAGTGTTACGCCATGTTATTCTGAGTCATCATGGACAATTAGAATATGGAAGCCCGGTTCGTCCTAGAATCATGGAGGCAGAAATTATCCATATGATCGATAACATTGATGCAAATATGATGATGATGACAACAGCTTTAAACCGTGTCAACGAAGGTGAAATGACAAATCGCATTTTTGCCATGGATAACCGTTCTTTTTATAAACCGAACATTAAA

SEQ ID NO: 16848 - protein, 313 aa, Streptococcus agalactiae; identical to SEQ ID NO: 3244

SEQ ID NO: 16849 - protein, 1272 aa, Streptococcus agalactiae
ATGCTTGTCATCATTTTGATCATTGTACTAGCTAGTCTGACAGTGACGATAATTTCTTACCCAAAAATGACGGAATTAACAAAGTCCGTTGAAAAACAACTTGAAGATAATGCTGATAATCTATCAGACCAACTGACATATCAGATAGAAGTGGCGCAAAAAGATCAAATTCTAACGTTGACTAATCAGCTAAACCGTATGCAACAGGAAATTTATCAGTTGCTTACCGATATGCGTACAGAATTAAATCAGCATTTAACGGAGAGTCGAGATCGATCAGACAAACGCTTGGAATTGATTAACTCCAATTTATCTCAGTCAGTTCAGAAAATGCAAGATTCCAATGAAAAACGCTTGGATCAAATGCGCCAAACTGTTGAGGAAAAGCTAGAAAAAACGCTACAAACGCGTTTGCAAACTTCTTTTGAAACTGTATCGCGTCAACTAGAGAGCGTCAATCAAGGTCTTGGGGAGATGAAAACTGTTGCCCAAGATGTTGGTACACTGAACAAAGTCTTGTCAAATACTAAGACAAGGGGAATATTAGGGGAGTTACAACTCGGCCAAATTATAGAAGATATTATGACAGTTAGTCAATATGAGAGAGAATTTCCTACGGTGTCTGGCTCTTCTGAGCGTGTTGAATATGCTATTAAATTACCTGGAAATGGTCAGGGAGATTATATCTATTTGCCTATTGACTCTAAGTTTCCTCTAGAAGATTATTACCGATTGGAAGATGCTTATGAATTGGGTGACAAGGTTCAAATAGAACTCTATCGTAAATCTTTACTGGCAAGTATTCGTAAATTTGCAAAAGATATAAACAATAAGTACTTAAATCCTCCTGAAACGACAAATTTTGGTATCATGTTCTTACCAACTGAAGGGCTCTATTCTGAAGTGGTAAGAAATGCAACATTCTTTGATAGTCTAAGACGTGACGAAAATATTGTAGTAGCTGGACCGTCAACCTTATCTGCTTTACTAAATTCATTATCTGTTGGCTTTAAAACCTTAAATATTCAAAAGAATGCTAATGATATTAGTAAAATTTTAGGGAATGTCAAGGTTGAATTTGGAAAATTTGGTGGCATGTTATCAAAAGCTCAAAAACAATTAAATACAGCAAGTAAAAGTATTGATAGTTTACTCACAACGCGGACAAACGCTATTATCAGAGTCTTAAATACAGTTGAAGAACATCAAGATCAAGCAACCACTAGCTTGTTAAACCTTCCTATAACAGAAGAAGAGGAAATTAATGAAAAT

SEQ ID NO: 16850 - protein, 424 aa, Streptococcus agalactiae
MLVIILIIVLASLTVTIISYPKMTELTKSVEKQLEDNADNLSDQLTYQIEVAQKDQILTLTNQLNRMQQEIYQLLTDMRTELNQHLTESRDRSDKRLELINSNLSQSVQKMQDSNEKRLDQMRQTVEEKLEKTLQTRLQTSFETVSRQLESVNQGLGEMKTVAQDVGTLNKVLSNTKTRGILGELQLGQIIEDIMTVSQYEREFPTVSGSSERVEYAIKLPGNGQGDYIYLPIDSKFPLEDYYRLEDAYELGDKVQIELYRKSLLASIRKFAKDINNKYLNPPETTNFGIMFLPTEGLYSEVVRNATFFDSLRRDENIVVAGPSTLSALLNSLSVGFKTLNIQKNANDISKILGNVKVEFGKFGGMLSKAQKQLNTASKSIDSLLTTRTNAIIRVLNTVEEHQDQATTSLLNLPITEEEEINEN

SEQ ID NO: 16851 - protein, 630 aa, Streptococcus agalactiae
ATGACTAAAATTGCTTTATTTGCTGGCGGTGACTTAACTTATTTTGAATATGATTTTGACTATTTTGTCGGAATTGACCGTGGAAGCCTATTTTTATTAAAAAATGGGCTTTCTTTGGACATGGCAGTGGGTGATTTTGATTCTATAACAGAAGATGAACTGCTTTATATCAAACACTATTGTAGCAATATCGTTTCTGCTAGTGCAGAAAAAAATGATACAGATACAGAATTAGCTTTAAAAACTATTTTCAAAGAATTTCCAGAAGCTCAGGTGACCGTATTTGGAGCATTTGGTGGCAGGATTGACCATATGATGTCTAATATCTTTTTACCAAGTGACAGAGATCTAGAACCATTTATGTCACAAATCAGACTCAAAGATGAACAAAACATAGTGACTTATCTACCATCCGGGAAAAATCAAGTCTCAAGGATTGAAGGGATGTCCTATGTCTCGTTCATGCCTGAGAGTGAGTCTACTTTGCAGATTTCTGGGGCTAAATATGAATTGAACAAAAGTAATTATTTTAAGAAAAAAATGTATTCCAGTAATGAATTTATGACTTCGCCAATTGAAGTAGAGCTCAAAGATGGTTACTTAATCATTATTTATAGTAAGGATAGAGGT

SEQ ID NO: 16852 - protein, 210 aa, Streptococcus agalactiae; identical to SEQ ID NO: 3248

SEQ ID NO: 16853 - protein, 660 aa, Streptococcus agalactiae
ATGTCAACCAATAAAATTGCCCCATCGATATTAGCAGCAGACTATGCTAATTTTGCTAACGAATTGAAACGTATTGAAGAGACAACAGCAGAATACGTTCATATTGATATCATGGATGGTCAATTTGTCCCTAATATTAGTTTTGGTGCGGATGTTGTATCCAGCATGCGTAAACACAGTAAACTTGTTTTTGATTGTCATCTGATGGTTGTTGATCCAGAACGTTATATTGAGGCTTTTGCTCAAGCTGGTGCTGATATCATGACCATTCATGTTGAAGCAACGAAACATATACATGGTGCGCTTCAAAAGATAAAAGAGGCAGGAATGAAAGCAGGTGTGGTTATTAACCCAGGAACACCCGTAGAATCTCTTATTCCTATCTTAGATTTGGTTGACCAGATTTTAATTATGACTGTTAATCCTGGCTTTGGTGGACAAGCCTTTATTCCAGAAATGATGTCAAAAGTAAAGACAGTTGCAGCATGGCGCAAAGAGTACGGTCATCATTATGATATTGAAGTTGATGGCGGTATAGATAATACTACAATTAAGGCAGCAGCAGAGGCTGGTGCAAATGTCTTTGTTGCAGGTTCTTATCTCTTTAAAGCAAGTGATTTACCTGCACAAGTAGAAACCTTAAGGGTGGCGCTCGATGAC

SEQ ID NO: 16854 - protein, 220 aa, Streptococcus agalactiae; identical to SEQ ID NO: 3250

SEQ ID NO: 16855 - protein, 828 aa, Streptococcus agalactiae
GTGGAATCTGACGGTGTTGTTTATCAGACACGTGCGCGTGGAAATTTTAGAAAAAAAGGTCAAATTCCCTACGTTGGGGATTGGGTTGAATTTTCTTCGCAAGATCAATCAGAAGGATATATTCTATCAATTGAAGAGCGTAAAAATAGCCTCGTACGACCACCTATTGTTAATATTGATCAAGCTGTCGTTATCATGTCTGCTAAAGAACCTGATTTTAACGCTAACTTATTAGACCGGTTCTTAGTACTTCTAGAATATAAGATGATTCAGCCTATCATTTATATTTCCAAGTTGGATTTGTTAGACGATTTGGTTGTTATTGATGATATTCGCGAACTTTATCAGAATATAGGCTACGTTTTCTGTTATTCTCAAGAGGAACTCTTGCCTCTGTTAGCAAATAAAGTGACTGTTTTTATGGGCCAGACAGGTGTCGGAAAATCAACGCTTCTCAACAAAATTGCTCCTGAGTTGAAACTTGAAACTGGTGAAATTTCGGGTAGTTTAGGCCGTGGCCGACACACCACAAGAGCAGTTAGTTTCTATAACGTTCATAAAGGAAAAATTGCAGACACTCCTGGTTTTTCTTCTTTGGACTATGAAGTGGATAATGCAGAGGACTTAAACGAATCCTTTCCAGAGCTTCGTAGACTTAGTCATTTTTGTAAATTCCGCTCGTGTACGCATACACATGAGCCTAAATGTGCTGTAAAAGAAGCCTTAACTCAAGGTCAGTTATGGCAAGTCCGCTATGATAACTACCTCCAATTTTTAAGTGAAATTGAGAACCGTCGTGAAACATATAAGAAAGTTATTAAAAGAAAG

SEQ ID NO: 16856 - protein, 276 aa, Streptococcus agalactiae
MESDGVVYQTRARGNFRKKGQIPYVGDWVEFSSQDQSEGYILSIEERKNSLVRPPIVNIDQAVVIMSAKEPDFNANLLDRFLVLLEYKMIQPIIYISKLDLLDDLVVIDDIRELYQNIGYVFCYSQEELLPLLANKVTVFMGQTGVGKSTLLNKIAPELKLETGEISGSLGRGRHTTRAVSFYNVHKGKIADTPGFSSLDYEVDNAEDLNESFPELRRLSHFCKFRSCTHTHEPKCAVKEALTQGQLWQVRYDNYLQFLSEIENRRETYKKVIKRK

SEQ ID NO: 16857 - protein, 849 aa, Streptococcus agalactiae
ATGTTGGTTGACAAGAAGTGGCGTTTTGAAGATAGTGCAAGTTATTTCGCTTGTCCTAAATGTCAAAATCCCTTGATAAAAGAAAGTAACAGCCTCAAATGCTCTGATAATCATTGTTTTGATTTATCCAAATTTGGATATGTTAATCTTCTTGGAGGAAAGAAGGTAGATGAACATTATGATAAAAAATCATTTGAAAATCGGCAGCTTGTCTTAGAAAACGGGTATTATAATCATATTTTAGAAGCTATTTCAAAGGTTTTGGAAAATAATTCTCAGTTTCATTCGGTTTTAGATATTGGTTGTGGAGAGGGCTTTTATTCTCGTCAATTAGTTAACAAGCATGAGAAGACTTTCTTGGCTTTTGATATTTCTAAAGATTCGATTCAATTAGCTGCTAAAAGTGATCAGTCTAGGCTTGTGAAATGGTTTGTTTCTGATTTAGCTAACCTTCCTATTCAAGACTCATCAATTGATATCATTTTAGACATTTTTTCTCCTGCAAATTATAAAGAATTTAGGCGGGTGCTGAGTGATGATGGTATCCTTGTAAAGGTTGTTCCTGTAGCTGAACATGTTCAAGAATTGCGAGAAAAAGCTAGTCAATACTTGAAACAGAAAGATTACTCTAATCAAAAAATTCTAGATCACTTTAGAGAAAATTTTGAAATTATTTCTGAGCAGAAAGTTGTTCAAAGCTATAACTGTTCTCAACAAGAACGTCAAGCTTTTATTGATATGACACCGTTGTTATTCAGCGTAGATAAAACGACTATTGATTGGGCGAGTATATCAGAAATTACAGTAGGTGCCTTAATAGTAATTGGAAAAAAGCGCAGTGTATCTAAA

SEQ ID NO: 16858 - protein, 283 aa, Streptococcus agalactiae; identical to SEQ ID NO: 3254

SEQ ID NO: 16859 - protein, 870 aa, Streptococcus agalactiae
ATGAGAATCGCAGATAAAACCGTTACCCGCGCTATTTTGGAGCGTCATGGGTTTACATTTAAGAAATCATTCGGTCAGAACTTTTTGACCGATACTAATATTTTACAGAAGATTGTTGACACGGCAGAGATTGACAAGGGTGTCAACGTGATTGAGATTGGTCCTGGTATCGGGGCTTTGACAGAGTTTTTGGCTGAGAATGCAGCTGAGGTTATGGCTTTTGAGATTGATGATCGTCTCATTCCTATCCTTGCTGATACGCTTGCGCGTTTTGACAATGTCCAAGTGGTCAATCAGGATATCCTCAAGGCTGATTTGCAGACCCAGATTCAGGCTTTCAAGAATCCTGATCTGCCTATCAAGGTGGTCGCAAACCTACCTTACTACATCACAACACCAATCCTTATGCACTTGATTGAGAGCAAGATTCCTTTTGCGGAGTTTGTGGTCATGATACAAAAAGAAGTGGCAGATCGTATTTCAGCTATGCCAAATACTAAAGCATACGGTTCTTTGTCAATCGCAGTGCAGTATTATATGACTGCCAAAGTATCATTTATCGTTCCGAGAACTGTTTTTGTTCCTGCTCCAAATGTAGATTCAGCTATTTTGAAAATGGTCTGTAGAGATCAACCAGTAGTGAGTGTTCAAGATGAGGATTTCTTTTTCAGAGTGTCAAAAGTAGCCTTCGTACATCGTCGTAAAACACTTTGGAATAATCTAACGAGTCATTTTGGAAAATCAGAAGATACTAAAGCAAAATTGGAAAAAGCATTAGAAATAGCAAAAATTAAGCCATCTATTCGCGGAGAAGCCTTATCTATCCCTGATTTTGCAAGTTTAGCAGATGCCTTGAAAGAGGTTGGGATA

SEQ ID NO: 16860 - protein, 290 aa, Streptococcus agalactiae
MRIADKTVTRAILERHGFTFKKSFGQNFLTDTNILQKIVDTAEIDKGVNVIEIGPGIGALTEFLAENAAEVMAFEIDDRLIPILADTLARFDNVQVVNQDILKADLQTQIQAFKNPDLPIKVVANLPYYITTPILMHLIESKIPFAEFVVMIQKEVADRISAMPNTKAYGSLSIAVQYYMTAKVSFIVPRTVFVPAPNVDSAILKMVCRDQPVVSVQDEDFFFRVSKVAFVHRRKTLWNNLTSHFGKSEDTKAKLEKALEIAKIKPSIRGEALSIPDFASLADALKEVGI

SEQ ID NO: 16861 - protein, 489 aa, Streptococcus agalactiae
GTGGAGTATAATGTAACGGAAGCATTGACTAGAGCTGGGGTAGATTTAGCAACGCTTGCAGTCAAAGGGACTGCAACTATGGTAACCAGTAAAATTCAATCAATAAAGGATGTAAAAGATGCTGCAACATTGAGAGCTACTTATGATGATTTAATTAACGAATTATTAGCTGAACGGGAGCAAGCAATTCGCATTGCACAGTCATATAAAGAAGAGTATGAAAAAATTAATATAGATGATGAGGATATTGAATATCTATCCAATACTCTCGAGCAAGGAATCTCATTGTTATATAATTTTTCTGGTCTAAATGAGGAACAGGAACGAACAATGAAACAATTGGTTACATTATTGAATAAAGATACTTTAAAAACAATGCAGTTGATTGGATTTAATTATAAGCAAGCAATAGGAGAACCACTAACCGAAGCTTGTGCAACTGCAATTAAAAATAAGTTTATAACTCAGAATAGTAAAGGCAAAAGGAAG

SEQ ID NO: 16862 - protein, 163 aa, Streptococcus agalactiae
MEYNVTEALTRAGVDLATLAVKGTATMVTSKIQSIKDVKDAATLRATYDDLINELLAEREQAIRIAQSYKEEYEKINIDDEDIEYLSNTLEQGISLLYNFSGLNEEQERTMKQLVTLLNKDTLKTMQLIGFNYKQAIGEPLTEACATAIKNKFITQNSKGKRK

SEQ ID NO: 16863 - protein, 558 aa, Streptococcus agalactiae
ATGAAAAAAATTGATATTCAAGAAGTGATCGTTGTCGAAGGGAAAGATGATACTGCTAATCTGCGACGCTTTTACAATGTTGATACCTATGAAACTAGAGGTTCAGCAATTGATGAAGATGATTTAGAGCGTATCGAACGTTTGCACAATTTGCGGGGAGTTATCGTCTTTACAGACCCAGATTATAATGGCGAGCGTATCCGTAAAATCATCATGAATGCCATTCCGACAGTCCGCCATGCCTTCCTCAATCGAGACGAGGCAAAGCCAGGCTCAAAGACCAAGGGACGATCTCTGGGTGTCGAGCATGCCAGCTTTGAAGATTTGCAGAAGGCACTCTCAAAAGTGACTCAGCATTTCGATGATGAAGATCATTTCGATATCACCCAAGCAGACCTCATTCGTTGGGGATTCATTACTGCTAGCGATAGCCGAAAACGCCGTGAGTATCTTGGGAATCAACTCCGTATCGGCTACTCAAATGGTAAACAACTCCTCAAACGCCTCAGACTCTTCGGAGTGACCAAGGCAGAAGTTGAAGAGTGTATGGAGGGGTAT

SEQ ID NO: 16864 - protein, 186 aa, Streptococcus agalactiae; identical to SEQ ID NO: 3262

SEQ ID NO: 16865 - protein, 852 aa, Streptococcus agalactiae
ATGCTTCAGTCTTATGTTATAATAATAAAGATTAATGCTTGTAGCTACGATAAGCAAAGAAAGAACGATGATATGATAAAAATATTTGATACCCATACCCACCTTAACGTAGAAAATTTTGAAGGAAAGATAGACGAGGAAATTAATTTAGCTAGCGAACTCGGTGTTACAAAAATGAATGTTGTCGGCTTTGACCAAGATACCATTTCAAAATCTTTGGAATTATCTTCCCAATATGCACAGGTATATAGCACAATAGGATGGCATCCAACTGAAGCTGGTTCTTATGATGATAATATTGAGTCAATGATTATCAGTCATTTAGAAAATCCCAAGGTTATTGCACTTGGTGAAATTGGTCTGGATTATTATTGGATGGAGGATCCCAAAGATATTCAGATCGAGGTGTTTAAGCGTCAAATTGAACTTTCAAAAGAGTATAACCTTCCTTTTGTCGTTCATACACGTGATGCGTTAGAAGACACTTATGAAGTCATTAAGGAATCTGGAGTTGGGCCTTTTGGTGGTATAATGCACTCTTTTTCTGGTTCTTTGGAAATGGCTCAGAAATTTATTGATTTAGGGATGATGATTTCCTTTTCTGGTGTTGTGACCTTTAAGAAGGCATTAGATGTACAAGAAGCTGCACGAGAGTTGCCATTAGATAAGATATTAGTGGAAACAGATGCTCCTTATTTGGCTCCTGTACCTAAAAGAGGTCGAGAAAACAAAACCGCTTATACGAGATATGTCGTTGAAAAAATAGCAGAGCTACGAGGCATAACTGTGGAAGAGGTAGCGGAGGCTACATACCAAAATGCAGTAAGGATATTTAGACTTGATGAAAAAAAT

SEQ ID NO: 16866 - protein, 284 aa, Streptococcus agalactiae; identical to SEQ ID NO: 3266

SEQ ID NO: 16867 - protein, 270 aa, Streptococcus agalactiae
ATGTGGGATGTCCTGACTGGTAAGGAGTCAGTAAGGACTTTAAAAAAACAATTGGATAAAGAATTGATACATAGCGTGTACGCGCCACGCAAGAGATCTAAGTTTCACGATATTATTACGTCGCATCATAAAGAAATAGACGAAGTAGCCATCAACACAAAGACAGCTATTCATAAAGTTGCTAATCAATTGGACGAGGCAATAAAAGGAGAATTTCGTTCAAAGGTTGAGGAGGCTATTGAAAGCAATCAGCAAAAATATAATCATTTA

SEQ ID NO: 16868 - protein, 90 aa, Streptococcus agalactiae; identical to SEQ ID NO: 3268

SEQ ID NO: 16869 - protein, 390 aa, Streptococcus agalactiae
ATGGCACTGATTGATATCATTGAAAAACAATTAGCTGATACTCAGAGAAAAATATCAGATTTAGATGATGCCTATCACCATAGTTGTTGCCAGTTTGAAGAAAAATTAGACGATCTCTCAGTAAGAAAAAATAAGATTATTAATATGCTTCAAGAAACTTACGACGCTGTTGAATATGATTTGAGATATAGTAATGATAGCTCAGATATGATGACGCTCAATCGTATTTTAGGTTCTTATCATGACGACTTAGAGCAAGCTTACCATAAAGAGTACTATGCCTTGTCCGCTCAAGAAGAAGAATATAGAGCTAACTATATTCGGCAACGTTCAGAACATGAACTAACCTTTGAAGAGTTGCAAAGGGAAAAGAAAAGAGAATTAATGAAG

SEQ ID NO: 16870 - protein, 130 aa, Streptococcus agalactiae
MALIDIIEKQLADTQRKISDLDDAYHHSCCQFEEKLDDLSVRKNKIINMLQETYDAVEYDLRYSNDSSDMMTLNRILGSYHDDLEQAYHKEYYALSAQEEEYRANYIRQRSEHELTFEELQREKKRELMK

SEQ ID NO: 16871 - protein, 441 aa, Streptococcus agalactiae
ATGCATGCTATTAAAGCGAAACTTAGTAGCTTTAAAAGTACGGGAAAAGAAGTTAGTAAGAATCAAGCTATTTTCCTAGATAGTCAACAAGCAAAAGTGATCTCTAGTGGTTTGGTAACGATATCAAAAGAAGCAGTTGAAGAAGTTAAAAAAGTTGAGCAAAAAGCAGTTGCTAAAGCAGAAGAGCTTTATCAATCTTTAAAAGTAGCTCCTACAGGAGTTACTGAACTAAGTCCTCAAGAATTGGAAGAAGCGTATGCTCAGTCAGGTGTTAGCTATGCGAGCATTGTCGGAGAAGCTCAAACCTTTTTCTCAAATAAAACTCAAGCGGCAGAAAGCATTTCTCACGCTTACGTTGAATTAGAAAACCAAATTAATAAAGGAGTTGAAGCTATGTTGCGACAAGATAGTAACTTGTCAGGGGAGTTTAAACAATGGCAC

SEQ ID NO: 16872 - protein, 147 aa, Streptococcus agalactiae
MHAIKAKLSSFKSTGKEVSKNQAIFLDSQQAKVISSGLVTISKEAVEEVKKVEQKAVAKAEELYQSLKVAPTGVTELSPQELEEAYAQSGVSYASIVGEAQTFFSNKTQAAESISHAYVELENQINKGVEAMLRQDSNLSGEFKQWH

SEQ ID NO: 16873 - protein, 714 aa, Streptococcus agalactiae
ATGGAAAAAGTCTTGACTGATTTAGATAGGGTAAATATAGCGAAGCAAGAGTATGAATTAGGTAGCCAACTTGATACACTAGTCAAAATAATGAGCCAAGATAAGGTACTCCCCATCGGTAAAGTTGCTCACGTTCAAGATGGAGGCAAAGAAACCGGGGAACAAATTTATACCATCACTCCAAATGGAACTTTAGACAAGCCAGAGGATGTTAAGGAAGTTACGGTTTTATTTAAGGGGTCAACAGCACCGTTTGGAGGGGATGATTGGAAAACAGACTGGTTTAAAAATGATATTCCAATAGCTAGTAAACTATTATTAAAGAAATTTGGTTCACAAAGTGTATCTCATAAACAAGGTACAAAGCAGTTAGAACAATCAGCTCATCTGCTAAAAGAAGTTATGAATAAATATCCTAACGCAAAAATTTCGGTCTACGGACACTCGTTAGGGTCAATGAATGCACAGTATGCTATTGCAGAATTGGATGATAATCAAATTTACCGAGTTCAAGGAGCTTGGATATATAACGGTCCAAACCTTTATAGTATTTTGACAGATAAACAAAAAGAACAGGTTGATAAAATAAAAGGGGTGGTCAATAATTACGTTGATTCCAAGGATAAAATTGGAATAGGTTATCCTAAAGAAGGAAGCGATAATGCTGTCGGAATTGTTAAAATAGTTGACAGTAAAGCTGTTTCAGGAGGTAGC

SEQ ID NO: 16874 - protein, 238 aa, Streptococcus agalactiae
MEKVLTDLDRVNIAKQEYELGSQLDTLVKIMSQDKVLPIGKVAHVQDGGKETGEQIYTITPNGTLDKPEDVKEVTVLFKGSTAPFGGDDWKTDWFKNDIPIASKLLLKKFGSQSVSHKQGTKQLEQSAHLLKEVMNKYPNAKISVYGHSLGSMNAQYAIAELDDNQIYRVQGAWIYNGPNLYSILTDKQKEQVDKIKGVVNNYVDSKDKIGIGYPKEGSDNAVGIVKIVDSKAVSGGS

SEQ ID NO: 16875 - protein, 390 aa, Streptococcus agalactiae
ATGAAGTCAATAAAATTACTTAGTTTTATTGTAATAATCCTTTTAGGGCTTGGTTTCACTGTAGGAGGTTTAAAAGTGACTGAAAACAATAAACAACAAGAATTATGGGAAATAGCTAATAGCAAAGACGCTAAAAATGCTTATCAAAAGTGGATTTATGCAGAAGATGAAGATGCTTTCAAAGAGAATGCTGTTATTAAGTCGTATGATATTGACAAAGAAAGTATCAAAAAAAATCCTATGGGAGGGATTTCGGTAAGGTTAATCATTAATAAAGATCCTAACTTATATATTACTTGTAATTTGGATAGGGATAATCAAGGGCATTTGGTCAGTCAAAGTAGCCATCAATCTCCCCAGTTAACTCATTTATTGGAAAGTAGAGGTCAT

SEQ ID NO: 16876 - protein, 130 aa, Streptococcus agalactiae; identical to SEQ ID NO: 3274

SEQ ID NO: 16877 - protein, 1260 aa, Streptococcus agalactiae
ATGCTTAAACGTCTAGGTAAAGTATTTGGACCTCTAGTTTGTGCTTTACTATTGTTGGTAGGATTATATTTTGTTTTTCCTGTTTCTCAGCCTCATCATTTAGGTAAGGAAAAAAACAGTGCAGTAGCGTTGACGAAGGCAGGTTTTAAAAGCAGAGTTCAAAAAGTTAGAGCTTTCAGTGATCCTAAAGCCAATTTTGTCCCTTTCTTTGGTTCAAGTGAGTGGCTAAGATTTGACGCAATGCATCCATCAGTTTTAGCAGAGGCTTACAATAGGTCTTATATCCCATATCTTTTAGGTCAAAAAGGGGCGGCTTCTCTGACACAATACTATGGCATTCAACAGATTAAAGGACAAATCAAAAATAAAAAAGCTATCTATGTTATTTCTCCGCAATGGTTTGTTCGCAAGGGAGCCAACAAAGGTGCTTTTCAAAACTATTTCAGCAACGATCAAACCATTCGATTTTTGCAAAATCAAACAGGGACAACCTACGATAGGTATGCTGCTCGTCGATTGTTAAAATTATATCCTGAAGCTTCTATGTCAGATTTGATAGAAAAAGTTGCAGATGGCCAAAAACTATCAAATAAAGACAAACAAAGACTAAAGTTTAATGATTGGGTATTTGAGAAGACAGATGCTATTTTTAGCTATCTACCACTAGGAAAAACTTATAATCAGGCAATAATGCCTCATGTTGGTAAATTACCGAAAGCATTCTCATATAATCATTTATCGCGTATTGCATCACAAGATGCTAAAGTAGCAACGAGATCAAATCAATTTGGTATTGATGATCGCTTTTACCAAACAAGAATTAAAAAGCACTTAAAAAAATTGAAAGGGTCACAACGACATTTCAATTATACTAAGTCACCAGAATTTAATGATTTACAGTTGGTTCTTAATGAATTCTCAAAACAAAATACAGATGTCCTTTTTGTCATACCACCAGTAAATAAAAAGTGGACAGACTACACAGGGCTTGATCAAAAAATGTATCAAAAATCTGTAGAAAAAATAAAACACCAACTTCAAAGTCAAGGTTTCAATCATATCGCTGACCTTTCTCGAGATGGAGGTAAGCCATACTTTATGCAAGATACAATCCATTTAGGTTGGAATGGTTGGTTAGAGCTAGATAAGCATATCAATCCATTTTTAACAGAGGAAAACAGCAAGCCGAATTATCACATTAATAATAAATTTTTGAAGAAATCTTGGGCAAAATATACAGAACGTCCAAGTGATTACAAG

SEQ ID NO: 16878 - protein, 420 aa, Streptococcus agalactiae
MLKRLGKVFGPLVCALLLLVGLYFVFPVSQPHHLGKEKNSAVALTKAGFKSRVQKVRAFSDPKANFVPFFGSSEWLRFDAMHPSVLAEAYNRSYIPYLLGQKGAASLTQYYGIQQIKGQIKNKKAIYVISPQWFVRKGANKGAFQNYFSNDQTIRFLQNQTGTTYDRYAARRLLKLYPEASMSDLIEKVADGQKLSNKDKQRLKFNDWVFEKTDAIFSYLPLGKTYNQAIMPHVGKLPKAFSYNHLSRIASQDAKVATRSNQFGIDDRFYQTRIKKHLKKLKGSQRHFNYTKSPEFNDLQLVLNEFSKQNTDVLFVIPPVNKKWTDYTGLDQKMYQKSVEKIKHQLQSQGFNHIADLSRDGGKPYFMQDTIHLGWNGWLELDKHINPFLTEENSKPNYHINNKFLKKSWAKYTERPSDYK

SEQ ID NO: 16879 - protein, 237 aa, Streptococcus agalactiae; identical to SEQ ID NO: 7967

SEQ ID NO: 16880 - protein, 79 aa, Streptococcus agalactiae; identical to SEQ ID NO: 3278

SEQ ID NO: 16881 - protein, 1263 aa, Streptococcus agalactiae
GTGATACAGGCATTTTTAGAAAAACTTCCTCACTTGGATGTTTATGGGAATCCACAATATTTCTTCTACCTTATCTTAGCTGTCCTACCAATTTACATCGGCTTATTCTTTAAGAAGCGTTTTGCCTTATATGAGATTATTTTTAGTCTAAGTTTTATTGTAATGATGTTGACTGGTAGTACTTTTAATCAATTGAAGTCACTATTGGCATACGTTGTCGGACAGTCTCTGCTAGTTTTTATCTATAAAGCTTACCGGAAACGATTTAATCATACTTTGGTCTTTTATGTAACGGTTTGTTTATCTATTTTTCCGCTATTTTTGGTAAAATTAATTCCAGCTATATCTGAGGATGGGCATCAGTCACTTTTTGGGTTTCTAGGAATTTCTTACCTTACTTTTAGAGCTGTTGCTATGATTATTGAAATGAGAGACGGTGTCTTGAAAGAATTTACTTTATGGGAATTCTTAAGATTTTTACTCTTCTTTCCAACTTTCTCAAGTGGACCAATTGATCGTTTTAAACGATTCAATGAGGATTACATTAATATCCCAGATCGAAACGAACTCCTAGATATGTTAGGTCAAGCGATTCATTATTTGATGTTAGGTTTTCTCTATAAGTTTATTTTAGCCTATATTTTTGGAAGTCTGATTATGCCTCCTCTAAAAGAATTAGCGCTAGAACAGGGTGGTGTGTTTAATTGGCCAACACTTGGGGTTATGTATGCCTTTGGTTTTGATTTGTTCTTTGATTTTGCAGGTTACACAATGTTTGCGTTGGCTATTTCTAACCTAATGGGGATTAAGTCTCCGATTAACTTTGACAAACCTTTCAAATCACGCGACCTAAAAGAATTTTGGAATAGATGGCATATGAGCCTTTCTTTCTGGTTTAGAGACTTTGTTTTCATGAGGCTTGTTAAGCTTTTAGTTAAAAATAAAGTTTTTAAAAACCGTAATGTTACTTCAAGTGTAGCTTATATTATCAATATGCTTCTTATGGGATTCTGGCATGGGTTAACTTGGTACTATATAGCCTATGGTCTCTTTCATGGGATTGGCCTAGTTATTAATGACGCTTGGGTACGTAAGAAGAAAAATATTAATAAAGAAAGAAGATTGGCTAAAAAACCACTTTTACCAGAAAACAAATGGACTTATGCTTTGGGTGTCTTCATCACCTTTAATGTAGTTATGTTTTCTTTCTTGATTTTTTCAGGATTTTTAGATCTTTTGTGGTTCCCACAACCGCATAACAAA

SEQ ID NO: 16882 - protein, 421 aa, Streptococcus agalactiae; identical to SEQ ID NO: 3280

SEQ ID NO: 16883 - protein, 1533 aa, Streptococcus agalactiae
ATGATACATGATATGATTAAAACAATTGAGCATTTTGCTGAGACACAAGCTGATTTTCCAGTGTATGATATTTTAGGGGAAGTCCATACTTATGGACAACTTAAAGTAGACTCTGACTCTCTAGCTGCTCATATTGATAGCCTAGGCCTTGTTGAAAAATCACCTGTCTTAGTATTCGGTGGTCAAGAATATGAAATGTTGGCGACATTTGTTGCTTTAACAAAGTCAGGGCATGCTTATATACCGGTTGACCAACACTCTGCTTTGGATAGAATACAGGCTATTATGACAGTTGCTCAACCAAGCCTTATCATTTCAATTGGTGAATTTCCTCTTGAAGTTGATAATGTCCCAATCCTAGACGTTTCTCAAGTTTCAGCTATTTTTGAAGAAAAGACTCTTTATGAGGTAACACATTCTGTTAAAGGTGATGATAATTACTATATTATTTTCACTTCAGGGACTACTGGTTTACCAAAAGGTGTGCAAATTTCACATGACAATTTATTGAGCTTTACAAATTGGATGATTTCTGATGATGAGTTTTCAGTTCCTGAAAGACCGCAAATGTTGGCTCAACCGCCATATTCATTTGACTTATCAGTTATGTATTGGGCACCAACACTAGCTATGGGAGGCACCCTGTTTGCCCTACCAAAAACAGTAGTTAATGATTTCAAAAAACTATTCGCTACCATTAATGAATTGCCAATACAGGTTTGGACTTCGACACCATCATTTGCTGATATGGCGCTACTATCTAACGATTTCAATTCAGAGACCTTGCCACAGTTAACACATTTTTATTTTGATGGGGAAGAGTTAACTGTCAAGACTGCACAAAAACTTCGTCAACGTTTTCCAAAAGCTCGTATCGTTAATGCATATGGGCCAACAGAAGCAACAGTTGCTCTATCCGCAGTAGCAATTACTGATGAAATGTTAGAAACATGCAAACGCCTTCCAATTGGTTACACTAAAGATGACTCACCAACGTATGTGATTGATGAAGAAGGTCATAAATTACCAAACGGAGAGCAAGGTGAAATCATTATTGCTGGACCAGCAGTATCAAAAGGCTATCTTAACAATCCAGAAAAGACAGCTGAGGCATTTTTCCAATTCGAAGGTCTACCTGCTTACCATACCGGTGACTTAGGAAGTATGACCGATGAAGGTCTTCTGCTTTACGGTGGGCGTATGGATTTCCAAATTAAATTTAACGGCTATCGTATTGAATTAGAAGATGTTTCTCAAAACTTAAACAAATCGCAGTATGTAAAATCAGCAGTAGCAGTGCCACGTTATAACAAGGATCATAAAGTTCAAAACTTATTAGCCTATATTGTCTTAAAAGAAGGTGTAAGAGATGATTTTGAACGTGATTTGGATTTGACAAAAGCAATTAAGGAAGACTTAAAGGACATTATGATGGATTACATGATGCCATCTAAATTTATCTATCGAGAGGATTTACCTTTGACACCAAATGGGAAAATTGATATCAAAGGTCTTATGAGCGAGGTAAACAAG

SEQ ID NO: 16884 - protein, 511 aa, Streptococcus agalactiae
MIHDMIKTIEHFAETQADFPVYDILGEVHTYGQLKVDSDSLAAHIDSLGLVEKSPVLVFGGQEYEMLATFVALTKSGHAYIPVDQHSALDRIQAIMTVAQPSLIISIGEFPLEVDNVPILDVSQVSAIFEEKTLYEVTHSVKGDDNYYIIFTSGTTGLPKGVQISHDNLLSFTNWMISDDEFSVPERPQMLAQPPYSFDLSVMYWAPTLAMGGTLFALPKTVVNDFKKLFATINELPIQVWTSTPSFADMALLSNDFNSETLPQLTHFYFDGEELTVKTAQKLRQRFPKARIVNAYGPTEATVALSAVAITDEMLETCKRLPIGYTKDDSPTYVIDEEGHKLPNGEQGEIIIAGPAVSKGYLNNPEKTAEAFFQFEGLPAYHTGDLGSMTDEGLLLYGGRMDFQIKFNGYRIELEDVSQNLNKSQYVKSAVAVPRYNKDHKVQNLLAYIVLKEGVRDDFERDLDLTKAIKEDLKDIMMDYMMPSKFIYREDLPLTPNGKIDIKGLMSEVNK

SEQ ID NO: 16885 - protein, 1185 aa, Streptococcus agalactiae
ATGTTTAGTGATTTACGCAAAAAATTTGTCTTTTTGACCATGTCAATCCTTATTGTCGTTGTTCTCTTTCTATTTGCAGTTAGTAATCGCTACAATCAATATTGGGATGAATATGATGCATATAGGATTGTTAAATTAGTTGCCAAAAATGATTATTTAGGAATACCAGGCGATGAACCGATTGCTTTGGTGACTATAGATAACCAAAAGATGGTTAAGATTCAAAGCAATAATACTGATTTGACAAATGATGTTATCGAAAAATCTAGTTTGAAGCTCCTTGAGCAAGGAAAGAAGTCACGAAAATGGAAGTCTTTTATATATTCCATAAAAGAATATAAAGATAAAACCTACACCATAGCTATTATGGATTTGGCTAGTTATGAAGTCCCTTATGCAAGGCGTTTTCTAATTCTTGTTTTTACTATTTTTGGATTTTGTTTATTAGCAGCTGTAAGTCTTTATCTTTCTCGATTTATTGTAGGACCTGTAGAGACAGAAATGACTCGCGAAAAACAGTTCGTTTCAGATGCGAGTCATGAGCTGAAGACCCCTATTGCAGCTATACGAGCCAACGTTCAGGTTCTGGAACAGCAAATTCCAGGGAATCGTTATCTGGATCATGTTGTTTCGGAGACTAAGCGAATGGAGTTTTTAATTGAAGATTTGCTTAATTTGTCTAGACTTGATGAAAAACGCTCCAAGGTAAATTTCAAAAAGTTAAACTTATCTGTCTTATGTCAAGAAGTACTTCTAACATATGAAAGTTTGGCATATGAAGAAGAAAAGTGTTTAAATGATACGATTGAAGATGATGTCTGGATTGTTGGAGAAGAGAGTCAGATTAAGCAAATTTTAATAATTCTTTTGGATAATGCTATTAGGCATTCTTTGTCAAAATCAGCAATCCAGTTTAGTCTTAAACAAGCTCGAAGAAAAGCTATTCTGACAATATCAAATCCAAGTGCTATCTATTCCAAAGAGGTTATGGATAATCTCTTTGAGCGTTTTTATCAAGCTAAAGATGATCATGCAGATTCTCTCAGTTTTGGTCTAGGCTTATCTATTGCTAAAGCAATCGTGGAACGCCATAAGGGGAGAATTAGAGCATATCAAGAAAAAGACCAATTACGTCTTGAAGTCCAGTTACCAATTGATGGATTTTGGACCAATACCATGATTAAT

SEQ ID NO: 16886 - protein, 395 aa, Streptococcus agalactiae; identical to SEQ ID NO: 3284

SEQ ID NO: 16887 - protein, 670 aa, Streptococcus agalactiae
ATGAGACTTCTTGTAGTTGAGGATGAAAAAAGTATAGCAGAGGCTATTCAGGCTTTATTGGCAGATAAAGGTTATTCTGTTGATTTAGCATTTGATGGAGATGATGGGTTAGAATACATTTTGACAGGTCTCTATGATTTAGTCCTGTTGGATATTATGTTACCCAAACGCTCAGGATTATCTGTTTTAAAAGAGTGAGGGAAGCTGGTTTAGAAACCCCAATAATCTTTTTAACTGCAAAATCACAGACTTATGATAAAGTTAATGGTTTAGATTTAGGGGCAGATGATTATATCACAAAACCCTTTGAAGCAGATGAATTGCTAGCTAGAATTAGGCTGAGAACCAGACAATCTTCTCTAATCAGAGCAAATCAATTGCGGCTTGGAAATATAAGGCTTAACACAGATTCACATGAGCTAGAATCTAAAGAAAGTAGTGTAAAATTATCCAATAAAGAATTTCTCTTGATGGAAGTTTTTATGCGAAATGCAAAGCAGATTATTCCTAAAATCAGTTGATTTCTAAGGTTTGGGGACCTTCAGACAATTCAGAATATAACCAGTTAGAAGTATTTATTTCTTTTTTGCGAAAAAAATTGCGCTTTTTAAAAGCAGACATTGAAATAATAACCACTAAGGGCTTTGGATATTCCTTGGAGGAGAGGACA

SEQ ID NO: 16888 - protein, 224 aa, Streptococcus agalactiae; identical to SEQ ID NO: 3286

SEQ ID NO: 16889 - protein, 130 aa, Streptococcus agalactiae
GTGAAACGTACTTATCAACCAAGTAAAATCCGTCCCACGTAAACACGGATTCCGTCACCGTATGTCAACTAAAAACGGACGTCGCGTGCTTGCTAGCCGCCGTCGTAAAGGACGTAAAGTGTTATCAGCT

SEQ ID NO: 16890 - protein, 44 aa, Streptococcus agalactiae
  VARIANT 12, 13: Xaa = Any Amino Acid
MKRTYQPSKIRXXRKHGFRHRMSTKNGRRVLASRRRKGRKVLSA

SEQ ID NO: 16891 - protein, 459 aa, Streptococcus agalactiae
GTGGAGTATAATGTAACGGAAGCATTGACTAGAGCTGGGGTAGATTTAGCAACGCTTGCAGTCAAAGGGACTGCAACTATGGTAACCAGTAAAATTCAATCAATAAAGGATGTAAAAGATGCTGCAACATTGAGAGCTACTTATGATGATTTAATTAACGAATTATTAGCTGAACGGGAGCAAGCAATTCGCATTGCACAGTCATATAAAGAAGAGTATGAAAAAATTAATATAGATGATGAGGATATTGAATATCTATCCAATACTCTCGAGCAAGGAATCTCATTGTTATATAATTTTTCTGGTCTAAATGAGGAACAGGAACGAACAATGAAACAATTGGTTACATTATTGAATAAAGATACTTTAAAAACAATGCAGTTGATTGGATTTAATTATAAGCAAGCAATAGGAGAACCACTAACCGAAGCTTTTGTGCACTGCATTAAAATAAAGTTA

SEQ ID NO: 16892 - protein, 153 aa, Streptococcus agalactiae
MEYNVTEALTRAGVDLATLAVKGTATMVTSKIQSIKDVKDAATLRATYDDLINELLAEREQAIRIAQSYKEEYEKINIDDEDIEYLSNTLEQGISLLYNFSGLNEEQERTMKQLVTLLNKDTLKTMQLIGFNYKQAIGEPLTEAFVHCIKIKL

SEQ ID NO: 16893 - protein, 408 aa, Streptococcus agalactiae
TTGCGGGGAGTTATCGTCTTTACAGACCCAGATTATAATGGCGAGCGTATCCGTAAAATCATCATGAATGCCATTCCGACAGTCCGCCATGCCTTCCTCAATCGAGACGAGGCAAAGCCAGGCTCAAAGACCAAGGGACGATCTCTGGGTGTCGAGCATGCCAGCTTTGAAGATTTGCAGAAGGCACTCTCAAAAGTGACTCAGCATTTCGATGATGAAGATCATTTCGATATCACCCAAGCAGACCTCATTCGTTGGGGATTCATTACTGCTAGCGATAGCCGAAAACGCCGTGAGTATCTTGGGAATCAACTCCGTATCGGCTACTCAAATGGTAAACAACTCCTCAAACGCCTCAGACTCTTCGGAGTGACCAAGGCAGAAGTTGAAGAGTGTATGGAGGGGTAT

SEQ ID NO: 16894 - protein, 136 aa, Streptococcus agalactiae
MRGVIVFTDPDYNGERIRKIIMNAIPTVRHAFLNRDEAKPGSKTKGRSLGVEHASFEDLQKALSKVTQHFDDEDHFDITQADLIRWGFITASDSRKRREYLGNQLRIGYSNGKQLLKRLRLFGVTKAEVEECMEGY

SEQ ID NO: 16895 - protein, 570 aa, Streptococcus agalactiae
ATGCTTCAGTCTTATGTTATAATAATAAAGATTAATGCTTGTAGCTACGATAAGCAAAGAAAGAACGATGATATGATAAAAATATTTGATACCCATACCCACCTTAACGTAGAAAATTTTGAAGGAAAGATAGACGAGGAAATTAATTTAGCTAGCGAACTCGGTGTTACAAAAATGAATGTTGTCGGCTTTGACCAAGATACCATTTCAAAATCTTTGGAATTATCTTCCCAATATGCACAGGTATATAGCACAATAGGATGGCATCCAACTGAAGCTGGTTCTTATGATGATAATATTGAGTCAATGATTATCAGTCATTTAGAAAATCCCAAGGTTATTGCACTTGGTGAAATTGGTCTGGATTATTATTGGATGGAGGATCCCAAAGATATTCAGATCGAGGTGTTTAAGCGTCAAATTGAACTTTCAAAAGAGTATAACCTTCCTTTTGTCGTTCATACACGTGATGCGTTAGAAGACACTTATGAAGTCATTAAGGAATCTGGAGTTGGGCCTTTTGGTGGTATAATGAACTCTTTTTCTGGTTCTTTGGAAATNNNNNTTAAT

SEQ ID NO: 16896 - protein, 190 aa, Streptococcus agalactiae
  VARIANT 187, 188, 189: Xaa = Any Amino Acid
MLQSYVIIIKINACSYDKQRKNDDMIKIFDTHTHLNVENFEGKIDEEINLASELGVTKMNVVGFDQDTISKSLELSSQYAQVYSTIGWHPTEAGSYDDNIESMIISHLENPKVIALGEIGLDYYWMEDPKDIQIEVFKRQIELSKEYNLPFVVHTRDALEDTYEVIKESGVGPFGGIMNSFSGSLEXXXN

SEQ ID NO: 16897 - protein, 1353 aa, Streptococcus agalactiae
ATGAAAAAAGAAAGTATATCTATTAAAGATATCTTGTGGTTTATTATTCCGTCGTTATTTGGAGTATTATTATTAATGACTCCATTTAAATATAATGGTATGACAACAGTAGCTGTCTCTGTAATCTCTAAGACAATTAATCAATGGATTAACGCTGTTTTTCCTATACATTATATTATTTTACTAATCATTTTTATTTCATGTGTGTTAGCACTTTGTTATCGTCTGTTTAGACCTAGCTTTATTGAAAAAAATGACTTGCTAAAAGAAATTTCTGACATTACCATTTTCTGGCTGATTATTCGTTTGATCGGTTTGGCACTTGGTCTGATGACGGTTTTACATATTGGTCCTGAAATGGTATGTGGGAAAGAGACAGGCGGCCTTATCCTTTTTGATTTGATTGGTGGTTTGTTTACCATTTTCCTTGCTGCGGGTTTTATTCTTCCATTTTTGACAGAATTTGGTCTACTGGAGTTTGTTGGTGTCTTCCTAACTCCCATTATGCGTCCATTCTTTCAGCTACCTGGTCGGTCAGCAGTTAATTGTGTAGCCTCATTTGTAGGTGATGGTACTATTGGAATTGCTTTGACCGATAAGCAGTATGTTGAGGGTTATTATACCAGTAGAGAAGCTGCAACGATTTCCACTACTTTTTCAGCAGTATCAATCACTTTTTGTCTTGTTGTTTTGCAGAATGTTGGCTTAACTGATTATTTTGGCCATTTTTATCTAACAGTCATCATTAGCAGTGTTGTCTGTGCATTCATTATCCCTTATATCCCTCCCTTATCTCGTCAATCAAATAGTTATTACACTAAACCAAAGAAAGAAACATCTGAGGTAATTCCGGATGGTTATAACAAGATAGAGTGGGGACTTAAGCTTGCCATCGATAAATCAAAAGCAAATGGAAACATGAAGACTTTTGTCAATAATGCCTCTAAGACAGTACTTAGTTTATGGTTTGGCGTTATGCCAACAATTATGACTGTCGGAACAATAGCTTTGATTATTTCAGTATCAACACCTATTTTTAAAATTTTAGGTACACCATTCCTTCCGTTCCTTGAACTTTTAGGGATTCCAGAAGCAGATATTGCGAGTCAAACCATGATTGTTGGTTTTTCAGATATGGTTGTTCCTTCGATAATGGCGGCTGAAATTCACAGTGAGATGACAAGGTTTATTGTCGCAACAGTTTCTATTGTGCAATTAATTTATATGTCTGAGACTGGTGCGGTGATATTAGGTTCCAAGATCCCTATCAACATTCTAGAATTATTTATCATTTTTATAGAGAGAACAATTATTTCATTACCTATTATTGTTTTGATGGCACATCTTTTCTTT

SEQ ID NO: 16898 - protein, 451 aa, Streptococcus agalactiae
MKKESISIKDILWFIIPSLFGVLLLMTPFKYNGMTTVAVSVISKTINQWINAVFPIHYIILLIIFISCVLALCYRLFRPSFIEKNDLLKEISDITIFWLIIRLIGLALGLMTVLHIGPEMVCGKETGGLILFDLIGGLFTIFLAAGFILPFLTEFGLLEFVGVFLTPIMRPFFQLPGRSAVNCVASFVGDGTIGIALTDKQYVEGYYTSREAATISTTFSAVSITFCLVVLQNVGLTDYFGHFYLTVIISSVVCAFIIPYIPPLSRQSNSYYTKPKKETSEVIPDGYNKIEWGLKLAIDKSKANGNMKTFVNNASKTVLSLWFGVMPTIMTVGTIALIISVSTPIFKILGTPFLPFLELLGIPEADIASQTMIVGFSDMVVPSIMAAEIHSEMTRFIVATVSIVQLIYMSETGAVILGSKIPINILELFIIFIERTIISLPIIVLMAHLFF

SEQ ID NO: 16899 - protein, 87 aa, Streptococcus agalactiae
ATGAGTTTATCCATCATGACAAAACACAAACACCTAACTCTCTCAGACCGTAATGACATCCAATCTGGTTTGGATAGAGAGAACCTT

SEQ ID NO: 16900 - protein, 30 aa, Streptococcus agalactiae
  VARIANT 30: Xaa = Any Amino Acid
MSLSIMTKHKHLTLSDRNDIQSGLDRGETX

SEQ ID NO: 16901 - protein, 743 aa, Streptococcus agalactiae
GTGAGTTCTTCAACCGTTTATCGACACATCAGAAAGGCTACCTATCCATCACACCAATCGACCTACCCAGAGCTGTGAAGTTCAAAAAAAGGCGAAAGAGCACACTCCCTCCTATTCCAAAAGCGATTAAAGAAGGGCGACGGTACGAGGATTTTATAGAACACATGAACCAATCAGAGCTGAACTCCTGGCTTGAAATGGACACGGTTATTGGACGGATTGGTGGAAAGGTCCTTCTCACCTTCAATGTCGCCTTCTGTAACTTCATCTTTGCCAAACTGATGGATTCTAAGACAGCTATCGAAACTGCTAAACACATACAGGTCATTAAGAGGACACTCTATGATAACAAGAGAGACTTCTTCGAACTCTTTCCTGTTATCCTAACGGATAATGGTGGGGAATTCGCTAGAGTGGATGATATTGAGATAGATGTTTGTGGACAGTCTCAACTCTTCTTTTGTGACCCTAATCGGTCTGACCAGAAAGCAAGAATCGAGAAGAATCATACCCTCGTGAGAGACATACTGCCTAAGGGGACTTCCTTCGACAACTTGACTCAAGAGGACATTAATCTGGCACTATCTCATATCAACAGCGTTAAGAGACAGGCTCTAAATGGTAAAACGGCTTATGAGCTATTCTCTTTTACTTACGGAAAAGACATCGCAAGTATACTCGGTATTGAGGAAATTACTGCGGAAGACGTCTGCCAATCTCCCAAACTATTAAAAGACAAAATC

SEQ ID NO: 16902 - protein, 248 aa, Streptococcus agalactiae
MSSSTVYRHIKKGYLSITPIDLPRAVKFKKRRKSTLPPIPKAIKEGRRYEDFIEHMNQSELNSWLEMDTVIGRIGGKVLLTFNVAFCNFIFAKLMDSKTAIETAKHIQVIKRTLYDNKRDFFELFPVILTDNGGEFARVDDIEIDVCGQSQLFFCDPNRSDQKARIEKNHTLVRDILPKGTSFDNLTQEDINLALSHINSVKRQALNGKTAYELFSFTYGKDIASILGIEEITAEDVCQSPKLLKDKI

SEQ ID NO: 16903 - protein, 1725 aa, Streptococcus agalactiae
TTGGAAAATTTATTACAACATAAGTTACCGGTCGCACCATTTGTAGAGTCAACGACCAATTGGATTACGAAAACTTTTTCTGGTTTATTTGACTTTATCCAGACAATCGGTAATGCATTGATGGATTGGATGACAAAAACATTACTATTCATTAATCCTTTACTTTTTATTGTACTAATTACAATTGCTGTATTTTTCTTAGCTAAGAAAAAATGGCAATTACCGACATTTACTTTCATTGGTTTGCTATTTATCTATAACCAAGGGCTGTGGGAACAGTTGATTAATACTTTTAACTTGGTTTTAGTAGCAAGTTTAATTTCTATTATTATTGGTGTACCACTAGGTATTTGGATGGCAAAAAGTGATAAAGTTAAACAAGTTGTTAATCCAATTCTTGACTTTATGCAAACTATGCCGGCATTCGTTTACCTTATTCCTGCAGTAGCCTTCTTTGGTATCGGTATGGTACCAGGTGTTTTTGCCTCTGTTGTATTTGCTCTGCCTCCAACAGTGCGCTTTACTAACTTGGCTATTCGTGAAATCCCACTTGAATTAATAGAAGCATCTGATTCATTTGGTTCAACAGCTAAGCAAAAATTATTCAAAGTTGAACTACCACTTGCTAAGAACACTATTATGGCAGGAATCAATCAAACTATGATGTTGGCTCTTTCTATGGTGGTTACAGGATCTATGATCGGTGCACCTGGACTTGGTCGTGAGGTGTTATCGGCGCTTCAACATGCTGATATTGGTACAGGATTTGTTAGTGGTCTATCGCTAGTTATTTTAGCAATCGTGTTAGACCGTGTTAGTCAATTCTTTAATTCCAAACCGGGTGAGAAGCAAGCTAAAACATCAAAAGTTAAAAAATGGGTAGGTTTAGGGGCCCTGGCTCTCTTCATTCTAGCAGCTCTTGGTCGCATTGTTGTCAATATGACTTCAGGAAATGAAGCCAAAGGTCAAAAAGTGAAGATAGCTTATGTCCAATGGGATTCAGAAGTTGCTTCAACCAACGTTATTGCTGAAGTTTTAAAATCTAAAGGATATGATGTTGAATTGACACCACTTGACAATGCGGTCATGTGGCAAACAGTCGCCAATGGGAATGCTGATTTTACAACAAGTGCTTGGTTACCAAAGACCCACGGGCAATATTTTAATAAATACAAAAATAGTTTAGATGACTTAGGTCCTCACGTTGAGAACGTCAAAATAGGTTTAGTTGTTCCTAAATACATGAACGTAAATAGTATTGAAGAATTATCAAATCAAGCAGATAAACAAATTACAGGTATCGAACCAGGTGCAGGTATTATGAAGTCTGCTAAACAATCCCTTAAAGATTATCCAAACCTTTCAAGTTGGAAGTTGTTATCAGCATCAACAGGAGCTATGACAACAACCTTAGGGAAGGCTATCAAAAACAAAGATCAAGTAGTCATTACAGGTTGGTCACCTCACTGGATGTTTGCTAAGTATGATTTAAAATACCTTAAAGATCCTAAGAAATCATTTGGTGGTGAAGAACATATCAATACAATAGCACGCAAGAATTTGAAAAAAGATATGCCAAAAGTATATAAAATTATCGATAAGTTCAAGTGGACTAAAGAAGATATGGAATCTATCATGTTAGATATGGATAAAGGTATGGAGCCTGCTAAAGCAGCTCAAAAATGGATTAAAAACCACAAAAAAGAAGTTTCAGAGTGGACTAAA

SEQ ID NO: 16904 - protein, 575 aa, Streptococcus agalactiae
MENLLQHKLPVAPFVESTTNWITKTFSGLFDFIQTIGNALMDWMTKTLLFINPLLFIVLITIAVFFLAKKKWQLPTFTFIGLLFIYNQGLWEQLINTFNLVLVASLISIIIGVPLGIWMAKSDKVKQVVNPILDFMQTMPAFVYLIPAVAFFGIGMVPGVFASVVFALPPTVRFTNLAIREIPLELIEASDSFGSTAKQKLFKVELPLAKNTIMAGINQTMMLALSMVVTGSMIGAPGLGREVLSALQHADIGTGFVSGLSLVILAIVLDRVSQFFNSKPGEKQAKTSKVKKWVGLGALALFILAALGRIVVNMTSGNEAKGQKVKIAYVQWDSEVASTNVIAEVLKSKGYDVELTPLDNAVMWQTVANGNADFTTSAWLPKTHGQYFNKYKNSLDDLGPHVENVKIGLVVPKYMNVNSIEELSNQADKQITGIEPGAGIMKSAKQSLKDYPNLSSWKLLSASTGAMTTTLGKAIKNKDQVVITGWSPHWMFAKYDLKYLKDPKKSFGGEEHINTIARKNLKKDMPKVYKIIDKFKWTKEDMESIMLDMDKGMEPAKAAQKWIKNHKKEVSEWTK

SEQ ID NO: 16905 - protein, 1221 aa, Streptococcus agalactiae
ATGACAAATATTTTAGAAGTGAAGAATTTAACCAAAATTTTTGGGAAAAAGCAAAAAGCTGCTCTTGAAATGGTTAAGCAAGGAAAAAGTAAGACAGAAATTCTTGAAAAAACAGGAGCGACTGTAGGTGTCTATGATGCGAGTTTTGAAATAAAAGAAGGCGAAATTTTCGTTATCATGGGACTTTCTGGTTCAGGAAAATCAACTTTAGTTCGGATGTTAAACCGTTTGATTGACCCATCATCAGGAAATATCTATTTAGATGGTAAAGATATTGCAAAGATGAATGTAGAAGATTTACGTAACATTCGTCGTCATGATATCAACATGGTTTTCCAAAATTTTGGTCTTTTCCCACATCGTACAATTTTAGAAAATACAGAGTTTGGGTTAGAGATGCGTGGTGTTTCTAAGGAAGAACGTACAACGTTAGCTGAAAAAGCTTTGGACAATGCAGGTCTATTACCGTTTAAAGATCAGTACCCCAGTCAATTATCAGGAGGAATGCAACAGCGTGTTGGTTTAGCACGTGCCCTTGCTAACAGCCCTAAAATCCTTCTGATGGATGAGGCCTTCTCAGCTTTAGACCCATTAATTCGTCGTGAAATGCAAGATGAGCTTCTTGATCTTCAAGACACGAATAAACAAACTATTATTTTTATCAGCCATGATTTGAATGAAGCGTTACGTATTGGTGATCGTATTGCTCTGATGAAAGATGGAGAAATCATGCAGATTGGTACAGGAGAAGAGATTTTGACTAATCCGGCTAATGATTTTGTTCGTGAGTTTGTTGAAGACGTTGATCGCTCAAAAGTGTTAACTGCTCAAAATATTATGATAAAACCTTTAACAACTGTTTTAGAAATTGATGGCCCACAAGTTGCTTTAACAAGAATGCATCGTGAGGAAGTCTCAATGTTAATGGCAACGAATCGTCGTCGCCAACTTCTGGGATCTCTAACTGCAGATGCTGCAATTGAAGCTCGTAAGAAAGGTTTGCCGCTTTCTGAAGTGATTGATAAAGATGTTGTAACGGTCTCAAAAGATACAGTTATTACAGATATCATGCCTTTAATTTATGATTCATCTGCTCCGATAGCCGTTACTGATGATAATGATAGACTCCTAGGGGTTATCATTAGAGGACGTGTGATCGAAGCACTTGCTAACGTTCAAGATGAAACAGTAGTAGAATCGCCAAAAGAAACGGTAGAAGCT

SEQ ID NO: 16906 - protein, 407 aa, Streptococcus agalactiae
MTNILEVKNLTKIFGKKQKAALEMVKQGKSKTEILEKTGATVGVYDASFEIKEGEIFVIMGLSGSGKSTLVRMLNRLIDPSSGNIYLDGKDIAKMNVEDLRNIRRHDINMVFQNFGLFPHRTILENTEFGLEMRGVSKEERTTLAEKALDNAGLLPFKDQYPSQLSGGMQQRVGLARALANSPKILLMDEAFSALDPLIRREMQDELLDLQDTNKQTIIFISHDLNEALRIGDRIALMKDGEIMQIGTGEEILTNPANDFVREFVEDVDRSKVLTAQNIMIKPLTTVLEIDGPQVALTRMHREEVSMLMATNRRRQLLGSLTADAAIEARKKGLPLSEVIDKDVVTVSKDTVITDIMPLIYDSSAPIAVTDDNDRLLGVIIRGRVIEALANVQDETVVESPKETVEA

SEQ ID NO: 16907 - protein, 663 aa, Streptococcus agalactiae
ATGGATAAAGCGTTTAAAGCTGAAGATAAAATTAATTTAATTGTGACATCTAAGCACCCTCGTCCACAATTTTACTCTATTGCTGAAGCAGAAGAGTTAGTGGCAGAAGGATATAAGGTGATTGACTGGGCTTCAAATGTGTCGCTTAATCAAGAGCCAGATGTTGTCTTTGCTGCGGCGGGAACAGAACCTAACTTAGAAGCTTTGGCAGCTATTAGCATTCTTCATAAGGCTTTCCCAGAACTTAAGATTAGATTTGTTAATGTATTAGACATCCTAAAACTTCGTCATCCTTCACAAGATGCTCGCGGTTTATCAGATGAAGAGTTTAACAAAGTCTTTACCACAGATAAACCTGTTATTTTTGCTTTCCATGGTTATGAAGATATGATTCGAGATATTTTCTTTAGTCGTCACAATCATAATTTGCATACGCATGGTTACCGTGAAAATGGTGACATCACAACACCATTTGATATGCGCGTGATGTCAGAATTGGACCGATTCCATCTGGCACAGGATGCAGCTCTTGCTTCTTTAGGAAATAAAGCACAAGCCTTCAGTGATGAAATGAATCAAATGGTTGCTTATCACAAAGACTATATTCGTGAACACGGAGACGATATTCCAGAAGTACAAAATTGGAAATGGGAAAATATCAAG

SEQ ID NO: 16908 - protein, 221 aa, Streptococcus agalactiae
MDKAFKAEDKINLIVTSKHPRPQFYSIAEAEELVAEGYKVIDWASNVSLNQEPDVVFAAAGTEPNLEALAAISILHKAFPELKIRFVNVLDILKLRHPSQDARGLSDEEFNKVFTTDKPVIFAFHGYEDMIRDIFFSRHNHNLHTHGYRENGDITTPFDMRVMSELDRFHLAQDAALASLGNKAQAFSDEMNQMVAYHKDYIREHGDDIPEVQNWKWENIK

SEQ ID NO: 16909 - protein, 2280 aa, Streptococcus agalactiae
ATGTCAGAATTTGATACAAAATCATATTTAGAAAAACTTGATGCATGGTGGAGAGCAGCTAATTATATTTCTGCAGCACAAATGTATCTAAAGGATAACCCTCTCTTGAGACGAGAGCTGGTTGAAAACGACTTAAAGGTTCATCCAATTGGTCACTGGGGCACTGTACCTGGACAAAATTTTATCTATGCTCACTTAAATCGCGCTATTAATAAATACGATTTAGACATGTTCTATATTGAAGGTCCAGGTCATGGTGGTCAAGTTATGGTATCTAATTCATATTTAGATGGTTCATATACTGAATTAAACCCAAATATTGAGCAAACAGAGGATGGCTTTAAGCAGTTATGTAAAATCTTCTCTTTCCCAGGTGGAATTGCATCCCATGCTGCACCAGAAACACCAGGGTCAATTCATGAAGGCGGTGAACTTGGTTACGCACTTTCTCATGCGACAGGTGCCATCCTAGACAATCCAGATGTTATTGCTGCGACTGTTATTGGTGATGGTGAAGGTGAAACAGGACCACTTATGGCTGGTTGGCTATCTAATACCTTTATCAATCCAGTAAATGATGGTGCTGTTCTACCAATCTTCTATTTAAATGGTGGTAAAATCCATAACCCAACTATCTTTGAACGTAAGACAGATGAAGAATTATCTCAGTTTTTTGAAGGATTAGGTTGGAAACCTATTTTTGCAGATGTTGTTGAACTCTCTGAGGATCATGCGGCTGCTCATGCTTTGTTTGCAGAAAAATTAGATCAAGCTATTCAAGAGATTAAAACCATTCAATCAGAAGCACGACAAAAACCAGCAGAAGAAGCTATCCAAGCAAAATTCCCTGTCTTAGTTGCACGTATTCCTAAGGGTTGGACTGGTCCAAAAGCTTGGGAAGGAACACCAATTGAAGGTGGCTTCCGCGCTCACCAAGTACCAATTCCAGTAGATGCCCACCATATGGAACATGTTGATTCTCTTTTGTCATGGCTTCAATCATACCGTCCAGAAGAATTATTTGATGAAAATGGTAAAATCGTTGATGAGATTGCTGCTATTTCACCAAAAGGTGATCGTCGCATGTCCATGAATCCAATAACCAATGCTGGTATTGTTAAAGCAATGGATACAGCAGATTGGAAGAAATTTGCTCTTGATATTAATGTTCCAGGTCAAATTATGGCACAAGATATGATTGAATTTGGAAAATATGCAGCAGATTTGGTAGATGCTAATCCAGATAATTTCCGTATTTTTGGTCCAGATGAAACGAAATCAAATCGTCTTCAAGAAGTGTTTACACGTACTAGCCGTCAATGGCTTGGTCGTCGTAAACCAGATTATGACGAAGCTTTAAGTCCAGCTGGACGTGTTATTGATTCCCAATTGTCTGAACACCAAGCAGAAGGTTTCTTAGAAGGTTATGTTTTAACTGGTCGTCACGGCTTCTTTGCTTCATACGAATCATTCCTTCGCGTTGTAGATTCAATGGTAACACAACATTTCAAATGGTTACGTAAATCAAAAACACACACAACATGGCGTAAAAATTATCCAGCGCTTAACCTAATTGCAGCTTCAACTGTTTTCCAACAAGATCATAATGGTTATACTCACCAAGATCCAGGTATTTTAACTCATTTAGCTGAAAAAACACCTGAATACATTCGTGAATATTTACCAGCAGATACTAACTCACTTCTAGCTGTTATGGATAAAGCGTTTAAAGCTGAAGATAAAATTAATTTAATTGTGACATCTAAGCACCCTCGTCCACAATTTTACTCTATTGCTGAAGCAGAAGAGTTAGTGGCAGAAGGATATAAGGTGATTGACTGGGCTTCAAATGTGTCGCTTAATCAAGAGCCAGATGTTGTCTTTGCTGCGGCGGGAACAGAACCTAACTTAGAAGCTTTGGCAGCTATTAGCATTCTTCATAAGGCTTTCCCAGAACTTAAGATTAGATTTGTTAATGTATTAGACATCCTAAAACTTCGTCATCCTTCACAAGATGCTCGCGGTTTATCAGATGAAGAGTTTAACAAAGTCTTTACCACAGATAAACCTGTTATTTTTGCTTTCCATGGTTATGAAGATATGATTCGAGATATTTTCTTTAGTCGTCACAATCATAATTTGCATACGCATGGTTACCGTGAAAATGGTGACATCACAACACCATTTGATATGCGCGTGATGTCAGAATTGGACCGATTCCATCTGGCACAGGATGCAGCTCTTGCTTCTTTAGGAATAAAGCACANNNNNTTAATTAAT

SEQ ID NO: 16910 - protein, 760 aa, Streptococcus agalactiae
  VARIANT 756, 757: Xaa = Any Amino Acid
MSEFDTKSYLEKLDAWWRAANYISAAQMYLKDNPLLRRELVENDLKVHPIGHWGTVPGQNFIYAHLNRAINKYDLDMFYIEGPGHGGQVMVSNSYLDGSYTELNPNIEQTEDGFKQLCKIFSFPGGIASHAAPETPGSIHEGGELGYALSHATGAILDNPDVIAATVIGDGEGETGPLMAGWLSNTFINPVNDGAVLPIFYLNGGKIHNPTIFERKTDEELSQFFEGLGWKPIFADVVELSEDHAAAHALFAEKLDQAIQEIKTIQSEARQKPAEEAIQAKFPVLVARIPKGWTGPKAWEGTPIEGGFRAHQVPIPVDAHHMEHVDSLLSWLQSYRPEELFDENGKIVDEIAAISPKGDRRMSMNPITNAGIVKAMDTADWKKFALDINVPGQIMAQDMIEFGKYAADLVDANPDNFRIFGPDETKSNRLQEVFTRTSRQWLGRRKPDYDEALSPAGRVIDSQLSEHQAEGFLEGYVLTGRHGFFASYESFLRVVDSMVTQHFKWLRKSKTHTTWRKNYPALNLIAASTVFQQDHNGYTHQDPGILTHLAEKTPEYIREYLPADTNSLLAVMDKAFKAEDKINLIVTSKHPRPQFYSIAEAEELVAEGYKVIDWASNVSLNQEPDVVFAAAGTEPNLEALAAISILHKAFPELKIRFVNVLDILKLRHPSQDARGLSDEEFNKVFTTDKPVIFAFHGYEDMIRDIFFSRHNHNLHTHGYRENGDITTPFDMRVMSELDRFHLAQDAALASLGIKHXXLIN

SEQ ID NO: 16911 - protein, 1089 aa, Streptococcus agalactiae
ATGCCTAACGTTAAAGATATTACTAGAGAATCATGGATTTTATCAACATTCCCAGAATGGGGTACATGGCTAAACGAAGAAATTGAAGAAGAAGTTGTTGCTGAGGGCAACTTTGCAATGTGGTGGTTAGGAAACTGTGGTGTTTGGATTAAAACACCAGGTGGTGCTAATGTTGTTATGGACCTATGGTCAAACCGCGGTAAATCAACAAAAAAAGTAAAAGATATGGTTCGTGGACACCAAATGGCTAATATGGCAGGTGTTCGTAAACTCCAACCAAACTTACGCGCACAACCAATGGTTATTGATCCATTTGCTATTAATGAATTGGATTACTATCTTGTTTCACATTTCCACAGTGACCACATTGATATCAACACTGCGGCAGCCATTATTAATAATCCTAACTTAGACCATGTTAAATTTGTTGGGCCATATGAATGTGGTGAAATTTGGAAAAAATGGGGAGTTCCAGAAGAACGAATCATCGTGATTAAACCAGGTGAATCATTTGAGTTTAAAGATATCAAAGTTACTGCTGTTGAATCATTTGACCGTACTTGCTTGGTGACACTTCCAGTAGATGGTGCAGAAGAACATGATGGAGAACTTGCTGGTTTAGCCGTGACTGATGAAGAAATGGCTCGTAAAGCAGTTAACTATATTTTTGAAACACCAGGTGGAACAATCTATCATGGAGCTGACTCACATTTTTCAAATTATTTTGCTAAACATGGTAAAGACTACAAGATTGACGTAGCTATTAACAACTATGGTGATAACCCAGTTGGTATTCAGGATAAAATGACTTCAATCGATCTTCTTCGTATGGCAGAAAATCTCCGTGCCAAAGTCATTATTCCTGTACACTACGATATCTGGTCTAACTTCATGGCTTCTACAGACGAAATCTTACAATTGTGGAAAATGCGTAAAGAACGCCTTCAATATGACTTCCATCCATTTATTTGGGAAGTTGGAGGTAAATACACTTATCCACAAGATAAAGATAGAATTGAATACCATCACCCACGTGGTTTTGATGATTGCTTCGAACAAGAATCAAATATTCAATTTAAAGCACTTCTA

SEQ ID NO: 16912 - protein, 363 aa, Streptococcus agalactiae; identical to SEQ ID NO: 3304

SEQ ID NO: 16913 - protein, 1675 aa, Streptococcus agalactiae
TTGATTATTCTCGATAAAAAAAGTTATGACCTCCTCTTTTACCTATTGAAATTAGAGGAACCTGAAACAGTTATGGCAATTGCCAACGCACTTAATCAGTCTAGACGTAAAGTGTATTATCACTTAGAGAAGATAAACGATGCACTGCCTAGCGATGTGCCTCAGATTGTTAGTTATCCACGTGTAGGAATCTTGCTACAGAAAAACAAAAAGCAGCCTGTCGTCTTTTATTAGATGAAGTGACTGATTATAGTTACGTCATGAAAAGTAGTGAGAGGTTGCAGCTGTCTTTAGTATCTATCGTAGTAGCTAAGGACCGCATAACGATTGATAGGTTGATGCAACTAAACGATGTTTCTCGAAATACTATCTTAAACGATTTAAACGAATTAAGAAGTGAGTTAGCAGAGAAAGAATATAATTTACAGTTACAATCAACAAAATGTCGTGGTTATTTTTTAGATGGTCATCCATTGTCCATTATCCAGTACTTATATAAGCTCTTAGATGATATCTACCATAATGGAAGTAGTAGTTTTATAGACCTTTTTAATCATAAACTGTCTCAAGCTTTTGGTGCCAGCACTTATTTTTCTAAAGAGGTTCTTGATTATTTTCATCATTATCTCTTCATTTCTCAACGAAGTCTAGGTAAGAAAATCAACAGTCAAGATGGTCAGTTTATGATTCAGATTTTGCCTTTTATACTAATGGCTTATCGTAAGATGCGATTAAGTCCTGAAGTACAGACCTCTCTTAATAGTGATTTTAGCTTGGTTTGGCAACGTAAGGAATATGAGATTGCTAAAGAGTTGGCTGATGAGCTGGAAGAAAATTTTCAGTTATCACTGGATGAGATTGAAGTGGGACTAGTAGCCATGCTTATGCTTAGTTTCCGCAAGGACCGTGACAATCATTTAGAGAGCCAGGATTATGATGATATGCGAGCTACTCTAACCAGTTTTTTGAAAGAATTGGAAGAACGATATCACCTTCACTTTGTTCATAAAAAGGACTTACTAAGACAACTTCTTACTCACTGCAAGGCACTCTTATATCGTAAACGTTATGGTATTTTTTCTGTTAATCCTTTAACAGAGCATATTAAAGACAAATATGAAGAACTTTTTGCCATAACCTCGTCTTCTGTAAAGCTTTTAGAGAAAGCTTGGCAAATCAAATTGACCGATGATGATGTAGCATATCTAACGATTCATTTAGGAGGGGAACTTCGTAATAGTCAACAATCTCCTAATAAACTTAAGTTAGTTATTGTATCTGATGAAGGAATAGCGATTCAGAAACTTCTTTTAAAGCAATGTCAACGCTACTTAACAAATAGTGATATAGAAGCTGTTTTTACAACCGAACAGTATCAAAGTGTGAGTGATCTTATGCATGTAGATATGGTTGTCTCTACTAGTGACGCTTTAGAATCTCGTTTTCCGATGTTAGTAGTTCACCCTGTTTTGACAGATGATGATATTATTCGCTTGATTCGCTTTTCTAAAAAAGGTAACTGTGCAAATAGTAATCAATTTACCAATGAACTTGAAAAAACAATTGCTCAATATGTCAAGGAAGATAGTGAACGCTACGTGCTGAAATCTAAGATTGAGAAACTTATTCATCAAGAATTGCTCCAAGACGTCCTTCCCCTTCAAAGTACAGTTGT

SEQ ID NO: 16914 - protein, 559 aa, Streptococcus agalactiae
MIILDKKSYDLLFYLLKLEEPETVMAIANALNQSRRKVYYHLEKINDALPSDVPQIVSYPRVGILLTEKQKAACRLLLDEVTDYSYVMKSSERLQLSLVSIVVAKDRITIDRLMQLNDVSRNTILNDLNELRSELAEKEYNLQLQSTKCRGYFLDGHPLSIIQYLYKLLDDIYHNGSSSFIDLFNHKLSQAFGASTYFSKEVLDYFHHYLFISQRSLGKKINSQDGQFMIQILPFILMAYRKMRLSPEVQTSLNSDFSLVWQRKEYEIAKELADELEENFQLSLDEIEVGLVAMLMLSFRKDRDNHLESQDYDDMRATLTSFLKELEERYHLHFVHKKDLLRQLLTHCKALLYRKRYGIFSVNPLTEHIKDKYEELFAITSSSVKLLEKAWQIKLTDDDVAYLTIHLGGELRNSQQSPNKLKLVIVSDEGIAIQKLLLKQCQRYLTNSDIEAVFTTEQYQSVSDLMHVDMVVSTSDALESRFPMLVVHPVLTDDDIIRLIRFSKKGNCANSNQFTNELEKTIAQYVKEDSERYVLKSKIEKLIHQELLQDVLPLQSTVC

SEQ ID NO: 16915 - protein, 759 aa, Streptococcus agalactiae
ATGAAACAAGAAGATATTATTATCAATAGTATTGTATTCAAAAAACAGTTAGACAAAGGTTTTACACAAGTTCAGCTCATTAAGTTAGTAAAGGATTTAGGATTTTCACGATTTGAGATACGTCAAGAATTGCTTCAAGATCCAGATAGAGAGCTACCCGCTTTAAAAGCAGAGGCTGACTTTTATGATATCAATCTTTACTATAGTGCTAATGAAGACCTTATCAAAGGAGGGAAAGTTAATCCTTATCTTAATAAAGGCCTTAAAGAAGCATCACAGTTAGGAGCTCCTTTCATTAAGCTAAATGTTGGACAAACCAGAAACTTAAGTAAAGAAGAGTTAGAACCTCTTAAAGAGATATTGAAAAGCCAAACTATTGGTATAAAGGTGGAAAATAATCAAGACCCTAAAGCAGCTACAGTGGAGAATTGCCAATATTTTATGACTCTAGTGAAAGAATTACAAATACCAATAAGTTTTGTTTTTGATACTGCTAATTGGGCCTTTATCAACCAAGACCTATACCAAGCGGTAAATAACTTAGCTTGTGATACCACCTACCTTCACTGTAAAAATTTTATACAGGTAGCTGGAAAGCCCCACCTCTCGAAGAGCCTCTTCGAAGGAGAGATTAATCTGACTGATTTGTTAAAGAGTTTCTCTAATTGTGAGTATCTAGCTCTAGAATACCCCACAGAGTTGGAGATATTAAAAAGGGATGTTCAACGTTTAATCTCTATCAGTAATAGTCAAAACTTT

SEQ ID NO: 16916 - protein, 253 aa, Streptococcus agalactiae; identical to SEQ ID NO: 3308

SEQ ID NO: 16917 - protein, 1515 aa, Streptococcus agalactiae
ATGACTTACTACCTTAGCATTGACTACGGCGGTACAAATACCAAGGCGCTTATTTTTGACAAATTAGGACACCAAATCGCTGTTTCGAGTTTTGAAACTTTAAAAAATGAGGCTCAATCTGGTCATCGTCAAGTAAACCTTGTTAAAACGTGGAATGCTATAACTTCTGCTATTAGAGAGGTTATTCAAATCTCAAAACTCAGCCCTGAGCAGATTAGTGCAGTAGCATGTATTGGACATGGGAAAGGTCTTTATCTGCTAGATAATAAGTTGGAGCCACTTGAACAAGGAATTTTGTCTACAGATAATCGTGCCAAAGATTTGGCGCAATATTTCGAATCTAAACTTGATAATATTTGGGAGTTGACTCGGCAACATATTTTCCCTTCACAAAGTCCAGTTATTTTACGTTGGCTTAAAGATTATCAGCCCGAAACCTATAAATCAATAGGGGCGGTCCTTTCTGCAAAGGACTTTATTCGGTATAAGCTTACAGGAAAAGTACAGCAAGAATATGGTGACGCTTCAGGTAATCATTGGATAAATTTTCAAACAGGAACTTATGATCCAGCTATTTTAGATTTTTTTGGCATTAGAGAGATAGAAAACTCACTTCCTGAACTTATAGATAGTGCAGATTTAGTTCCTGGGGGAATTAGTTCTCAAGCAGCAAAAGAGACTGGTCTTGTAGAAGGAACCCCCGTTGTTGGAGGGCTCTTTGACATCGATGCTTGTGCTCTTGGATCAGGTGTTTTAGAGTCAGATACTTTTAGTGTTATTTCGGGAACTTGGAATATTAATACTTATCCAAGTTTAAAACCAGCAAAGCAAGATAGTGGTCTTATGACTTCCTATTTTCCAGATCGTCGTTATCTCTTAGAGGCAAGTAGCCCTACTTCTGCAGGGAATCTTGATTTTATGTTAAAAATGCTCATGCATCAAGAAATTGATAACGCTAAATCTAGTGGAGGTTCTATCTATGATAATTTAGAAGAATTTCTCACTCATACTGATGCCACACATCATGGACTTATTTTCTTTCCGTTTCTTTACGGTAGTAACACATCACAAGATGCTAGCGCTTGCTTTTTTGGGCTAACAACTAAATCGACGAAATCTCAGATGATACGTGCGGTATATGAAGGTATTGCGTTTGCACATAAGCAGCATATCACTGATTTAATAAAAAGTAGGGGCGGTGTGCCAAAAATAATTCGTTTCTCTGGCGGAGCTACCAACTCACCAGCATGGATGCAAATGTTTTCTGATATCTTAAACCTTCCTATTGAAACAGTAGAAGGCACAGAATTAGGAGGATTAGGAGGAGCTATTTTAGCACGTCATGCTTTAGATAAGATTTCGTTAAAGGAAGCAGTCCAAGATATGGTTCGTGTAAAAGCTATTTATAAACCTCAATTATCCGAAGTAAAGGGGTACGAAAAAAAATATCACGCCTACCAAAAATTATTGGAAACACTGGATCCTATTTGGTCGGAACTCGGTCATCTGAATAAG

SEQ ID NO: 16918 - protein, 505 aa, Streptococcus agalactiae
MTYYLSIDYGGTNTKALIFDKLGHQIAVSSFETLKNEAQSGHRQVNLVKTWNAITSAIREVIQISKLSPEQISAVACIGHGKGLYLLDNKLEPLEQGILSTDNRAKDLAQYFESKLDNIWELTRQHIFPSQSPVILRWLKDYQPETYKSIGAVLSAKDFIRYKLTGKVQQEYGDASGNHWINFQTGTYDPAILDFFGIREIENSLPELIDSADLVPGGISSQAAKETGLVEGTPVVGGLFDIDACALGSGVLESDTFSVISGTWNINTYPSLKPAKQDSGLMTSYFPDRRYLLEASSPTSAGNLDFMLKMLMHQEIDNAKSSGGSIYDNLEEFLTHTDATHHGLIFFPFLYGSNTSQDASACFFGLTTKSTKSQMIRAVYEGIAFAHKQHITDLIKSRGGVPKIIRFSGGATNSPAWMQMFSDILNLPIETVEGTELGGLGGAILARHALDKISLKEAVQDMVRVKAIYKPQLSEVKGYEKKYHAYQKLLETLDPIWSELGHLNK

SEQ ID NO: 16919 - protein, 987 aa, Streptococcus agalactiae
ATGAAAAAAATTGATGGACATGCTCATATTGTTGATACAATTGCAGGATTTAATGGTAAAGGGCGTCTTAATGCCCTTGGAAACGGTTATGCTATTTGGGATGATGGTGATTTAATTAAGCTCATCCCAGACGAATACGGTGACAAAGCATTTACAGCTGAATCTTTTTTGAAGTATATGGATGCTAATGGTGTAGATAAAGCAGTCATTTTGCAAGGTCATCTTAATGGTTATCAAAATTATTATACGCATTTAGCTATTAAACGTTATCCAGAACGTTTTACAGGCGCATTCTCTGTTGATCCATTTGCAGATAATGCAATGCAAATTGTAAAACGTCATGTTGAAGTCCTTGGTTTTCGAGCTATTAAATTTGAAATTAGTCAAGGAGGGGGTATCCATGGATACCGTGGACAAAAAACGCCTTTCCGTCTTGATACAGACCCACATGTGAGTCGTATTTTGACTTATCTGTTAGACTATCCAGGATTTGTAGTTACAGTTGATTATGGCAATTGGGATCAAATTAGTCACCAACCTGATGCTATTGCTAATTTAGCTCGCCTTTATACGAGTCTCGATTTTGTTGTTTGTCACCTCTCTTTTCCACATGTTGAGCATTCAAATCGATTGCGTGCTGAACTTAATATGTGGAAAAACTTCAACAATATCTATACTGATATTTCAGCTATTCAAGATATTGATGCCCCAGATAGTTTTCCTTTTCCAAAATCAGAACAAAATGTACGTATTGCTAAAGAAGTTCTTGGGGCTAAGCGTATCATTTGGGGAACTGATTCTCCATGGTCAGCGACCTTCAATACTTACGAAGAATTAGCTACTTGGCTAGAGAATGTTGATATTTTCAGTCAAGAGGAACTAGAAGATGTTATGTACAATAATGCTGAGCGTGTTTACTTTAAAGAAGAACATGTAAAGGCTAACAGAGCAGGTATAGATGATACAACCAAAGAGCTCAATCTTTAT

SEQ ID NO: 16920 - protein, 329 aa, Streptococcus agalactiae
MKKIDGHAHIVDTIAGFNGKGRLNALGNGYAIWDDGDLIKLIPDEYGDKAFTAESFLKYMDANGVDKAVILQGHLNGYQNYYTHLAIKRYPERFTGAFSVDPFADNAMQIVKRHVEVLGFRAIKFEISQGGGIHGYRGQKTPFRLDTDPHVSRILTYLLDYPGFVVTVDYGNWDQISHQPDAIANLARLYTSLDFVVCHLSFPHVEHSNRLRAELNMWKNFNNIYTDISAIQDIDAPDSFPFPKSEQNVRIAKEVLGAKRIIWGTDSPWSATFNTYEELATWLENVDIFSQEELEDVMYNNAERVYFKEEHVKANRAGIDDTTKELNLY

SEQ ID NO: 16921 - protein, 1449 aa, Streptococcus agalactiae
ATGCTAGAAGCTTTACATAAATTCTTTGAAGTTTTTGGTGCAGCAACTGTTGTACCCGCTATGATTTTTATTGTCAGCCTTTTTCTAAAGGTCAATCCAAGGCGAGCTTTCTTTAGCGCCTTACGAGCTGGTGTTGGACTCACTGGCTTTGGTTGGATTATATCAGCTTTTGCTCCTATGGTGACTAAGTATATCCAGCAGATGGTTAAAACTACTGGTCTCCATTTACCAATTGTAGATATTGGTTGGCAGGCTGGTTCTCTCACCGCCTTTTCTTCTGAGATTGGCCTCTCTTTCTTTGTTTTTGGCTTGCTAATTGAATTGGGGCTTTTCTTGCTTGGGATTACCCGAGTATTTGTCCCATCTAATCTTTGGAATAACTTTGGCTATATGATTTGGGGTACAATGGCCTATGCAGCAACAGGTAATTTTATATTGTCTTTCGCATTTATGGTTTTTGTCTTACTCTATTCATTAGTGATGTCAGAAGTATTGGCAGATCGATGGTCGGAGTATTACGGTGTTAAAAATGCAACGATCAACTCGATTCATAATATTGAAACCCTTATTCCAGCTCTTATTCTTGATCCTCTTTGGAACCTACTTGGTGTCAATAAGGTAAAGTTGAATCCAGAATCATTAAAGACTAAGTTAGGGATATTTGGTGAGCCAATGACACTTGGTTTTATACTTGGTGTGATTATTGGTGTATTAGGTAGTTTACGTAACCTTGCAAGTATTGATACTTGGGGAGGTATACTTGGTTTTGCAGTTGCTCTTGCAGCGGTTATGACTATTTTTCCTTTGATTACGGGGGTATTTGCTAGTGCTTTTGCTCCTCTTGCTGAAGCAGTTGAACGCAATAAGAAAAAAGAAAGTCAAGCTGAGCAAGGAGCACTGGATAAAAAACGTTGGTTTATTGCAGTAGATGACGGTGTTGGTTTTGGAGAACCAGCAACTATTATCGCAGGTCTCATTTTAGTACCAATAATGGTTGTTATTTCCTTGATTTTACCTGGAAATGAAGCTTTACCAGTCGTTGACCTTATTGCTATTCCTTTTATGATTGAAGCTATGATAGCTGTGTCAAAAGGAAATATCCTTAAAGCTATTTTGAATGGAATCATATGGTTTTCACTAGGTCTTTATGCTGCTAGTGCCCTAGGTCCAATCTACACAGAAGCTGTTAAGCATTTTGGAACTGCTTTACCAGCAGGGGTAACTTTGATTATGAGCTTTAATCTCCTAGCTCATCCTTTGACAGCTCTAGTCTTCTTTGCTTGGATATCTGGGAATCCACTCTATATTGGTGTGACAGTTATTATCTATCTTGCTTTCTTGTTCTTGCTTCGTACTCGTCGTGAATCTATTTACGCATACCTTAAAACTATGGCTGATAAGAATAGCGGATATGAAGGTAGTTGTGAAAAAATCTTTATTGCTGAAGAT

SEQ ID NO: 16922 - protein, 483 aa, Streptococcus agalactiae
MLEALHKFFEVFGAATVVPAMIFIVSLFLKVNPRRAFFSALRAGVGLTGFGWIISAFAPMVTKYIQQMVKTTGLHLPIVDIGWQAGSLTAFSSEIGLSFFVFGLLIELGLFLLGITRVFVPSNLWNNFGYMIWGTMAYAATGNFILSFAFMVFVLLYSLVMSEVLADRWSEYYGVKNATINSIHNIETLIPALILDPLWNLLGVNKVKLNPESLKTKLGIFGEPMTLGFILGVIIGVLGSLRNLASIDTWGGILGFAVALAAVMTIFPLITGVFASAFAPLAEAVERNKKKESQAEQGALDKKRWFIAVDDGVGFGEPATIIAGLILVPIMVVISLILPGNEALPVVDLIAIPFMIEAMIAVSKGNILKAILNGIIWFSLGLYAASALGPIYTEAVKHFGTALPAGVTLIMSFNLLAHPLTALVFFAWISGNPLYIGVTVIIYLAFLFLLRTRRESIYAYLKTMADKNSGYEGSCEKIFIAED

SEQ ID NO: 16923 - protein, 954 aa, Streptococcus agalactiae
ATGGACAAGAAAAAAATCTTAGTAACGGGTATTGTGCCTAAAGAAGGTCTAAGAAAGCTTATGGACCGATTTGATGTTACTTATTCAGAAGATCGCCCATTTTCACGTGACTATGTGTTAGAGCATTTATCTGAATATGACGGATGGTTACTCATGGGACAAAAAGGTGATAAAGAGATGATTGATGCAGGTGAAAACTTACAAATTATTTCTTTAAATGCGGTTGGTTTTGATCATGTAGATACTGCGTATGCTAAAGAAAAAGGAATTGTAGTCTCTAATTCCCCTCAAGCAGTACGAGTTCCGACAGCGGAAATGACTTTTGCTTTAATTTTAGCTGCCAGTAAGCGCCTTGCATTTTATGATAGTATTGTAAGAAGTGGAGAGTGGATTGATCCGAGCGAACAACGTTATCAAGGTTTGACTTTGCAAGGTTCAACATTAGGTATTTACGGAATGGGACGCATCGGTTTGACAGTCGCAAATTTTGCTAAAGCATTTGGGATGACTGTTGTTTACAATGATGTTTATCGACTTCCTGAAGATAAGGAAAAAGAGCTTGGTGTAACCTATCTCGAATTTGATCAGCTTATTGAAACAGCTGATGTCATAACCATCCACGCCCCAGCATTACCATCAACAATCCACAAATTCAATAAAGATGTTTTTGCTAAGATGAAAAATCGAAGCTACTTAATCAACGCTGCTAGAGGCCCAATCGTTTCTGAAGAAGCACTTATTGAAGCTCTGAAAGAAGGTGAAATCGCGGGTGCGGGATTAGATGTTTTTGAGAATGAACCACAGGTATCTGAAGGCTTGAGAAGTCTTGATAATGTTATCATGAGTCCACATGCTGGGACAGGTACTATTGAGGGACGTAGAACTTTGGCTGAAGAAGCAGCTGACAACATCATTGCCTTCTTTGATGGCAAGCCACAAAATATTGTCAATAAG

SEQ ID NO: 16924 - protein, 318 aa, Streptococcus agalactiae
MDKKKILVTGIVPKEGLRKLMDRFDVTYSEDRPFSRDYVLEHLSEYDGWLLMGQKGDKEMIDAGENLQIISLNAVGFDHVDTAYAKEKGIVVSNSPQAVRVPTAEMTFALILAASKRLAFYDSIVRSGEWIDPSEQRYQGLTLQGSTLGIYGMGRIGLTVANFAKAFGMTVVYNDVYRLPEDKEKELGVTYLEFDQLIETADVITIHAPALPSTIHKFNKDVFAKMKNRSYLINAARGPIVSEEALIEALKEGEIAGAGLDVFENEPQVSEGLRSLDNVIMSPHAGTGTIEGRRTLAEEAADNIIAFFDGKPQNIVNK

SEQ ID NO: 16925 - protein, 1017 aa, Streptococcus agalactiae
ATGAAGATTAATAAATTATTGTCAGACAGACTTGAAGCTTGTTATTCAGTTTGTCGTTTGCAAAATCAAGACTATGATTTTTTATTAGTAGCTTCAGAGGTTGATCAAGCCTGCTTTGCTTATGATTTGAATAGCGATTTAGCAAAAATTGTTGTTTGGGAAGATGTGGGAGGTACCATGAGTATTATTCCAATTCCCGGAACCATGGATTTTTTGGCAACCCAGAAATTTTACCCAGGGTTTAAGGCCAAAGATTGTCAGGTTGTTTATGCAAGTTTTCAAGGAGATCATTGGGACATTTGTAACGCATTTGATTTTCCGTATTTACATCGCTTTGATCTCATTAAAGGTAAAGAAAATCAACTTTACTTTATAGGTTGTACAATTGCTAACAGTAAAGCCTACACTGAGGATTGGAGTGATAAAGGCCGAATTTTTGTTGCTCGTTTTAATACTCAAAACCATACATTGGAAGGATTGCAACAATTGCCTCAAACTTTATTAAAAAATCATGGATACTATGCCATTCAGGATGAAGGATATTCATTGATTACTTCAGTAGAAGGGGTACTCAAACTCACTTATCCAGAATTTTCTACTACAGGCGACTGGCAATTAGAACGGCTTTTCGATGAGGAGACAAGCGATGTGGTGAAAGTGGATATTAATCAGGATGGTAAGGATGAGTATGTGATCATCCAAGGTTTTCATGGAGATCGTTTACGTATCTTCACTGAAGATTTCGGTCGAGAATTATTCCATTATCCTGAAAAAACCCCATTTGGTCACGCTATTTGGAGTGGTCGTTTACTTAATCAGACTTGTTTCGTATTCGGGTGGCGATCAGAAAAAGCAGAATTAAGGCTTTTTCACTTTGTAGATGGGCACTTGGTTTCAGAATTAGTAGATGCAAAAGCAGCTTCTAGTAATGTCTTAGCTTTTGAAAAAGATGGAAAAGCTTATCTTTTCTCAGCCAATAACGGACGTGGCGAAGTTGCTCTTTATCAATTAGTAAAA

SEQ ID NO: 16926 - protein, 339 aa, Streptococcus agalactiae
MKINKLLSDRLEACYSVCRLQNQDYDFLLVASEVDQACFAYDLNSDLAKIVVWEDVGGTMSIIPIPGTMDFLATQKFYPGFKAKDCQVVYASFQGDHWDICNAFDFPYLHRFDLIKGKENQLYFIGCTIANSKAYTEDWSDKGRIFVARFNTQNHTLEGLQQLPQTLLKNHGYYAIQDEGYSLITSVEGVLKLTYPEFSTTGDWQLERLFDEETSDVVKVDINQDGKDEYVIIQGFHGDRLRIFTEDFGRELFHYPEKTPFGHAIWSGRLLNQTCFVFGWRSEKAELRLFHFVDGHLVSELVDAKAASSNVLAFEKDGKAYLFSANNGRGEVALYQLVK

SEQ ID NO: 16927 - protein, 977 aa, Streptococcus agalactiae
ATGTTTGAGAAGGTAACCATTAGTGATATTGCAAATTTAGTAGGTGTGTCAAAAGCTACAGTTTCCTATTATCTCAATGGGAACTATAAGAAAATGTCTCTGCAAACGAAAGAAAAAATCCGTTTAGCTATTAAGGAGACTGGTTATCAACCAAGTAAGATTGCTCAAAGTTTAGTTACAAAAAATACCCGTACTATTGGGGTCGTTATTGCTGATATTACCAATCCATTTATTTCGTCTGTGATGAAGGGAATACATGATACTTGTCAACAATTTGGTTACTCGGTTAACTTTACTAACTCGGATAATGATATTGACATTGAGTTGGAAAATTTAAACCGTTTAAATCAGCAAAACGTTTCAGGAATTATTTTAGATTCTGTAGATCCTAATCATTCATTTATAGAAACTTTGAGTAATGATCGTCTTGTCATGGTTGATAGACAAGCTAAAGATATTAAGGTAGATACTGTAGTATCCGACATAAAGAATCGACTCAATATTTCTTGAAAAAATGCAAGAAACTGGGTATCATGACATCTATTTTGTCACTTCCCATTGAAGGGATTTCAACCCGTGAGCTTCGTTACGAAGGTTTTAAAGAAGTGGTCAGTTCAAATCCTGATAAGTTGATTATTATCACTGAAGATGGTAGCACACAGAGAATTCTTGATATTATTGAACATTCAGAGCAAAAACCAGGGTTCTTAATGATGAACGGTCCAACTCTTTTGAATTTTATGAAAAAATTAAATCAATCAACGGTCAGATACCCTGAGGATTATGGTCTTGGGAGTTACGAAGATTTAGAATGGATGCAGGTGCTTACACCAAACGTTTCCTGTATAAAACAGGATTCATATGGCATTGGTTGTCTGGCTGCCCAATGTTTAATTGAAAAAATTAGTCAAGGAAACGAACCAACTACTGCAAGGTTACTAGAAGTAAAAAATCAAATCGTTATTCGTCAATCTTTT

SEQ ID NO: 16928 - protein, 327 aa, Streptococcus agalactiae
  VARIANT 167, 186: Xaa = Any Amino Acid
MFEKVTISDIANLVGVSKATVSYYLNGNYKKMSLQTKEKIRLAIKETGYQPSKIAQSLVTKNTRTIGVVIADITNPFISSVMKGIHDTCQQFGYSVNFTNSDNDIDIELENLNRLNQQNVSGIILDSVDPNHSFIETLSNDRLVMVDRQAKDIKVDTVVSDNKESTXIFLEKMQETGYHDIYFVTXPIEGISTRELRYEGFKEVVSSNPDKLIIITEDGSTQRILDIIEHSEQKPGFLMMNGPTLLNFMKKLNQSTVRYPEDYGLGSYEDLEWMQVLTPNVSCIKQDSYGIGCLAAQCLIEKISQGNEPTTARLLEVKNQIVIRQSF

SEQ ID NO: 16929 - protein, 645 aa, Streptococcus agalactiae
ATGAAATACTTTTTAGATACTGCCGATGTTTCTGAAATTCGTCGTCTTAATCGTTTAGGAATCGTTGATGGTGTTACTACCAATCCTACTATTATTTCACGTGAGGGGCGTGACTTTAAAGAAGTTATTAACGAAATTTGCCAAATCGTTGATGGTCCAGTTAGTGCAGAAGTGACAGGTTTAACTTGTGATGAAATGGTTACCGAAGCTAGAGAAATCGCTAAGTGGTCACCAAATGTTGTTGTTAAAATTCCAATGACTGAAGAAGGTTTAGCAGCAGTTTCACAATTATCAAAAGAAGGTATAAAGACAAATGTGACATTAATATTTACTGTGGCTCAAGGGCTTTCGGCAATGAAAGCTGGTGCAACCTTTATTAGTCCTTTTGTGGGTCGTCTTGAAGATATTGGAACAGATGCTTATGCTTTGATTCGTGACCTTCGTCACATTATTGATTTTTATGGTTTCCAATCTGAGATTATTGCTGCTAGCATTCGTGGATTGGCGCATGTGGAGGGCGTCGCTAAATGCGGTGCGCACATTGCCACTATTCCAGATAAAACATTTGCATCACTATTTACTCACCCGCTTACTGATAAAGGGATTGAAACTTTCTTAAAAGATTGGGATAGTTTCAAGAAGAAG

SEQ ID NO: 16930 - protein, 215 aa, Streptococcus agalactiae; identical to SEQ ID NO: 3326

SEQ ID NO: 16931 - protein, 714 aa, Streptococcus agalactiae
ATGGCAAAATCATTGCAAGAAATGCGTGAACGCGTGTGTGAAGCTAATAAATCACTACCAGTTCATGGTTTAGTTAAATTTACTTGGGGTAACGTTTCTGAAGTTGACCGCGAAGCAGGATTGATTGTTATCAAACCTTCAGGAGTTGACTATGACCAATTGACACCTGAAAATATGGTTGTCACAGACTTAGAGGGAAATATAGTGGAGGGGGATTTGAATCCATCATCTGATCTTCCAACTCATGTTCAACTTTATAAAGCATGGCCAGAAGTCGGTGGTATTGTTCATACTCATTCAACAGAAGCAGTTGGCTGGGCACAAGCGGGTCGCGATATTCCATTTTATGGAACAACACATGCAGATTATTTTTATGGGCCAGTACCATGTGCTAGGTCACTTAGTGAAGATGAAGTTAACACTGCTTATGAAAAAGAAACAGGTAGTGTTATTATAGAGGAATTTGAACGTCGGAATTTAGATCCAATGGCTGTTCCTGGTATTGTTGTACGTAATCATGGACCATTTACTTGGGGGAAAGATCCAGCACAAGCAGTTTATCACTCAGTCGTTCTTGAAGAAGTTGCCAAGATGAATCGTTTCACTGAACAAATTAATCCACGTGTTGAACCAGCTCCAAAATATATTATGGATAAACACTATTTACGTAAGCATGGACCAAATGCTTATTATGGTCAAAAAGGACAAGAACAT

SEQ ID NO: 16932 - protein, 238 aa, Streptococcus agalactiae
MAKSLQEMRERVCEANKSLPVHGLVKFTWGNVSEVDREAGLIVIKPSGVDYDQLTPENMVVTDLEGNIVEGDLNPSSDLPTHVQLYKAWPEVGGIVHTHSTEAVGWAQAGRDIPFYGTTHADYFYGPVPCARSLSEDEVNTAYEKETGSVIIEEFERRNLDPMAVPGIVVRNHGPFTWGKDPAQAVYHSVVLEEVAKMNRFTEQINPRVEPAPKYIMDKHYLRKHGPNAYYGQKGQEH

SEQ ID NO: 16933 - protein, 861 aa, Streptococcus agalactiae
ATGACACGTCCAATAGGAATTTACGAGAAGGCAACACCAAAACATTTTAACTGGTTAGAACGCCTACAATTTGCTAAAGAATTGGGATTTGATTTTGTAGAATTATCCATTGATGAGTCAGATGAACGTTTGGCACGTTTGGAGTGGTCAAAAGAAGAACGCCTTGAGTTGGTCAAAGCTATTTTTGAGACAGGAGTTCGTGTTCCAACAATTACATTTAGTGGTCATCGTCGTTTCCCAATGGGATCTAATGATCCTGAGAAAGAAGCGCGTGCGATGGATATGATGAAAAAATGTATCGTCTTTGCTCAAGATATTGGTATTCGTAATATTCAATTAGCAGGATATGATGTGTACTATGAAGAAAAATCTCCAGAGACACGTGCACGCTTTATTAAGAATCTTCGTCAAGCTTGTACTTGGGCCGAAGAAGCACAAGTTATTCTGTCTATTGAGATTATGGATGACCCATTTATGAATTCCATTGAGAAATATTTGGCTGTGGAAAAAGAGATTGATTCTCCTTATCTCTTTGTCTACCCAGATACTGGAAATGTATCAGCATGGCATAATGATCTTTGGAGTGAATTTTATAATGGACATCGCTCAATTGCAGCGCTTCATATTAAAGATACCTATGCTGTTACCGAAACGTCTAAAGGTCAATTCCGTGATGTTCCATTTGGTCAAGGGTGTGTTGATTGGGAAGAAATGTTTGCTGTCATTAAGAAAACAAATTATAATGGTCCATTCTTGATTGAAATGTGGTCGGAGAACTGTGAGACTGTAGAGGAAACACGTGCAGCCATTAAAGAGGCGCAAGATTTTCTTTACCCATTAATGGAGAAAGCAGGAGTGAAA

SEQ ID NO: 16934 - protein, 287 aa, Streptococcus agalactiae; identical to SEQ ID NO: 12288

SEQ ID NO: 16935 - protein, 662 aa, Streptococcus agalactiae
ATGACAAAACGTTTACCAAATTTACAAGTTGCACTTGACCACTCAGATTTACAAGGAGCTATCAAAGCTGCCGTATCAGTAGGACATGAAGTTGATGTTATTGAAGCTGGAACTGTTTGCCTTCTTCAAGTAGGTAGTGAATTAGTTGAGGTCCTTCGCAGTCTCTTCCCTGACAAAATAATTGTTGCTGATACAAAATGTGCTGATGCTGGTGGGACTGTTGCTAAAAATAATGCTGTTCGCGGTGCAGACTGGATGACTTGTATCTGTTGTGCTACTATTCCAACAATGGAAGCAGCCTTAAAAGCTATCAAAGAAGAACGCGGCGATCGTGGAGAAATTCAAATCGAACTATATGGTGATTGGACTTATGAGCAAGCGCACAATGGTTGGATGCAGGTATTTCACAAGCCATTTATCACCAATCTCGTGATGCGCTTCTTGCTGGCGAAACATGGGGAGAAAAAGATCTTAATAAGGTTAAAAAATTGATTGATATGGGCTTCCGAGTTTCTGTAACTGGTGGTTTATCAACTGATACTCTTCAATTATTTGAAGGTGTTGATGTCTTTACTTTTATTGCGGGTCGTGGTATTACAGAGGCAGATGATCCAGCCGCAGCAGCACGTGCATTTAAGGATGAAATTAAACGTATTTGGGGG

SEQ ID NO: 16936 - protein, 221 aa, Streptococcus agalactiae; identical to SEQ ID NO: 3332

SEQ ID NO: 16937 - protein, 483 aa, Streptococcus agalactiae
ATGAATTTAAAACAAGCCTTTATCGAAAATGACTCAATTCGTCTTAAATTATCTGCAAGCGATTGGAAAGAAGCAATCAAATTATCAATTGATCCATTAATTGAAAGTGGTGCTGTTGATGCAGAATATTACGATGCCATTATTGAATCTACAGAGGAATTTGGTCCGTACTACATTCTTATGCCGGGTATGGCGATGCCTCATGCTCGTCCAGAAGCAGGCGTAAAACGTGATGCATTTTCATTAATTACATTAACAGAGCCAGTAGTCTTTCCAGATGGCAAAGAAGTCTCAGTATTGTTAGCACTTGCTGCAACAAGTTCAGCTATTCATACTTCTGTTGCTATCCCTCAAATTATTGCCCTTTTTGAATTGGAAAATTCAATTCAGCGCTTGACGGAATGCCAAGAAGCAAAAGAAGTCCTTGCAATGGTAGAGGAATCAAAAAACAGCCCATATTTAGAAGGTTTAGATTTAGAAAGC

SEQ ID NO: 16938 - protein, 161 aa, Streptococcus agalactiae; identical to SEQ ID NO: 3334

SEQ ID NO: 16939 - protein, 276 aa, Streptococcus agalactiae
ATGGTTAAAGTTCTTACAGCATGCGGAAACGGCATGGGATCATCAATGGTTATCAAAATGAAAGTTGAAAATGCGCTTCGTCAATTAGGCGTTAGCAACTTTGAGTCAGCATCTTGCTCAGTCGGAGAAGCAAAAGGTTTAGCTGCGAACTATGATATCGTGGTTGCTTCAAACCACCTTATCCATGAATTAGACGGACGTACAAAAGGTCATTTAGTAGGTCTTGACAACCTTATGGATGACAATGAAATAAAAACAAAACTACAAGAAATTTTG

SEQ ID NO: 16940 - protein, 92 aa, Streptococcus agalactiae; identical to SEQ ID NO: 3336

SEQ ID NO: 16941 - protein, 660 aa, Streptococcus agalactiae
ATGTCTAATGTTAAATTAATCGGACCTGGTGCATTTGTACCAACTAAGCAAGCTTTCTTCATGTACATCCTTCAAACATCATTGACATTCTCAGTTTACCTTTTCATTTTGATGCAAGGTGTACGCATGTTCGTTACAGAATTGACAAATGCCTTCCAAGGTATCTCAAACAAACTTCTTCCAGGATCATTCCCAGCGGTTGACGTTGCAGCTTCATATGGTTTTGGTTCTTCAAATGCAGTTCTTTCAGGATTTGCTTTTGGTTTGATTGGTCAATTAATTACAATCGCTCTACTTGTTGTCTTCAAAAATCCAATCTTGATTATCACAGGATTCGTTCCAGTATTCTTTGATAATGCGGCAATCGCTGTTTATGCAGATAAACGTGGTGGCTGGAAAGCAGCAGTAGCTCTATCATTTATCTCAGGTATTATTCAGGTGGCACTTGGTGCTGTTGCTGTAGGTCTTTTAGGACTTGCAGGTGGTTATCATGGAAATATCGACTTTGAATTCCCATGGTTAGCATTTGGTTACATCTTCAAGTATTTAGGTATTGCTGGTTACGTGATTGTATGTCTCTTCTTCTTAGCTATTCCACAACTTCAATTTATGAAATCTAAAGATAAAGAAGCATACTATCGTGGTGATGCGCCTGCAGAA

SEQ ID NO: 16942 - protein, 220 aa, Streptococcus agalactiae
MSNVKLIGPGAFVPTKQAFFMYILQTSLTFSVYLFILMQGVRMFVTELTNAFQGISNKLLPGSFPAVDVAASYGFGSSNAVLSGFAFGLIGQLITIALLVVFKNPILIITGFVPVFFDNAAIAVYADKRGGWKAAVALSFISGIIQVALGAVAVGLLGLAGGYHGNIDFEFPWLAFGYIFKYLGIAGYVIVCLFFLAIPQLQFMKSKDKEAYYRGDAPAE

SEQ ID NO: 16943 - protein, 272 aa, Streptococcus agalactiae
ATGTACATGAAGAAAGCTTGCTTAGTTGGTACAAATGCACCAGGTCCGATTAATTTAACATTAGACATAATGTCTGGACCAAGGACAGCTAAGTCCTCCAAAGAAAACTAGCATCAATGTTGCTGATGCAACAACTGTATCATGGAAAATATTTAAGAATGTGGTAATTTTAGTTATCAAGATTTTCTCTTTTTTACAAAAATGGCGCACTTTATCAACAAACCAAATTGCAAATTGTTGTTGATGTCCGATGGCAAATCCGCCACCACCTG

SEQ ID NO: 16944 - protein, 93 aa, Streptococcus agalactiae
  VARIANT 55, 58, 72: Xaa = Any Amino Acid
MYMKKACLVGTNAPGPINLTLDIMSGPRTAKILQRKLASMLLMQQLYHGKYLRMXVIXSYQDFLLFYRKMAXLYQQTKLQIVVDVRWQIRHHL

SEQ ID NO: 16945 - protein, 476 aa, Streptococcus agalactiae
TTGGTTAATACATTCCGTCCAATCTTAGTTGCTCTTGCTAAAAAATTTCATTTAAACTGCTGTTATTGACCCTTACTTTGGTTTACATCAGCAAATGCTAAGTTAGAAACAATGGGCTTTATCATGTTGCAACAACAGCACTCTTGATTGGTTTGGGATTAACATTCTCTTGGTTGCTCTTCGAAAGTAACTAAAGTCCGTACTCTTTTTATTACTGGTCATATCATGGTACAACAAGCTGCAACAATTTCAGTATTTGTACTGCTCTTGATTCCACAACTTCGTAATGGTTTTGGTGCATGGGCTGTTGGTATCATTTGTGGTCTATATTGGGCGGTAAGTTCTAATATGACCGTTGAAGCAACTCAACGCCTTACAGGTGGTGGCGGATTTGCCATCGGACATCAACAACAATTTGCAATTTGGTTTGTTGATAAAGTGCGCCATTTTTGTAAAAAAGAGAAAATCTTGATAAC

SEQ ID NO: 16946 - protein, 162 aa, Streptococcus agalactiae
  VARIANT 19, 20, 30, 43, 53: Xaa = Any Amino Acid
MVNTFRPILVALAKKFHLXXAVIDPYFGLXSANAKLETMGFIXVATTALLIGXGINILLVALRKVTKVRTLFITGHIMVQQAATISVFVLLLIPQLRNGFGAWAVGIICGLYWAVSSNMTVEATQRLTGGGGFAIGHQQQFAIWFVDKVAPFFGKKEENLDN

SEQ ID NO: 16947 - protein, 264 aa, Streptococcus agalactiae
GTGCATTCAAATCGATTGCGTGCTGAACTTAATATGTGGAAAAACTTCAACAATATCTATACTGATATTTCAGCTATTCAAGATATTGATGCCCCAGATAGTTTTCCTTTTCCAAAATCAGAACAAAATGTACGTATTGCTAAAGAAGTTCTTGGGGCTAAGCGTATCATTTGGGGAACTGATTCTCCATGGTCAGCGACCTTCAATACTTACGAAGAATTAGCTACTTGGGCTAGGAAAGGAAAATGGTTTGGNNNNNTTAAT

SEQ ID NO: 16948 - protein, 88 aa, Streptococcus agalactiae
  VARIANT 86, 87: Xaa = Any Amino Acid
MHSNRLRAELNMWKNFNNIYTDISAIQDIDAPDSFPFPKSEQNVRIAKEVLGAKRIIWGTDSPWSATFNTYEELATWARKGKWFGXXN

SEQ ID NO: 16949 - protein, 219 aa, Streptococcus agalactiae
ATGGAAAACTTCCTAGCCCCCTTAATTGGTTCTCGCAAAATATCTTGCAGAATCCAGCCTCTCGTAGGTCTGTTGGTACTCATTGGGTATCTTTTATTGAAGAAACCACTTCATGATGTCTTTGCTGGTTTTATCAAAGCGACCGTTGGATATTTGATTTTGAACGTAGGTGCAGGAAGATTGGTTAATACATTCCCGTCCATCTTAAGTGCTCTTTGC

SEQ ID NO: 16950 - protein, 74 aa, Streptococcus agalactiae
MENFLAPLNWFSQNILQNPAFFVGLLVLIGYLLLKKPLHDVFAGFIKATVGYLILNVGAGRLVNTFPSILSALC

SEQ ID NO: 16951 - protein, 615 aa, Streptococcus agalactiae
ATGCGTAAATTTTTCCAAGATGTTATTGTAGAGGTGGCTTATTATTTAGAGATTGCTTTGTCAGTTATTCTGGCAACAGCTATTATTTTCTTTAGTTTAGCACTCTTTCATGATTTGTTTAGCATGTTGTCTGTTGATCAAAATGTTGATAAGTTGTTCCAGACTTTCCTTGCTCGCGCCATGACAATAGCAGTCGGGATTGAGTTGATCAAAATGTTTTCAAAACCTTCCCCTGATACTTTAATTGAAGTGTTATTGTTTGCCTTAGCTCGTCAACTTGTAATTGAACATGGTAGTGTTTCAGATTACCTTATGGGGATTGCTTCAGTTGCTATTTTGTTTGCTGTTCGTAAATATCTTTTCACCCATTTTGATGAGTCAAGCAACATTGTTTTACGTGCTAATAACAAAGTCAAAAAAGCTAATATTTTAGCTAGGGTTCAACTACCTTGTCAACCCAATGAAACTTTAGGAGACTTACTTGTTCGTCATTTAAATGATGAGGAAAAGGACGTTGCTATTGGTTCAGTAGTCTATATTAATAACGTTGCATTGCGTGTTGATAGTATGCACGATGGTCTTGTGACGCGTGTAGAAATCATTAGGAGTCTACAT

SEQ ID NO: 16952 - protein, 205 aa, Streptococcus agalactiae
MRKFFQDVIVEVAYYLEIALSVILATAIIFFSLALFHDLFSMLSVDQNVDKLFQTFLARAMTIAVGIELIKMFSKPSPDTLIEVLLFALARQLVIEHGSVSDYLMGIASVAILFAVRKYLFTHFDESSNIVLRANNKVKKANILARVQLPCQPNETLGDLLVRHLNDEEKDVAIGSVVYINNVALRVDSMHDGLVTRVEIIRSLH

SEQ ID NO: 16953 - protein, 453 aa, Streptococcus agalactiae
TTGATTAATAAACGGTTAAGAACAATCTTCTTACTACATTATCTGTTAGCGCTACTACTTCTTATAGACATTATCTTTACGATTGATTTTATAATTCACACGTCAACAATTCCCAAAAATAGTCTATCATATATAGGTTATGGTCAAGGATTTGGTTGGTCTATGATTCTTATTAATTTGATAGCTCTACCTATTTGCTTCCTAGCAGAATTGTCAGCTGGTCTACTATTAAAATTAGAAATGCATAAGCAACATGGCTACTATCCTCTGGAACGCTTATTGATGACTGGTAGTATTCTAACAGTTGTATCGCTAGTATTATTACATACTTTGATTCACAATATCAATTCACTTCTTTTTTTATCAATTATAGTAGTTTTATTGATTTCTGGGAAGTCCTTAAGTCTTATTAGTATCTATCTATTAAAAAGAAAAAGTAAACATCAAAAAGTC

SEQ ID NO: 16954 - protein, 151 aa, Streptococcus agalactiae
MINKRLRTIFLLHYLLALLLLIDIIFTIDFIIHTSTIPKNSLSYIGYGQGFGWSMILINLIALPICFLAELSAGLLLKLEMHKQHGYYPLERLLMTGSILTVVSLVLLHTLIHNINSLLFLSIIVVLLISGKSLSLISIYLLKRKSKHQKV

SEQ ID NO: 16955 - protein, 1289 aa, Streptococcus agalactiae
ATGACTTCAGTTGTTGTAGTAGGTACCCAATGGGGTGACGAAGGTAAAGGTAAAATTACAGATTTTTTATCTGCTGACGCAGAAGTAATTGCACGTTATCAAGGTGGTGATAACGCTGGGCATACTATCGTTATTGATAACAAAAATTTAAACTTCATTTAATTCCTTCAGGAATTTTCTTCAAAGAAAAAATTTCTGTCATTGGTAATGGTGTTGTCGTTAATCCGAAATCATTAGTTAAAGAGTTAGCTTATCTTCACGGAGAAGGTGTAACAACGGATAACCTTCGTATTTCAGATCGTGCGCATGTTATCTTGCCATACCACATCAAGCTTGACCAACTACAAGAAGATGCTAAAGGTGATAATAAAATTGGAACAACCATCAAAGGAATTGGGCCAGCTTACATGGACAAGGCTGCGCGTGTCGGTATCCGTATTGCTGACCTTCTTGATAGAGAAGTTTTTGCTGAGCGTTTGAAAATTAATTTAGCTGAGAAAAATCGTTTATTTGAAAAAATGTATGACAGTACACCTCTTGAATTTGATGATATTTTCGAAGAATATTATGAATATGGTCAACAAATTAAGCAATATGTGACTGATACATCCGTTATCTTAAATGATGCTCTTGATGCCGGTAAACGTGTTCTTTTTGAAGGAGCACAAGGAGTTATGCTCGACATTGATCAAGGAACATACCCATTTGTAACATCTTCCAATCCAGTAGCAGGTGGTGTCACAATTGGTTCGGGAGTTGGACCAAGTAAAATTAATAAAGTGGTAGGTGTATGTAAAGCTTACACTAGCCGTGTTGGCGATGGACCATTCCCAACAGAACTTTTTGATGAGGTTGGTGACCGTATTCGTGAGATTGGTAAAGAGTATGGTACAACGACTGGTCGTCCTCGTCGCGTTGGATGGTTTGATTCTGTTGTTATGCGTCACAGCCGTCGAGTATCAGGTATTACTAACCTCTCTCTGAATTCAATTGATGTTCTTTCAGGGCTTGATACGGTGAAAATTTGTGTGGCTTATGACCTTGATGGGAAACGTATTGACTATTACCCAGCAAGCCTTGAACAGCTAAAACGTTGTAAACCAATCTATGAAGAATTACCGGGCTGGTCTGAAGATATTACAGCTTGCCGTAGCTTAGATGATCTTCCAGAAAATGCACGTAATTACGTTCGCCGTGTTGGCGAATTGGTTGGTGTTCGTATTTCTACTTTCTCAGTAGGGCCTGGTCGTGAACAAACAAACATTCTTGAGTCTGTTTGGTCAAATATT

SEQ ID NO: 16956 - protein, 430 aa, Streptococcus agalactiae; identical to SEQ ID NO: 3342

SEQ ID NO: 16957 - protein, 1020 aa, Streptococcus agalactiae
ATGAATATCATTATTGGGACCAGTCTTTTAATACTTGTATTAGCGATTTTCACTTTATTTAATTATAAAGCACCCTACGGAACAAAAGCAATGGGAGCATTGGCATCTGCGGCTTGTGCATCCTTCCTTGTAGAAGCTTTTCAAGATTCTTTCTTTGGTAAAGTTTTGGGATTTCAATTTTTAAGTGAAGTGGGTGGTGCTAATGGTTCACTTTCTGGTGTAGCTGCAGCTATATTGGTTACTATTGCTATTGGTGTAACCCCAGGATACGCAGTTTTAATTGGTTTATCTGTTTCTGGAACAGGTATTATTCCTGGTTTCCTTGCAGGATATTTAGTGGGATTTCTTGTTAAGTGGATGGAAAGAAATATTCCTGGTGGTTTAGATCTTATTTCAATTATTATTATTGGTGCACCATTAACACGTCTTGTGGCCAAACTGTTGACGCCGCTTATTAATAGCACTTTGCTCACCATTGGAGATATCTTAACATCAGGTGCTCATAGCAACCCTATTTTAATGGGGGTTATACTTGGCGGGACAATTGTAGTAGTGGCGACAGCACCACTTTCTTCTATGGCATTGACAGCTATGCTAGGATTAACCGGAATGCCTATGGCTATAGGAGCCTTGTCTGTCTTTGGTTCGTCATTTATGAATGGTGTACTTTTCCATAAATTAAAACTTGGAAGTCGTAAAGATAATATAGCTTTTGCTGTTGAGCCTCTAACTCAAGCTGACGTGACTTCAGCTAACCCTATTCCAATCTATGTCACTAATTTTGTTGGTGGTGCAGCTTGTGGTATTTTAATTGCCTTGATGAAATTAGTTAATGATACTCCTGGAACAGCGACACCAATTGCAGGATTTGCTGTCATGTTTGCCTATAACCCAATGATAAAAGTACTAATAACCGCTCTAGGTTGTATTATCCTATCTTTACTAGCAGGCTATTTTGGAGGCATTGTTTTTAAAGATTATAAATTAGTTACAAAAGAAGAGCTACAGGCTAGAGATAAC

SEQ ID NO: 16958 - protein, 340 aa, Streptococcus agalactiae
MNIIIGTSLLILVLAIFTLFNYKAPYGTKAMGALASAACASFLVEAFQDSFFGKVLGFQFLSEVGGANGSLSGVAAAILVTIAIGVTPGYAVLIGLSVSGTGIIPGFLAGYLVGFLVKWMERNIPGGLDLISIIIIGAPLTRLVAKLLTPLINSTLLTIGDILTSGAHSNPILMGVILGGTIVVVATAPLSSMALTAMLGLTGMPMAIGALSVFGSSFMNGVLFHKLKLGSRKDNIAFAVEPLTQADVTSANPIPIYVTNFVGGAACGILIALMKLVNDTPGTATPIAGFAVMFAYNPMIKVLITALGCIILSLLAGYFGGIVFKDYKLVTKEELQARDN

SEQ ID NO: 16959 - protein, 672 aa, Streptococcus agalactiae
ATGGATAAAGAAAAATTAGACTATTGGAAGACGATAATAACGTTTCTCCATAATGTTTTAGGTGATAATTACGAAATTGTTTTGCATGTAGTAGATGAAAATGATATCTATATTGGTGAGTTGGTTAATAGTCACATTAGTGGACGAACCATAAGTTCACCTCTAACGACTTTCGCCCTTGATTTAATCAAGAATAAAGTTTATAAGGAAAAAGATTTTGTTACTAACTATAAGGCGATTGTCAGCCCTCTCAATAAAGAAGTTCGTGGATCTACTTTCTTCATCAAGAATGCTCAAAATGAACTTGAAGGGATGTTATGTATCAACCTTGATATTTCTGCATACCAAAATATTGCTTTGGATATTCTAGACTTAGTTAATTTAAATGTTAACAAAATACTATCTAAGTCCCCTCAAAAAATTTCTCTCCCTCAACAGGAGGAACCTGTAGAAGTTCTATCAGGCAATATTCAGGATATTATTAGTGAGATTGTTGATCCTAGTCTTTTAAATCAGAATATTCATTTAAGTCAAGAAGTTAAGGTAGAAATTGTTTCTAAACTTCACGAAAAAGGTGTATTCCAATTAAAAGGTGCCGTTTCAAAGGTCGCTGAAGTTCTCAACATCTCCGAACCAAGCGTCTATCGTTATCTTAAAAAAATTGAAACTCAT

SEQ ID NO: 16960 - protein, 224 aa, Streptococcus agalactiae
MDKEKLDYWKTIITFLHNVLGDNYEIVLHVVDENDIYIGELVNSHISGRTISSPLTTFALDLIKNKVYKEKDFVTNYKAIVSPLNKEVRGSTFFIKNAQNELEGMLCINLDISAYQNIALDILDLVNLNVNKILSKSPQKISLPQQEEPVEVLSGNIQDIISEIVDPSLLNQNIHLSQEVKVEIVSKLHEKGVFQLKGAVSKVAEVLNISEPSVYRYLKKIETH

SEQ ID NO: 16961 - protein, 2250 aa, Streptococcus agalactiae
GTGATTATCGATCAACTGTTACAAAGAAGCCACTCTCATCTACCGATTCTACAAGCTACATTTGGCTTAGAGAGAGAAAGCCTTCGTATTCACCAACCCACTCAAAGGGTTGCTCAAACACCCCATCCCAAAACATTAGGGAGTCGTAACTATCATCCTTATATCCAAACGGATTATAGTGAACCTCAATTAGAACTCATTACACCTATTGCAAAGGATAGCCAAGAAGCCATTCGATTTTTGAAAGCTATAAGTGATGTCGCTGGACGATCTATCAACCACGATGAATACTTATGGCCGCTTTCTATGCCACCCAAAGTGAGGGAAGAAGACATACAGATTGCCCAATTAGAGGATGCTTTTGAATATGATTATCGCAAATATTTGGAGAAAACTTATGGAAAACTAATACAATCCATCTCTGGAATTCACTATAATCTCGGTTTAGGTCAAGAGTTATTAACTTCTCTCTTTGAATTGAGTCAAGCAGATAATGCTATTGATTTTCAGAACCAGCTTTACATGAAATTGTCTCAAAATTTTTTACGTTACCGTTGGTTACTAACTTATCTATACGGAGCGAGCCCAGTAGCTGAAGAAGACTTTTTAAATCAGAAACTTAATAACCCTGTCCGGTCACTTAGAAATAGTCACTTAGGCTATGTGAATCATAAAGATATTCGTATTTCTTATACTAGCTTGAAGGATTATGTCAACGATCTAGAAAATGCTGTAAAAAGTGGGCAATTGATTGCTGAGAAAGAATTTTATTCACCTGTTCGTCTCCGTGGTAGTAAGTCCTGTCGTAATTATTTAGAAAAAGGAATTACATATTTAGAATTTCGCACTTTTGATCTCAACCCATTTAGCCCAATCGGTATAACGCAGGAAACTGTTGATACTGTTCACCTTTTCTTATTGGCGCTTTTGTGGATAGATTCTAGTAGTCATATTGACCAAGATATCAAGGAAGCCAATAGATTAAATGACCTTATAGCACTCAGTCATCCATTAGAAAAATTACCTAATCAAGCACCAGTTTCTGACTTAGTGGATGCTATGCAATCTGTTATCCAACATTTTAACTTACCACCTTACTATCAAGACCTATTGGAATCTGTAAAAAGGCAAATTCAGTCACCTAAATTAACGGTAGCTGGTCAACTTTTAGAAATGATTGAAGGACTTTCCTTAGAAACATTTGGACAAAGACAAGGACAAATTTATCACGATTATGCTTGGGAAGCTCCCTACGCCTTAAAGGGATATGAAACGATGGAACTTTCTACCCAATTGCTACTATTTGACGTTATCCAAAAAGGAGTCAACTTCGAAGTACTGGATGAACAAGATCAATTCCTAAAATTATGGCACAATAGTCATATTGAGTACGTTAAAAATGGTAATATGACCTCAAAAGATAACTATATTGTACCGCTCGCTATGGCTAACAAAGTTGTTACAAAAAAAATCCTAGATGAAAAGCATTTCCCAACTCCTTTTGGAGATGAATTTACTGACCGTAAAGAGGCACTTAACTATTTTTCACAAATCCAAGATAAACCAATCGTCGTTAAGCCAAAATCTACAAACTTTGGTTTAGGCATTTCTATTTTTAAAACATCAGCTAACTTAGCTTCTTATGAAAAAGCAATTGACATTGCTTTTGCCGAAGATAGCGCTATTCTTGTGGAAGAATATATTGAGGGTACCGAATACCGTTTCTTCGTCCTTGAGGGGGACTGTATTGCTGTATTGCTTAGGGTAGCAGCTAATGTCGTTGGAGATGGTATTCATACTATTAGTCAGCTAGTTAAACTTAAAAACCAAAACCCTCTCAGAGGCTATGATCATCGCTCTCCTCTAGAGGTTATTGAGCTCGGAGAAGTAGAACAGTTAATGTTGGAACAACAAGGATACACTGTTAACAGTATCCCTCCAGAAGGAACAAAAATAGAACTTCGCCGTAATTCTAATATTTCCACTGGCGGTGACTCTATAGATGTAACAAATACAATGGATCCTACATATAAACAACTAGCAGCTGAGATGGCAGAGGCTATGGGGGCTTGGGTTTGTGGAGTTGATTTAATTATTCCTAATGCCACTCAAGCATACTCAAAAGATAAGAAAAATGCTACTTGCATTGAACTAAACTTTAACCCATTGATGTATATGCACACCTACTGTCAAGAGGGGCCTGGTCAATCTATTACACCTCGAATTTTGGCTAAACTGTTCCCAGAATTA

SEQ ID NO: 16962 - protein, 750 aa, Streptococcus agalactiae
MIIDQLLQRSHSHLPILQATFGLERESLRIHQPTQRVAQTPHPKTLGSRNYHPYIQTDYSEPQLELITPIAKDSQEAIRFLKAISDVAGRSINHDEYLWPLSMPPKVREEDIQIAQLEDAFEYDYRKYLEKTYGKLIQSISGIHYNLGLGQELLTSLFELSQADNAIDFQNQLYMKLSQNFLRYRWLLTYLYGASPVAEEDFLNQKLNNPVRSLRNSHLGYVNHKDIRISYTSLKDYVNDLENAVKSGQLIAEKEFYSPVRLRGSKSCRNYLEKGITYLEFRTFDLNPFSPIGITQETVDTVHLFLLALLWIDSSSHIDQDIKEANRLNDLIALSHPLEKLPNQAPVSDLVDAMQSVIQHFNLPPYYQDLLESVKRQIQSPKLTVAGQLLEMIEGLSLETFGQRQGQIYHDYAWEAPYALKGYETMELSTQLLLFDVIQKGVNFEVLDEQDQFLKLWHNSHIEYVKNGNMTSKDNYIVPLAMANKVVTKKILDEKHFPTPFGDEFTDRKEALNYFSQIQDKPIVVKPKSTNFGLGISIFKTSANLASYEKAIDIAFAEDSAILVEEYIEGTEYRFFVLEGDCIAVLLRVAANVVGDGIHTISQLVKLKNQNPLRGYDHRSPLEVIELGEVEQLMLEQQGYTVNSIPPEGTKIELRRNSNISTGGDSIDVTNTMDPTYKQLAAEMAEAMGAWVCGVDLIIPNATQAYSKDKKNATCIELNFNPLMYMHTYCQEGPGQSITPRILAKLFPEL

SEQ ID NO: 16963 - protein, 816 aa, Streptococcus agalactiae
ATGGTTAAAAAACGCTATTCCAAAAATTCTCATAATCTAATAACATTACTTGGTATTGTTGTTCTTGCTTCCCTGATTTCAGACTTTTGGAGTGAGGTGATTGCTACTCTGTTAATTATTGGTGGTGGTTATTGTGCCTATTACGTTTATGATAAAAAGCGTCTTAAATGTTTTACATCAAACCAACGTATTGAAGCTTTAAAATCCGATATTAAAGAGACTGACCAAGACATTAGACACTTGGAAATTTTAAAAAAAGACAATCGTTCTAAGGAATATATCAAATTAGCACATCAAATATTACCTCAATTGGACCTAATTCGTAATGAAGCAAACCAACTACAAAAAGCCATTGAGCCTAATATCTATAAACGTATCACCAAAAAAGCAAATACATTTAGTAATGAGATTAACGAACAATTAATAAAGCTACATGCCTCTCCAGAACTAGAACCTATTTCTGATCAGGAAGATGAAATGATACGCATTGCTCCGGAATTAAAACCGTTCTATCACAATATTCAAGATGATCACTATGCTATCTTAAAAAAGATTGAAGAGGCAGATAACAAAGCTGAATTAGCAGCAATTCATCAAGCCAATATGAAACGTTTTACAGATGTTCTGGCTGGCTACATCAGAATCAAACAATCTCCTAAAAATTTTAACAATGCTAAGGAACGCCTAGAACAAGCATTACAAGCAATTAAAAAATTTAATTTAGATTTAGATGAAACGCTGCGCCAATTGAATGAAAGTGATATGAAAGATTTTGACGTTAGCCTAAGAATGATGCAAGACGAAAGGAACAATAAA

SEQ ID NO: 16964 - protein, 272 aa, Streptococcus agalactiae
MVKKRYSKNSHNLITLLGIVVLASLISDFWSEVIATLLIIGGGYCAYYVYDKKRLKCFTSNQRIEALKSDIKETDQDIRHLEILKKDNRSKEYIKLAHQILPQLDLIRNEANQLQKAIEPNIYKRITKKANTFSNEINEQLIKLHASPELEPISDQEDEMIRIAPELKPFYHNIQDDHYAILKKIEEADNKAELAAIHQANMKRFTDVLAGYIRIKQSPKNFNNAKERLEQALQAIKKFNLDLDETLRQLNESDMKDFDVSLRMMQDERNNK

SEQ ID NO: 16965 - protein, 1254 aa, Streptococcus agalactiae
ATGAGCGATACCTTTAATTTTGATATTGACCAAATTGCAGACAATGCTATCACTAAAACAGATAAAACAACAGAAATTATTTCCAACCAGACAACAAGCCAAACTGGGCAAATTGCCTTTTTTGAAAAACTAACACCAGCACAAAAGTCTGCTATCTCTGAAAAAACACCAGCTTTGGTAGATACTTTTGTCGGTGACCAAAATGCGCTCCTTGATTTTGGACAATCCGCAGTAGAAGGCGTTAATACTACTGTTAATCATATCTTGTCTGAGCAGAAAAAAATTCAAATTCCTCAAGTTGATGATTTACTAAAAAATGCTAATCGCGAACTAAATGGATTTATTGCCAAATATAAAGATGCTACTCCGGCAGAATTAGAGAAAAAACCAAACTTGATTCAAAAATTATTCAAACAAAGCAAGACCTCGCTACAGGAATTTTATTTTGACTCACAAAACATCGAGCAAAAAATGGATATGATGGCAGCAAATGTTGTCAAACAAGAAGATACTTTGGCAAGAAATATCGTCTCTGCTGAAATGCTCATTGAAGATAATACTAAATCTATTGAAAATTTGGTTGGAGTTATTGCTTTTATTGAATCGAGTCAAGCCGAGGCTGCCAATCGTGCAAGCCACTTACAACAAGAAATTCTAGCATTAGATAGCCAAACGTCCGAATATCAAATTAAAAGTAACCAATTAGCCCGAATGACTGAAGTTATCAATACCCTCGAACAGCAACATACGGAATATGTCAGCCGTCTCTACGTTGCATGGGCAACAACACCACAGATGCGAAACTTGGTCAAAGTATCGTCAGATATGCGTCAGAAACTTGGTATGTTACGTCGAAATACCATTCCAACAATGAAACTCTCAATCGCTCAGTTAGGCATGATGCAACAATCTGTCAAATCCGGTGTCACTGCTGATGCTATTGTCAACGCTAATAATGCAGCATTGCAAATGCTGGCTGAAACTAGTAAAGAAGCGATTCCGATGTTAGAGAAGACCGCACAAAGCCCCACTGTTTCTATTAAATCTGTCACTGCATTAGCTGAAAGCTTAGTGGCTCAAAATAATGGTATTATCGCTGCCATAGACAAAGGACGTAAGGAACGTGCCCAATTAGAATCTGCTGTTATTAAATCGGCTGAAACAATCAATGATTCTGTCAAAATTCGTGATAAAAAAATAGTTGAAGCCTTACTCAACGAAGGTAAATCTACCCAAGAAAAAGTTGATGAGTCT

SEQ ID NO: 16966 - protein, 418 aa, Streptococcus agalactiae; identical to SEQ ID NO: 8040

SEQ ID NO: 16967 - protein, 873 aa, Streptococcus agalactiae
ATGGATAAAATTATAAAATCAATTTCAACTTCCGGTTCTTTCCGGGCCTATGTCCTTGATTGTACAGAAACTGTAAGAACAGCTCAAGAAAAACATCAGACACTTTCAAGTTCTACTGTAGCTCTTGGGAGAACATTAATTGCAAATCAAATTTTAGCAGCAAATCAAAAAGGAAATAGTAAAGTAACTGTCAAGGTTATTGGAGATAGCTCTTTTGGTCATATTATTTCTGTAGCTGATACTAAAGGAAATGTTAAAGGTTACATCCAAAATACGGGTGTTGATATCAAGAAAACAGCTACTGGAGAGGTCTTAGTTGGACCTTTCATGGGGAATGGACACTTTGTCGTTATTACCGATTACGGAACTGGGCAACCTTACACTTCAACAACTCCACTAATTACAGGAGAAATTGGAGAAGATTTTGCTTATTATTTAACCGAAAGTGAGCAAACACCTTCTGCCGTCGGTTTAAATGTCCTCTTAGATGACGAGGATAAGGTTAAAGTTGCAGGTGGATTCATGCTTCAGGTGCTACCAGGTGCTTCTGACGAAGAAATTTCTCGCTATGAAAAACGCATTCAGGAGATGCCTTCTATTTCAAGTCTGCTAGAGTCTGAAAATCATATAGAATCTCTCCTTTCAGCTATTTACGGAGAAGACGACTACAAGCGCTTATCGGAAGACTCTTTAGCCTTCTATTGTGACTGTTCAAAAGAACGTTTTGAAGCCGCTCTATTGACTTTAGGAACTAAAGAATTGCAAGCCATGAAGGATGAAGATAAAGGTGTTGAAATTACTTGTCAATTTTGCAACCAGACTTACTATTTCACAGAAGAAGATTTGGAGAAGATAATTAATGACTCAATTAAA

SEQ ID NO: 16968 - protein, 291 aa, Streptococcus agalactiae; identical to SEQ ID NO: 12320

SEQ ID NO: 16969 - protein, 975 aa, Streptococcus agalactiae
ATGACTCAATTAAATAGTTCATTTATGATTGGGAAGGTTGAAATTCCTCATCGTACCGTACTAGCACCGATGGCAGGTATTACTAATTCTGCTTTTCGTACTATCGCTAAAGAATTTGGTGCTGGTCTCGTTGTTATGGAAATGATTTCTGAGAAAGGGTTACTTTATAACAACGAAAAGACCTTACATATGCTCCATATCGATGAAAATGAACATCCTATGTCAATTCAACTATTTGGTGGCGATGCAGAAGGCTTAAAACGTGCAGCTGACTTTATCCAAAATAATACGAAAGCAGATATCGTAGACATCAATATGGGATGTCCAGTTAACAAAGTTGTTAAAAACGAAGCTGGAGCTAAATGGTTACGTGACCCTGAAAAAATTTATCATATTGTTAAAGAGGTAACGTCTGTACTTGACATTCCATTAACAGTAAAAATGCGTACAGGATGGTCTGACTCATCTAATGCTGTAGAAAATGCACTCGCTGCCGAATCTGCTGGTGTATCTGCACTTGCTATGCACGGTCGAACACGTGAACAAATGTATACTGGCACGTGTGACCATGAAACACTTGGCAAGGTCGCTAAAGCTGTTACTAGTATTCCTTTTATTGCCAATGGTGACATTCGTACTGTTCACGATGCCAAATTTATGATTGAAGAGATTGGAGCTGACGCTATAATGGTTGGACGTGGTGCTCGTAGCAATCCTTACATCTTTACACAAATTAATCATTTCTTTGAAACAGGCGAAATCCTTCCCGACCTACCATTTGAGAAGATGTTAGATGTTGCCGAGGATCATCTCACTCGACTAGTTAATTTAAAAGGTGAAACTATTGCTGTTCGTGAATTTCGAGGGTTAGCACCTCATTATCTACGTGGAAAATCAGGCGCAGCAAAAATTAGAGGAGCTGTTTCACGTGCAGAAACACTAGCAGAAGTTCAAGAACTTTTTGCAGGTTTACGC

SEQ ID NO: 16970 - protein, 325 aa, Streptococcus agalactiae
MTQLNSSFMIGKVEIPHRTVLAPMAGITNSAFRTIAKEFGAGLVVMEMISEKGLLYNNEKTLHMLHIDENEHPMSIQLFGGDAEGLKRAADFIQNNTKADIVDINMGCPVNKVVKNEAGAKWLRDPEKIYHIVKEVTSVLDIPLTVKMRTGWSDSSNAVENALAAESAGVSALAMHGRTREQMYTGTCDHETLGKVAKAVTSIPFIANGDIRTVHDAKFMIEEIGADAIMVGRGARSNPYIFTQINHFFETGEILPDLPFEKMLDVAEDHLTRLVNLKGETIAVREFRGLAPHYLRGKSGAAKIRGAVSRAETLAEVQELFAGLR

SEQ ID NO: 16971 - protein, 639 aa, Streptococcus agalactiae
ATGTTGATTGTTTTAGCTGGAACCATTGGAGCAGGTAAAAGCTCCCTTGCAGCTGCTCTAGGACAACACCTAGGGACAGATGTTTTCTATGAGGCGGTTGATAATAACCCAGTTTTAGATCTTTACTATCAAGATCCCAAAAAATATGCTTTTTTACTACAAATATTCTTTTTAAATAAACGATTCCAATCTATAAAAGAAGCCTATAAGGCTAACAACAATGTTTTGGATCGTTCTATTTTTGAAGATGAACTATTCCTCACTCTAAATTTTAAGAATGGAAATGTGACTAAAACAGAGCTAGATATCTATAAAGAACTTCTTGCAAATATGTTGGAAGAATTAGAAGGTATGCCTAAGAAGAGACCTGATTTGCTAGTCTACATTGATGTTTCATTTGATAAAATGTTAGAACGTATTGACAAACGAGGACGCAGCTTTGAGCAAGTAGATTCTAACCCAGAATTATACGACTACTACAAACAAGTCCACTCTGAATATCCAGAATGGTATGAAAATTACGACGTTTCACCTAAAATTCGGATCGATGGTAACAAACTTGATTTCGTCAAAAATCCAGAGGATCTTCAACACGTCCTTGACACTATTGATTCCGAATTGCAAAAACTTGATTTACTA

SEQ ID NO: 16972 - protein, 213 aa, Streptococcus agalactiae
MLIVLAGTIGAGKSSLAAALGQHLGTDVFYEAVDNNPVLDLYYQDPKKYAFLLQIFFLNKRFQSIKEAYKANNNVLDRSIFEDELFLTLNFKNGNVTKTELDIYKELLANMLEELEGMPKKRPDLLVYIDVSFDKMLERIDKRGRSFEQVDSNPELYDYYKQVHSEYPEWYENYDVSPKIRIDGNKLDFVKNPEDLQHVLDTIDSELQKLDLL

SEQ ID NO: 16973 - protein, 489 aa, Streptococcus agalactiae
ATGATTATAAGACCTGTCCTACCCTCAGATGCTAAAGAATTACTTGCTATCTATGCTCCCTACGTTACTGACACTACAATAACGTTTGAATACGATATTCCTAGTATATCGGAATTCACTAATCGTATCAAAAATATCAGCAAATCTTTCCCATATTTAGTTGCTGAAGAAAATGGGAAAATATTAGGTTATGCATATGCTTCAACTTACTACGCTAGAGCTTCCTATGACTGGACTTGCGAGCTTTCTATTTACCTTGATAAAGATGTACGTAGCAAAAAAATTGGTAGCCAACTATATGATACATTGGAGAAAGAATTAGTTAACCAAGGGTATGTTAATCTACTCGCTTGTATCAGTTTACCAAATGATATAAGCATTGCATTCCACAAAAAAAGAGGATTTAATCAAGTCGCACATTTCCCAAAAATCGGGTTTAAATTTGAACAATGGCATGACATTGTATGGTTACAAAAGCGATTGAAATCT

SEQ ID NO: 16974 - protein, 163 aa, Streptococcus agalactiae
MIIRPVLPSDAKELLAIYAPYVTDTTITFEYDIPSISEFTNRIKNISKSFPYLVAEENGKILGYAYASTYYARASYDWTCELSIYLDKDVRSKKIGSQLYDTLEKELVNQGYVNLLACISLPNDISIAFHKKRGFNQVAHFPKIGFKFEQWHDIVWLQKRLKS

SEQ ID NO: 16975 - protein, 2443 aa, Streptococcus agalactiae
ATGAGTCATTATTCCATAAAATTACAAGAAGTATTCAGATTGGCGCAATTTCAAGCAGCACGCTATGAAAGTCACTATTTAGAAAGCTGGCATCTTCTTTTAGCAATGGTTTTAGTTCATGATTCAGTAGCTGGTTTGACATTTGCTGAATATGAGTCTGAAGTTGCAATTGAAGAGTACGAAGCAGCAACAATTTTAGCTTTAGGTAGAGCACCGAAAGAAGAGATTACCAATTATCAATTTTTAGAGCAATCACCAGCTTTGAAAAAGATCTTAAAGTTAGCAGAAAATATTAGTATCGTAGTAGGAGCTGAAGATGTGGGTACTGAACATGTCTTGCTTGCTATGTTGGTTAATAAAGATTTATTAGCCACACGTATCTTAGAATTAGTTGGCTTTAGAGGTCAAGACGATGGTGAATCAGTTCGTATGGTTGATTTACGTAAGGCTCTAGAACGTCATGCCGGTTTTACAAAAGATGATATCAAAGCAATTTATGAATTACGTAATCCTAAAAAAGCAAAGTCGGGTGCTTCTTTTTCTGATATGATGAAACCACCAAGTACTGCTGGTGATTTAGCTGATTTCACACGTGATTTATCACAGATGGCGGTTGATGGGGAAATTGAACCTGTTATTGGGCGTGATAAAGAAATTTCACGTATGGTCCAAGTCTTAAGTCGTAAAACAAAGAATAATCCTGTCTTAGTTGGAGATGCGGGTGTCGGTAAAACAGCTTTGGCGTACGGTCTAGCACAACGTATTGCTAATGGAAATATTCCTTATGAGCTTAGAGATATGCGTGTTCTAGAGTTAGATATGATGAGCGTTGTTGCTGGAACTCGTTTTCGTGGTGATTTTGAGGAACGTATGAATCAAATCATTGCAGATATTGAAGAAGACGGTCATATTATTCTTTTCATTGATGAACTGCATACTATTATGGGTTCTGGCTCTGGTATTGATAGCACACTTGATGCTGCTAATATTTTAAAACCAGCTTTGGCTCGAGGCACTTTACGCACTATTGGAGCAACAACTCAAGAGGAATATCAAAAGCATATTGAAAAAGATGCTGCTTTATCTCGTCGCTTTGCAAAAGTTTTAGTAGAAGAACCAAATCTTGAAGACGCATATGAAATTCTACTTGGATTGAAGCCAGCGTATGAAGCCTTTCATAATGTTACCATTTCAGATGAAGCAGTTATGACTGCTGTAAAAGTGGCTCATCGTTATTTGACAAGTAAGAATTTACCAGACTCAGCTATAGACTTACTTGATGAAGCTTCTGCCACTGTGCAAATGATGATTAAGAAAAATGCTCCATCGCTTTTAACAGAAGTTGACCAAGCTATTTTAGATGATGATATGAAATCTGCTTCTAAAGCTCTAAAAGCAAGTCATAAGGATAAAAAGCATAAGCCTATTGCCGTAACCGAAGATCATATTATGGCAACTCTCAGCCGTCTATCTGGTATTCCTGTTGAAAAATTGACACAAGCTGATAGTAAAAAATACCTCAATTTAGAAAAAGAATTGCATAAACGTGTTATCGGTCAAGATGATGCAGTTACTGCCATTAGTCGTGCTATCCGTCGCAATCAATCTGGCATTCGTACTGGTAAGCGTCCTATTGGTTCCTTTATGTTCTTGGGACCAACTGGTGTTGGTAAGACAGAGTTAGCAAAAGCCTTGGCAGAAGTGTTGTTTGATGATGAATCAGCCCTAATTCGTTTTGATATGTCGGAATATATGGAAAAATTCGCAGCTTCTCGCCTGAATGGGGCACCTCCAGGTTATGTTGGTTATGATGAAGGAGGAGAGCTGACTGAAAAAGTACGCAATAACCATATTCAGTTTTACTTTTTGATGAAGTTGAAAAAGCTCATCCAGATATTTTTAATGTATTATTACAAGTGCTTGATGATGGCGTTTTAACAGATAGTCGAGGACGAAAAGTTGACTTTTCAAATACTATAATCATTATGACTTCTAATTTAGGAGCAACTGCATTACGTGACGATAAAACAGTTGGTTTTGGAGCTAAGGATATCAGCCATGATTATACTGCTATGCAAAAACGTATTATGGAGGAGCTTAAAAAAGCTTATCGACCAGAGTTTATCAATCGTATTGATGAGAAAGTGTATTCCATAGTCTCAGTCAAGATAATATGCGTGAAGTTGTGAAAATTATGGTTAAACCTTTAATTTTAGCGCTTAAAGATAAAGGTATGGATCTGAAATTCCAGCCTTCAGCCTTGAAACACTTGGCAGAGGATGGCTATGATATAGAAATGGGTGCTCGTCCACTGCGTAGAACTATTCAAACGCAAGTAGAGGATCATTTATCAGAACTACTATTGGCAAATCAAGTGAAAGAGGGGCAAGTAATTAAGATTGGCGTATCCAAAGGCAAATTGAAATTTGATATTGCAAAATCA

SEQ ID NO: 16976 - protein, 815 aa, Streptococcus agalactiae
MSHYSIKLQEVFRLAQFQAARYESHYLESWHLLLAMVLVHDSVAGLTFAEYESEVAIEEYEAATILALGRAPKEEITNYQFLEQSPALKKILKLAENISIVVGAEDVGTEHVLLAMLVNKDLLATRILELVGFRGQDDGESVRMVDLRKALERHAGFTKDDIKAIYELRNPKKAKSGASFSDMMKPPSTAGDLADFTRDLSQMAVDGEIEPVIGRDKEISRMVQVLSRKTKNNPVLVGDAGVGKTALAYGLAQRIANGNIPYELRDMRVLELDMMSVVAGTRFRGDFEERMNQIIADIEEDGHIILFIDELHTIMGSGSGIDSTLDAANILKPALARGTLRTIGATTQEEYQKHIEKDAALSRRFAKVLVEEPNLEDAYEILLGLKPAYEAFHNVTISDEAVMTAVKVAHRYLTSKNLPDSAIDLLDEASATVQMMIKKNAPSLLTEVDQAILDDDMKSASKALKASHKDKKHKPIAVTEDHIMATLSRLSGIPVEKLTQADSKKYLNLEKELHKRVIGQDDAVTAISRAIRRNQSGIRTGKRPIGSFMFLGPTGVGKTELAKALAEVLFDDESALIRFDMSEYMEKFAASRLNGAPPGYVGYDEGGELTEKVRNKPYSVLLFDEVEKAHPDIFNVLLQVLDDGVLTDSRGRKVDFSNTIIIMTSNLGATALRDDKTVGFGAKDISHDYTAMQKRIMEELKKAYRPEFINRIDEKVVFHSLSQDNMREVVKIMVKPLILALKDKGMDLKFQPSALKHLAEDGYDIEMGARPLRRTIQTQVEDHLSELLLANQVKEGQVIKIGVSKGKLKFDIAKS

SEQ ID NO: 16977 - protein, 462 aa, Streptococcus agalactiae
GTGGCCATAAAAAATACTTCCGATAATATTGAAGAATATATAAAATCATTATTAGAACAATCAGGAATTGCTGAAATAAAGCGTTCCAATTTAGCTGATACTTTTCAAGTTGTTCCTAGTCAGATTAATTATGTCATTAAGACACGGTTTACTGAAAGCCGTGGTTATGTGGTTGAGAGTAAACGAGGTGGTGGAGGTTACATCCGCATTGCTAAGGTTCATTTTTCTGACCAACACCAATTATTTGGAAATATGTTATCAACGATTGGCGAGCGTATCAGTGAACAAGTCTTTGATGATTTGATTCAATTATTATTCGATGAAGAGATAATTACAGAACGTGAAGGAAATTTGATTCTGGCGACATCAGGTGATGACGTCTTAGGAGAGCAAGCCTCTGTTATTAGAGCTCGTATGCTCCGTAAATTATTACAACGATTAGATAGAAAAGGATTCCATTTA

SEQ ID NO: 16978 - protein, 154 aa, Streptococcus agalactiae; identical to SEQ ID NO: 3368

SEQ ID NO: 16979 - protein, 399 aa, Streptococcus agalactiae
GTGCCATTTGCAATCGCTAATGGAATACCTTTGTGGGAAGCGCTAGCTATCGGTGTTGTTGGAAACATGCTACCTGTACCTATCATCTTCTTCTTTGCTCGCAAAGTTCTAGAATGGGGAGCAGATAAACCTTATACTGGTAAGTTTTTCACATGGTGCCTTAAAAAAGGACATAGCGGTGGTCAAAAACTTGAAAAAGTAGCTGGAGAAAAAGGATTGTTTATTGCCTTGCTATTGTTTGTAGGCATTCCCTTACCCGGAACAGGAGCATGGACTGGCACACTTGCAGCTAGCCTCCTAGATTGGGAATTTAAACATAGTGTTATTGCTGTTATGCTAGGTGTTATACTAGCTGGATGCATCATGGGAACATTATCCATTATCGGCTTCAACCTATTC

SEQ ID NO: 16980 - protein, 133 aa, Streptococcus agalactiae; identical to SEQ ID NO: 3370

SEQ ID NO: 16981 - protein, 693 aa, Streptococcus agalactiae
ATGCCTTCAGGTGAAACTTTAGAACAAGCATTTGTAACTGCAACTGCTACAATTGGTGAAAAAATTTCATTCCGTCGCTTCGCTTTAGTTGAAAAAACTGATGAGCAACATTTTGGTGCATACCAACATAATGGTGGACGTATCGGAGTAATTACTGTTGTTGAAGGTGGCGACGATGCACTTGCTAAACAAGTATCAATGCACGTTGCAGCTATGAAGCCAACTGTTCTTTCATATACTGAACTTGATGCACAATTTGTTCATGATGAATTAGCACAGTTGAACCACAAAATTGAGCAAGACAACGAGAGTCGTGCTATGGTTAACAAACCAGCTCTTCCATTCCTTAAATATGGATCAAAAGCTCAATTGACTGATGAAGTTATTGCCCAAGCAGAAGAAGACATCAAAGCAGAATTAGCTGCAGAAGGTAAACCAGAAAAAATCTGGGATAAAATCGTTCCAGGTAAAATGGATCGTTTCATGCTTGACAACACTAAAGTTGACCAAGAGTACACACTCCTTGCTCAAGTTTACATCATGGATGATAGCAAAACAGTTGAAGCTTATCTTGAGTCAGTAAATGCTAAAGCAGTTGCTTTCGTACGTTTTGAAGTTGGAGAAGGTATTGAGAAAGCTTCTAACGACTTTGAAGCAGAAGTTGCAGCTACAATGGCAGCAGCACTTGAAAAA

SEQ ID NO: 16982 - protein, 231 aa, Streptococcus agalactiae
MPSGETLEQAFVTATATIGEKISFRRFALVEKTDEQHFGAYQHNGGRIGVITVVEGGDDALAKQVSMHVAAMKPTVLSYTELDAQFVHDELAQLNHKIEQDNESRAMVNKPALPFLKYGSKAQLTDEVIAQAEEDIKAELAAEGKPEKIWDKIVPGKMDRFMLDNTKVDQEYTLLAQVYIMDDSKTVEAYLESVNAKAVAFVRFEVGEGIEKASNDFEAEVAATMAAALEK

SEQ ID NO: 16983 - protein, 178 aa, Streptococcus agalactiae
ATGGCAGAAATCACAGCTAAACTTGTAAAAGAATTGCGTGAAAAATCAGGTGCAGGCGTTATGGACGCTAAAAAAGCATTAGTAGAAACTGATGGTGACCTTGATAAAGCGATTGAATTACTTCGCGAAAAAGGTATGGCTAAAGCAGCAAAAAGCAGACCGTGTTGCTGCTGAAGGT

SEQ ID NO: 16984 - protein, 60 aa, Streptococcus agalactiae
  VARIANT 60: Xaa = Any Amino Acid
MAEITAKLVKELREKSGAGVMDAKKALVETDGDLDKAIELLREKGMAKAAKKQTVLLLKX

SEQ ID NO: 16985 - protein, 768 aa, Streptococcus agalactiae
ATGGCAGTAATTTCAATGAAACAACTTCTTGAGGCTGGTGTTCACTTTGGTCACCAAACTCGTCGCTGGAACCCTAAGATGGCTAAGTACATCTTCACAGAACGTAATGGTATCCACGTTATCGACCTTCAACAAACTGTAAAATTAGCTGACCAAGCTTACGAATTTGTTCGTGATGCTGCAGCAAACGATGCAGTTATCTTGTTTGTTGGTACTAAGAAACAAGCAGCTGAGGCTGTTGCTGAAGAAGCTAAACGTGCTGGTCAATACTTCATTAACCACCGTTGGTTAGGTGGAACTCTTACTAACTGGGGAACTATCCAAAAACGTATTGCTCGTTTGAAAGAAATCAAACGTATGGAAGAAGAAGGAACTTTTGAACTTCTTCCTAAGAAAGAAGTTGCATTGTTAAACAAACAACGTGCACGTCTTGAAAAATTCTTGGGTGGTATCGAAGATATGCCACGCATCCCAGATGTAATGTATGTTGTTGACCCACATAAAGAGCAAATCGCTGTTAAAGAAGCTAAAAAACTTGGTATTCCAGTTGTAGCTATGGTTGACACTAACGCTGATCCAGATGATATCGATGTTATCATCCCAGCAAACGATGACGCTATTCGCGCCGTTAAATTAATTACTTCTAAATTAGCTGATGCAGTTATTGAAGGTCGTCAAGGTGAAGATGCTGACGTTGACTTCGCTCAAGAAGCACAAGCAGATTCAATTGAAGAAATCGTTGAAGTAGTTGAAGGATCAAACAACGAC

SEQ ID NO: 16986 - protein, 256 aa, Streptococcus agalactiae; identical to SEQ ID NO: 3374

SEQ ID NO: 16987 - protein, 558 aa, Streptococcus agalactiae; identical to SEQ ID NO: 12337

SEQ ID NO: 16988 - protein, 186 aa, Streptococcus agalactiae; identical to SEQ ID NO: 12338

SEQ ID NO: 16989 - protein, 1530 aa, Streptococcus agalactiae
ATGGTCTTAGATAAAGAAATCAAGGCTCAATTAGCGCAATATTTAGATTTGCTAGAATCTGATATTGTATTACAAACTGATTTAGGAGATAACGATAATTCTCAAAAAGTAAAGGATTTTCTAGATGAAATTGTCGCTATGTCTGATCGTATCAGCCTTGAATCAACACATTTAAAACGTCAACCTAGTTTTGGGATTGCAAAAAAAGGGCAAGAAAGTCGCGTTATTTTTTCAGGCTTGCCAATGGGGCATGAATTCACATCTTTCATTTTAGCTTTGTTGCAAGTCTCTGGTCGCGCACCAAAAGTTGATGAAGATATTATCAAACGAATTAAGGGGATTGAGAAAACTATCAATCTAGAAACTTATGTTTCATTAACTTGCCATAATTGTCCAGATGTCGTTCAAGCCTTTAATATAATGGCTGTTTTGAATCCAAATATCACTCATACTATGATTGAAGGAGGCATGTATCAAGACGAAGTCAAATCAAAAGGTATCATGTCTGTTCCTACTGTTTATAAGGACCAAGAAGAATTTACTTCTGGCCGTGCTACAATTGAACAGCTTTTAGAACAACTAGATGGACCTCTTGATGCTGAAGCATTTGCTGACAAAGGTGTCTATGATGTTCTAGTTATTGGTGGTGGTCCTGCAGGTAACAGTGCTGCAATTTATGCCGCTCGTAAAGGGTTAAAAACAGGTATTTTAGCAGAAACTTTTGGTGGACAAGTTATCGAAACAGTTGGTATTGAGAACATGATTGGTACACTGTACACCGAAGGCCCTAAATTAATGGCTCAAATTGAAGAGCATACCAAATCTTACGATATTGATATTATCAAGAGTCAATTAGCAACTGGCATTGAGAAAAAAGAATTAGTTGAGGTAACACTGGCTAACGGAGCTATTTTACAAGCTAAAACTGCTATCCTAGCTCTGGGTGCTAAGTGGCGAAATATCAACGTTCCTGGCGAGGAAGAATTCCGCAATAAAGGTGTTACTTACTGTCCACATTGTGATGGCCCTCTTTTCGAAGGAAAAAATGTTGCTGTTATAGGTGGTGGTAATTCAGGTATGGAAGCTGCTTTAGATCTAGCCGGTGTCACTAAACATGTTACAGTCCTAGAATTCTTACCTGAGCTCAAAGCAGACCAAGTACTGCAAGAACGAGCAGCTAAAACTGACAATTTAACTATTCTTAAGAATGTTGCTACTAAAGATATCGTTGGTGAAGATCATGTCACTGGTTTAAACTATACCGATCGTGATACAAACGAAGAAAAACACATTGATTTAGAAGGTGTTTTTGTACAAATTGGTCTTGTACCAAGTACTTCTTGGCTCAAGGATAGCGGCATTGAACTCAATGAACGTCAAGAAATTGTCGTTGATAAATTTGGCTCAACAAATATCCCTGGTATTTTTGCTGCAGGTGACTGTACAGATGCTGCCTACAAGCAAATCATTATTTCCATGGGGTCTGGTGCCACAGCTGCCATTGGCGCATTTGATTATTTAATCAGACAA

SEQ ID NO: 16990 - protein, 510 aa, Streptococcus agalactiae
MVLDKEIKAQLAQYLDLLESDIVLQTDLGDNDNSQKVKDFLDEIVAMSDRISLESTHLKRQPSFGIAKKGQESRVIFSGLPMGHEFTSFILALLQVSGRAPKVDEDIIKRIKGIEKTINLETYVSLTCHNCPDVVQAFNIMAVLNPNITHTMIEGGMYQDEVKSKGIMSVPTVYKDQEEFTSGRATIEQLLEQLDGPLDAEAFADKGVYDVLVIGGGPAGNSAAIYAARKGLKTGILAETFGGQVIETVGIENMIGTLYTEGPKLMAQIEEHTKSYDIDIIKSQLATGIEKKELVEVTLANGAILQAKTAILALGAKWRNINVPGEEEFRNKGVTYCPHCDGPLFEGKNVAVIGGGNSGMEAALDLAGVTKHVTVLEFLPELKADQVLQERAAKTDNLTILKNVATKDIVGEDHVTGLNYTDRDTNEEKHIDLEGVFVQIGLVPSTSWLKDSGIELNERQEIVVDKFGSTNIPGIFAAGDCTDAAYKQIIISMGSGATAAIGAFDYLIRQ

SEQ ID NO: 16991 - protein, 2067 aa, Streptococcus agalactiae
ATGGAAGAAACTATTCTAATAGTCAGCTTTCTCCTGTTTTTGATTTTATCTAATGTTATCAATAGGATATTTCCTAAATTACCATTACCATTTATCCAGTTGGTCTTTGGGATTCTCTCTGGCTTAGTTTTTCATAAGTCACAAGTCCATATCGATCCTGAGTTATTTCTTGCCTTTGTTATTGCTCCTTTGAACTTTAGGGAAGGTCAAGAAAGTGATATTGGTAGTTTTGTAAAGTATCGGACTATTATTCTTTACTTAATCTTACCAACGGTATTTTTAACAGCTATTGTCGTTGGTTATGTAGCAGGGCACCTTTTGCCAGTTAGTTTACCACTTGCGGCATGCTTTGCGCTTGGAGCAGCCTTAGGCCCAACAGATGCCGTTGCCTTTATATCGATTGCTAAGAGGTTTCAATTTCCTAAACGAGCAGAGAATATCCTCAAATTGGAAGGTCTTTTAAATGACGCTAGTGGTCTAGTTTCCTTCCAGTTTGCTTTAACAGCCCTTGTAACAGGTTATTTCTCCTTAGCAAAAGCTAGTCTCAAGTTAGCATTGGCCATAATGGGTGGTTTTTTAATTGGCTTGCTTTTTGCTTTTCTAATGAGGTTATGTCTCACTGTCCTAGAGAAATTTGATGCTGCTGATGTTACAGGGGCTCTACTTTTGGAATTAACCTTACCTTTTGTTGCTTATTTCGTTGCTGATTTGTTGGGATTTTCAGCTATTATTGCGGTGGTAGTGGCAGGAGTAATGCAAGCAAATCGTTTGAAAAAAGTGACTCTCTTTGATGCTCAAGTAGATCGCGTTACCTCTGTTATTTGGGAAACCTTAAATTTTATTTTAAATGGTTTAGTTTTCTTAATATTTGGAAGAGAACTGATACGTATCATTGGTCCTCTTTTAACAAGTAACGCTTATAGTAATTTTGATCTTATTAGTATTGTTGTTTTAGTTACTTGCACACTTTTTCTAGTTCGCTTTCTAGCAGTTTCTCGCTTTTATGCTTGGAGATCTTTCAAATACCATAAATCATTTAAAAAGTATTGGAGAGAGATTCAACTGTTGACTTTTTCAGGAGTTAAAGGAAGTGTTTCCATAGCAACAATACTCTTATTACCCAAGCACTCAGTCATAGGAGAGTTGGGGTATAGTTTGATTCTTTTCACTGTTGGTGCAGTAACGTTAATGAGTTTTTTAACGGGACTTTTAGTATTACCAAAGTTAGCGCCTCCCTTACAGGTGAAAGATGATTATTTAATACGTCTATCGATTTTAACAAAAGTATTATCTGTCTTAGAAGAAGACGGTAAGAGTTCTGAAAATCAAGCTTCATTTTATGCAGTTATAGATAATTATAATAGCCGTATTCGTCATCTCATTTTAGAACAAGAATCTAGTGACATTAAGAAGGACTTAGCTGAATTGCAACTGATGATGCTTAGTATAGAAAGCGACGGGCTTGAAGCTGCTTATCGTTATGGCAATATTTCTATCAAAGAATATCGTATTTACCAGCGTTATTTAAAATACTTAGAACGTCAAGTTAATCGTAGCTTTGTGTCAAATATCACTTATAGTTTAACGATTCTTATGCGTGTTATTCGTGGTATTGTTCATGAGTTTTTAACATTTGGACAAGGAATACGAAATCGGAAAAAACATTTCAAAAACAGGAAACGGTTGTTAGCAGAAGTCAATCGTCAGCACTTAACAGATTTGTACTTATCAAATAATGACCTCATTTTAGAAACGCTAGAAGATATGGAAGGTTATTATAATGCAACTTTGATAGATTTCTTAAAAAATGAACGCATTCGAGACGCAGAATTAATTAAATCAGGTTTATTTGTAGAACGTGTCATTGCACGCATAACGCCAGATATTTTAAATGAAACCCTAAGAGGATATTACTTGGAACGCAGAACAATCTCTGAATTTGAAAGGGACGGTTTAATTAGTTCTAAAGAGTCTCAAATTTTAAGGGATAATGTCAATGAATTAGAAAGCTATTCATTAAGAGATAGTCAATCTTCTATACCTTATCAATTATTGGATTTAAAAAAA

SEQ ID NO: 16992 - protein, 689 aa, Streptococcus agalactiae
MEETILIVSFLLFLILSNVINRIFPKLPLPFIQLVFGILSGLVFHKSQVHIDPELFLAFVIAPLNFREGQESDIGSFVKYRTIILYLILPTVFLTAIVVGYVAGHLLPVSLPLAACFALGAALGPTDAVAFISIAKRFQFPKRAENILKLEGLLNDASGLVSFQFALTALVTGYFSLAKASLKLALAIMGGFLIGLLFAFLMRLCLTVLEKFDAADVTGALLLELTLPFVAYFVADLLGFSAIIAVVVAGVMQANRLKKVTLFDAQVDRVTSVIWETLNFILNGLVFLIFGRELIRIIGPLLTSNAYSNFDLISIVVLVTCTLFLVRFLAVSRFYAWRSFKYHKSFKKYWREIQLLTFSGVKGSVSIATILLLPKHSVIGELGYSLILFTVGAVTLMSFLTGLLVLPKLAPPLQVKDDYLIRLSILTKVLSVLEEDGKSSENQASFYAVIDNYNSRIRHLILEQESSDIKKDLAELQLMMLSIESDGLEAAYRYGNISIKEYRIYQRYLKYLERQVNRSFVSNITYSLTILMRVIRGIVHEFLTFGQGIRNRKKHFKNRKRLLAEVNRQHLTDLYLSNNDLILETLEDMEGYYNATLIDFLKNERIRDAELIKSGLFVERVIARITPDILNETLRGYYLERRTISEFERDGLISSKESQILRDNVNELESYSLRDSQSSIPYQLLDLKK

SEQ ID NO: 16993 - protein, 234 aa, Streptococcus agalactiae
ATGTCTCAATTATCTTTGGAAGAACGATTGAATCGACTAAAAGATAAATACCTTTCTTCTAAAAATCAAGAATTTTCAAATGTTCACTTAAGTAAAGTAAAGAAGAAAAAGAAGAAATTAATAATACTTGAAAAAGAAAGATGTCGCTGTCGATTGGAGAGAGAAGATACTAAAAAAATCGATGATAAAATTGAGAAATTGAAGAAAGAATTGATAGATGTTATGAAGGAGGAA

SEQ ID NO: 16994 - protein, 78 aa, Streptococcus agalactiae
MSQLSLEERLNRLKDKYLSSKNQEFSNVHLSKVKKKKKKLIILEKERCRCRLEREDTKKIDDKIEKLKKELIDVMKEE

SEQ ID NO: 16995 - protein, 951 aa, Streptococcus agalactiae
ATGAAAAAATTAACAAAAGGCAGCCACATTCGTGTTCTTAGTCCCTCTTCTTCCATTGAACGTCTGGGTGGTTTTGAGGCTAACCTATTAGCCAAAGAAGTACTAGAAAAGCTGGGATTTCAAGTGTCATTCTCTAAGCACTATCTAGAAAATGATATCCTCTATTCTGCTTCGATTGCTAGCCGCGTAGAAGATTTACATGAAGCATTTGCCGACCCTTCTGTTGATGCCATATTAGCAACCATTGGCGGATTCAATTCCAACGAGCTTTTACCATATTTAGATTATGATTTAATCTCTAAGAATCCCAAAATAATTTGTGGTTACTCAGATTCAACCGCCTTCCTTAATGCTATTTTTGCCAAAGCAAAAATCCAAACTTACATGGGCCCTGCTTATTCTTCTTTCAAAATGAAGGAAGGTCAACCTTACCAAACACAAGCTTGGCTTACTGCCATGACAGAAAACCACTATGAACTTTGGCCTAGTGAAGAATGGTCTAGTGATCCCTGGTATGATCCCAGCAAACCACGCCAATTTTTCCCAACAGAATGGAAAATTTATAATCACGGAAAAGCTTCCGGTACGATTATCGGAGGTAATCTCTCTACGTTTGGCCTACTTCGAGGTACCCCTTATGCACCGAAAATTGAACGCTATGTCCTCTTGATTGAAGAGGCTGAGGAAAGTAATTTTTATGAATTTGACCGCAACCTTGCTGCAATTTTACAAGCTTATCCTCATCCACAAGCTATTCTTATGGGGCGCTTTCCTAAAGAATGCGGCATGACTCCACAAGTCTTTGAATATATCCTTTCAAAACATGCTATTTTCAAGGAAATTCCTGTTATTTATGATATGGATTTTGCGCACACCCAACCTCTTTTGACAGTGACTATTGGAGCTGAGATAAGCGTTGACACTACTACATTATCTTTATCTATAAAAGAA

SEQ ID NO: 16996 - protein, 317 aa, Streptococcus agalactiae
MKKLTKGSHIRVLSPSSSIERLGGFEANLLAKEVLEKLGFQVSFSKHYLENDILYSASIASRVEDLHEAFADPSVDAILATIGGFNSNELLPYLDYDLISKNPKIICGYSDSTAFLNAIFAKAKIQTYMGPAYSSFKMKEGQPYQTQAWLTAMTENHYELWPSEEWSSDPWYDPSKPRQFFPTEWKIYNHGKASGTIIGGNLSTFGLLRGTPYAPKIERYVLLIEEAEESNFYEFDRNLAAILQAYPHPQAILMGRFPKECGMTPQVFEYILSKHAIFKEIPVIYDMDFAHTQPLLTVTIGAEISVDTTTLSLSIKE

SEQ ID NO: 16997 - protein, 1893 aa, Streptococcus agalactiae
ATGATAAAATATCAAGATGATTTTTACCAAGCGGTTAATGGGGAATGGGCTAAGACAGCTGTTATTCCTGATGACAAACCAAGGACAGGTGGTTTTTCTGATCTTGCTGATGACATTGAAGCATTAATGCTGTCAACGACAGATAAGTGGCTGGCTGATGAAAATAAACCAAGTGATACGATTTTAAATCATTTTATTGCTTTTCATAAAATGACAGCTGATTATCAAAAACGTGAAGAGGTAGGAGTATCACCAGTATTACCATTAATTGAAGAATATAAAGGTCTACAATCTTTCTCTGAGTTTGCATCAAAAGTTGCAGAATATGAACTAGAAGGTAAACCAAATGAATTTCCATTTGGTGTGGCTCCTGACTTTATGAATGCTCAATTGAATGTACTTTGGGCTGAAGCGCCTGGGATTATTTTACCGGATACAACTTATTATAGTGAAGATAATGAAAAAGGAAAGGAACTCCTTGCTCTTTGGCGTAAAAGTCAAGAAGACTTACTGCCTTTGTTTGGCCTTTCAGAACAGGAAATTAAAGATATCTTGGATAAGGTTTTAGCTTTGGATGCAAAATTGGCACAATATGTCTTATCTCGCGAAGAGAGTTCGGAATATGTTAAACTTTACCATCCTTATAACTGGGAAGATTTCATAAAATTAGCACCTGAACTTCCATTAGATGCTATTTTCCAAAAGATATTAGGACAAAAACCAGATAAAGTTATTGTTCCTGAAGAACGTTTCTGGACAGAATTTGCATCTGACTATTACTCAGAATCTAATTGGGAATTATTAAAGGCAGATCTTATTTTATCAGCTGCGAATGCCTATAATGCTTACTTAACTGATGATATTCGTATCAAATCGGGAGTTTACAGTCGAGCTTTATCAGGCACACCACAAGCAATGGATAAGAAAAAAGCAGCTTACTACCTTGCTTCAGGACCTTACAATCAAGCTCTAGGTTTGTGGTATGCAGGGGAAAAATTCTCTCCAGAAGCTAAAGCTGATGTTGAGCATAAGATTGCAACGATGATTGATGTCTATAAGTCACGCTTAGAAAAGGCGGATTGGCTTGCACAGTCAACACGGGAAAAAGCTATTGTGAAACTTAATGTTATCACGCCACACATTGGATACCCTGAGAAACTACCAGAGACTTATACTAAAAAAATCATTGATCCTAAACTATCGCTTGTCGAAAATGCTACTAATTTAGACAAAATTTCAATAGCCTATGGTTGGAGTAAATGGAATAAACCAGTTGATAGAAGTGAATGGCATATGCCTGCCCACATGGTCAATGCGTATTATGATCCACAACAAAACCAAATTGTCTTCCCAGCAGCCATTTTACAAGCACCATTTTATGCTTTAGAGCAAAGTTCATCAGCAAATTATGGGGGAATTGGTGCAGTGATTGCACATGAAATATCACACGCTTTTGACACTAATGGAGCTTCATTTGATGAACATGGAAGTTTGAATAATTGGTGGACTGATGAAGATTTTAAAGCTTTCAAAAAACTTACAGATAAAGTAGTTGAGCAGTTTGATGGACTGGAATCTTATGGCGCAAAAGTCAATGGTAAACTAACAGTATCAGAAAATGTTGCAGATTTAGGTGGAGTTGCTTGTGCTTTAGAAGCTGCGCAGCGTGAGTCAGATTTTTCAGCGAGGGATTTCTTTATTAACTTTGCGACAATTTGGCGTATGAAGGCACGTGATGAGTATATGCAAATGTTAGCTAGTGTAGATGTTCACGCCCCAGCACAATGGCGAACTAATATTACAGTAACGAATTTTGAAGAATTCCATAAAGAGTTTGATGTTAAAGATGGTGATAACATGTGGCGTCCAGTTGAAAAACGTGTTATTATTTGG

SEQ ID NO: 16998 - protein, 631 aa, Streptococcus agalactiae
MIKYQDDFYQAVNGEWAKTAVIPDDKPRTGGFSDLADDIEALMLSTTDKWLADENKPSDTILNHFIAFHKMTADYQKREEVGVSPVLPLIEEYKGLQSFSEFASKVAEYELEGKPNEFPFGVAPDFMNAQLNVLWAEAPGIILPDTTYYSEDNEKGKELLALWRKSQEDLLPLFGLSEQEIKDILDKVLALDAKLAQYVLSREESSEYVKLYHPYNWEDFIKLAPELPLDAIFQKILGQKPDKVIVPEERFWTEFASDYYSESNWELLKADLILSAANAYNAYLTDDIRIKSGVYSRALSGTPQAMDKKKAAYYLASGPYNQALGLWYAGEKFSPEAKADVEHKIATMIDVYKSRLEKADWLAQSTREKAIVKLNVITPHIGYPEKLPETYTKKIIDPKLSLVENATNLDKISIAYGWSKWNKPVDRSEWHMPAHMVNAYYDPQQNQIVFPAAILQAPFYALEQSSSANYGGIGAVIAHEISHAFDTNGASFDEHGSLNNWWTDEDFKAFKKLTDKVVEQFDGLESYGAKVNGKLTVSENVADLGGVACALEAAQRESDFSARDFFINFATIWRMKARDEYMQMLASVDVHAPAQWRTNITVTNFEEFHKEFDVKDGDNMWRPVEKRVIIW

SEQ ID NO: 16999 - protein, 981 aa, Streptococcus agalactiae
ATGACTGAAAAATATTATAATTGGGCAACGCTTGGAACCGGCGTTATTGCCAACGAATTAGCCCAAGCACTGGAAGCACGTGGACAAAAATTATATTCTGTAGCTAATAGAACTTACGACAAAGGACTTGAATTTGCTAACAAATATGGTATCCAAAAAGTTTATGATCACATAGATCAAGTATTTGAAGACCCTGAAGTGGATATCATTTATATCTCTACTCCCCACAATACTCACATCTCATTTTTACGAAAGGCTTTAGCAAATGGTAAGCACGTTCTTTGCGAAAAATCTATTACTTTAAATAGTACTGAGCTTAAAGAAGCCATAGATTTAGCCGAAACTAACCATGTTGTCTTAGCTGAAGCCATGACTATTTTTCATATGCCAATTTACCGCCAATTAAAAACATTAGTTGATAGTGGAAAATTAGGACCGTTAAAAATGATTCAAATGAATTTCGGAAGTTATAAAGAATATGATATGACTAACCGTTTTTTCAGTCGTGACCTAGCAGGCGGTGCTTTGCTGGACATTGGTGTTTATGCACTTTCTTGTATTCGCTGGTTTATGTCAGAAGCACCTCACAACATTACCTCTCAAGTTACATTTGCACCAACAGGGGTTGATGAACAAGTTGGTATCCTACTAACCAACCCAGCAAATGAGATGGCGACTGTCAGCCTTAGTTTACATGCAAAACAACCTAAACGAGCAACTATCGCTTACGATAAAGGCTACATTGAACTTTTTGAATATCCGCGAGGACAAAAGGCAGTTATTACTTATACTGAGGATGGGCATCAAGATATTATCGAAGCTGGCAAAACTGAAAATGCTCTCCAATATGAGGTAGCTGATATGGAAGAAGCCATTTCAGGAAAAACTAACCACATGTACTTAAACTATACCAAAGATGTTATGGATATCATGACACAGCTACGTCAAGAATGGGGATTTACCTACCCAGAAGAAGAAAAA

SEQ ID NO: 17000 - protein, 327 aa, Streptococcus agalactiae
MTEKYYNWATLGTGVIANELAQALEARGQKLYSVANRTYDKGLEFANKYGIQKVYDHIDQVFEDPEVDIIYISTPHNTHISFLRKALANGKHVLCEKSITLNSTELKEAIDLAETNHVVLAEAMTIFHMPIYRQLKTLVDSGKLGPLKMIQMNFGSYKEYDMTNRFFSRDLAGGALLDIGVYALSCIRWFMSEAPHNITSQVTFAPTGVDEQVGILLTNPANEMATVSLSLHAKQPKRATIAYDKGYIELFEYPRGQKAVITYTEDGHQDIIEAGKTENALQYEVADMEEAISGKTNHMYLNYTKDVMDIMTQLRQEWGFTYPEEEK

SEQ ID NO: 17001 - protein, 900 aa, Streptococcus agalactiae
TTGCCGGTTGTCAGTCAGAACTACCTTTTAGTATTTGTATCGCGTCTTTTATTGGGGAGTGGTATCGGTTTTATTAATGCTAGGGCCATTAGTGTGATTAGTGAATATTATCAAGGCAAAGAAAGAAGAAAACTCTTAGGATTAAGGGGGTCCTTTGAAGTTTTAGGAAATGCTGGTTTGACAGCCTTAGTTGGGCTATTGTTGACTTTTGGTTGGTCTAAATCATTTATGATTTATTTTTTAGCTTTACCAATCTTAGTTCTATATCTTGTTTTTGCGCCTAAGAAAGTGGTGAAAGATACAAATGACAAGATTAAAACTAAAGGTCAAAAAATCCCTAAAGCTGATTTGACTTATATTGTCGCCTTAGCTATTTTAGCAGGATTTGTCATAACTATAAATACTGGGATTAATCTTAGGATACCTCTGCTAGTAGTAGAATTTGGTTTGGGTACGCCAGCTCAAGCTAGTCTTGTTCTTAGTGCGATGATGCTTATGGGAATAATAGCAGGTATGAGTTTTGGTCAGTTGATAGCTATGTTTCATAAACAATTAATTCCAATCTGCCTCGTCTTATTTTCTTTAACATTGCTTGGAGTTGGATTGCCTTCTAATCTAATGGTACTAACAATTAGTGCGATGGCGTCAGGTTTCCTTTACAGCCTGATGGTCACTGCTGTGTTTAGCCTAGTAGCAGACCGTGTTGAATATTCGTTGGTTGGTTCTGCAACGACATTAGTTTTAGTATTTTGTAATATTGGTGGAGCTAGTGCGGCTATTCTTCTGTCTTGTTTTGATCATTTACTAGGACAAATAAATGCAGTTTTCTATGTTTATGCTATTTTAAGTTTAGCAGTTGGTATGATTTATTTCCTTAAACGCCTATTTTTTAAGAAAATG

SEQ ID NO: 17002 - protein, 300 aa, Streptococcus agalactiae
MPVVSQNYLLVFVSRLLLGSGIGFINARAISVISEYYQGKERRKLLGLRGSFEVLGNAGLTALVGLLLTFGWSKSFMIYFLALPILVLYLVFAPKKVVKDTNDKIKTKGQKIPKADLTYIVALAILAGFVITINTGINLRIPLLVVEFGLGTPAQASLVLSAMMLMGIIAGMSFGQLIAMFHKQLIPICLVLFSLTLLGVGLPSNLMVLTISAMASGFLYSLMVTAVFSLVADRVEYSLVGSATTLVLVFCNIGGASAAILLSCFDHLLGQINAVFYVYAILSLAVGMIYFLKRLFFKKM

SEQ ID NO: 17003 - protein, 177 aa, Streptococcus agalactiae; identical to SEQ ID NO: 8077

SEQ ID NO: 17004 - protein, 59 aa, Streptococcus agalactiae; identical to SEQ ID NO: 8078

SEQ ID NO: 17005 - protein, 642 aa, Streptococcus agalactiae
ATGGATATAGAAAACTACTGCCAAGACTACTGTTTGGAGACTATCTTTCCAAAACATTATTTCAAGGATTTACAAGTAATCACCCTAACTGCCGGCCAATCCGTCTGTAAACAGGGAGAACAATTAGAATACTTGCACTACATCGTCAAGGGACGTTTTAAAATTGTACGTCGACTCTTTAACGGCAAAGAACATATTTTAGATATTAAAACAAAACCAACACTGATTGGTGATATTGAACTTTTGACTAATAGACAAATTGTATCATCTGTTATTGCCTTAGAGGATATTACAGTCATTCAATTATCACTTAAAGGACGGAAAGAGAAACTGTTAACAGACGCAACTTTCCTCCTAAAACTTAGTCAAGAGCTAGCTCAGGCTTTTCATGATCAAAACATCAAAGCGTCTACTAATTTAGGGTATACCGTCAAAGAGTTACTTGCAAGTCATATTTTAGCAATTGAAGAACAAGGTTGCTTTCACCTTGAACTAAGTAGTTTAGCTGATTCGTTTGGCATCAGTTATCGTCATTTATTAAGAGTTATCCATGATATGGTCAAAGAAGGCCTTATCCAAAAAGAAAAACCAAAATACTTTATCAAAAATCGTTTCGCACTAGAATCATTAAATATTCAGCCA

SEQ ID NO: 17006 - protein, 214 aa, Streptococcus agalactiae
MDIENYCQDYCLETIFPKHYFKDLQVITLTAGQSVCKQGEQLEYLHYIVKGRFKIVRRLFNGKEHILDIKTKPTLIGDIELLTNRQIVSSVIALEDITVIQLSLKGRKEKLLTDATFLLKLSQELAQAFHDQNIKASTNLGYTVKELLASHILAIEEQGCFHLELSSLADSFGISYRHLLRVIHDMVKEGLIQKEKPKYFIKNRFALESLNIQP

SEQ ID NO: 17007 - protein, 610 aa, Streptococcus agalactiae
ATGTCTGCTATTGATAAATTAGTAAAAGCTAGTCATTTAATTGACATGAATGACATTATCCGCGAAGGCAATCCAACCCTTCGCAAAGTGGCTGAAGAAGTCACATTCCCACTTTCTGAGAAAGAAGAAATTCTCGGAGAAAAAATGATGCAATTTTTAAAACACTCTCAAGATCCAATTATGGCTGAGAAGCTAGGCTTACGTGGTGGTGTTGGTTTAGCCGCACCACAATTAGACATCTCAAAACGCATCATTGCCGTCCTTGTTCCAACGTTGAGGATGCTCAAGGAAATCCACCTAAAGAAGCTTATAGCCTCCAAGAAGTAATGTACAACCCTAAAGTGTATCGCATTCTGTTCAAGATGCTGCTTTATCTGACGGGGAGGGATGCCTATCAGTAGATCGTGAAGTACCTGGCTATGTCGTCCGCCACGCGCGTGTAACTATTGAATATTTCGACAAAACTGGTGAAAAACATCGACTCAAATTAAAAGGTTACAACTCTATTGTTGTTCAACATGAAATTGACCACATTGATGGTATTATGTTTTACGACCGTATCAATGAGAAAAATCCTTTCGCTGTCAAAGAAGGCTTACTTATTTTAGAA

SEQ ID NO: 17008 - protein, 204 aa, Streptococcus agalactiae; identical to SEQ ID NO: 3398

SEQ ID NO: 17009 - protein, 992 aa, Streptococcus agalactiae
ATGTCTAAAAAAATGACCATTAATGACATCGCTCAATTATCAAAAACTTCCAAAACAACGGTTTCTTTTTTCTTGAATCAAAAATTTGAAAAAATGTCGGATGAGACGAGGCAGCGTATTCAAGAGGTGATTGATGAAACAGGTTATAGACCAAGTACGATAGCAAGAAGTCTAAATTCTAAAAAAACAAAACTACTAGGTGTCTTAATTGAGATTAACAAACACATTTTCAAATCAAATTGTAAAAGGAATTGAGCACATCACCAAACAAAAAGGCTATCAAATTATTGTGGGTAATAGTAATTATGATGCCAAAAGTGAAGAAGATTATATTGAAAATATGTTAAATTTAGGTGTTGATGGTTTCATTATTCAGCCTACATCAAATTTTCGAAAGTATTCTCGTATTTTAAAAGAAAAAAAGAAACCAATGGTATTTTTTGATAGTCAACTTTATGAACATAAGACGAGTTGGGTTAAGGCTAATAACTATGATGCTGTTTATGATATGACACAGGAGTGTCTAAATCGAGGTATAAAGTTTATTATGATTACTGCTGATACGAGCTTGCTTAGTACACGTATTGAGAGAGCTTCGGGATTCATGGATGCTTTAAAGGACAATGGTTTCGGTTATGACACTTTGGTGATTGAAGATGATGATCATTCAAAAAGTGATATAGAAGACTTTCTAAAAGCGGTAGTTCCAGATAAGGAGGAGACATTAGTATTTGCACCAAATTGTTGGGCTTTACCAATGGTTTTTACTGCCATGAAAAATCTCAATTTTGATATGCCACGAGTTGGTTTAGTTGGGTTTGACAATATGATGGACAGACTTTTCATCTCCTAAAGTGTCAACAATTGTCCAGCCGGCTTATGAAGAAGGTGAACAAGTAGCACAGATTTTGATTAATCGTATTGAAGGAGATGACTCCGTCGATAACCAACAGATTGTAGATTGCCAGATGTTTTGGAAAGAGTCGACTTTT

SEQ ID NO: 17010 - protein, 333 aa, Streptococcus agalactiae
  VARIANT 73: Xaa = Any Amino Acid
MSKKMTINDIAQLSKTSKTTVSFFLNQKFEKMSDETRQRIQEVIDETGYRPSTIARSLNSKKTKLLGVLIGDXTNTFSNQIVKGIEHITKQKGYQIIVGNSNYDAKSEEDYIENMLNLGVDGFIIQPTSNFRKYSRILKEKKKPMVFFDSQLYEHKTSWVKANNYDAVYDMTQECLNRGYKKFIMITADTSLLSTRIERASGFMDALKDNGFGYDTLVIEDDDHSKSDIEDFLKAVVPDKEETLVFAPNCWALPMVFTAMKNLNFDMPRVGLVGFDNIEWTDFSSPKVSTIVQPAYEEGEQVAQILINRIEGDDSVDNQQIVDCQMFWKESTF

SEQ ID NO: 17011 - protein, 1900 aa, Streptococcus agalactiae
ATGAAAGATCGCTTATATAATAAATTCAAGGATTTTGATAGGGAATTTTGTCAAAAGTATATTAAAACATACCAATCTAATGCCTATCAAGAAATGAAAGCCTCTGTTAATTTGATGATGAGGAACACTTTTGTATTTAATGATAATTGGGATATGGAACCTTGTTCTAAAGCATATTGTCTTGATCCTTTGGAGTGGGATAATCCAGTAACAGATGATCCAGAATGGTTGTATATGCTAAATCGTCAAACTTATCTTTTTAAATTCCTGGTGGTCTACATTGTTGAAGGCGATAAGTCTTATCTTAGACAAATGAAATATTTTATGTACCATTGGATTGATTGCCAATTTACACTAAAGCCAGAAGGGGCGGTAAGTCGTACTATTGATACTGGGATACGTTGCATGTCATGGCTCAAAGTTTTGATTTTTTTAGATTATTTTGGATTAATAACAGAAACTAAAAAAATTAAACTATTAACTAGTTTACGGGAGCAGATAACTTATATGAGGGACTATTATCGTGAAAAAGATAGTCTAAGTAACTGGGGAATTTTACAAACAACAGCAATATTGGCGTGTTTATACTATTATGAAGATGAATTAAACCTACCTGAAATTCAGAGTTTTGCTGAAGAAGAATTATTACTTCAAATCAAGCTTCAAATTTTAGATGACGGGAGCCAGTATGAACAATCAATTATGTATCATGTAGAAGTCTTGAAGTCCTTAATGGAACTAGTTATCCTTGCGCCTAAATATTATCTACCATTAGAAGAAACTATTGAAAAAATGGTTACCTATCTAATTGCTATGACTGGTCCGGATTATTGTCAACTAGCTATAGGGGACAGTGATGTGACCGATACTCGTGATATTCTAACTTTGGCAACACTTGTGTTGAAATCTTCTAAAACAAAATCATTTTCTTTTGATAATGTTAATTTAGAAACTTTACTTTTGTTTGGGAAGCCATCAATTTATCTTTTGAAGAAATACCGCGTGCAACAATAGGTGATCTGCTTATCTTTTTCCAGATTCTGGTCATGTGTGTTTACGTGATGATAGGCGTTATATATTTTTTAAGAACGGTCCATTTGGTAGCGCTCATACTCATAGTGATAATAATAGTGTTTGTCTCTATGATAAAAAGAAACCTATTTTCATTGATGCAGGAAGATATACTTACAAAGAAGAACAACTAAGGTATGATTTTAAACGTTCGACTAGTCATTCAACATGTACCCTTGATGGGCAATCTTTAGAAATGATCAAGGACTCTTGGACATACAATTCTTATCCAAAATGTGACTATTGTCAGCTGACTTCAAAGGATAGGTACCATTTAGTCGAAGGACAACTACATGTCCAAAGAGCTTCTGATATCTATTACCATAAGCGATGGTTGTTAACTTTACCGCAGGCCATTACCTTAGTTATTGATAAGGTGAATTGTCCAGGAGAGCATGTTTTAACAAATCAATATATTTTAGATGATCAGGTCATTTATGAAAATGGGCTTGTTAACGACTTGAAATTAGTAAGTCCTACGACCTTTAATCTAGAAGATTGCCTTATTTCTAAGCGGTATAATCAATTGACAGAAAGTCATAAATTAGTTAAGAAAATAAAATTTGTTGATGAGGTGATGGATTATACCTTGATAGTTGATCGGAACTGTCAGGTGAAATGTGTTCCTTTAGTGCAAACGAACAGTCATAAGGAACTAAGTAATAGCATTGCATTTGATATTAGGTCTCAAGACTTTCATTATTTAATTGGAGTGCATATGGATGATATTATCTTTGGGGATAAACTCTATTTGATGCAAGGGATAAAATGCAAAGGAAAAGTCATTGTATATGATAAAAATAATGGCAAAATGAGTCGTTTAAAAAAT

SEQ ID NO: 17012 - protein, 634 aa, Streptococcus agalactiae
MKDRLYNKFKDFDREFCQKYIKTYQSNAYQEMKASVNLMMRNTFVFNDNWDMEPCSKAYCLDPLEWDNPVTDDPEWLYMLNRQTYLFKFLVVYIVEGDKSYLRQMKYFMYHWIDCQFTLKPEGAVSRTIDTGIRCMSWLKVLIFLDYFGLITETKKIKLLTSLREQITYMRDYYREKDSLSNWGILQTTAILACLYYYEDELNLPEIQSFAEEELLLQIKLQILDDGSQYEQSIMYHVEVLKSLMELVILAPKYYLPLEETIEKMVTYLIAMTGPDYCQLAIGDSDVTDTRDILTLATLVLKSSKTKSFSFDNVNLETLLLFGKPSIYLFEEIPRATIGESAYLFPDSGHVCLRDDRRYIFFKNGPFGSAHTHSDNNSVCLYDKKKPIFIDAGRYTYKEEQLRYDFKRSTSHSTCTLDGQSLEMIKDSWTYNSYPKCDYCQLTSKDRYHLVEGQLHVQRASDIYYHKRWLLTLPQAITLVIDKVNCPGEHVLTNQYILDDQVIYENGLVNDLKLVSPTTFNLEDCLISKRYNQLTESHKLVKKIKFVDEVMDYTLIVDRNCQVKCVPLVQTNSHKELSNSIAFDIRSQDFHYLIGVHMDDIIFGDKLYLMQGIKCKGKVIVYDKNNGKMSRLKN

SEQ ID NO: 17013 - protein, 813 aa, Streptococcus agalactiae
ATGACTGGATCTAAAAAATTAGCAAAAAGTGATTACACTAAAACAGCTTTACGTGCCTTTTATTTACAAAATGGCTTTAATTACAGTAACTATCAAGGTCTTGGTTATGCTAATGTCATATATCCAGCTCTCAAAAAATATTATGGAGATGACAAAAAAGCTTTAGCGGGAGCTCTAGAAGAAAATGTGGAGTTTTACAATACAAACCTTCATTTCTTACCTTTTGTAACTAGTTTACATTTAGCAATGCTTGATAATGAGCGGCCAGAAGAAGAAATTCGCGGTATTAAGATGGCGCTTATGGGTCCTCTTGCAGGTATCGGTGATTCTTTATCACAATTTTGCTTAGCACCCTTGTTCTCAACGATTGCAGCCTCTTTAGCGACAGATGGTTTGGTGATGGGACCGATTCTGTTCTTTGTGGCTATGAATACTATTTTAACGGGAATTAAATTAGTTACTGGCATGTATGGTTATCGTCTTGGGACCAGTTTTATTGATAAATTGAGTGAACAAATGTCAGTTATCTCACGGGCAGCTAATATCGTTGGTGTAACGGTCATCTCAAGTTTAGCTGCAACACAAGTTAAGCTTACAATCCCTTACACTTTTGCTCCAGAAAAAGTAACTAGTACAGCGCAAAAAATTGTTACTGTCCAAGGTATGCTTGATAAAATTGCACCAGCTCTACTTCCAGCACTCTACACTTTCCTTATGTTTTACCTTATTAAAAATAAAAAATGGACAACTTATAAGCTAGTTATCCTTACGGTTATTATTGGTATCCTTGGTAGCTGGTTAGGTATTTTAGCT

SEQ ID NO: 17014 - protein, 271 aa, Streptococcus agalactiae
MTGSKKLAKSDYTKTALRAFYLQNGFNYSNYQGLGYANVIYPALKKYYGDDKKALAGALEENVEFYNTNLHFLPFVTSLHLAMLDNERPEEEIRGIKMALMGPLAGIGDSLSQFCLAPLFSTIAASLATDGLVMGPILFFVAMNTILTGIKLVTGMYGYRLGTSFIDKLSEQMSVISRAANIVGVTVISSLAATQVKLTIPYTFAPEKVTSTAQKIVTVQGMLDKIAPALLPALYTFLMFYLIKNKKWTTYKLVILTVIIGILGSWLGILA

SEQ ID NO: 17015 - protein, 864 aa, Streptococcus agalactiae
ATGGATATTAGTATTCTTCAGGCTGTCTTAATTGGACTGTGGACGGCTTTCTGTTTTAGTGGCATGTTGCTTGGCCTCTATACAAATCGTTGTATCGTTCTCTCTCTAGGCGTTGGTGTTATTTTAGGAGATATTCAAACAGCTTTGGCAGTTGGAGCAATATCTGAACTGGCTTACATGGGATTTGGTGTGGGAGCGGGAGGGACAGTTCCTCCAAACCCAATCGGTCCTGGGATTTTTGGAACTTTGATGGCTATTACAACAGCTGGAACTAAAGGAAAAATCACACCGGAAGCTGCTCTTGCATTATCAACCCCAATTGCAGTTGGTATTCAATTTCTTCAAACAGCAACTTATACTGCTTTTGCAGGTGCGCCTGAAACAGCTAAAAAAGCTTTGCAAGCAGGTAATTTCCGAGGATTTAAAATTGCAGCAAATGGTACAATTTGGGCATTCGCTGGATTGGGATTTGGTTTAGGAGTACTGGGTGCTCTTTCAACGCAAACTTTGACAGATTTATTTGCTCTCATTCCCCCTGTTTTGCTTAATGGTCTAACCTTAGCTGGGAAAATGCTTCCTGCAATTGGTTTTGCGATGATTCTCTCTGTAATGGCTAAAAAAGAACTCATTCCTTATATCCTACTTGGATATGTTCTAGCTGTTTATTTTGGTTTGCCAGTTCTAACTCCAACAGCAAATGGAGACGGAGTTTTAACATCAGTGGCTACTAACAGTGTGCTTGGGGTTCCAACTATCGGGGTAGCTATAATTGCAACAATATTTGCTTTGCTCGATATTTTCAGAAAACCAGCTGCACCTACTAAAGAAACTAAGACAGAAGGAGACAACCAAGATGACTGGATC

SEQ ID NO: 17016 - protein, 288 aa, Streptococcus agalactiae; identical to SEQ ID NO: 3406

SEQ ID NO: 17017 - protein, 492 aa, Streptococcus agalactiae
ATGGCAGCAGGACCAAATATTGTAATGACACGTGTTGATGAGCGTCTTATTCATGGACAAGGACAACTTTGGGTGAAATTTTTAAGTTGTAATACTGTTATTGTGGCAAATGATGATGTCTCCAAAGATCATCTTCAACAAACGTTAATGAAGACGGTGGTGCCAGAATCAATTGCATTGCGATTTTTTGATATTCAAAAAGTTATTGATATTATTCACAAGGCCAACCCAGCACAGACGATTTTTATAATTGTTAAAGATTTGAAAGATGTCTATAGACTTGTAGCAGGAGGCGTCCCAATTAAAGAGATTAATATTGGAAATATTCATAATGGAGAAGGTAAAGAGCAGGTAAGTCGCTCTATCTTCTTAGGGATGAAGGATAAAGAGATAATTAGAAAATTAAACCAAGAATATCACATTGCATTTAATACTAAAACAACTCCAACAGGTAACGATGGTGCTGTGGAAGTTAATATTTTAGATTATATT

SEQ ID NO: 17018 - protein, 164 aa, Streptococcus agalactiae; identical to SEQ ID NO: 3408

SEQ ID NO: 17019 - protein, 1193 aa, Streptococcus agalactiae
ATGATGAAAATAAAACCGGTCAAGGTTGAGTCAATTGAAAATCCAAAGCGTTTTTTAGACAGTAGATTATTAACTAAGATTGAAGTTGAGGAAGCCATTGAAAAAGCCTTGAAGCAACTTTATATTAATATTGATTACTTTGGTGAAGAGTATCCAACGCCTGCAACATTCAATAATACTTATAAAGTTATGGATAACACAGAATGGACAAATGGTTTTTGGACAGGGTGCTTGTGGTTAGCTTATGAGTATAATCAGGATAAAAAGTTAAAAAACATAGCCCACAAAAATGTATTGTCATTTCTAAATCGTATTAATAATCGTATAGCATTAGATCACCACGACTTAGGATTTCTTTACACACCATCTTGTACAGCAGAATATCGTATCAATGGTGATGCTAAAGCTTTAGAAGCCACTATAAAAGCTGCAGATAAATTGATGGAGCGCTATCAAGAAAAAGGTGGATTTATTCAGGCTTGGGGAGAACTCGGGTATAAGGAACACTATCGCTTAATTATCGATTGCTTACTTAATATCCAACTCTTATTTTTTGCTTATGAACAGACAGGTGATGAAAAGTATAGACAAGTTGCGGTGAATCACTTCTACGCTTCAGCTAACAATGTGGTGCGTGATGATTCTTCTGCTTTTCATACTTTTTATTTCGACCCAGAAACTGGAGAACCGTTAAAAGGTGTCACACGACAGGGTTATAGTGATGAGTCATCTTGGGCAAGAGGGCAAGCATGGGGCATCTACGGTATTCCGCTTAGTTACCGGAAAATGAAAGATTATCAGCAGATTATCCTTTTTAAAGGTATGACAAACTATTTTCTAAATCGTTTACCTGAAGACAAGGTATCCTATTGGGACCTTATTTTTACGGATGGCTCGGGTCAGCCTAGAGATACATCCGCAACAGCAACAGCTGTGTGTGGGATTCATGAGATGCTTAAACATTTACCAGAAGTAGATCCTGATAAAGAGACATACAAATATGCTATGCATACAATGCTTCGTAGTCTGATTGAACAGTATAGTAATAGTGAATTTATAGCAGGACGTCCTCTTCTATTGCACGGTGTGTATTCGTGGCATTCAGGTAAAGGAGTAGATGAAGGTAATATTGGGGAGATTATTATTACTTAGAAGCCTTAATAAGATTCTATAAAGACTGGGAACTTTATTGG

SEQ ID NO: 17020 - protein, 398 aa, Streptococcus agalactiae
MMKIKPVKVESIENPKRFLDSRLLTKIEVEEAIEKALKQLYINIDYFGEEYPTPATFNNTYKVMDNTEWTNGFWTGCLWLAYEYNQDKKLKNIAHKNVLSFLNRINNRIALDHHDLGFLYTPSCTAEYRINGDAKALEATIKAADKLMERYQEKGGFIQAWGELGYKEHYRLIIDCLLNIQLLFFAYEQTGDEKYRQVAVNHFYASANNVVRDDSSAFHTFYFDPETGEPLKGVTRQGYSDESSWARGQAWGIYGIPLSYRKMKDYQQIILFKGMTNYFLNRLPEDKVSYWDLIFTDGSGQPRDTSATATAVCGIHEMLKHLPEVDPDKETYKYAMHTMLRSLIEQYSNSEFIAGRPLLLHGVYSWHSGKGVDEGNIWGDYYYLEALIRFYKDWELYW

SEQ ID NO: 17021 - protein, 318 aa, Streptococcus agalactiae
ATGTCTTCTAATGATGTTAGAGTTGCTTTGCAAAGAGAGGTTATCGATTTCAAAGAAATTTTAGTATTGACTGATTTGCTAGGTGGGACTCCTTTCAATGTTTCTTCCGCCTTATCAGTAGAATATACAGATAAAAAGATAAAAGTTTTATCGGGCTTGAACCTTTCAATGTTAATGGAAGCTGTTTTATCTAGAACGATGTTTGAACATGTAGATGACCTTGTTGATAAAGTTATAACATCATCTCATGAAGGAATTGTTGATTTTTCTACTTGCCTTGCTACACAAACTGCAGAAGCAACTTTTGAGGGAGGCATT

SEQ ID NO: 17022 - protein, 106 aa, Streptococcus agalactiae; identical to SEQ ID NO: 3412

SEQ ID NO: 17023 - protein, 570 aa, Streptococcus agalactiae
ATGGTGAACAAAATTTCTCAAGATGTTGGGGTAATTGATATTCTAGTTAACAACGCAGGTATTATAAAACGCACCCCTATGCTAGAGATGAGCGCTGCAGATTTTCGACAAGTTATTGATATTGATTTGAATGCTCCCTTTATCGTATCAAAAGCGGTATTACCTGGAATGATCCAAAAAGGACATGGTAAAATCATCAATATTTGCTCCATGATGAGTGAGCTTGGACGCGAAACAGTTGCTGCCTATGCTGCTGCCAAAGGGGGACTTAAAATGTTAACCAAGAACATTGCTTCTGAATACGGTTCTGCTAACATCCAATGTAACGGTATCGGGCCCGGCTATATTGCCACACCACAAACAGCTCCCCTTCGTGAACGTCAAGATGATGGTTCACGTCATCCATTCGACCAATTTATCATCGCTAAAACACCTGCCGCTCGCTGGGGTGAGGCAGAAGATTTAGGTGCACCAGCTATCTTCCTTGCTAGCGATGCATCAAACTTTATCAATGGTCACATACTCTATGTAGATGGCGGTATTTTAGCTTACATCGGTAAACAACCTCAA

SEQ ID NO: 17024 - protein, 190 aa, Streptococcus agalactiae
MVNKISQDVGVIDILVNNAGIIKRTPMLEMSAADFRQVIDIDLNAPFIVSKAVLPGMIQKGHGKIINICSMMSELGRETVAAYAAAKGGLKMLTKNIASEYGSANIQCNGIGPGYIATPQTAPLRERQDDGSRHPFDQFIIAKTPAARWGEAEDLGAPAIFLASDASNFINGHILYVDGGILAYIGKQPQ

SEQ ID NO: 17025 - protein, 636 aa, Streptococcus agalactiae
ATGAAAATTGCATTAATCAACGAAAATAGCCAAGCGAGTAAAAATACTCTTATCTACAAAGAATTGAAAGCGGTTTCCAAAAAAAAAGGATTTGATGTTTTCAACTACGGGATGTATGGCAAAGAAGAAGAAAGCCAGCTAACTTATGTACAAAATGGTTTACTGACTGCTATTTTACTTAATAGCGGTGCTGCAGATTTTGTTATTACAGGCTGTGGGACAGGAATTGGAGCGATGCTTGCTTGTAATAGCTTTCCTGGCGTAGTCTGTGGATTCGCTGCTGATTCTGTCGACGCTTACTTATTCTCTCAAGTAAACGGAGGAAATGCTCTTTCCCTTCCTTTTGCTAAAGGATTTGGTTGGGGAGCTGAATTGAATCTGAGGTATTTATTTGAACGTCTTTTCGAAGATGAAAAAGGAGGGGGATACCCTAAAGAGAGGGCTGTACCTGAGCAACGCAATGCACGTATCCTTAGCGAAGTAAAACAGATTACTTACAGAGATTTACTCTCTGTTTTAAAAGAAATTGATCAAGATTTCTTAAAGGAAACTATTTCTGGGGAGCATTTCCAAGAATATTTCTTCGCTAATTGCCAAAATCAAAATATAGCAGACTACTTGAAATCTGTCTTAGAC

SEQ ID NO: 17026 - protein, 212 aa, Streptococcus agalactiae
MKIALINENSQASKNTLIYKELKAVSKKKGFDVFNYGMYGKEEESQLTYVQNGLLTAILLNSGAADFVITGCGTGIGAMLACNSFPGVVCGFAADSVDAYLFSQVNGGNALSLPFAKGFGWGAELNLRYLFERLFEDEKGGGYPKERAVPEQRNARILSEVKQITYRDLLSVLKEIDQDFLKETISGEHFQEYFFANCQNQNIADYLKSVLD

SEQ ID NO: 17027 - protein, 1005 aa, Streptococcus agalactiae
ATGTCTAAGATTCTTTTTTTCGGTGAACCTCTCATTCGCATCACTCCCAAAGAAAATGACTATTTTGCAGATAGTATCTCAACTAAACTATTCTATGGTGGCTCTGAAGTTAATATCGCAAGAGCTCTACAAGGCTTTGGGCAAGATACTAAACTCCTCTCAGCCTTACCCAATAATCCCATAGGTAATAGTTTTCTTCAATTTTTAAAAGCACAGGGTATTGATACTCATTCTATTCAGTGGGTTGGAGAACGTGTTGGGTTATATTTCTTAGAAAATTCCTTTGCTTGCAGAAAAGGTGAGGTGGTCTACGACCGCGATTATAGTAGTTTACATGACTTTAGGATAAACCAAATTGATTTCGATCAATTATTTGAAGGAGTTTCTCTCTTTCATTTTAGTGGTATTACACTATCATTGGATGAGTCTATCCAAGAGATAACACTGCTTCTTTTAAAAGAAGCTAAAAAAAGAGAGATAACAATCTCCTTAGATCTCAATTTTCGCAGTAAACTAATTTCTCCTAAAAATGCCAAAATCCTTTTTTCTCAGTTCGCTACCTTTGCGGATATTTGTTTTGGTATTGAACCTCTTATGGTTGACTCACAGGACACTACCTTCTTCAATCGCGATGAAGCTACAATAGAGGACATCAAAGAACGAATGATTTCTCTTATAAATCACTTTGACTTTCAAGTCATTTTCCATACTAAACGTCTACAGGATGAATGGGGACGAAACCACTACCAAGCTTACATAGCAAATCGTAAACAAGAGTTTGTCACTTCAAAAGAAATCACCACAGCTGTAAACCAGAGAATTGGAAGCGGAGATGCTTTTGTGGCGGGAGCGCTATATCAACTACTTCAGCACTCAGACAGCAAGACAGTCATTGATTTCGCTGTCGCTAGTGCATCTTTAAAATGTGCTTTGGAAGGGGACAATATGTTTGAGACCGTTACCGCAGTTAACAAAGTACTAAATCAATCGAAAGACATTATTCGT

SEQ ID NO: 17028 - protein, 335 aa, Streptococcus agalactiae
MSKILFFGEPLIRITPKENDYFADSISTKLFYGGSEVNIARALQGFGQDTKLLSALPNNPIGNSFLQFLKAQGIDTHSIQWVGERVGLYFLENSFACRKGEVVYDRDYSSLHDFRINQIDFDQLFEGVSLFHFSGITLSLDESIQEITLLLLKEAKKREITISLDLNFRSKLISPKNAKILFSQFATFADICFGIEPLMVDSQDTTFFNRDEATIEDIKERMISLINHFDFQVIFHTKRLQDEWGRNHYQAYIANRKQEFVTSKEITTAVNQRIGSGDAFVAGALYQLLQHSDSKTVIDFAVASASLKCALEGDNMFETVTAVNKVLNQSKDIIR

SEQ ID NO: 17029 - protein, 636 aa, Streptococcus agalactiae
ATGATAAAATCAAAGATTTTGTTGCAATTAATGCAAGGAAAAATAGTTGCTGTCATTCGTGGAAATAGCCAAGAAGAAGCTTTTCAAGCTGCTCAAGCATGCATAAAAGGTGGTATTTCTGCTATCGAAATCGCCTATACTAATAGCAAAGCTAGCCAAGTCATTGAACAACTAGTCACACAATATACTAACCAAGAACAAGTTGTCGTTGGGGCAGGAACTGTTCTAGACGCAGAAACTGCCCGAATGGCTATTTTAGCAGGAGCAAAGTTTATTGTATCTCCCGCATTTAATCTACAGACTGCTAAATTATGTAATCGTTATGCTATTCCTTATTTACCAGGTTGCATGACCTTATCAGAGATAACAACAGCACTTGAAGCTGGTTGTGAAATAATTAAAATATTCCCAGGAGGTACTCTAGGAACATCTTTCATCTCATCACTAAAAGCACCTTTACCTCAAGTACAAATTATGGTGACTGGTGGGGTAAATCTCACAAATGCCAAAGACTGGTTTCTATCTGGAGTAACAGCCATTGGTATTGGTGGAGAGTTCAATAAACTAGCAGCTTTGGGGGAATTTGATAAAATCACAGAAATGGCTAAACAATACAAAATACAGCTAAATCTGAAT

SEQ ID NO: 17030 - protein, 212 aa, Streptococcus agalactiae
MIKSKILLQLMQGKIVAVIRGNSQEEAFQAAQACIKGGISAIEIAYTNSKASQVIEQLVTQYTNQEQVVVGAGTVLDAETARMAILAGAKFIVSPAFNLQTAKLCNRYAIPYLPGCMTLSEITTALEAGCEIIKIFPGGTLGTSFISSLKAPLPQVQIMVTGGVNLTNAKDWFLSGVTAIGIGGEFNKLAALGEFDKITEMAKQYKIQLNLN

SEQ ID NO: 17031 - protein, 902 aa, Streptococcus agalactiae
ATGAATAAAAAACATAAATTACTTAAAAATATAGAGGAATTTAAGACGATAACCCAAAAAAGGCTAACTGAGAGAGGAAAGTTCCCATATGATACCGTTCATTCTACGTTTGAAATTAAGGATGAAAACTTTATCATGGAAAGATTGAAATCATCAGGGTTATCTATGGGTAAACCAGTTGATTATATGGGCGTAAATGGTATCCCTATTTACACTAAAACATTATCTATAGATAATAAGTTTGCCTTTGAAAATAATTCAAAAGATTCTTCATATTCTTCAAACATTAATATTAGTGAAGATAAAATAAAAGAAAATGCCAAAAAATTCTAGATTTAATAGTTAAATCTGGAGCTAATAATCAAAACTTAACAGATGAAGAAAAAGTAATTGCTTTCACTAAATATATAGGTGAAATAACTAATTATGACAATGAAGCTTACAGAGCTAGAAATGTCGACACAGAATATTACAGAGCTTCAGATTTATTTTCTGTAACAGAAAGAAAACTTGCTATGTGCGTTGGCTATAGTGTAACAGCCGCTAGAGCATTTAATATTATGGGGATACTAGTTATGTCGTTTCTGGTAAAAGTCCTCAAGGAATTCTCATGCAGCTGTGAGAGCGTATTATAATAGAAGTTGGCATATCATAGATATCACAGCCAGTACATTTGGAAAAATGGTAATTACAAAACAACGTATTCCGATTTATTAAAGAATACTGTATAGATGGTTATGACGTTTATATCCCGCAAAAACAAATAATAGATTTAAAGTTAAGTATATGGAATCAAATGAAGCGTTTGAAAATTGGATACATAATAATGGAAGCAAATCTATGTTATTTATTAATGAATCTGCAGCTCTAAAAGATAAAAAACCAAAAGATGATTGTACCAG

SEQ ID NO: 17032 - protein, 303 aa, Streptococcus agalactiae
  VARIANT 107, 191, 226: Xaa = Any Amino Acid
MNKKHKLLKNIEEFKTITQKRLTERGKFPYDTVHSTFEIKDENFIMERLKSSGLSMGKPVDYMGVNGIPIYTKTLSIDNKFAFENNSKDSSYSSNINISEDKIKENXQKILDLIVKSGANNQNLTDEEKVIAFTKYIGEITNYDNEAYRARNVDTEYYRASDLFSVTERKLAMCVGYSVTAARAFNIMGIXSYVVSGKSPQGISHAAVRAYYNRSWHIIDITASTXWKNGNYKTTYSDFIKEYCIDGYDVYBPAKTNNRFKVKYMESNEAFENWIHNNGSKSMLFINESAALKDKKPKDDLYQ

SEQ ID NO: 17033 - protein, 480 aa, Streptococcus agalactiae
TTGAAAAATGAATATGAAGAAATATTAAAGAAAGATAATTTATTTGAGCATGAACATGCAGAATTTAAAGAAAGTCTAAATTTAAATGAATCATTCTACCTACAATTAAAGAAAGAAGAAAAGAAACCGAGTGATAATCTCAAAAAAGAAGAAAAACCAAGAGAAAATTCAGTAAAAGAGAGAGAGACTCCAGCTGAAAACAATGATTTTGTTTCAGTAACAGAAAAAAACAACTTGATTGATAAATATAAAGAATTATTATCAAAAATCCCAGAGAATACACAAAATCCTGGGGAAAAGAATATACGAAATTATCTAGAGAAAGAATATGAAGAACTACTACAAAAAGATAGATTATTCAAGCATGAGTACACAGAGTTTACAAAAAGTCTAAATTTGAATGAAACATTCTATTCACAATTAAAAGAAGGAGAAATGAAACTAAGTGAAAATCCCGAAAAAGGAGAAACGAACACGAAT

SEQ ID NO: 17034 - protein, 160 aa, Streptococcus agalactiae
MKNEYEEILKKDNLFEHEHAEFKESLNLNESFYLQLKKEEKKPSDNLKKEEKPRENSVKERETPAENNDFVSVTEKNNLIDKYKELLSKIPENTQNPGEKNIRNYLEKEYEELLQKDRLFKHEYTEFTKSLNLNETFYSQLKEGEMKLSENPEKGETNTN

SEQ ID NO: 17035 - protein, 612 aa, Streptococcus agalactiae; identical to SEQ ID NO: 8107

SEQ ID NO: 17036 - protein, 204 aa, Streptococcus agalactiae; identical to SEQ ID NO: 3426

SEQ ID NO: 17037 - protein, 423 aa, Streptococcus agalactiae
ATGGGAAACTTTAAAAATTCAGCGGTTAAATCTATGGTTGTCATGCGAAAAGCATTTAGAACAATAGACGGAAAAGTCTCAGAATCATTTAAAGAATTTGAATTAACACCAACTCAGTTTGCAGTTTTGGATGTTCTCTATGCTAAAGGCACAATGAAAATTGGAGAATTGATTGAAAATATGCTTGCTACATCAGGTAATATGACTGTTGTTATTAAAAATATGGAAAAGAAGGGATGGGTATTACGCCATTCTTGTCCGAATGATAAGAGAGCCTTTTTGGTGAGTTTAACAACTGAAGGAGAAGAAGTGATAAAAAAAGCTCTACCAGAGCATATTAAACGTGTAGAAGATGCTTTTTCAGTCTTAACAGAAACAGAGCAAGAAGACTTGATTAACCTTTTAAAAAAATTTAAAACCTTG

SEQ ID NO: 17038 - protein, 141 aa, Streptococcus agalactiae; identical to SEQ ID NO: 3428

SEQ ID NO: 17039 - protein, 4404 aa, Streptococcus agalactiae
ATGTCAGAATTGTTCAAGAAACTTATGGATCAGATTGAAATGCCGCTTGAAATTAAGAATTCAAGTGTTTTTTCGTCTGCTGATATTATCGAGGTAAAGGTTCATTCTCTATCACGCTTATGGGAATTTCATTTTTCATTTCCAGAATTATTGCCAATTGAGGTGTATTGTGAATTACAAACTCGTTTAGTGAATAGTTTTGAAAAAGCAGATATAAAGGCTACTTTTGATATAAGAGCAGAAACTATTGATTTTTCTGATGATCTGCTACAGGATTATTATCAACAAGCTTTTTGTGAACCCTTGTGTAATAGTGCAAGTTTTAAGAGTTCTTTTTCACAATTAAAAGTTCATTACAATGGCAGTCAGATGATTATTTCAGCACCTCAATTTGTCAATAATAATCATTTTCGTCAGAATCATTTGCCGCGCTTGGAACAACAATTTTCATTGTTTGGATTTGGTAAACTTGCTATTGATATGGTTTCTGATGAACAAATGACGCAAAACTTAAAATCATCATTTGAAACTAACCGCGAGCAATTGCTTGAAAAAGCTAACCAAGAGGCTATGCAAGCCTTGGAAGCACAAAAATCACTAGAAGATTCAGCGCCTCCATCAGAAGAAGTGACACCAACTCAAAATTATGATTTCAAAGAGCGTATCAAACAACGTCAAGCTGGCTTTGAAAAAGCAGAGATTACACCCATGATTGAGGTGACCACAGAAGAAAATCGTATCGTTTTTGAAGGAATGGTTTTTAGTGTTGAACGAAAAACAACCCGCACTGGACGTCATATCATTAATTTTAAGATGACTGATTATACCTCAAGTTTTGCTATGCAAAAGTGGGCTAAAGATGATGAAGAATTGAAGAAGTACGATATGATTTCTAAAGGTTCGTGGTTGCGGGTCAGAGGGAATATTGAGAACAATAACTTTACTAAATCTTTGACAATGAATGTTCAAGATATCAAAGAGATTGTGCATCATGAACGTAAAGACTTAATGCCAGCAGATCAAAAACGTGTGGAATTTCATGCTCATACCAATATGTCAACGATGGATGCTTTACCAACTGTCGAGAGCCTCATTGATACTGCAGCTAAGTGGGGACACCCAGCTATTGCAATTACTGACCATGCCAATGTTCAAAGTTTTCCGCACGGCTACCACAGAGCAAAAAAAGCAGGTATAAAAGCAATTTTTGGATTAGAGGCAAATATTGTTGAAGATAAAGTGCCTATTTCCTACAACGAAGTTGATATGAATTTGCACGAAGCAACTTATGTTGTATTTGATGTGGAAACTACAGGTCTTTCTGCAGCTAATAATGACCTAATTCAGATTGCAGCATCAAAAATGTTCAAGGGTAATATTATTGAGCAATTTGATGAGTTTATTGACCCAGGCCATCCTCTTTCTGACTTTACAACTGAGTTGACAGGTATTACGGATAATCATGTCAGAGGTTCAAAACCTATTTTACAAGTCCTTCAGGAATTTCAGAATTTTTGTCAAGGTACGGTTTTAGTTGCGCATAATGCAACCTTTGACGTTGGTTTTATGAATGCGAATTATGAACGTCATAATCTGCCTTTGATCACACAGCCGGTCATTGATACCTTAGAATTTGCAAGAAATCTTTATCCTGAATATAAGCGTCATGGTTTGGGGCCTCTAACCAAACGTTTCCAAGTTGCTTTGGAACATCATCATATGGCCAACTACGATGCTGAAGCAACGGGTCGCTTACTCTTTATTTTCTTAAAAGAGGCGCGGGAAAATCGTGATGTGACTAATTTGATGGAGCTCAATACTAAATTGGTAGCTGAAGACTCTTACAAAAAGGCACGCATAAAGCATGCAACCATTTATGTCCAAAATCAGGTTGGACTTAAAAATATATTTAAGTTAGTTAGCCTTTCAAATGTTAAATATTTTGAAGGGGTGGCAAGAATTCCTAGATCAGTTTTAGATGCTCACAGAGAAGGTCTCTTGCTAGGTACTGCCTGTTCTGATGGAGAAGTTTTTGATGCCTTGTTATCAAATGGAATTGATGCAGCAGTGACCCTAGCTAAATATTATGATTTTATTGAAGTCATGCCACCTGCTATTTATCGCCCCTTGGTGGTTCGTGATTTAATTAAAGATGAGGCGGGGATTCAACAAATTATTAGAGACCTAATAGAGGTCGGTCGGCGTTTAGATAAGCCTGTTTTAGCTACGGGAAATGTTCATTATATTGAGCCTGAAGATGAGATTTACCGTGAGATTATTGTTCGTAGTCTTGGACAAGGTGCCATGATTAATAGGACTATCGGTCGTGGGGAGGATGCTCAACCAGCGCCTTTGCCAAAAGCACATTTCCGTACAACAAATGAGATGTTAGATGAATTTGCCTTTCTTGGTAAAGATTTAGCCTATGAGATCGTTGTAACCAATACGAATACTTTTGCAGATCGATTTGAAGACGTTGAAGTTGTAAAAGGGGATCTCTATACCCCGTTTGTTGATCGTGCTGAAGAACGAGTTGCTGAATTAACTTATGCTAAAGCATTCGAAATATATGGTAATCCTCTTCCTGATATTATTGATTTACGTATCGAAAAAGAGTTAGCATCTATACTTGGTAATGGATTTGCCGTTATCTATCTTGCTTCGCAAATGTTGGTGCAACGTTCTAATGAACGTGGTTATCTAGTAGGATCACGTGGGTCTGTTGGGTCGAGTTTTGTAGCGACCATGATAGGAATTACTGAAGTTAATCCAATGCCACCTCATTATGTTTGCCCAAATTGTCAGCATTCTGAATTTATCACAGATGGTTCTTGTGGTTCAGGTTACGATTTACCAAATAAAAATTGTCCTAAATGTGGTACTTTGTACAAGAAAGATGGACAGGATATTCCGTTTGAAACTTTCTTAGGATTTGATGGAGATAAGGTTCCTGATATTGATCTAAATTTCTCTGGAGATGATCAACCTTCTGCTCACTTAGATGTTCGTGATATCTTTGGAGAAGAATATGCTTTTCGTGCAGGAACGGTAGGTACCGTAGCTGAAAAAACTGCCTTTGGTTTTGTCAAAGGTTACGAACGAGATTACAATAAATTTTATAACGATGCAGAGGTCGAACGGTTAGCGACTGGTGCTGCGGGAGTCAAACGTTCTACAGGTCAACACCCCGGTGGTATCGTTGTTATTCCTAACTATATGGATGTTTATGATTTTACTCCGGTTCAATATCCAGCAGATGATATGACAGCTGCTTGGCAGACAACTCACTTCAATTTCCATGATATTGATGAGAATGTCTTGAAGTTAGATATTCTAGGACATGATGATCCTACTATGATTCGTAAACTTCAGGATTTATCAGGAATTGATCCATCAAATATCCTTCCAGATGATCCAGACGTTATGAAGTTATTTTCTGGTACGGAAGTTTTAGGAGTGACAGAAGAGCAAATTGGAACTCCTACAGGGATGCTTGGTATTCCTGAGTTTGGTACGAACTTTGTTCGTGGTATGGTGAACGAAACCCATCCAACCACATTTGCAGAATTGTTGCAACTGTCAGGACTATCACATGGTACGGATGTTTGGTTAGGTAATGCTCAAGACTTAATCAAAGAAGGTATTGCTACCTTATCAACCGTTATTGGTTGTCGTGATGACATCATGGTTTATTTAATGCACGCTGGTCTACAACCAAAGATGGCCTTTACAATCATGGAGCGCGTGCGTAAGGGGTTATGGTTGAAAATTTCAGAAGATGAGCGTAACGGTTATATCCAAGCAATGCGTGATAATAATGTCCCGGATTGGTATATTGAATCGTGTGGAAAAATCAAGTATATGTTCCCTAAAGCCCATGCAGCAGCCTATGTTTTAATGGCCTTACGTGTGGCGTACTTTAAAGTACATTATCCAATATTTTATTATTGTGCTTATTTTTCTATTCGCGCCAAAGCTTTTGAATTACGCACAATGAGTGCTGGACTTGATGCCGTTAAGGCGCGCATGAAGGATATCACTGAGAAGCGTCAGCGTAATGAGGCGACGAATGTCGAAAATGATCTTTTTACGACATTAGAGTTGGTTAATGAAATGCTTGAGCGTGGCTTTAAATTTGGGAAATTAGATCTTTATCGTAGCCATGCGACTGACTTTATTATTGAAGAGGATACGCTAATCCCTCCATTTGTTGCTATGGAAGGCTTGGGAGAAAACGTTGCAAAACAGATAGTTCGAGCACGTGAAGATGGTGAATTTTTATCAAAAACAGAGCTTCGTAAACGAGGAGGAGTCTCAAGTACCTTAGTTGAAAAATTTGATGAGATGGGTATTTTGGGAAATTTACCAGAAGACAATCAGTTGAGTCTTTTTGATGATTTCTTC

SEQ ID NO: 17040 - protein, 1468 aa, Streptococcus agalactiae
MSELFKKLMDQIEMPLEIKNSSVFSSADIIEVKVHSLSRLWEFHFSFPELLPIEVYCELQTRLVNSFEKADIKATFDIRAETIDFSDDLLQDYYQQAFCEPLCNSASFKSSFSQLKVHYNGSQMIISAPQFVNNNHFRQNHLPRLEQQFSLFGFGKLAIDMVSDEQMTQNLKSSFETNREQLLEKANQEAMQALEAQKSLEDSAPPSEEVTPTQNYDFKERIKQRQAGFEKAEITPMIEVTTEENRIVFEGMVFSVERKTTRTGRHIINFKMTDYTSSFAMQKWAKDDEELKKYDMISKGSWLRVRGNIENNNFTKSLTMNVQDIKEIVHHERKDLMPADQKRVEFHAHTNMSTMDALPTVESLIDTAAKWGHPAIAITDHANVQSFPHGYHRAKKAGIKAIFGLEANIVEDKVPISYNEVDMNLHEATYVVFDVETTGLSAANNDLIQIAASKMFKGNIIEQFDEFIDPGHPLSDFTTELTGITDNHVRGSKPILQVLQEFQNFCQGTVLVAHNATFDVGFMNANYERHNLPLITQPVIDTLEFARNLYPEYKRHGLGPLTKRFQVALEHHHMANYDAEATGRLLFIFLKEARENRDVTNLMELNTKLVAEDSYKKARIKHATIYVQNQVGLKNIFKLVSLSNVKYFEGVARIPRSVLDAHREGLLLGTACSDGEVFDALLSNGIDAAVTLAKYYDFIEVMPPAIYRPLVVRDLIKDEAGIQQIIRDLIEVGRRLDKPVLATGNVHYIEPEDEIYREIIVRSLGQGAMINRTIGRGEDAQPAPLPKAHFRTTNEMLDEFAFLGKDLAYEIVVTNTNTFADRFEDVEVVKGDLYTPFVDRAEERVAELTYAKAFEIYGNPLPDIIDLRIEKELASILGNGFAVIYLASQMLVQRSNERGYLVGSRGSVGSSFVATMIGITEVNPMPPHYVCPNCQHSEFITDGSCGSGYDLPNKNCPKCGTLYKKDGQDIPFETFLGFDGDKVPDIDLNFSGDDQPSAHLDVRDIFGEEYAFRAGTVGTVAEKTAFGFVKGYERDYNKFYNDAEVERLATGAAGVKRSTGQHPGGIVVIPNYMDVYDFTPVQYPADDMTAAWQTTHFNFHDIDENVLKLDILGHDDPTMIRKLQDLSGIDPSNILPDDPDVMKLFSGTEVLGVTEEQIGTPTGMLGIPEFGTNFVRGMVNETHPTTFAELLQLSGLSHGTDVWLGNAQDLIKEGIATLSTVIGCRDDIMVYLMHAGLQPKMAFTIMERVRKGLWLKISEDERNGYIQAMRDNNVPDWYIESCGKIKYMFPKAHAAAYVLMALRVAYFKVHYPIFYYCAYFSIRAKAFELRTMSAGLDAVKARMKDITEKRQRNEATNVENDLFTTLELVNEMLERGFKFGKLDLYRSHATDFIIEEDTLIPPFVAMEGLGENVAKQIVRAREDGEFLSKTELRKRGGVSSTLVEKFDEMGILGNLPEDNQLSLFDDFF

SEQ ID NO: 17041 - protein, 261 aa, Streptococcus agalactiae
ATGCCTACTTTAGAAGATGATGGGAAAGGCAATATGACTCAAATCCAAGCTCCTTTTCGCGCCTATCCAAATTATTCTGCTTCACTATATGATTATGCTGAGTTAGTATCTAGTCAAAAGTATGCATCTGTTTGGAAATCAAATACTTCTTCTTATAAGGATGCTACTGCAGCTCTAACAGGTCTTTATGCGACAGATACTGCTTATGCTAGTAAATTAAACCAAATTATTGAAACCTACAGTCTAGATGCTTATGATAAA

SEQ ID NO: 17042 - protein, 87 aa, Streptococcus agalactiae
MPTLEDDGKGNMTQIQAPFRAYPNYSASLYDYAELVSSQKYASVWKSNTSSYKDATAALTGLYATDTAYASKLNQIIETYSLDAYDK

SEQ ID NO: 17043 - protein, 606 aa, Streptococcus agalactiae
ATGCTTGGTATTCCTGAGTTTGGTACGAACTTTGTTCGTGGTATGGTGAACGAAACCCATCCAACCACATTTGCAGAATTGTTGCAACTGTCAGGACTATCACATGGTACGGATGTTTGGTTAGGTAATGCTCAAGACTTAATCAAAGAAGGTATTGCTACCTTATCAACCGTTATTGGTTGTCGTGATGACATCATGGTTTATTTAATGCACGCTGGTCTACAACCAAAGATGGCCTTTACAATCATGGAGCGCGTGCGTAAGGGGTTATGGTTGAAAATTTCAGAAGATGAGCGTAACGGTTATATCCAAGCAATGCGTGATAATAATGTCCCGGATTGGTATATTGAATCGTGTGGAAAAATCAAGTATATGTTCCCTAAAGCCCATGCAGCAGCCTATGTTTTAATGGCCTTACGTGTGGCGTACTTTAAAGTACATTATCCAATATTTTATTATTGTGCTTATTTTTCTATTCGCGCCAAAGCTTTTGAATTACGCACAATGAGTGCTGGACTTGATGCCGTTAAGGCGCGCATGAAGGATATCACTGAGAAGCGTCAGCGTAATGAGGCGACGAATGTCAAAAATGATTTTTTACGACAT

SEQ ID NO: 17044 - protein, 202 aa, Streptococcus agalactiae
MLGIPEFGTNFVRGMVNETHPTTFAELLQLSGLSHGTDVWLGNAQDLIKEGIATLSTVIGCRDDIMVYLMHAGLQPKMAFTIMERVRKGLWLKISEDERNGYIQAMRDNNVPDWYIESCGKIKYMFPKAHAAAYVLMALRVAYFKVHYPIFYYCAYFSIRAKAFELRTMSAGLDAVKARMKDITEKRQRNEATNVKNDFLRH

SEQ ID NO: 17045 - protein, 303 aa, Streptococcus agalactiae
ATGAAAAGTCGAAAAAAAGATAAATTGGTATTGAGGTTAACAACAACACTATTAGTTTTTGGTTTGGGTGGGGTTTGGTTTTACAATTATAAAAATGATAATGTCGAACCGACAGTCACTAGTGCATCGGATCAAACGACGACTTTTATTCAAACGATTTCTCCAACAGCTATTGAAATTTCTAAGACCTATGATTTGTATGCGTCAGTCTTATTAGCACAAGCTATTTTGGAATCATCCAGTGGACAATCAGATTTGTCTAGGGCTCCTAATTTATACCTCTTTGGCATCCAAGGAGAAATA

SEQ ID NO: 17046 - protein, 101 aa, Streptococcus agalactiae
MKSRKKDKLVLRLTTTLLVFGLGGVWFYNYKNDNVEPTVTSASDQTTTFIQTISPTAIEISKTYDLYASVLLAQAILESSSGQSDLSRAPNLYLFGIQGEI

SEQ ID NO: 17047 - protein, 1646 aa, Streptococcus agalactiae
ATGTAGCTCCAGCTCTTCTTACAGCAGATTTATGGCGTGAATCTGGGCGCTACGAAACATATGGTGAAGACCTTTATAAATTAAAGAATCGTGATCAATCGGATTTTATCTTAGGACCAACTCATGAAGAGACTTTCACAACTCTTGTTCGTGATGCAGTAAAATCTTATAAGCAATTACCACTAAACCTTTATCAAATTCAGTCTAAATATCGTGATGAGAAGCGTCCTCGTAATGGACTTCTTCGAACACGTGAATTTATCATGAAAGATGGATACAGCTTCCACAAAGATTATGAAGACCTTGATGTCACTTACGAAGATTACCGTAAAGCATATGAAGCCATCTTCACACGTGCTGGACTTGACTTTAAAGGCATTATAGGTGACGGAGGTGCTATGGGAGGTAAAGATAGCCAAGAATTTATGGCAGTAACTCCCAATCGTACAGATTTAAATCGTTGGTTAGTCCTTGATAAAACTATTCCTTCTATTGATGATATTCCAGAGGATGTTTTAGAAGAAATTAAGGCAGAACTCTCGGCTTGGCTAGTTTCTGGTGAGGACACTATTGCATACTCCACTGAATCAAGCTATGCTGCTAACCTTGAGATGGCAACGAATGAGTACAAACCATCTACTAAGGCTGCTACCTTTGAAGAAGTAACAAAAGTAGAAACTCCTAACTGCAAATCAATTGATGAGGTAGCTGGATTTTTATCAATTGATGAAAATCAAACTATCAAGACACTATTGTTTATTGCTGATGAACAGCCCGTGGTTGCTTTACTAGTTGGTAACGATCAAGTCAATGATGTGAAGTTAAAAAATTATTTAGCGGCTGATTTCTTAGAGCCTGCAAGTGAAGAGCAAGCAAAAGAGATTTTTGGTGCAGGTTTTGGTTCTCTTGGGCCAGTTAACCTACCTGAGTCTGTTAAAATTATTGCTGATCGTAAAGTTCAAGACCTTGCTAATGCTGTGTCTGGTGCTAACCAAGATGGTTATCATTTTACTGGAGTTAATCCAGAACGTGATTTCACAGCTGAATACGTTGATATTCGTGAAGTAAAAGAAGGGGAGATTTCTCCAGACGGTAAAGGTACTCTGAAATTTGCTCGTGGTATTGAAATTGGACATATCTTTAAACTAGGTACCCGTTATTCAGATAGTATGGGAGCAAACATCCTTGATGAAAATGGCCGCTCAAATCCTATTGTTATGGGGTGTTATGGTATTGGTGTTAGTCGTATTCTCTCAGCTGTCATTGAACAACATGCCCGACTTTTTGTGAATAAGACACCAAAAGGAGCTTATCGCTTTGCTTGGGGGATTAATTTCCCAGAAGAATTAGCCCCATTTGATGTACATTTGATTACTGTCAATGTCAAAGATCAAGAGTCACAAGATCTTACTGAGAAAATTGAAGCTGATTTGATGCTTAAAGGTTATGAAGTCCTGACAGACGATCGTAATGAACGTGTTGGTTCTAAATTCTCAGACAGTGACTTAATTGGACTTCCAATTCGAGTAACTGTTGGGAAGAAAGCTTCTGAAGGTATCGTTGAAGTGAAAATTAAAGCAAGTGGTGATACGATTGAGGTTCACGCTGATAACTTAATTGAAACTTTAGAGATTCTAACAAAAAAA

SEQ ID NO: 17048 - protein, 549 aa, Streptococcus agalactiae
MLAPALLTADLWRESGRYETYGEDLYKLKNRDQSDFILGPTHEETFTTLVRDAVKSYKQLPLNLYQIQSKYRDEKRPRNGLLRTREFIMKDGYSFHKDYEDLDVTYEDYRKAYEAIFTRAGLDFKGIIGDGGAMGGKDSQEFMAVTPNRTDLNRWLVLDKTIPSIDDIPEDVLEEIKAELSAWLVSGEDTIAYSTESSYAANLEMATNEYKPSTKAATFEEVTKVETPNCKSIDEVAGFLSIDENQTIKTLLFIADEQPVVALLVGNDQVNDVKLKNYLAADFLEPASEEQAKEIFGAGFGSLGPVNLPESVKIIADRKVQDLANAVSGANQDGYHFTGVNPERDFTAEYVDIREVKEGEISPDGKGTLKFARGIEIGHIFKLGTRYSDSMGANILDENGRSNPIVMGCYGIGVSRILSAVIEQHARLFVNKTPKGAYRFAWGINFPEELAPFDVHLITVNVKDQESQDLTEKIEADLMLKGYEVLTDDRNERVGSKFSDSDLIGLPIRVTVGKKASEGIVEVKIKASGDTIEVHADNLIETLEILTKK

SEQ ID NO: 17049 - protein, 205 aa, Streptococcus agalactiae
ATGAAACAAAGTAAAATGCTTATTCCAACACTTCGCGAAATGCCAAGTGATGCTCAGGTTATCAGCCATGCTCTTATGGTTCGTGCAGGATATGTCCGCCAAGTTTCGGCTGGAATCTATGCTTATTTGCCTCTAGCTAACCGTACTATTGAAAAATTAAAACAATTATGCGTCAAGAATTTGAGAAGAGGTGCAGTTGAAATGT

SEQ ID NO: 17050 - protein, 69 aa, Streptococcus agalactiae
  VARIANT 53: Xaa = Any Amino Acid
MKQSKMLIPTLREMPSDAQVISHALMVRAGYVRQVSAGIYAYLPLANRTIEKXKTIMRQEFEKMVQLKC

SEQ ID NO: 17051 - protein, 1257 aa, Streptococcus agalactiae
ATGCTAGGAATTTTAACCTTTATTATTATTTTTGGTGTCATTGTAGTTGTTCACGAATTTGGGCATTTCTATTTTGCAAAGAAATCAGGAATTCTTGTTCGTGAATTTGCTATTGGTATGGGTCCAAAAATCTTTTCTCACATTGATAAAGAAGGAACAACCTATACTATTCGTATATTACCGCTAGGTGGTTATGTCCGTATGGCTGGTTGGGGTGATGATAAGACTGAAATTAAGACAGGGACGCCGGCTAGCCTTACTTTAAATAAAGAAGGCATTGTAACTCGTATTAATTTATCAGGAAAACAATTAGACAATACTTCTTTACCAATCAATGTAACAGCTTATGATTTAGAAGATAAACTAACTATCACAGGATTGGTCTTAAGTGAGACAAAAACCTATAGTGTTGATCACGATGCTACTATCATTGAGGAGGATGGTACTGAAATTCGTATTGCTCCCTTAGATGTGCAGTATCAGAATGCTTCTGTATGGGGGCGCTTAATTACCAATTTTGCAGGTCCGATGAATAATTTTATTTTAGGTCTTGTAGTCTTTATTGCACTTGCTTTTATTCAAGGAGGTGTTCAAGATTTATCAACCAATCAGGTCCGTGTATCAGAAAATGGTCCTGCTGCTAGTGCAGGTTTAAAAAATAATGACCGTATTTTACAAATAGGGTCGCACAAAGTTTCTAACTGGGAACAGTTGACAGCAGCAGTAGAAAAGTCAACTAGTCATTTAGAAAAAAACCAAAAACTTGCCCTTAAAATTAAGAGCAAAGAGGTGGTGAAAACGATCAACGTTAAGCCACAGAAAGTTGATAAATCCTACATCATCGGCATTATGCCAGCTCTAAAGACAAGCTTTAAAGACAAGCTTTTAGGTGGATTTAAACTAGCATGGGAAAGTTTCTTTAGAATTTTAAATGAATTAAAGAAACTTATTGCTCATTTTAGTATTAATAAATTGGGAGGTCCAGTAGCTCTCTATCAGGCTAGTAGCCAAGCTGCTAAAAATGGTTTCGTCACAGTTCTCAACTTAATGGGATTAATCTCTATCAACTTAGGTATTATGAATCTCATCCCTATACCAGCCCTTGACGGGGGTAAGATAGTGATGAATATTTTAGAAGCCATTCGTCGCAAACCACTTAAACAAGAAACAGAAACTTATATTACGCTCGCTGGGGTAGCAGTTATGTTAGTATTAATGATTGCTGTAACCTGGAACGATATCATGCGAGCTTTCTTC

SEQ ID NO: 17052 - protein, 419 aa, Streptococcus agalactiae
MLGILTFIIIFGVIVVVHEFGHFYFAKKSGILVREFAIGMGPKIFSHIDKEGTTYTIRILPLGGYVRMAGWGDDKTEIKTGTPASLTLNKEGIVTRINLSGKQLDNTSLPINVTAYDLEDKLTITGLVLSETKTYSVDHDATIIEEDGTEIRIAPLDVQYQNASVWGRLITNFAGPMNNFILGLVVFIALAFIQGGVQDLSTNQVRVSENGPAASAGLKNNDRILQIGSHKVSNWEQLTAAVEKSTSHLEKNQKLALKIKSKEVVKTINVKPQKVDKSYIIGIMPALKTSFKDKLLGGFKLAWESFFRILNELKKLIAHFSINKLGGPVALYQASSQAAKNGFVTVLNLMGLISINLGIMNLIPIPALDGGKIVMNILEAIRRKPLKQETETYITLAGVAVMLVLMIAVTWNDIMRAFF

SEQ ID NO: 17053 - protein, 792 aa, Streptococcus agalactiae
ATGAAAGAACGTGTTATTTGGGGAGCTGTCGCGCTTGCCATATTTATCCCTTTTTTAGTAATGGGTGGTTTGCCTTTCCAATTTTTAGTTGGACTTTTAGCTATGATTGGTGTTTCTGAATTACTTCGTATGCGTCGTTTAGAAATATTTTCCTTTGAAGGTGCATTAGCTATGATAGGAGCCTTTGTTTTAACAGTTCCTTTAGATAGTTATTTGTCCTTTTTACCAGTTGACGCTAGTTTATCAGCATACGGTATTGTTATTTTTATGATTTTGGCAGGTACTGTTTTGAACAGTAATTCTTACAGTTTTGAAGATGCTGCCTTTCCAATTGCGTCTAGTTTTTATGTGGGTATTGGCTTTCAAAATCTAGTCAGTGCTCGTATGGCTGGAATAGATAAGGTGTTGTTAGCTTTATTTATTGTCTGGGCGACTGATATCGGTGCTTATATGATTGGTCGTCAATTTGGACAACGCAAACTACTACCTTCAGTGTCTCCAAATAAAACAATTGAAGGGAGTCTGGGAGGAATTGCTTCAGCCATTGTGGTAGCTTTCTTTTTTATGCTTTTTGATAAGACCGTCTATGCGCCTCATAGCTTCCTAGTCATGTTAGTTTTAGTGGCTATCTTTAGCATTTTTGGTCAATTTGGAGATTTAGTTGAAAGTAGTATTAAACGTCATTTTGGTGTTAAAGATTCGGGTAAATTGATTCCGGGTCATGGGGGGATTTTGGATCGCTTTGATAGTATGATTTTTGTTTTCCCAATCATGCACTTCTTTGGCTTATTC

SEQ ID NO: 17054 - protein, 264 aa, Streptococcus agalactiae; identical to SEQ ID NO: 3438

SEQ ID NO: 17055 - protein, 543 aa, Streptococcus agalactiae
ATGCCTTTTCTACGATGGTCACGTCCAGATGATGAAGTTAAGTTTATTATGAACCTTCCGGTTGAATTTTTTGATAAATATGTACCAGAGTTAGATAAAAATAATGTACGTGTACAGGTCATCGGAGATACTCATAAATTACCTAAGGCAACATACGATGCAATGCAACGCGCTTGTTTGAGGACAAAACATAATTCGGGGCTCGTATTGAATTTTGCGCTAAATTATGGCGGACGTTCAGAAATCACTAATGCCATTAAGGAAATTGCTCAGGATGTTTTGGAAGCTAAGTTGAATCCTGACGATATTACAGAGGATTTAGTAGCAAATCATTTAATGACAAATAGCTTACCCTATCTTTATAGGGACCCTGATTTGATTATCCGCACTAGTGGAGAGTTACGCTTGAGTAACTTTTTACCTTGGCAATCAGCTTATAGTGAATTTTACTTTACTCCCGTTTTATGGCCAGATTTTAAAAAAGACGAACTACATAAGGCCATTGTGGATTATAATCAACGCCATCGTCGATTTGGTAGTGTA

SEQ ID NO: 17056 - protein, 182 aa, Streptococcus agalactiae
MPFLQNWSRPDDEVKFIMNLPVEFFDKYVPELDKNNVRVQVIGDTHKLPKATYDAMQRACLRTKHNSGLVLNFALNYGGRSEITNAIKEIAQDVLEAKLNPDDITEDLVANHLMTNSLPYLYRDPDLIIRTSGELRLSNFLPWQSAYSEFYFTPVLWPDFKKDELHKAIVDYNQRHRRFGSV

SEQ ID NO: 17057 - protein, 411 aa, Streptococcus agalactiae
ATGTTTATATTTAAAAGAAAAAAACAAGTAGAAATGCCTTTGGAGAAAATACCAGCACATATTGGTATTATCATGGATGGAACGGACGTTGGGCAAAAAAACGTTTAAAACCACGCGTTATGGGACATAAGGCGGGGATGGATGCTCTTCAAGAAGTACAATAGCAGCTTCGAATTAGGTGTTAAAGTACTAACTGTCTATGCCTTTTCTACAGAAAATTGGTCACGTCCAGATGATGAAGTTAAGTTTATTATGAACCTTCCGGTTGAATTTTTTGATAAATATGTACCAGAGTTAGATAAAAATAATGTACGTGTACAGGTCATCGGAGATACTCATAAATTACCTAAGGCAACATACGATGCAATGCAACGCGCTTGTTTGAGGACAAACATAATTCGGAGCTCGTAT

SEQ ID NO: 17058 - protein, 138 aa, Streptococcus agalactiae
  VARIANT 53: Xaa = Any Amino Acid
MFIFKRKKQVEMPLEKIPAHIGIIMDGNGRWAKKRLKPRVMGHKAGMDALQEXTIAASELGVKVLTVYAFSTENWSRPDDEVKFIMNLPVEFFDKYVPELDKNNVRVQVIGDTHKLPKATYDAMQRACLRTNIIRSSY

SEQ ID NO: 17059 - protein, 155 aa, Streptococcus agalactiae
ATGGTTTTAGATGTTGATGGTGTCTACTTGACGTTTGAGTTGGCAGCTATCAAATCTGTTGTCTCTAAGGCAGCAACACCAACAGAACCAGTGAAGATGTTAAGATTATTGAAGTCAATGAAGACGAAAATAAAGAAACAGCCATCGAAACTGAA

SEQ ID NO: 17060 - protein, 52 aa, Streptococcus agalactiae
  VARIANT 31: Xaa = Any Amino Acid
MVLDVDGVYLTFELAAIKSVVSKAATPTEPXEDVKIIEVNEDENKETAIETE

SEQ ID NO: 17061 - protein, 342 aa, Streptococcus agalactiae
ATGTATTCTTTTGAAGAACTTTTGGCAACCATGACTTTGATAACGGCTGCCGAAATTGAAGATAAAATTGATTCAAATCAAGATTTTGTACTGTTCATTGGTCGTATTTCTTGTCCATTTTGTCACCTCTTTGTTCCTAAAATTGTAGAAGTAGCTGATGAAGATGAATTTGAATTATTCCATTTAGATAGTGAAGATTTTGATCATTGGACTGCAAATAAAGATTTTCGAAATAAATATGACATTCCTACAGTGCCAGGTTTGATGGTTGTTAAAAACGGAACTATCAAGGTGAAGTGCGATTCAAAAATGACAAAAGAAGAAATCCGTGAATTTATTGGC

SEQ ID NO: 17062 - protein, 114 aa, Streptococcus agalactiae
MYSFEELLATMTLITAAEIEDKIDSNQDFVLFIGRISCPFCHLFVPKIVEVADEDEFELFHLDSEDFDHWTANKDFRNKYDIPTVPGLMVVKNGTIKVKCDSKMTKEEIREFIG

SEQ ID NO: 17063 - protein, 1161 aa, Streptococcus agalactiae
ATGAGTGAAAATTTAGGTCAATTAGCTATCAACCAAGCTAGAGAAAATGGTGGAAAATTAGAAGTAATTTCAAAAGTTAAGGTGGAAGATAAGAGGGATCTTAGTATTGCCTATACCCCAGGGGTGGCGTCAGTATCATCGGCTATTGCAGAGGATGTGGAGCTTGCATATGAGTTGACGACTAAAAAAAATACAGTAGCCGTAGTAAGTGATGGTTCAGCTGTTCTTGGATTAGGAGATATTGGTCCTGAGGCAGCAATGCCAGTCATGGAAGGTAAAGCAGCACTCTTTAAACGTTTTGCAAATGTAGATGCTGTGCCAATTGTGTTGAAAACAAATGATACAGAGGAAATTATTTCTATAGTAAAAGCGATTTCGCCGACTTTTGGAGGGATTAATTTAGAGGATATTTCAGCACCACGTTGTTTCGAAATTGAACAACGCCTAATTGAAGAATGTGATATACCAGTTTTCCATGATGACCAACATGGTACAGCAATCGTAGTATTAGCGGCTTTGTTTAACAGTTTGAAGTTAGTTAAAAAAGACATTGAAGATATCAAAGTAGTTGTTAATGGTGGAGGTTCAGCGGGCTTATCTATAACAAGGAAGCTTCTATCAGCAGGAGCAAAACATGTAACGGTAGTTGATCGATTTGGCATTATTAACGATAAAGATCGGGAGTCATTAGCCCCTCATCACAAAGCGATTGCAAAATTGACTAATAGAGAATTCCAATCTGGATCCTTAGAAGATGCTTTGGAGAATGCCGATGTTTTTATAGGTGTTTCTGCTCCGGAAGCATTACATGCAGAATGGATTTCCAAGATGGCTGATAAACCTATTGTATTTGCAATGGCGAATCCTATTCCAGAAATTTATCCAGATCAAGCCTTAAAAGCCGGAGCTTACATAGTTGGAACTGGTCGTAGTGATTTTCCAAATCAAATTAATAATGTTTTAGCATTTCCGGGTATTTTCAGAGGAGCATTAGATGCTAGAGCAAAAACGATAACTGTTGAAATGCAAATTGCGGCAGCGAGAGGCATAGCTAGTTTAATACCGGAGGAAGAATTAAGCACAACTCACATCATTCCAAATGCTTTTCAAAATGATGTGGCCGATGTAGTTGCTAAAAGCGTTAGTAATGCTGTACAAAAA

SEQ ID NO: 17064 - protein, 387 aa, Streptococcus agalactiae
MSENLGQLAINQARENGGKLEVISKVKVEDKRDLSIAYTPGVASVSSAIAEDVELAYELTTKKNTVAVVSDGSAVLGLGDIGPEAAMPVMEGKAALFKRFANVDAVPIVLKTNDTEEIISIVKAISPTFGGINLEDISAPRCFEIEQRLIEECDIPVFHDDQHGTAIVVLAALFNSLKLVKKDIEDIKVVVNGGGSAGLSITRKLLSAGAKHVTVVDRFGIINDKDRESLAPHHKAIAKLTNREFQSGSLEDALENADVFIGVSAPEALHAEWISKMADKPIVFAMANPIPEIYPDQALKAGAYIVGTGRSDFPNQINNVLAFPGIFRGALDARAKTITVEMQIAAARGIASLIPEEELSTTHIIPNAFQNDVADVVAKSVSNAVQK

SEQ ID NO: 17065 - protein, 1335 aa, Streptococcus agalactiae
ATGGCAGACGTGAAGGTAGTGAATAATGAGGGTTCTAGAGGTCAAAAGCAAGACTTAAAGACTAAACTATTTCATATTAAGGTAGGCTCAGTTCCCTTACCAGTATATGTTTGTTTAGCATTATTGATTCTTCTAGCAGGCTTTTTACAAAAATTGCCAGTCAATATGCTAGGAGGATTTGCAGTCATCTTAACAATGGGATGGTTCTTAGGTACTATTGGAGCTAGCATCCCTGGTTTTAAAAACTTCGGTGGCCCAGCTATTTTATCTTTATTAGTACCATCTATTTTGGTGTTTTTCAACCTCATTAATAAAAATGTTTTAGAGTCAACAAATATGTTGATGAAGCAAGCTAACTTTCTTTATTTTTATATTGCTTGTTTAGTGTCCGGTAGTATTTTAGGGATGAATCGGAAAATGTTGATTCAGGGATTACTAAGAATGATTTTCCCCATGTTATTAGGAATGGTTTGTGCGATGATGGTAGGGACATTTGTCGGTGTTATTTTAGGCTTAGAGTGGCGACACACTTTGTTTTATATCGTAACACCCGTTTTAGCTGGTGGTATTGGTGAAGGTATTTTACCATTATCGTTAGGCTATAGTTCAATTACCGGTGTAGCTAGCGAACAACTAGTTGCTCAACTCATCCCAGCCACTATTATTGGTAATTTCTTTGCCATTTTATGTACTGCACTATTGAATCGTTTGGGAGAAAAGAAACCACACTTGTCTGGTCAAGGGCAATTAGTAAGGTTAAATAAAGGAGAGGACATGTCAGATATTATTGCTGATCATTCTGGCCCAATTGACGTTAAGAAAATGGGTGGAGGTGTTTTAACAGCATGTAGTCTCTTTATTTTTGGACATTTGTTGCAGCAATTAACTGGATTTCCTGGTCCCGTATTAATGATTATCGCAGCAGCTATTTTGAAATATATCAATGTTATTCCTAGAGAAACACAAAATGGAGCTAAGCAACTTTATAAATTTATTTCTGGTAATTTTACATTTCCTCTAATGGCAGGGCTAGGATTGCTTTATATCCCGTTAAAAGATGTTGTGGCAACGCTTAGCATACAATATTTCATAGTTGTTATTAGTGTTGTATTTACAGTTATTTCTGTTGGATTCTTTGTATCGCGATTCCTTAATATGAATCCTGTTGAAGCAGGTATTATTTCAGCTTGTCAAAGTGGTATGGGAGGAACAGGAGATGTTGCCATTTTAAGTACAGCAGACCGAATGAACTTGATGCCATTTGCTCAAGTTGCTACGCGTTTAGGAGGAGCTATTACTGTTATCACGATGACAGCCATTTTACGCATGTTATTC

SEQ ID NO: 17066 - protein, 445 aa, Streptococcus agalactiae
MADVKVVNNEGSRGQKQDLKTKLFHIKVGSVPLPVYVCLALLILLAGFLQKLPVNMLGGFAVILTMGWFLGTIGASIPGFKNFGGPAILSLLVPSILVFFNLINKNVLESTNMLMKQANFLYFYIACLVSGSILGMNRKMLIQGLLRMIFPMLLGMVCAMMVGTFVGVILGLEWRHTLFYIVTPVLAGGIGEGILPLSLGYSSITGVASEQLVAQLIPATIIGNFFAILCTALLNRLGEKKPHLSGQGQLVRLNKGEDMSDIIADHSGPIDVKKMGGGVLTACSLFIFGHLLQQLTGFPGPVLMIIAAAILKYINVIPRETQNGAKQLYKFISGNFTFPLMAGLGLLYIPLKDVVATLSIQYFIVVISVVFTVISVGFFVSRFLNMNPVEAGIISACQSGMGGTGDVAILSTADRMNLMPFAQVATRLGGAITVITMTAILRMLF

SEQ ID NO: 17067 - protein, 1524 aa, Streptococcus agalactiae
ATGAAAAAAAAACTATCTCTTTGGGCATTTCTATCATTGATTTTAGTCACTATGACCATTTGTATATTTTCTATTTTTTATTATGTCACTATACATCAGTCCTATCGTATGGTAAGGGTACAGGAAGAAAAAATCTTAAAAAATACTGGTTATGCTTTATCGAGAAATCCACAAGTTATACAAACACTCAAAGATAATCACTATAATCAAAGTCTCCAAAAACAAATGCTATTCCTTAGCAAAAAATCAAATTTAGACTATATTGTCCTTATAAATTTAAAAGGGATCCGTTTTACCCACCCTGACTCCACTAAGATTGGTAAACCATTTCAAGGCGGTGATGAACAAGCTGTTTTTAAGGGAAAAGCTATTATGTCTACTGCAGAAGGTTCTTTAGGAAAATCTTTACGATACTTAATTCCAGTATATGATCACCAAAAACAGGTTGGGGCAATTGCAGTTGGCTTAAAATTAACGACACTTGGAGACTTATCTCAAAGCAGCATAAAAGAGTTTAGTAAGCCTCTCTTGATTAGTATTTTGATTAGCTTAGTCGTCACAAGTATAATTTCTTATGGCTTAAAAAAACAACTTCACAACCTCCATCCAAGTGATATTTTTCAACATTTAGAAGAGCGCAATGCAACACTGGACCAAATTCAAGCCGCTGTATTTGTTATTGACCAGAGGCATATCATCAAAAGAAATAATCCTGCAGCTAGTTTATTATTCAAAAAAGAGGGGCAACGAGACCTATTTTCAGGTAAATTATTAGAATCTTTAATTCCTCAACTCAAGCAGGATCATTTTTCAAAAAAAACTGAACAAGTATTACATTTTCAAGGACAAGACTATTTACTATCTATCTCGCCAATTACGGTTAAAACACAAAATAGAGGCTATGTTGTCTTCTTAAGGAATGTTACTGAAACACTTTTCACTTTGGATCAATTAGCACACACTACAGCTTATGCTTCTGCTCTACAGGCCCAAACACATCAATTTATGAATCAACTTCATGTTATTTATGGACTTGCAGACATCGAATACTACGACGAGTTGAAAATTTATTTAAAAGAATTATTGGAGCCACAAAATGAATTTTTAGCACGCTTATCAATGTTAGTTAGAGAGCCTCGACTGGCTAGTTTCATTATTGGCGAAAGAGAAAAATTCGCAGAAAAACACATCAATCTATCCACAGAAATTTTAGTAGAAATCCCTACCAAGTCAACTGTTGAGGATGTTAATAACTATCTCTTGCTCCACAGATATATTAATACGAAGATACTCACGCTATTAAATTCAACGACTTTAGTTTCTTTACGTTTAAATTATCAAAATAACCTCATTGAAACAGATTATCAATGGGAGAATGAGAAGTGGTTACTCAATGACTACCATCAGTATTTCAACGACGCTTATTTTCAACAGTTACTTGTAGATTCAAGAGCTACTTATAAGATCTCTTTAAAACAAAATAAGGTTATTATAAGAACAAATATTATCTACTCAGAAGGGTCT

SEQ ID NO: 17068 - protein, 508 aa, Streptococcus agalactiae
MKKKLSLWAFLSLILVTMTICIFSIFYYVTIHQSYRMVRVQEEKILKNTGYALSRNPQVIQTLKDNHYNQSLQKQMLFLSKKSNLDYIVLINLKGIRFTHPDSTKIGKPFQGGDEQAVFKGKAIMSTAEGSLGKSLRYLIPVYDHQKQVGAIAVGLKLTTLGDLSQSSIKEFSKPLLISILISLVVTSIISYGLKKQLHNLHPSDIFQHLEERNATLDQIQAAVFVIDQRHIIKRNNPAASLLFKKEGQRDLFSGKLLESLIPQLKQDHFSKKTEQVLHFQGQDYLLSISPITVKTQNRGYVVFLRNVTETLFTLDQLAHTTAYASALQAQTHQFMNQLHVIYGLADIEYYDELKIYLKELLEPQNEFLARLSMLVREPRLASFIIGEREKFAEKHINLSTEILVEIPTKSTVEDVNNYLLLHRYINTKILTLLNSTTLVSLRLNYQNNLIETDYQWENEKWLLNDYHQYFNDAYFQQLLVDSRATYKISLKQNKVIIRTNIIYSEGS

SEQ ID NO: 17069 - protein, 678 aa, Streptococcus agalactiae
ATGGACGTATTAATTATCGAAGATGATCCTATGGTGGAATTTATCCACCGCAATTACCTTGAAAAACTCAATTATTTTCAAAACATCTATTCAACTGCTAGTCAAACACAAGCTATTGCTTATCTTAATGACATTAAAATCCAACTTGTTCTTTTAGATATTCATATTAAAGAAGGCAATGGTCTAGAATTATTAAAGTTATTACGCAATCAACACCAAAATACCGAAGTCATTGTTATTTCAGCAGCCAACGAGGCGCACACTGTCAAAGAAGCATTTCATTTAGGTATTGTAGATTACCTGATAAAACCATTTACATTTGAACGCTTTGAGTCTAGTATTGAAAAATTCCTAAATCATTATCATACATTTGAAGCTGATAAAATCTATCAAGACAACATCGATCACTTTCAAAAAATAGATTCTGGATGGCTAGAGGGAGAGGTTAAACTTGATGAGAAAGGGCTCTCTGAAATTACCTATCAGCATATTCTTGATGCCATTCAAGAGTTAGAGCAGCCTTTCACTATCCAAGAGTTAGCAAAATGCAGTCAATTTTCTCATGTCTCTGTTAGGAAATATATTGCCTATATGGAAGAAAAAGGCCTTCTGACAAGTCAGCAAATTTATACTAAGGTCGGTCGTCCTTACAAAGTTTATAAGCTTATAAAAAAAACT

SEQ ID NO: 17070 - protein, 226 aa, Streptococcus agalactiae; identical to SEQ ID NO: 12414

SEQ ID NO: 17071 - protein, 993 aa, Streptococcus agalactiae
ATGGCAGTTCTGATTTTAGGTGGCGCCGGTTACATTGGCTCGCATATGGTTGATCAGTTAATCACACAAGGAAAAGAGAAAGTTATTGTTGTTGATAACTTGGTAACAGGTCATCGTCAAGCGGTGCATTCAGATGCGATTTTTTATGAAGGAGATTTATCCGATAAAACGTTTATGCGTCAAGTTTTTAGGGAAAATCCTGATGTAGATGCTGTTATCCATTTTGCGGCATTTTCACTAGTTGCTGAGTCAATGGAAAATCCTTTAAAATATTTTGATAATAACACTGCTGGAATGATAAAACTTTTAGAAGTAATGAATGAATGTGATATCAAAAATATTGTCTTTTCATCAACAGCTGCAACATATGGTATTCCAGAACAAGTTCCTATTTTAGAAACAGCTCCTCAAAATCCTATTAATCCTTATGGCGAAAGTAAGCTTATGATGGAAACAATTATGAAATGGGCTGATCAAGCCTACGGTATTAAGTTTGTCGCTCTACGTTACTTCAACGTTGCTGGAGATAAACCGGATGGCTCAATTGGGGAAGATCATAAACCAGAAACACATTTGTTACCAATCATTCTTCAAGTTGCTCAAGGAGTACGTGACAAAATAATGATTTTTGGAGATGATTACAATACTCCAGATGGAACTAATGTTCGAGATTATGTGCATCCATTTGATTTGGCAGATGCTCATATATTAGCAGTTGATTACCTTCGCCAAGGGAATGAATCAAACGTGTTTAATCTCGGATCTTCGACAGGTTTTTCTAACCTTCAGATGTTAGAGGCGGCTCGTCGTATTACTGGGAAAGAAATTCCTGCTCAAAAGGCAGCTCGTCGTCCAGGAGATCCAGATACGCTTATTGCTTCCTCAGAGAAAGCTCGTCAAATGCTTGGGTGGGAGCCTAAATTTGATAATATTGATAAAATTATTTCATCGGCATGGGCATGGCATTCTAGTCATCCAAATGGCTACGAAGAT

SEQ ID NO: 17072 - protein, 331 aa, Streptococcus agalactiae
MAVLILGGAGYIGSHMVDQLITQGKEKVIVVDNLVTGHRQAVHSDAIFYEGDLSDKTFMRQVFRENPDVDAVIHFAAFSLVAESMENPLKYFDNNTAGMIKLLEVMNECDIKNIVFSSTAATYGIPEQVPILETAPQNPINPYGESKLMMETIMKWADQAYGIKFVALRYFNVAGDKPDGSIGEDHKPETHLLPIILQVAQGVRDKIMIFGDDYNTPDGTNVRDYVHPFDLADAHILAVDYLRQGNESNVFNLGSSTGFSNLQMLEAARRITGKEIPAQKAARRPGDPDTLIASSEKARQMLGWEPKFDNIDKIISSAWAWHSSHPNGYED

SEQ ID NO: 17073 - protein, 1605 aa, Streptococcus agalactiae
ATGAAGAAACACTGGTGGCATAAAGCTACGATTTATCAAATTTACCCACGTTCATTTATGGATTCAGATGGTGATGGTGTGGGGGACATTAAAGGGATTACTAGCAAACTAGACTACCTTGAAAAATTAGGGATTACTGCTATCTGGTTATCACCTGTTTACCAAAGTCCAATGGATGACAATGGTTATGATATTTCAGATTATCAAGCCATTGCAGATATTTTCGGTGACATGAATGATATGGACCAACTGTTACAAGAGGCAAATCAACGCGGGATTAAAATCATCATGGATTTGGTAGTGAATCATACCTCTGATGAACATGCTTGGTTCGTAGAAGCGCGAGAAAACCCTAATAGTCCTGAACGTGATTTTTATATTTGGCGAGATGAACCTAACGATTTGACTTCTATTTTTAGTGGCTCAGCTTGGGAATATGATAAAGCATCAGGTCAATATTATTTGCACCTTTTTAGCAAACGTCAGCCAGATCTCAACTGGGAGAATGAAGCTTTACGTCATAAAATTTATGATATGATGAATTTCTGGATTGATAAGGGTATTGGTGGTTTCCGTATGGATGTCATTGATTTAATTGGGAAAATTCCAGATAAGGGCATTACTGGTAATGGACCAAAACTCCATGATTATCTTAAAGAAATGAACAGAGCTAGTTTTGGAAAGCATGACTTATTGACGGTGGGTGAAACTTGGGGAGCAACGCCAGACATTGCAAAACAATACTCAAATCCCGATAATGAAGAATTATCTATGGTCTTTCAATTTGAACATGTAGGTCTTCAACATAAACCTGACGCTCCTAAGTGGGATTACAGTGACGGATTAGATGTTCCAGCATTGAAAGATATTTTTACAAAATGGCAAACACAATTGGAGCTTGGCCAAGGTTGGAATTCTTTATTCTGGAATAATCACGACCTTCCTCGGGTGCTCTCGATTTGGGGAAATGATAGTGATAACAGAAAACAATCTGCCAAGGCTCTAGCAATCCTACTACATTTGATGCGTGGAACGCCTTACATCTATCAAGGTGAAGAAATTGGTATGACCAATTATCCATTTGAGTGTTTAGCAGATGTAGATGATATTGAATCCCTTAACTATGCTAAAGAAGCCATGGATAATGGGGTATCTGAAGCAACAATTTTAGATAGTATTCGTAAAGTCGGTCGTGATAATGCTCGTACTCCAATGCAGTGGAGTCAAGGACATCAAGCTGGTTTTACTAACGGTACCCCATGGCTAGCAGTCAATCCCAATTATCAGGAAATTAATGTGGAGGCAGCGTTAAATGATACGGAAAGTATTTTTTATACTTATCAAAAATTAGTTGCTTTACGTAAAGAACACGACTGGTTAGTTGATGCTGATTTTAAACTTTTGGAAACAGCAGATAAGGTATTTGCTTATGTTCGTCAAACAGATAAAGAACGTTATTTAATAGTTGCAAACTTATCCGATCAAAACCAATCTTTTGAATTTCCAGAAGCTGTTAAAGAAACTATTATTTCAAATACAGAGGTTCAAGAAGTACTATCAAGTAACACTCTCAAGCCGTGGGATGCCTTCTGCATAGAGCTATTC

SEQ ID NO: 17074 - protein, 535 aa, Streptococcus agalactiae
MKKHWWHKATIYQIYPRSFMDSDGDGVGDIKGITSKLDYLEKLGITAIWLSPVYQSPMDDNGYDISDYQAIADIFGDMNDMDQLLQEANQRGIKIIMDLVVNHTSDEHAWFVEARENPNSPERDFYIWRDEPNDLTSIFSGSAWEYDKASGQYYLHLFSKRQPDLNWENEALRHKIYDMMNFWIDKGIGGFRMDVIDLIGKIPDKGITGNGPKLHDYLKEMNRASFGKHDLLTVGETWGATPDIAKQYSNPDNEELSMVFQFEHVGLQHKPDAPKWDYSDGLDVPALKDIFTKWQTQLELGQGWNSLFWNNHDLPRVLSIWGNDSDNRKQSAKALAILLHLMRGTPYIYQGEEIGMTNYPFECLADVDDIESLNYAKEAMDNGVSEATILDSIRKVGRDNARTPMQWSQGHQAGFTNGTPWLAVNPNYQEINVEAALNDTESIFYTYQKLVALRKEHDWLVDADFKLLETADKVFAYVRQTDKERYLIVANLSDQNQSFEFPEAVKETIISNTEVQEVLSSNTLKPWDAFCIELF

SEQ ID NO: 17075 - protein, 1131 aa, Streptococcus agalactiae
ATGGTAGAATTAAATTTAAATCATATTTACAAAAAATATCCAAGTGCATCGCATTATTCTGTTGAAGACTTTGACTTGGATATTAAAGACAAAGAATTTATTGTTTTTGTTGGACCATCAGGTTGTGGGAAATCAACAACACTTCGTATGATCGCAGGTCTTGAAGATATTAGTGAAGGTGAGCTCAAGATTGATGGCGAAGTTGTCAATGACAAATCACCTAAAGATCGTGATATTGCTATGGTTTTCCAAAACTATGCTCTTTATCCACATATGACTGTTTACGATAATATGGCTTTTGGGCTCAAATTGCGTAAATTCTCAAAACAAGAAATTGATAAGCGCGTTCGTGAAGCAGCAGCTAATATTGGCCTTACTGAATTCTTAGAGCGCAAACCTGCGGATTTGTCAGGTGGACAACGCCAACGTGTTGCTATGGGACGTGCTATTGTGCGTGATGCCAAAGTGTTCTTAATGGATGAGCCTTTATCTAACTTAGATGCTAAATTACGTGTTTCAATGCGTGCTGAAATTGCAAAAATTCATCAACGTATTGGTTCAACAACTATTTATGTTACCCACGACCAAACAGAGGCGATGACTTTGGCAGACCGTATTGTCATTATGTCAGCTACTAAGAACCCTGATGGTGATGGTACAATTGGTAAAATTGAGCAAGTTGGTTCACCACAAGAACTCTATAATCTTCCTGCTAATAAATTTGTTGCGGGATTCATCGGTAGTCCATCTATGAACTTCTTCAAAGTTAAAGTTGAAAATGGTATGATTATTAGTGAAGATGGTCTTCGAATCGCTATCCCTGAAGGTCAAGAAAAACTTTTAGAATCACGAGGCTATAAAGGAAAAGAATTGATTTTTGGTATTCGTCCAGAAGACATTTCAAGCAATCTTCTTGTCCAAGATACTTATCCAAATGCCAATGTTGAAGCAGAAGTTTTAGTTTCTGAATTACTCGGTAGCGAAACTATGCTTTATGTTAAGTTAGGTCAAACAGAATTTGCTTCTCGTGTTGAAGCGCGTGACTTCCATAATCCAGGAGAAAAAGTTAACCTAACGTTTAATGTTGCTAAGGGGCATTTCTTTGATGCAGATACTGAACAAGCTATTCGT

SEQ ID NO: 17076 - protein, 377 aa, Streptococcus agalactiae; identical to SEQ ID NO: 3460

SEQ ID NO: 17077 - protein, 849 aa, Streptococcus agalactiae
ATGGATTTTAAGGAACTGTTTCCAGAAGTTATTACTAAACAGGAAGTTAAACAGAGTGAGGATTATATCATCGTTGAGCAAGATGGTCATGTCCTCCACTTTCCAAAATCTTCGCTAACTAAGCGTGAACTATGCTTATTACAAATGACACAAAGCCTGGAAGAGGCGAGTTCAGTGGATTCTCAGAATCCTTGGTACCGCTATCTAGTTGAAGGTCGTGGAAGGTTGCCCCAATCTCATTCGGCAGTCCAATTTATTTTTATTGAGCATCAATTTACCTTATCAGAAGAACTTAAGGATTTCTTGTCGCCTTTAGTAATAAACGTAGAAACAATTATGACAATTAATCAAACCCAAAGTGTCATGATTTTAAATCAGGATAATTTCTTTAATGCTACGGAATTACTAACAGATATTTTACCAACGATTGAAAATGACTTTAACACGCGTTTAAGATGCTATTTTGGAAATAGTTGGACGCATCTACAAGCAGTGGACTGGAAAGAATTATATGAAGAAGAATATAAACTTTTTACGCTTTTTCTTAGTCACAAGGCCGAACAACATTACTGTCGATTTCCAAAGATGGCTTTATGGGCTTTGGCAAATCAATCGCCCATGCCTTCTATTAAAGCAAAATGTTTACAACATATCCTTGATACGAGTGATACTTCGGCTATAATAAAAGCCTTGTGGCAAGAGCAAGGGAACCTTGCTAAAACGGCTAAGGCACTTTTCATTCATCGGAATTCATTGCAATATAAATTAGATAAATTTACCCAATCTTCGGGGCTTAATTTAAAAATATTAGATGATTTAGCCTATGCCTATTTAATTTCGATGGATACC

SEQ ID NO: 17078 - protein, 283 aa, Streptococcus agalactiae
MDFKELFPEVITKQEVKQSEDYIIVEQDGHVLHFPKSSLTKRELCLLQMTQSLEEASSVDSQNPWYRYLVEGRGRLPQSHSAVQFIFIEHQFTLSEELKDFLSPLVINVETIMTINQTQSVMILNQDNFFNATELLTDILPTIENDFNTRLRCYFGNSWTHLQAVDWKELYEEEYKLFTLFLSHKAEQHYCRFPKMALWALANQSPMPSIKAKCLQHILDTSDTSAIIKALWQEQGNLAKTAKALFIHRNSLQYKLDKFTQSSGLNLKILDDLAYAYLISMDT

SEQ ID NO: 17079 - protein, 894 aa, Streptococcus agalactiae
ATGGCTATTACGATACAAAATCATGAGTTGCAAGTGACATTAAAAGCGTTAGGTGCAACAATGACTTCTATTACAGATAGTCAAGGCGTTGAGTACCTTTGGCAAGGGGAACCCACTTATTGGGGTGGGCAAGCTCCTATTTTATTTCCTATATGCGGAAGTGTTCGAAATGATTGCGTCATTTACAGACCAGCTCAAGCTCCACATTTTACGGGTATCATACCAAGGCATGGCTTTGTACGTCACAAAACATTCGACTATGATTACATATCGGATTCTTCTGTTCGTTTTACAATTAAAAGTAGTGAAGAAACGTTGATAAATTATCCTTATCGTTTTAGTTTAGAAATAACTTACACCTTAAGAAATAAAAGCATTGCCATTACATATATTGTCAAAAACTTAGAATCAGAAAAAAATATGCCATATGCTATCGGAGCTCACCCAGGCTTTAATTGCCCTTTGTTTGAAAAGGAAGTATTTAGTGATTACTATCTAGAGTTTGAACAGTTTGAAACTTGCACAATTCCTGAGTCGTTTCCGGATACAGGCTTGTTAGATTTACAAGCTAGACATCCTTTTTTAGAAAATCAAAAACAATTATCTCTTAATTATGCTTTATTTGAAAAAGATGCTATTACTTTAGACCAACTACGATCTAAGACGGTCTACTTAAAATCTAGAAATCATGCAAAAGGAATCCAACTTGACTTTGATGATTTTGAGAATCTTATTCTTTGGACAAGTAACAATGGTGGTCCTTTTTTGGCTTTGGAACCCTGGAGTTCCTTGTCAACTTCTATTGAAGAGTCTGATATTTTAGAAGATAAACAAAATATCGTACGGCTTAATCCAAAGCAGTCGAAACAGCATTCTATTCGGATCACTATTTTA

SEQ ID NO: 17080 - protein, 298 aa, Streptococcus agalactiae
MAITIQNHELQVTLKALGATMTSITDSQGVEYLWQGEPTYWGGQAPILFPICGSVRNDCVIYRPAQAPHFTGIIPRHGFVRHKTFDYDYISDSSVRFTIKSSEETLINYPYRFSLEITYTLRNKSIAITYIVKNLESEKNMPYAIGAHPGFNCPLFEKEVFSDYYLEFEQFETCTIPESFPDTGLLDLQARHPFLENQKQLSLNYALFEKDAITLDQLRSKTVYLKSRNHAKGIQLDFDDFENLILWTSNNGGPFLALEPWSSLSTSIEESDILEDKQNIVRLNPKQSKQHSIRITIL

SEQ ID NO: 17081 - protein, 975 aa, Streptococcus agalactiae
ATGGGATTAACGGAACAAAAACAAAAACATATGGAACAATTGAGTGATAAAAATGGTATTATTTCGGCCTTGGCTTTTGACCAACGTGGAGCATTGAAGCGATTAATGGCAAAATATCAATCTGAGGAGCCCACTGTTTCTCAAATAGAAGCACTTAAAGTTTTGGTAGCTGAAGAATTAACCCCTTACGCTTCATCAATGTTGTTAGATCCAGAATATGGGTTGCCAGCTACGAAAGTTTTAGATGACAATGCCGGTCTTTTACTTGCGTACGAAAAAACAGGTTATGATACCAGTAGTACCAAGCGACTCCCAGACTGTTTAGACATTTGGTCTGCGAAACGCATTAAAGAAGAGGGGGCAGACGCAGTTAAGTTCTTACTTTATTATGATGTTGATAGTTCGGATGAAGTAAACGAAGAAAAAGAAGCTTATATTGAACGGATTGGTTCTGAATGTGTTGCAGAAGACATTCCTTTTTTCCTTGAAATTTTGTCATATGATGAAAAGATTACGGATAGCTCAGGTATTGAGTATGCCAAAATTAAGCCACGTAAGGTTATTGAAGCTATGAAAGTTTTTTCAAATCCTCGATTTAATATTGATGTCTTGAAGGTGGAAGTGCCTGTCAATATGGACTATGTAGAAGGTTTTGCGCAAGGAGAGACTGCTTATAATAAAGCGACAGCTGCGGCTTATTTTAGAGAACAAGATCAGGCGACACTACTCCCCTACATTTTTTTGAGTGCAGGAGTTCCTGCTCAGCTTTTTCAAGAGACTCTTGTGTTTGCTAAAGAAGCTGGTGCTAAATTTAACGGTGTCCTTTGTGGTAGAGCAACTTGGGCTGGAAGTGTTAAAGAGTATGTTGAAAAAGGAGAAGCTGGTGCACGTCAATGGTTACGTACAATAGGTTTTCAAAATATTGATGAACTAAATAAAATTTTGCAAAAAACAGCAACTTCTTGGAAGGAAAGA

SEQ ID NO: 17082 - protein, 325 aa, Streptococcus agalactiae; identical to SEQ ID NO: 3466

SEQ ID NO: 17083 - protein, 807 aa, Streptococcus agalactiae
GTGACTCGTGTTCTTTCTCAACTTGGCGATAATGTAGTGGCAACTGGTCTATTAGGGGGGCATTTTGGAGATTTCATCCGAAGTGGCTTAGATGCATTGGAAATCAGACACCAATTTTTAAGTATTGGTGGAGAAACACGTCATTGTATTGCAGTTTTACATGAGGGTCAGCAGACTGAAATTCTAGAAAAAGGTCCACATATTACTAAAGATGAAGCAGGCGCCTTTTTGAATCATCTAAAACTTATCTTTGATGCTGCAACTATCATAACAGTATCAGGAAGTTTACCAAAGGGACTCCCCTCAGATTATTATGCTAGGTTAATCTCCCTAGCGAATCACTTTAATAAGAAAGTTGTTTTAGACTGTTCAGGAGAAGCATTACGTTCGGTTTTAAAATCTAGTGCTAAGCCGACCGTCATTAAACCTAACCTTGAAGAATTAACACAATTAATTGGAAAGCCAATTAGCTATAGTTTAGACGAATTAAAATCTACCTTACAGCAAGATATTTTTAGAGGAATTGATTGGGTTATTGTTTCCTTAGGTGCTAGGGGAGCTTTTGCTAAACATGGGAATCACTACTATCAAGTGACGATTCCAAAAATAGAAGTTATCAATCCAGTTGGTTCAGGGGATGCAACGGTTGCAGGAATCGCGTCTGCTTTAGAACATCAACTAGATGATATAAATTTACTTAAGAGAGCTAATGTCTTGGGTATGCTTAATGCACAAGAAACATTAACAGGGCATATCAATCTGACCTACTATCAAGAATTAATCAGTCAAATCCAAGTGAAAGAGGTA

SEQ ID NO: 17084 - protein, 269 aa, Streptococcus agalactiae
MTRVLSQLGDNVVATGLLGGHFGDFIRSGLDALEIRHQFLSIGGETRHCIAVLHEGQQTEILEKGPHITKDEAGAFLNHLKLIFDAATIITVSGSLPKGLPSDYYARLISLANHFNKKVVLDCSGEALRSVLKSSAKPTVIKPNLEELTQLIGKPISYSLDELKSTLQQDIFRGIDWVIVSLGARGAFAKHGNHYYQVTIPKIEVINPVGSGDATVAGIASALEHQLDDINLLKRANVLGMLNAQETLTGHINLTYYQELISQIQVKEV

SEQ ID NO: 17085 - protein, 831 aa, Streptococcus agalactiae; identical to SEQ ID NO: 14349

SEQ ID NO: 17086 - protein, 277 aa, Streptococcus agalactiae; identical to SEQ ID NO: 14132

SEQ ID NO: 17087 - protein, 534 aa, Streptococcus agalactiae; identical to SEQ ID NO: 14133

SEQ ID NO: 17088 - protein, 178 aa, Streptococcus agalactiae; identical to SEQ ID NO: 2808

SEQ ID NO: 17089 - protein, 513 aa, Streptococcus agalactiae
ATGAAAATTGCGGTCGGTTGTGATCATATTGTAACTTATGACAAAATTGCAGTTGTGGATTATTTAAAAACAAAAGGGTATGAGGTTATTGATTGTGGAACTTATGATAACATCCGTACTCACTATCCTATTTATGGTAAGAAAGTAGGAGAAGCTGTCGCTAGTGGAAAAGCCGACTTAGGTGTATGTATTTGTGGAACTGGAGTTGGTATTAATAATGCTGTTAATAAAGTTCCAGGAATTCGCTCAGCTCTGGTACGTGATTTGACATCAGCTATCTATGCTAAAGAAGAATTAAATGCTAACGTTATCGGATTTGGTGGGAAAATTACTGGTGGGCTGTTAATGACAGATATCATCGAGGCGTTTATAAGAGCTAAATATAAACCAACAAAAGAAAACAAAGTATTAATTGAAAAGATAGCCGAGGTTGAGACTCATAATGCCCATCAAGAAGAGAATGACTTTTTCACAGAGTTCTTAGATAAATGGAATCGTGGTGAATATCACGAC

SEQ ID NO: 17090 - protein, 171 aa, Streptococcus agalactiae; identical to SEQ ID NO: 3474

SEQ ID NO: 17091 - protein, 345 aa, Streptococcus agalactiae
ATGACAATTATTATTGGGGCGGATGCGCATGGTGTTGAACTTAAGGAAGTGATTAGACAACACCTTACACGTTTAGGTAAGGAAATTATTGATTTAACGGATACTAGCAAAGATTTCGTTGATAATACCTTAGCAATCGTTGCTAAAGTGAATCAAAAAGAAGATAACTTAGGAATAATGGTTGATGCTTACGGTGCTGGTCCTTTTATGGTAGCCACTAAGGTTAAGGGGATGATTGCAGCAGAAGTTTCAGATGAACGCTCAGCTTATATGACTAGAGCTCATAATAACGCTAGGATGATTACTTTAGGTTCAGAGATTGTTGGTCCGGGGTTGCTAAACATA

SEQ ID NO: 17092 - protein, 115 aa, Streptococcus agalactiae
MTIIIGADAHGVELKEVIRQHLTRLGKEIIDLTDTSKDFVDNTLAIVAKVNQKEDNLGIMVDAYGAGPFMVATKVKGMIAAEVSDERSAYMTRAHNNARMITLGSEIVGPGLLNI

SEQ ID NO: 17093 - protein, 2376 aa, Streptococcus agalactiae
ATGCTAGGTTTTATCTTATTATGTGGACTTTTGCATCCTAGTACAATTTATAGTGAGGAAATAAAATCTGATATAAACTCTTTTATATCAATAGATGATGAAAAAACTACTGCTCCCATATTTGACTCTACTTTAGATAAGCTTACTAATTCAACAGAGGAGAGGCAGTTAGAATTAGATTCTGATACATCGGACGGTTTAATAGTAGATGATCAAAAAGATAAAGATATGGTAGTAGTCTTAGGTGATTCTGACAGTCAAGAAAAATTGTCACCTCCTCTAAAATCGGAAATAGCGACAGAAGAAAATCGTAAACAGGCAAATTTAGCAGAACTAAATGCAACTCAACCTAATAATAGAACTACCTATATTATACCCGAAAGCAGTCATTCCATTGCAGAACAACAGAGATTCCTGATAGAATCAAAGGGTTCTTCGGTTGCATTACTTAATAGCGATGAATTTAGAAAGACAGCGGGAGAGGATAGAGGTTTTGAAAGGGATAAGTTGAGGTCTTTGGATATCATTCCTAAGGGAGATTTATCGACAAGTAATGTCATAGGTAATACGGACATTGCTAGTCAGATATCGTTGGGCTTTAAAAAGAATGCGATGCAGGAACACCATCTTACTAAAACATTCTCTCAAAAGGATGGAAAGTTATCGTCTGTTATAGAGGGGATGCTTGCTATTGGCAAAGAGAAAGTAGAGAAAGAAATAAAATATAGTGGTAATTTATGGCAAAAATTAAAAGCTAAGGCACACTGCCTTGTTTGCTGTGTTGATAATTTGAATTTTGAAGATATAAAATCTTATTTTATATTATTGTCATCTAAACCATCAGCTCAAATTACCTAAAGGTGCTATACTTTCTGCTAAAACAGAAGTATATAGGGGAGGAGATTTTGGGAGAAAAAATAAAGATAATGTGTTTGGTTACCGTATCCCCTCATTATTGAAAACCCAAAAAGGAACTTTACTTGCGGGAGCTGATGAAAGAATTGAGCAAGCTTGTGATTGGGGAAACATAGGAATGGTTATTCGCCGTAGTGAGGATGATGGTGTCACTTGGGGAAAAAGAGAAACTATTGTCAATCTCCGTAATAACCCTAGAGTTCCGCTAGTTACTAGTGGTGACTATAGTGGCTCACCTATTAATATGGATATGGCATTAGTTCAAGATACTAGCTCCAAGACGAAACGTATTTTTTCAATATATGATATGTTTCCAGAAGGAAGAGGCGTTATTAGTATTGCTAACACACCTGAAAAAGAATATACCCAAATCGGAGGACAGTCTTATCTTAATTTATATAATAATGGAAAGAAATCGAAGGTTTTTACTATCCGTGACAAAGGTATTGTATATAATTTTAAAGGGAAAAAGACTGATTATCATGTTATAACAGAAACTACTAAAAGTGACCATTCAAATCTAGGGGATATTTATAAGGGAAAACAGCTACTTGGAAATATATATTTTACAAAACATAAAACGTCACCATTTCGTTTAGCAAAATCAAGCTATGTGTGGATGTCATATAGCGATGATGATGGTAGGACATGGTCATCACCTAGAGATATAACAGCAAGTCTTCGTCAGAAAGGCATGAAATTTTTGGGAATAGGACCTGGAAAAGGTATAGTTTTAAAATGGGGGCCACACGCTGGTCGTATTATTATTCCTGCCTATTCTACGAATTGGAAATCTCATCTAAGAGGTTCACAATCTTCACGCCTAATTTATTCAGACGACCATGGAAAAACGTGGCATACTGGAAAAGCAGTTAATGATAACCGTATACTTTCTAATGGTGAAAAAATTCACTCCTTAACAATGGATAATAAAAAAGAACAAAATCAGAATCCGTACCCGTTCAATTGAAAAATGGGGACATTAAGTTATTTATGAGGAATCTAACTGGTAACCTAGAAGTAGCCACAAGTAAAGACGGCGGGGAGACTTGGCAAAACCATGTTAAACGATATAAGGAAATTCATGATGCTTACGTCCAACTATCAGCTATTCGCTTTGAGCATGACAAAAAAGAGTATATTTTATTAGTGAATGCTAATGGGCCAGGGAAGAAGTGCCAAGATGGATATGCACGTCTAGCGCAAGTTAATCGAAATGGTAGTTTTAAGTGGTTATATCACCATCACATTCAAGATGGTTCGTTTGCTTACAACTCTGTTCAACAACTTAATAATGATCAATTTGGTGTCCTTTATGAACATAGAGAAAAACATCAAAATAGTTTTACTTTAAATTACAAAGTTTTTAATTGGAGTTTTCTTAGTCAAAATACAGAGAAGCAAGGCACTTTATGGGAGAAAATGGCAGCAAATTGGCATGTTTTGTTTAAATTTTATTTA

SEQ ID NO: 17094 - protein, 793 aa, Streptococcus agalactiae
  VARIANT 274, 622: Xaa = Any Amino Acid
MLGFILLCGLLHPSTIYSEEIKSDINSFISIDDEKTTAPIFDSTLDKLTNSTEERQLELDSDTSDGLIVDDQKDKDMVVVLGDSDSQEKLSPPLKSEIATEENRKQANLAELNATQPNNRTTYIIPESSHSIAEQQRFLIESKGSSVALLNSDEFRKTAGEDRGFERDKLRSLDIIPKGDLSTSNVIGNTDIASQISLGFKKNAMQEHHLTKTFSQKDGKLSSVIEGMLAIGKEKVEKEIKYSGNLWQKLKAKAHCLVCCVDNLNFEDIKSYFXYYCHLNHQLKLPKGAILSAKTEVYRGGDFGRKNKDNVFGYRIPSLLKTQKGTLLAGADERIEQACDWGNIGMVIRRSEDDGVTWGKRETIVNLRNNPRVPLVTSGDYSGSPINMDMALVQDTSSKTKRIFSIYDMFPEGRGVISIANTPEKEYTQIGGQSYLNLYNNGKKSKVFTIRDKGIVYNFKGKKTDYHVITETTKSDHSNLGDIYKGKQLLGNIYFTKHKTSPFRLAKSSYVWMSYSDDDGRTWSSPRDITASLRQKGMKFLGIGPGKGIVLKWGPHAGRIIIPAYSTNWKSHLRGSQSSRLIYSDDHGKTWHTGKAVNDNRILSNGEKIHSLTMDNKKEQNXESVPVQLKNGDIKLFMRNLTGNLEVATSKDGGETWQNHVKRYKEIHDAYVQLSAIRFEHDKKEYILLVNANGPGKKCQDGYARLAQVNRNGSFKWLYHHHIQDGSFAYNSVQQLNNDQFGVLYEHREKHQNSFTLNYKVFNWSFLSQNTEKQGTLWEKMAANWHVLFKFYL

SEQ ID NO: 17095 - protein, 222 aa, Streptococcus agalactiae
TTGGGCTCCATTAGCAACTATTACATGGGGATCACCATATACGCTTTACTTCTTATTAATCATGCTTATTGTCAATATTGTTATGATTGTTATGAAAAAAAAACGGATACCTTAGATGTTGATATTTTTGATATTTGGCATTTATCTATCACAGGTCTTTTAATTATGTGGTATGCTAAACAAATGAAACGCCGTAATGCAGAATATGCAGCTAATCAAAAA

SEQ ID NO: 17096 - protein, 74 aa, Streptococcus agalactiae
MGSISNYYMGITIYALLLINHAYCQYCYDCYEKKTDTLDVDIFDIWHLSITGLLIMWYAKQMKRRNAEYAANQK

SEQ ID NO: 17097 - protein, 375 aa, Streptococcus agalactiae
ATGCAGGTATTTTTAAATATTGTCAATAAATTCTTTGATCCAGTTATTCATATGGGTTCGGGAGTTGTGATGCTAATTGTCATGACAGGTTTAGCCATGATATTTGGAGTGAAGTTTTCTAAAGCACTTGAAGGTGGTATTAAGTTAGCTATTGCTCTTACGGGTATTGGTGCTATTATTGGTATTTTAACTGGTGCTTTTTCCGAATCACTTCAAGCTTTTGTTAAAAATACAGGAATCAATCTAAGCATTATTGACGTTGGTTGGGCTCCATTAGCAACTATTACATGGGGATCACCATATACGCTTTACTTCTTATTAATCATGCTTATTGTCAATATTGTTATGATTGTTATGAAAAAAAAACGGATACCT

SEQ ID NO: 17098 - protein, 125 aa, Streptococcus agalactiae
MQVFLNIVNKFFDPVIHMGSGVVMLIVMTGLAMIFGVKFSKALEGGIKLAIALTGIGAIIGILTGAFSESLQAFVKNTGINLSIIDVGWAPLATITWGSPYTLYFLLIMLIVNIVMIVMKKKRIP

SEQ ID NO: 17099 - protein, 303 aa, Streptococcus agalactiae
ATGATCAAAATATTAGCAGCTTGTGGTGCAGGCATAAATTCAAGTCATCAAATTAAAGATGCTATCGAGACACAATTAGGAGATAGAGGTTACAATGTACATTGTGATGCTGTTATGGTTAAGGATATCACTGAGGAAATGGTCAACAAATATGATATCTTTACTCCTATTGCTAAAACTGATTTAGGTTTTAATGTACCAATTCCAGTTGTAGAAGCAGGATCTATTCTTTATCGCATACCAGTTATGAGCGAACCGGTCTTTACTGCTTTAGAACAAGTTATCAAAGAACACAACCTATCA

SEQ ID NO: 17100 - protein, 101 aa, Streptococcus agalactiae
MIKILAACGAGINSSHQIKDAIETQLGDRGYNVHCDAVMVKDITEEMVNKYDIFTPIAKTDLGFNVPIPVVEAGSILYRIPVMSEPVFTALEQVIKEHNLS

SEQ ID NO: 17101 - protein, 462 aa, Streptococcus agalactiae
GTGACTCAAGATATTTTATTTATTGATGCCCATTCTCAGGAAGAATTATTTGACTTAGTATCAAAAGCATTGATAAAACAACACTATGTTAGTCCTGACTACCGACAGGCAGTAAAAGAAAGGGAGAGAGAGTTTCCAACGGGGTTAAAAATTGATTTAAAAGATGGGACTCCTATTCAATATGTTGCTATTCCACACACTGAAACGCAGTATTGTCTAGTAGATAGAATCTTTTATGTCAAAAATAGTCAGCCAATTACTTTCAAACATATGATTAATCCAGAAGAGGAGTGTAGGGTTCAGGATTTTTTCTTCATCATTAATAGTAGGAATAGTAACCAAAGTGATATTTTATCTAATTTGATTACCTTCTTTATTACAAAAGGAAACCTAGATCGGCTACATGAGCTTGGCGACAATAAGGAAAAAATTAATCATTATTTAATAGAAAAAGGAGTGTTT

SEQ ID NO: 17102 - protein, 154 aa, Streptococcus agalactiae
MTQDILFIDAHSQEELFDLVSKALIKQHYVSPDYRQAVKEREREFPTGLKIDLKDGTPIQYVAIPHTETQYCLVDRIFYVKNSQPITFKHMINPEEECRVQDFFFIINSRNSNQSDILSNLITFFITKGNLDRLHELGDNKEKINHYLIEKGVF

SEQ ID NO: 17103 - protein, 774 aa, Streptococcus agalactiae
ATGTTAAAGCGAGAAAGATTACAAAAAATAATAGAAAAAGTCAATATAAATGGTATTGTCACTGTTAATGAAATCATGGAAGAACTTGATGTATCAGACATGACTGTTAGGCGTGACTTGGATGAATTAGATAAAGCAGGACTGTTAATACGCATCCATGGTGGTGCACAAAAAGTAAACGCAGCACCAATTCCACAAAATTATGAAAAATCAAACACTGAAAAATACGATATTCAAACAAATGAAAAATTAGAAATTGCCCAATTTGCAAAACAATTCATCAATGATGGTGAAACAATCTTTATTGGGCCTGGAACAACCTTAGAGAAATTAGCTACGCAATTACTTGATTTTAAAATTAGGGTAGTAACCAATAGCCTTCCTGTTTTCAATATTCTGAATCAAAGTTCAACACTTGACCTTATCCTTGTAGGAGGAGAGTACAGAGAAATTACTGGTGCTTTTGTCGGTTCTGTTACTATTAACTCTATTAAATCACTTAATTTTTCAAAAGCTTTTGTTAGTAGTAATGGTGTTTTTGAAAAGTCTATCGCTACTTATGACGAGGGAGAAGGTGAAATCCAGCGCATTGCTCTTAATAATTCCTTTGAAAAATTCCTTTTAGTTGATAGCCAAAAATTTGGTAAATATGATTTTTATACTTTTTATCAATTAGACGATATTGATTTTGTATTAACAGATCATAATATTGATAATGTTGTTAAGGAGCAATACAGTAGCTTCACCAAAATTTTAACTAATAACAATTACATG

SEQ ID NO: 17104 - protein, 258 aa, Streptococcus agalactiae
MLKRERLQKIIEKVNINGIVTVNEIMEELDVSDMTVRRDLDELDKAGLLIRIHGGAQKVNAAPIPQNYEKSNTEKYDIQTNEKLEIAQFAKQFINDGETIFIGPGTTLEKLATQLLDFKIRVVTNSLPVFNILNQSSTLDLILVGGEYREITGAFVGSVTINSIKSLNFSKAFVSSNGVFEKSIATYDEGEGEIQRIALNNSFEKFLLVDSQKFGKYDFYTFYQLDDIDFVLTDHNIDNVVKEQYSSFTKILTNNNYM

SEQ ID NO: 17105 - protein, 2579 aa, Streptococcus agalactiae
ATGAATCGTAAAAAAACAGTTATTATTAGTGCTTTATCAGTAGCTCTATTTGGTACTGGTGTAGGTGCTTACCAATTAGGTAGCTATAATGCCCAAAAATCAGACAATAGTGTTTCTTATGTGAAAACAGATAAATCTGATAGCAAAGCACAAGCAACAGCTGCAAATAAAACGCCCGACCAAATCAGTAAAGAAGAAGGCATATCTGCAGAACAAATCGTTGTTAAAATTACTGATGATGGTTATGTAACTTCTCATGGAGACCATTACCATTATTACAATGGGAAAGTGCCATATGATGCCATCATTAGTGAAGAATTGATTATGAAAGACCCTAGCTATGTCTTTAATAAAGCTGATGTCATTAATGAAGTCAAAGATGGTTATATTATCAAAGTTAATGGTAAGTATTACCTCTATCTTAAAGAAGGTAGCAAACGAACAAATGTTCGTACAAAGGAACAAATCCAAAAGCAACGCGAAGAATGGTCTAAGGGTGGTTCTAAGGGAGAATCAGGAAAGCATAGTAGTGCAAAAACTCAAGCTTTATCAGCCAGCGTACGTGAAGCGAAAGCTAGCGGTCGCTATACTACAGATGATGGTTATGTTTTTAGTCCAACAGATGTTATTGATGACATGGGAGATGCCTTTTTAGTACCACATGGCGATCATTTCCATTATATCCCGAAAGCTGATTTATCTCCATCAGAGTTATCAGCCGCACAGGCATATTGGAACCGCAAGACTGGCCGATCAGGTAATAGCTCAAAACCATCAAATTCAAGTTCATACATTCATGCAAGTGCACCAAGCGGTAATGTATCAACAGGAAGACATGCTAATGCCCCTATTTCTATTCCAAGAGTCACTCACGCAAATCACTGGTCAAAACCAGCTGGTAATCATGCTACGGCACCAAAACACCATGCACCTACAACCAAACCAATCAACAAAGATTCTGCTTTAGACAAAATGTTGAAACGTTTATATGCTCAACCGTTATCTGCTCGTCACGTAGAAAGTGATGGTTTGGTTTATGACCCAGCACAAGTTAATGCTTTCACAGCAATCGGTGTTTCTATTCCGCACGGTAATCATTTCCACTTTATTCACTATAAGGATATGTCTCCATTAGAGTTAGAAGCAACAAGGATGGTGGCAGAGCATAGAGGACATCATATTGATGCATTAGGGAAAAAAGATTCTACAGAGAAACCAAAGCATATTTCTCATGAACCTAATAAGGAACCTCACACAGAGGAAGAACACCATGCAGTAACACCGAAAGACCAACGTAAAGGCAAACCAAATAGCCAGATTGTCTACAGTGCTCAAGAAATTGAAGAGGCAAAAAAAGCTGGTAAATACACAACATCTGATGGTTACATTTTTGATGCTAAAGATATTAAAAAAGATACAGGTACAGGTTATGTCATTCCACATATGACACATGAGCATTGGGTACCAAAGAAAGATTTATCAGAGTCGGAATTAAAAGCAGCTCAAGAATTTCTTTCAGGAAAATCTGAAGCAAATCAAGACAAACCAAAAACAGGTAAAACAGCTCAAGAAATCTATGAGGCAATTGAACCAAAAGCAATTGTTAAACCTGAAGATTTATTATTTGGAATTGCACAAGCGACAGACTATAAGAATGGTACATTTGTAATTCCTCATAAAGATCATTACCATTATGTGGAATTAAAATGGTTTGATGAAGAAAAAGATCTTTAGCTGATTCAGATAAGACATATTCTTTAGAAGACTATTTAGCTACGGCTAAATATTACATGATGCACCCAGAAAAACGTCCTAAAGTTGAAGGATGGGGTAAAGATGCTGAAATTTATAAGGAAAAGGACTCTAATAAAGCAGATAAACCAAGTCCTGCACCAACTGATAATAAATCAACATCAAATTCTAGTGACAAAAACTTAAGTGCTGCAGAAGTATTCAAACAAGCAAAACCAGAAAAAATTGTACCGCTTGATAAAATTGCTGCTCACATGGCATATGCAGTTGGATTTGAAGATGATCAATTGATTGTTCCTCATCATGATCATTATCATAATGTTCCTATGGCATGGTTTGACAAGGGTGGTTTATGGAAAGCACCAGAAGGCTATACATTACAACAACTCTTCTCAACAATTAAATACTACATGGAACATCCTAATGAATTACCAAAAGAAAAGGGTTGGGGACACGACAGTGATCATAACAAAGGCTCAAATAAAGACAATAAAGCCAAAAATTATGCTCCAGATGAAGAACCTGAAGATTCAGGGAAAGTAACTCACAACTATGGTTTTTATGATGTTAATAAAGGTTCAGACGAAGAAGAACCAGAAAAACAAGAAGATGAATCAGAGCTAGATGAATATGAACTAGGAATGGCACAAAACGCTAAGAAATATGGTATGGATAGACAATCTTTTGAAAAGCAACTCATCCAATTATCAAATAAATATAGTGTAAGTTTTGAAAGCTTTAATTATATTAATGGTAATCAAGTTCAAGTTACTAAAAAAGATGGCTCTAAAGTGCTTGTTGATATTAAAACACTAGCAGAAGTGAAA

SEQ ID NO: 17106 - protein, 860 aa, Streptococcus agalactiae
MNRKKTVIISALSVALFGTGVGAYQLGSYNAQKSDNSVSYVKTDKSDSKAQATAANKTPDQISKEEGISAEQIVVKITDDGYVTSHGDHYHYYNGKVPYDAIISEELIMKDPSYVFNKADVINEVKDGYIIKVNGKYYLYLKEGSKRTNVRTKEQIQKQREEWSKGGSKGESGKHSSAKTQALSASVREAKASGRYTTDDGYVFSPTDVIDDMGDAFLVPHGDHFHYIPKADLSPSELSAAQAYWNRKTGRSGNSSKPSNSSSYIHASAPSGNVSTGRHANAPISIPRVTHANHWSKPAGNHATAPKHHAPTTKPINKDSALDKMLKRLYAQPLSARHVESDGLVYDPAQVNAFTAIGVSIPHGNHFHFIHYKDMSPLELEATRMVAEHRGHHIDALGKKDSTEKPKHISHEPNKEPHTEEEHHAVTPKDQRKGKPNSQIVYSAQEIEEAKKAGKYTTSDGYIFDAKDIKKDTGTGYVIPHMTHEHWVPKKDLSESELKAAQEFLSGKSEANQDKPKTGKTAQEIYEAIEPKAIVKPEDLLFGIAQATDYKNGTFVIPHKDHYHYVELKWFDEEKDLLADSDKTYSLEDYLATAKYYMMHPEKRPKVEGWGKDAEIYKEKDSNKADKPSPAPTDNKSTSNSSDKNLSAAEVFKQAKPEKIVPLDKIAAHMAYAVGFEDDQLIVPHHDHYHNVPMAWFDKGGLWKAPEGYTLQQLFSTIKYYMEHPNELPKEKGWGHDSDHNKGSNKDNKAKNYAPDEEPEDSGKVTHNYGFYDVNKGSDEEEPEKQEDESELDEYELGMAQNAKKYGMDRQSFEKQLIQLSNKYSVSFESFNYINGNQVQVTKKDGSKVLVDIKTLAEVK

SEQ ID NO: 17107 - protein, 921 aa, Streptococcus agalactiae
ATGAAAAGGATACGGAAAAGCCTTATTTTTGTTCTCGGAATAGTTACCCTAATTTGCTTATGTGCTTGTACTAAACAGAGCCAGCAAAAAAATGGCTTGTCGGTCGTGACTAGCTTTTATCCAGTATATTCCATTACAAAAGCAGTTTCTGGTGATTTGAATGATATTAAAATGATTCGATCACAGTCAGGCATTCATGGTTTTGAACCCTCATCAAGTGATGTTGCTGCCATTTATGATGCTGATCTATTTCTTTATCATTCGCACACACTAGAAGCTTGGGCGAGACGTTTGGAACCTAGTTTGCATCACTCTAAAGTATCTGTAATTGAAGCTTCAAAAGGTATGACTTTGGATAAAGTTCATGGCTTAGAAGATGTAGAGGCAGAAAAAGGAGTAGATGAGTCAACCTTGTATGACCCTCACACTTGGAATGACCCTGTAAAAGTATCTGAGGAAGCACAACTCATCGCTACACAACTAGCTAAAAAGGATCCTAAAAACGCTAAGGTTTATCAAAAAAATGCTGATCAATTTAGTGACAAGGCAATGGCTATTGCAGAGAAGTATAAGCCAAAATTTAAAGCTGCAAAGTCTAAATACTTTGTGACTTCACATACAGCATTCTCATACTTAGCTAAGCGATACGGATTGACTCAGTTAGGTATTGCAGGTGTCTCAACCGAGCAAGAACCTAGTGCTAAAAAATTAGCCGAAATTCAGGAGTTTGTGAAAACATATAAGGTTAAGACTATTTTTGTTGAAGAAGGAGTCTCACCTAAATTAGCTCAAGCAGTAGCTTCAGCTACTCGAGTTAAAATTGCAAGTTTAAGTCCTTTAGAAGCAGTTCCCAAAAACAATAAAGATTACTTAGAAAATTTGGAAACTAATCTTAAGGTACTTGTCAAATCGTTAAATCAA

SEQ ID NO: 17108 - protein, 307 aa, Streptococcus agalactiae
MKRIRKSLIFVLGIVTLICLCACTKQSQQKNGLSVVTSFYPVYSITKAVSGDLNDIKMIRSQSGIHGFEPSSSDVAAIYDADLFLYHSHTLEAWARRLEPSLHHSKVSVIEASKGMTLDKVHGLEDVEAEKGVDESTLYDPHTWNDPVKVSEEAQLIATQLAKKDPKNAKVYQKNADQFSDKAMAIAEKYKPKFKAAKSKYFVTSHTAFSYLAKRYGLTQLGIAGVSTEQEPSAKKLAEIQEFVKTYKVKTIFVEEGVSPKLAQAVASATRVKIASLSPLEAVPKNNKDYLENLETNLKVLVKSLNQ

SEQ ID NO: 17109 - protein, 441 aa, Streptococcus agalactiae
ATGAAAATCATTATTCAACGTGTTAGTCAAGCAAGTGTTTCTATTGAAGATGATGTAGTCGGATCTATTGAGAAGGGTTTAGTACTTCTAGTTGGGATTGCTCCAGAAGATACAACAGAAGATATTGCTTATGCAGTTCGTAAAATTACTAGCATGCGTATTTTTTCTGATGATGAGGGGAAAATGAACCTTTCAATTCAAGACATTAAAGGAAGCGTCTTATCTATCTCACAATTTACACTCTTTGCAGATACCAAAAAAGGAAATCGTCCAGCTTTTACTGGGGCAGCTGATCCTGTTAAAGCGAATCAGTTTTATGATATCTTTAATCAAGAATTAGCAAATCATGTTTCGGTAGAAACAGGTCAATTTGGAGCTGATATGCAAGTCAGTCTGATTAATGATGGACCAGTAACTATCGTTTTAGATACTAAAAATAAA

SEQ ID NO: 17110 - protein, 147 aa, Streptococcus agalactiae
MKIIIQRVSQASVSIEDDVVGSIEKGLVLLVGIAPEDTTEDIAYAVRKITSMRIFSDDEGKMNLSIQDIKGSVLSISQFTLFADTKKGNRPAFTGAADPVKANQFYDIFNQELANHVSVETGQFGADMQVSLINDGPVTIVLDTKNK

SEQ ID NO: 17111 - DNA, 2214 bp, Streptococcus agalactiae
atggtcaaagaaattaatttaacaggagaagaggttgttgcaatcacatcccagtacatgagtgagacggatgttgcttttgtaaaatttgccttaaattacgcaaccgcagctcattattatcaagcaagaaagtcgggcgagccctacattattcatccaattcaagtagcaggtattcttgcagatttacaccttgatgccgttacggtagcttgtggttttttacatgatgttgtagaagatacggaaattacccttgatgagattgaaactgattttggcaaggatgttcgcgatattattgacggtgtaacaaaattgggtaaagtggagtacaaatctcatgaagaacagttagcagaaaatcaccgtaaaatgttaatggctatgtctaaggatatccgtgttattttggttaagctcgctgatcgcttacataatatgagaacccttaaacacctcagaaaagataaacaagagcgtatttcacgtgagactatggaaatatacgctcctttagcgcatcgtttggggattagtcgtatcaagtgggaattagaagatttatcttttcgttacttgaatgagacggaattttataagatttctcatatgatgagtgaaaaacgtcgtgaacgcgaagagttggttgatataattgtcgataaaatcagatcctatactgaggaacagggtttatatggtgatatttatggtagaccaaaacacatttattctatttacagaaaaatgcgtgataaaaagaaacgctttgatcagatttatgatttaattgcgatacgctgtattatggaaactgctagtgatgtttatgccatggtggggtatatccatgagttatggcgtccgatgccaggaaggtttaaagattatattgcggcaccaaaggccaatggttatcaatctattcacacgacggtttatggacctaaagggccaattgaaattcagattcgaactaaagaaatgcatcaagttgccgagtttggtgttgcagcccattgggcctataaaaaaggaatcaccagtaaggttaatcaagcagagcaatcggttggtatgggatggattcaagaattagttgagcttcaagatgaatcaaaagacgccaaggattttgttgactctgttaaggaagatatctttacagaacgcatctatgtttttaccccaaatggtgctgttcaggaattgccaagggaatctggaccaattgattttgcttatgctattcacacgcaagttggagaaaaagctactggcgctaaagtaaatggacgtatggttccattgactgctaagttaaaaacaggagatgttgttgagattatcacaaaccctaattcatttggaccaagtcgtgactggattaagattgttaagaccaataaagctcgcaataaaattcgtcagttcttcaaaaaccaagataaagaaacttctattaataaaggtagagaattactggttgattatttccaagaacaaggttatgtgcctaacaaatatttagataagaaacatattgaagaaatccttccacgtgtcagtgttaaaagtgaggaagctttgtatgcagccgtaggttttggtgatttgagtccgattagtatttttaataaactgacggaaaaagaacgccgtgaggaggaacgtgctaaggctaaagcggaagcagacgaacttattaacggtggcgaaatcaaaaccgataagcgtgatgttctcaaagttaagagtgaaaatggtgttatcattcaaggagcttcaggtttattaatgcgtattgcaaaatgttgtaatcccgttcctggagatctcattgaaggctatataactaaaggtagaggcgtggctatccatcgttcagattgtcaaaatttaaagagtcaggagaactacgaacaacgtttgattgatgttgagtgggatgatgatggatctaaaaaagagtacatggctgaaatcgatatttatggtttgaatcgtagtggcctccttaatgatgttcttcaaaccttatcaaatgcaacaaagctagtatcgacagtaaatgcacaaccaacaaaagatatgaaatttgctaatattcatgttagctttggaatttcaaatttagcacaattgacaactgtggttgataaaatcaaaattatcccagatgtttattctgttaaacgtacgaatggt

SEQ ID NO: 17112 - protein, 738 aa, Streptococcus agalactiae
MVKEINLTGEEVVAITSQYMSETDVAFVKFALNYATAAHYYQARKSGEPYIIHPIQVAGILADLHLDAVTVACGFLHDVVEDTEITLDEIETDFGKDVRDIIDGVTKLGKVEYKSHEEQLAENHRKMLMAMSKDIRVILVKLADRLHNMRTLKHLRKDKQERISRETMEIYAPLAHRLGISRIKWELEDLSFRYLNETEFYKISHMMSEKRREREELVDIIVDKIRSYTEEQGLYGDIYGRPKHIYSIYRKMRDKKKRFDQIYDLIAIRCIMETASDVYAMVGYIHELWRPMPGRFKDYIAAPKANGYQSIHTTVYGPKGPIEIQIRTKEMHQVAEFGVAAHWAYKKGITSKVNQAEQSVGMGWIQELVELQDESKDAKDFVDSVKEDIFTERIYVFTPNGAVQELPRESGPIDFAYAIHTQVGEKATGAKVNGRMVPLTAKLKTGDVVEIITNPNSFGPSRDWIKIVKTNKARNKIRQFFKNQDKETSINKGRELLVDYFQEQGYVPNKYLDKKHIEEILPRVSVKSEEALYAAVGFGDLSPISIFNKLTEKERREEERAKAKAEADELINGGEIKTDKRDVLKVKSENGVIIQGASGLLMRIAKCCNPVPGDLIEGYITKGRGVAIHRSDCQNLKSQENYEQRLIDVEWDDDGSKKEYMAEIDIYGLNRSGLLNDVLQTLSNATKLVSTVNAQPTKDMKFANIHVSFGISNLAQLTTVVDKIKIIPDVYSVKRTNG

SEQ ID NO: 17113 - DNA, 2400 bp, Streptococcus agalactiae
atgtcaaaacattatttttcaaaaagcatattcgctttaactgtcttaacagctacaacaacaagtggtttagctgttcaagcagaagacattgttacaacaccaagttcaaccgctacaaaggttgaatcaactacccccactagcacaattgcagaggaaaagtcaaacgttacttctactccaactgcaataactgatgcttcaacagccacaagcacaaataccactgccaataatcaaaatccacagcctgttgccacagaaaccacaactggtgatctcaaacctattgaaggtgaaaaagttgaccttcgcatcatgtcaaccacagacctacacaccaatttagttaactatgattattatcaagataaagaatctcaaaaaatagggttagcaaaaactgctgtccttatcgaagaagcaaaaaaagaaaatcctaataccgtcttagttgataacggagatgtcattcaagggacacctttaggaacttataaagcaatcgttaaacctgtcgcagaaaatgaagaacatcctatgtaccaagccatgaatgctcttggttatgatgcatcaacactaggtaatcatgaatttaattacggtttagattacctcaaaaaaatcattgctacagccaaccttccaatcctcaacgcaaatgttttggatttcaaaacacatcaaccagtttttaaaacttatgacatcattactaaaaccttcaaagattcaacaggaagagctgttgcactaaatattggaattacaggaattgtacctcctcaaatcttaaactgggacaaggctaacttagagggaaaggttattgtcaaagattcagttaaagcaatcgaagaaatcgttcctactatgcgtgctaaaggagcagatgtcattctcgttttatcacactctggcattggagatgatcgatatgaagaaggtgaagaaaacgttggctatcaaattgccagcatcaagggagtggatgccgttgttacgggacactcacacgctgaatttccatcaggtaacggtactggcttctatgaaaaatacactggagttgatggtatcaatggaaaaataaatggaacacctgttacaatggcaggcaagtacggggatcaccttggtattattgatttaggacttagttatactaatggaaaatggcaagtctccgaaagcagtgctaaaatccgtaaaattgatatgaactcaacaactgctgacgagcgtatcattgcattggctaaggaagcacacgatggcactatcaactatgttcgccaacaagtaggtacaacaactgcgccaattacaagttactttgcactagttaaagatgacccttcagttcaaattgttaacaacgctcaacgttggtacgttgcaaatgaattaaaaggaacacctgaggcaaatttaccacttctatctgctgcagcaccatttaaagccggaacacgtggcgatgctaccgcatatactgatattccagctggacctgttgcaattaaaaacgtagctgatctttacctttatgataatgttactgcacttttaaaagtgaccggagcagacttacgtgaatggttagaaatgtccgctggtcaatttaaccaaattgaccctaacaataaagcaccgcaaaatattatcaataccgaatatcgtacctataattttgacgttattgatggcttgacttataaatttgatattacacaacctaataaatacaacaaagatggaaaagttgttaatagtcaagctagtcgagtacgcgatttaatgtacaatggtaagcctgttgcagacaaacaagagtttatgattgtgaccaataactaccgtgctagtggtaccttccctggggctaaaaatgccacaatgaaccgtttgctgaacttagaaaatcgccaaactattataaactatattatttcagagaaaaccatcaatcctacagctgataataactggggcttcacagagtctattaaaggccttgatttacgattccaaacagccgataaagctaaaaatcttgttactaatagcaaggatattcagtatatcgctagttctaccaaagatgaaggatttggtgattatcgatttgtctatactgaacaagaaaaagtagaccttactgagccatcacatcaagaaaagttaagccaaatagagaaacaaaaaattcaccacatggttgcaactgcttatacaaaagcaaaagcttctccaaatatcgcaggcactatctatacacaacagaaagaaaaaacattacctaaaactggacaagaaaaacaatcttatctggctttctttggcgtcgcaatacttggactcgtgggaaatttacttaaaaagaaacaaata

SEQ ID NO: 17114 - protein, 800 aa, Streptococcus agalactiae
MSKHYFSKSIFALTVLTATTTSGLAVQAEDIVTTPSSTATKVESTTPTSTIAEEKSNVTSTPTAITDASTATSTNTTANNQNPQPVATETTTGDLKPIEGEKVDLRIMSTTDLHTNLVNYDYYQDKESQKIGLAKTAVLIEEAKKENPNTVLVDNGDVIQGTPLGTYKAIVKPVAENEEHPMYQAMNALGYDASTLGNHEFNYGLDYLKKIIATANLPILNANVLDFKTHQPVFKTYDIITKTFKDSTGRAVALNIGITGIVPPQILNWDKANLEGKVIVKDSVKAIEEIVPTMRAKGADVILVLSHSGIGDDRYEEGEENVGYQIASIKGVDAVVTGHSHAEFPSGNGTGFYEKYTGVDGINGKINGTPVTMAGKYGDHLGIIDLGLSYTNGKWQVSESSAKIRKIDMNSTTADERIIALAKEAHDGTINYVRQQVGTTTAPITSYFALVKDDPSVQIVNNAQRWYVANELKGTPEANLPLLSAAAPFKAGTRGDATAYTDIPAGPVAIKNVADLYLYDNVTALLKVTGADLREWLEMSAGQFNQIDPNNKAPQNIINTEYRTYNFDVIDGLTYKFDITQPNKYNKDGKVVNSQASRVRDLMYNGKPVADKQEFMIVTNNYRASGTFPGAKNATMNRLLNLENRQTIINYIISEKTINPTADNNWGFTESIKGLDLRFQTADKAKNLVTNSKDIQYIASSTKDEGFGDYRFVYTEQEKVDLTEPSHQEKLSQIEKQKIHHMVATAYTKAKASPNIAGTIYTQQKEKTLPKTGQEKQSYLAFFGVAILGLVGNLLKKKQI

SEQ ID NO: 17115 - DNA, 453 bp, Streptococcus agalactiae
atgcctaaattaaccctagtctatatcagtcttagcggcaatactcaaagctttgtcaaacgtcttagtgaacaactgtcaacttggcataactgtcaggtttcgactattaatatcaaggaacaaaatcatcaaacctttcctgttgaccaacctttcgtagcactattacccacttacctcgagggaggaaatggcattgacaatggcgatcaagaaattcttaccattccacttggtgattttatagctgcacacaataatgtcaaaaattgtatcggaattgttggctctggaaatagaaattttaacaatcagtactgtttaactgcaaaacaatactctgaacggtttggatttcctatgttaggagactttgaattgcgaggaacttctagcgacgttgaacgtatcgcaaatattatcgttgaaacattatcgaactttaaagcc

SEQ ID NO: 17116 - protein, 151 aa, Streptococcus agalactiae; identical to SEQ ID NO: 3502

SEQ ID NO: 17117 - DNA, 1035 bp, Streptococcus agalactiae
atggaaacaacattaaactacattaaaaccctgacatcaatcccttcaccaacagggtttacccaaacaatcatgacctatatcatcaaagaattggaagcgtttggctactcaccaattcgcacaaacaagggaggcgtcatggtttctctaaaaggaaaaaataatactaaacatcgcatgataactgctcaccttgatacacttggtgctatggttagggccatcaaaccagatggtcggttaaaaattgaccttattggcggatacacatacaatgccattgaaggagaaaactgtactatacacctctcaaaaaatggtaaagaaatttctggaactgctcttattcatcaaactagtgtccatgtttacaaagatgctggaactgctgaacgtaatcaaacaaatatggaaattcgtttagatgagaaagtaacaactgctgacgaaacacgtgctttaggcatccaggtcggtgatttcatttcatttgatccgcgtacaatcataacaggcagcggctttattaaatcacgttacctagatgacaaggtatccgctggtatcctaatggaacttctttctgtttacaagaaagaagacattcaacttccttatactactcatttctactttagtgcctttgaagagctaggacatggagcaaattcaagcatcccaaatgaaactgtagaatatctagcagttgatatgggagctatgggagacgatcaagaaactgacgaatatactgtctctatctgtgttaaagatgcttctggtccttatcattatgaattacgtcaacatcttgtttctctagctgaaaacaataatattccttataaacttgatatttatccttattatggtagtgacgcctccgctgccatgcgtgctggtgcggaagttaaacacgcgctacttggtgcaggtattgaatctagtcattcttatgaacgtacccatatcgattctattcaagcaactgaactcttagtggatgcctatctcaaaagcaatatggtgaac

SEQ ID NO: 17118 - protein, 345 aa, Streptococcus agalactiae
METTLNYIKTLTSIPSPTGFTQTIMTYIIKELEAFGYSPIRTNKGGVMVSLKGKNNTKHRMITAHLDTLGAMVRAIKPDGRLKIDLIGGYTYNAIEGENCTIHLSKNGKEISGTALIHQTSVHVYKDAGTAERNQTNMEIRLDEKVTTADETRALGIQVGDFISFDPRTIITGSGFIKSRYLDDKVSAGILMELLSVYKKEDIQLPYTTHFYFSAFEELGHGANSSIPNETVEYLAVDMGAMGDDQETDEYTVSICVKDASGPYHYELRQHLVSLAENNNIPYKLDIYPYYGSDASAAMRAGAEVKHALLGAGIESSHSYERTHIDSIQATELLVDAYLKSNMVN

SEQ ID NO: 17119 - DNA, 495 bp, Streptococcus agalactiae
atggtagccacgctcattattatcaggggaaattcagctagcggaaagtctacaatagctaaacaacttcaagccgaattaggggaagatacccttctcttatctcaggattaccttcgtagagagatgttaggaactaaggatggtgaaaatactactaccattccccttttgatcaatttactaaattatggttaccataactgttcctacatcatccttgaaggcatacttcgttctgattggtatacgcctgtttggaaacatattttaaaacataaccccaacaatacttatgcttattactatgatttaagctttcaagaaactgttaaaagacattcaactcgacttaaatctttagaatttggagaagattctcttgcaaggtggtggcttgagaaagacttcttaaaagagatacctgaaaaaatattaacaaaatctatgagtttagaggatgtcaaaaaacttataatgaccgacgttttacct

SEQ ID NO: 17120 - protein, 165 aa, Streptococcus agalactiae; identical to SEQ ID NO: 12458

SEQ ID NO: 17121 - protein, 1035 aa, Streptococcus agalactiae
ATGAAAGAAAAACAGTCGAAAAGGCTTATTTATATACTACTGATTGTTCCCATTATCTTTATAAGTGTTTTTACATACAGTATTAGCCAGCCTTCTAAACTACTTCCACCAAAAGAATTAGTTATTCTAAGTCCAAATAGTCAAGCCATTTTAACAGGAACGATTCCAGCTTTTGAGGAAAAATACGGTATAAAAGTTAAGCTTATTCAAGGTGGGACAGGGCAACTAATAGATAGATTAAGTAAGGAGGGTAAGCAGTTGAAGGCGGATATTTTCTTTGGAGGAAATTATACGCAATTTGAAAGTCATAAGGCATTGTTTGAGTCTTACGTATCAAAGAATGTTCATACTGTTATTCCAGACTATATCCATCCGAGTGATACGGCGACACCTTATACTATAAATGGGAGTGTCTTGATTGTAAATAACGAATTAGCTAAGGGACTTACCATCAAGAGTTATGAAGATTTATTACAGCCTTCCTTAAAAGGTAAAATTGCCTTTGCAGATCCGAATACTTCCTCTAGTGCTTTCTCACAACTCACTAATATACTCTTGGCCAAGGGTGGTTACACCAATCCAAAAGCGTGGAACTATGTTAAAAAGCTACAACATAATATTAATGCTATCAAATCTTCTAGCTCTTCAGAAGTTTATCAATCAGTTGCAGAAGGAAAAATGATTGTGGGGTTGACTTACGAAGACCCTAGTGTCAATTTGCAAAAAAGTGGTGCCAATGTTTCTATTGTATACCCGACAGAAGGGACAGTTTTTGTCCCATCTTCGGTTGCAATTATAAAGAATGCTCCTTCTATGAAAGAAGCAAAGTTATTTATTAATTTTATGCTTTCTTTAGATGTTCAAAATGCCTTTGGGCAGTCAACGAGTAACCGACCTATTCGTAAAGATGCCCAAACAAGTAATGGCATGAAAGCTTTAAAGGATATCGCTACTCTTAAAGAAGATTATCGCTATGTCACTAAGCATAAGAGCCAAATCCTTAAAACCTATAATCGCATTCGTAGAAATGCTGAT

SEQ ID NO: 17122 - protein, 345 aa, Streptococcus agalactiae
MKEKQSKRLIYILLIVPIIFISVFTYSISQPSKLLPPKELVILSPNSQAILTGTIPAFEEKYGIKVKLIQGGTGQLIDRLSKEGKQLKADIFFGGNYTQFESHKALFESYVSKNVHTVIPDYIHPSDTATPYTINGSVLIVNNELAKGLTIKSYEDLLQPSLKGKIAFADPNTSSSAFSQLTNILLAKGGYTNPKAWNYVKKLQHNINAIKSSSSSEVYQSVAEGKMIVGLTYEDPSVNLQKSGANVSIVYPTEGTVFVPSSVAIIKNAPSMKEAKLFINFMLSLDVQNAFGQSTSNRPIRKDAQTSNGMKALKDIATLKEDYRYVTKHKSQILKTYNRIRRNAD

SEQ ID NO: 17123 - protein, 771 aa, Streptococcus agalactiae
ATGTATAGATTACTTATCGTTGAGGATGAGCACCTTATTCGTAAGTGGTTGCGCTATGCTATTGATTATCAATCATTGAATATTTTAGTGGTTGGTGAAGCAAAAGATGGTAAAGAAGGAGCTCAATTAATTCAGGAAGAGCAGCCAGACATTGTTTTAAGTGATATTAATATGCCAATTATGACAGCATTCGATATGTTTGAGGCAACCAAAGGACAATCTTATGCCAAAATTATTTTATCTGGCTATGCTGATTTTCCAAATGCGCAATCAGCTATTCACTATGGCGTTCTTGAATTTTTAACAAAACCACTAGAAAAGCAAGCTTTGATTGATTGTTTAAAAACAATTATGGCTAGAATTGAGGAACATAAGGAGAAGCACCTACAAGAGCATACAGAATTGTATTTACCTCTACCACAAGCTAATGACCAAGTTCCTGAAGTTATTAAAGATATGCTAGCATGGATTCATAGCCATTTTCATGGGAAAATTGTGATTAGCCAGTTAGCTCACGATTTAGGTTACAGTGAAAGTTATCTTTACACAGTCACTAAAAAGCACCTTCATATAACTTTGAGTGATTATATAAATCAATATCGTATTAATCAAGCCATTCAGTTGATGTTTAGAGAACCAGACCTAATGGTTTACCAAATTGCAGAAGCTGTTGGTATTTATGATTATCGTTATTTTGATAGGGTTTTTAAAAAGTACTTGGGTCAGACAGTAAAAGCGTTTAAGGAAGAACATATTTTTAAACAGATGGAT

SEQ ID NO: 17124 - protein, 257 aa, Streptococcus agalactiae; identical to SEQ ID NO: 3510

SEQ ID NO: 17125 - protein, 1647 aa, Streptococcus agalactiae
ATGAGAGGATATAGAATGGAAGAACGCTTTAAGAAACGACTACAAGATGATATCTCTAAACATTTTTCCCGCCAGTCTTTAATTTTATCCTTGTTATTGATTGCACTTTTCGTCCTTTTTTCTTTAGCGCCTCAGCAGATAGGCCTTTATAAAGATGTTAATTCAGTTTCCTATAGTTATAAGCAATTGATTCAAAAACATGATACCTTATTAGATGACTTAGGTAAAAATAGTTTGAAACCATTTGTCTCAGGACACTTAGGAAGTGCTGATTTGAGTAAGCAATATTATCATTTAAGGAATCATTTACAAAGTCAAACAGAACTTTTAGTATTCTCACCTAATCAAGAACTTTTGTTTGCTAGTAATTCACATTTAGGTAATTTTTTTAGTAAGTCTATTTACATTAGTGAAGTTTTAGATAAGGCTAAAATAAATCAAAGGCTACTAAAAATTATTGTAGATAGTGAGGGAGGGCATTACCTTGCACTCATTAAGCCAATTATAGTTAATAAAAAAGTTTCAGGTTATGCCTTTTTATTGATGAATGGGAAAGACTTTTTACTTCCAACGAAGGCTATTAACTCAGACTTGATTATTGCCGATCAGCTAAATAATAGCTTTACTTTTACTAATCGTGATTTTATCTCCTCTAGTTTAGATAAGGTAGATAGTCAATTCTTAACTAGATATTTTAGTTTTCACGATCATCGAGCTTTTGTTGTTAGGAAAGTAGCTCTGCAAGATAATATCCTACTTTATATGTATCGTCCCCTGATACCAGTAACTCTGGTCGTCCTTTTTTCTCTAGTATCATCAGTTATTATTTTTGTGATTTTACGACGAAAATCTAGAGTTCTAGCCGATCGCATCGCAGTAAAAAATTCTGGCGCCATAAATCAAATGGTGCTAGATATGGATGCCATTTCCCGCCAAGAAAAATCTAGTATTGAGCTTGATAGTCAAGATGAATTTCAATATCTATCTGTTCAAATCAATCAGATGGTTTCACGGTTAAAAGATTTACATGAGAAAACTCTCGATTTGGAAACACAAAAGTTGCTGTTTGAAAAGAGGATGTTAGAAGCTCAGTTTAATCCTCACTTCCTTTATAATACCCTTGAGACAATTTTAATAACCAGTCACTATGATTCACAATTAACAGAAAGAATCGTTATACAACTAACAAAATTATTGCGCTATAGCCTTAGTGGTAGCACAGAGGCAGCTGTGCTTAAGGATGATTTAGCAATCATTGAATCCTACCTTTTGATTAATCAAGTGAGATTTGAAGAATTAACTTACACTATTTCAGTATCTCCTGAACTTGAACACATGCGTGTACCAAAACTTTTCTTGTTACCGCTAATTGAGAATGCTATTAAATATGGCTTAAAAGAACGTCATGATGTAGCAATAAACATAGATATTTGGCAAGATAGTGATGGAATTTGGTTTACTGTTTCAAATAATGGATCGGGTATTAGTTTGGCTAGGCAAAAAGCTATACGTACAATGTTAAGATCAAATCACTCGCATCATGGGCTTATTAATTCTTATAGACGATTACAATATCAATTTTCAACAGTATTGTTAGAGTTTACGAAGACAGATGATGCTTTTCGAGTTAGCTATATAGTAAAGGAG

SEQ ID NO: 17126 - protein, 549 aa, Streptococcus agalactiae
MRGYRMEERFKKRLQDDISKHFSRQSLILSLLLIALFVLFSLAPQQIGLYKDVNSVSYSYKQLIQKHDTLLDDLGKNSLKPFVSGHLGSADLSKQYYHLRNHLQSQTELLVFSPNQELLFASNSHLGNFFSKSIYISEVLDKAKINQRLLKIIVDSEGGHYLALIKPIIVNKKVSGYAFLLMNGKDFLLPTKAINSDLIIADQLNNSFTFTNRDFISSSLDKVDSQFLTRYFSFHDHRAFVVRKVALQDNILLYMYRPLIPVTLVVLFSLVSSVIIFVILRRKSRVLADRIAVKNSGAINQMVLDMDAISRQEKSSIELDSQDEFQYLSVQINQMVSRLKDLHEKTLDLETQKLLFEKRMLEAQFNPHFLYNTLETILITSHYDSQLTERIVIQLTKLLRYSLSGSTEAAVLKDDLAIIESYLLINQVRFEELTYTISVSPELEHMRVPKLFLLPLIENAIKYGLKERHDVAINIDIWQDSDGIWFTVSNNGSGISLARQKAIRTMLRSNHSHHGLINSYRRLQYQFSTVLLEFTKTDDAFRVSYIVKE

SEQ ID NO: 17127 - protein, 825 aa, Streptococcus agalactiae; identical to SEQ ID NO: 8197

SEQ ID NO: 17128 - protein, 275 aa, Streptococcus agalactiae; identical to SEQ ID NO: 3514

SEQ ID NO: 17129 - protein, 807 aa, Streptococcus agalactiae
ATGATAATGCCAGCGACGATGGCAGCTTTAGCTGTGTTGATTTGTTTTGGGGGAAATTACTTAACAGGTCAAAGTATGATGGAGAGACCACTTGTAGTTGGTCTTGTAACAGGAATGCTACTAGGTGATATTAAGGTTGGTATCTTAATGGGTGCTTCCCTAGAAGCGCTATTTTTGGGAAACGTTAATATTGGGGGTGTTATTGCCGCAGAGCCAGTAACAGCAACAGCGATGGCAACAACTTTTACCATTATTTCAAACATTGATCAAAAAGCAGCAATGACTCTAGCTGTTCCGATTGGAATGTTGGCAGCATTTGTTGTTATGTTTTTGAAAAACGTCTTCATGAATATCTTTGCACCGATGGTGGATAAAGCCGCAGCCGCAAACCATCAAGGTAAACTTGTGATGCTTCACTATGGTACATGGATTATTTACTATCTCATTATCGCTTCTATTTCTTTCATTGGTATTTTAGTAGGTAGTGGGCCTGTTAATAGTTTTGTCCATCATATTCCTCAAAACCTGATGAATGGCTTGAGTGCGGCGGGAGGCCTCCTTCCAGCTGTTGGTTTTGCCATGCTGATGAAATTATTATGGACAAATAAATTAGCTGTTTTTTACTTGCTTGGTTTTGTTTTAACAGCTTATTTAAAATTACCAGCGGTTGCAGTTGCTGCCCTAGGAGCAGTTATTTGCGTCATTAGTTCACAACGTGATATAGAATTAGACGCAATTACTAGAGGTGCGATCAGTAAACAGACAACCTTTGACTCTAAAGAATCAGAAGAGGAGGACTTCTTCGCA

SEQ ID NO: 17130 - protein, 269 aa, Streptococcus agalactiae; identical to SEQ ID NO: 3516

SEQ ID NO: 17131 - DNA, 501 bp, Streptococcus agalactiae
atgattactcaaattcgtgttgacgaccgtttgattcacgggcaagtggcagttgtatggactaaagaattaaatgcaccacttttagtggtggctaatgatgaggctgccaaaaatgaaatcacacagatgactcttaaaatggctgtgcctaatggcatgaaattattaatccgttcagttgaagaatcaatagctctatttaaagatccacgcgcaactgacaagcgcatttttgtgattgtcaattctgttaaagatgcctgtacaattgctaaaaatataaccgatttagaagcagtaaacgtcgctaatgtaggacgctttgataagtctgatccagctacaaaagtcaaactaacatcaagtctcttattaaatccagaagagttggaagccgcaaaagaattagccagcttaccagatttagacgtctttaaccaagtattgccttcaaatactaaggttaacttgagtcagctagtcaaacaaagtgaggta

SEQ ID NO: 17132 - protein, 167 aa, Streptococcus agalactiae
MITQIRVDDRLIHGQVAVVWTKELNAPLLVVANDEAAKNEITQMTLKMAVPNGMKLLIRSVEESIALFKDPRATDKRIFVIVNSVKDACTIAKNITDLEAVNVANVGRFDKSDPATKVKLTSSLLLNPEELEAAKELASLPDLDVFNQVLPSNTKVNLSQLVKQSEV

SEQ ID NO: 17133 - DNA, 423 bp, Streptococcus agalactiae
atgaagcggaaattcctaatcggcagtcacggaaaacttgcgagtgggttgcagagttctattgatattctgacaggcaagggacaagagattcagacaatagatgcttacattgatgatagtgactataccaagtctattgtagaatttattgatgagattgcaccagatgaacaggggcttatttttacagatttgttaggtggcagcgttaatcagaaaatggcgactgctgtaatgaatagtgggaaaaataatgtttttttaataacgaacagcaatttagcgaccttgttgtcattactatttttgaaacctgaagaggaattaactaaagaagaaattgtaaccgttatcaatgaatctcaagtgcagctggtagatctcagctttaaagcgtgttcagaagatgactttttcgat

SEQ ID NO: 17134 - protein, 141 aa, Streptococcus agalactiae
MKRKFLIGSHGKLASGLQSSIDILTGKGQEIQTIDAYIDDSDYTKSIVEFIDEIAPDEQGLIFTDLLGGSVNQKMATAVMNSGKNNVFLITNSNLATLLSLLFLKPEEELTKEEIVTVINESQVQLVDLSFKACSEDDFFD

SEQ ID NO: 17135 - DNA, 1032 bp, Streptococcus agalactiae
atggataataagcagcataatacatcaatgattagcttgctacaatatcttttttccatactggtcattttagttcatagtggaaggttatttagtcaggatgtcattcattttacctttaaaagtttcctaggtcggatggctgttccttattttttgatttgtactgctttctttttgagaggtcgtatacagcaaggtttgtgtaatcactcctactttcgtaaactgattaaaaagtatagcatgtggactatcatttatttgccttatggttatttcttttttgaatctctaaatatagcgaagatttatttgctgccgggttttattgtggcatttttgtatttaggtatgtcacatactctttggtacatccctgctgttattctaggttggttcattattcaaggattattgaagtatgtaggaactagggggacatttatcacagttgttgtactctattgtattggagcagtagagacctattctgtctttgtacagtcaacaaaattttatcccctgatgtccacttatatgtcaatttttcagacaacacgaaacggattattttacactccagtttatcttctagcaggatatttactctatgattattttaatactgacctatttaccaaatcgcgtggtcttaagtatattctcttccttttacttctagctttagagaatgttcttatttattttaatcaagggttggataaaaatttcttcttattagctcctttatgtgcagtattcttatttaactggagtatacgtacatcactgtttaagggctatcgtttaagtcctttaaaacagttgagtgtctattatttcttccttcaccctctttttgttggcatagtgtcttactgtttaaaatcaacttccttagttgcacaccatcaaggaaaagtgatttttgtggtgaccttggcattaacacatgcttgtgctctactcataataaaggttgttaataagataccctatcaaaaaattattccattatctctttcgaaa

SEQ ID NO: 17136 - protein, 344 aa, Streptococcus agalactiae
MDNKQHNTSMISLLQYLFSILVILVHSGRLFSQDVIHFTFKSFLGRMAVPYFLICTAFFLRGRIQQGLCNHSYFRKLIKKYSMWTIIYLPYGYFFFESLNIAKIYLLPGFIVAFLYLGMSHTLWYIPAVILGWFIIQGLLKYVGTRGTFITVVVLYCIGAVETYSVFVQSTKFYPLMSTYMSIFQTTRNGLFYTPVYLLAGYLLYDYFNTDLFTKSRGLKYILFLLLLALENVLIYFNQGLDKNFFLLAPLCAVFLFNWSIRTSLFKGYRLSPLKQLSVYYFFLHPLFVGIVSYCLKSTSLVAHHQGKVIFVVTLALTHACALLIIKVVNKIPYQKIIPLSLSK

SEQ ID NO: 17137 - DNA, 180 bp, Streptococcus agalactiae
atgataccaatctcttcagaagaatatctcaattatccccaaaagtcattgaaacgccttaaatggtatctgataattattgttaataccttatcaaccatattaggaaataaaaaagctgatttcgcaaaagaaaatcagcttagaataatttcttgttcagataaccagtgggaacta

SEQ ID NO: 17138 - protein, 60 aa, Streptococcus agalactiae
MIPISSEEYLNYPQKSLKRLKWYLIIIVNTLSTILGNKKADFAKENQLRIISCSDNQWEL

SEQ ID NO: 17139 - DNA, 1152 bp, Streptococcus agalactiae
atgatatcaatttttccttttgaattaaaaaaacttctacaacgtaaggcagcattgggggcttttattatcttccttcttgctatttttggtctattttaccagcatttttttgttgggcaaattagtggctattctgcagataaaatacatggtcgagaagcggttgcaattaatcgtagaatagctgaaaaatattcaggggatttatctgaagaacgagtaacaaatattattaaaaactatgttaatccgccagcaggacgcccccctatatttgatgtttttagttattatgtggcagacacttttgatcgtgattttttaatttactataaccaattgaaagatgataaaacaattgattttaataaaataaatattaaagatcaaaaacagttgggttctgcgctaccactaaaacaactaaagctaggtaactttgctccttggaatcaactttttgaagtaagtaatagtacttatattttaattgtcttatttactctattcttatcagctcctcttttttcaggagatagggctaagaagattaatcctatactactgacgactcggtatggacgtggtcagttgacctgggctaagttagctagtacaatgaccatcggtatttccacatttatcctagcatatgccctcattctgacggtatttgcagattattttggttttagtggttgggagacaagtgttcaactgaatttatactggacatcacctttggctaatattatgggatttcctgtacctatgacaatatcaactgcttttgttcatattattgtcttacaatttgttggactcctttttatagccagtcttaatttctttatattaagtatcacaaattcgccattaacatcttttgctgtttcaacgcttgccttttttgctcctagctttttaatggctatgtttaataaaggtgtgataaacaagttattaactattttctcagtatcaacgacagacacttcagctttacttttaaaattatcacgtaatggtagtcatggctttttctttgatagtttttctgctaatgaaatctgtctgattagtctacgtatgttaattgcagtgttattgatagcttatacctatcgtttaatgcgacgaagaagttta

SEQ ID NO: 17140 - protein, 384 aa, Streptococcus agalactiae
MISIFPFELKKLLQRKAALGAFIIFLLAIFGLFYQHFFVGQISGYSADKIHGREAVAINRRIAEKYSGDLSEERVTNIIKNYVNPPAGRPPIFDVFSYYVADTFDRDFLIYYNQLKDDKTIDFNKINIKDQKQLGSALPLKQLKLGNFAPWNQLFEVSNSTYILIVLFTLFLSAPLFSGDRAKKINPILLTTRYGRGQLTWAKLASTMTIGISTFILAYALILTVFADYFGFSGWETSVQLNLYWTSPLANIMGFPVPMTISTAFVHIIVLQFVGLLFIASLNFFILSITNSPLTSFAVSTLAFFAPSFLMAMFNKGVINKLLTIFSVSTTDTSALLLKLSRNGSHGFFFDSFSANEICLISLRMLIAVLLIAYTYRLMRRRSL

SEQ ID NO: 17141 - protein, 708 aa, Streptococcus agalactiae
ATGAGCCACTTTACATTCGCAGATAGTGGGAATATTTATTGGAATGGACAGGAGCAGTCGGAAGAATTTTATCGTCACATTGGTTTTTTACCGCAACATTTTCGCTATTATGATCAATTTACTGGCATTGCTTTCTTAAATTATATCGCTACCTTAAAAGGTGTTGATAAAAAGAAAGCTAAACCAGAAATTCCTAGATTACTAGAGCTTGTTGGTTTAGGTGATGTAGGTAAAAAGAAGATTTCATCATATTCCGGTGGTATGAAGCAACGTTTAGGCATTGCTCAAGCACTTATCAATGACCCTGAAATACTTATTCTGGATGAACCAACTGTTGGACTTGATCCTAAGGAACGGGTTAAATTTCGCCATATTTTGAGTCAGTTATCCACCAATAAAATTATCATTTTATCAACGCATATTGTGTCGGATGTGGAAGCTGTTGCCAAAGAAATTATAGTATTAAAAAATGGTAAATTTATCGAACAGGGCAACACCGCACAGTTGTTGAAAACTATTGAGGGAAAAGTGTGGGAAATAACGACTGAACCAGATTTATCTCAGATACCCAATATTGCTATTGTTAATGAAAAAGTCATTTCAGATAGTCTGGTATTTCGTGTAGTGAGTGATATTTGTCCGAGTGATTCGGCACAGTTGGTTGTTCCGACTCTAGAAGATTTCTACATCTATCATTTTAGAGGGGAG

SEQ ID NO: 17142 - protein, 236 aa, Streptococcus agalactiae
MSHFTFADSGNIYWNGQEQSEEFYRHIGFLPQHFRYYDQFTGIAFLNYIATLKGVDKKKAKPEIPRLLELVGLGDVGKKKISSYSGGMKQRLGIAQALINDPEILILDEPTVGLDPKERVKFRHILSQLSTNKIIILSTHIVSDVEAVAKEIIVLKNGKFIEQGNTAQLLKTIEGKVWEITTEPDLSQIPNIAIVNEKVISDSLVFRVVSDICPSDSAQLVVPTLEDFYIYHFRGE

SEQ ID NO: 17143 - protein, 180 aa, Streptococcus agalactiae
ATGTTGACGTACAAAAAAGCATTGGTGCGTCAGGTTGATACTAAGGATTGTGGAGTAACTGCACTTGCTTCAATCGCAAAGTTCTATGGTTCAAAATATTTATTAAACCACTTACGAGAACTAGCCAAAACTAATCGAGATGGAACTACAGCTTCAGGAATTATCGCCGGAACAACTAAA

SEQ ID NO: 17144 - protein, 60 aa, Streptococcus agalactiae
MLTYKKALVRQVDTKDCGVTALASIAKFYGSKYLLNHLRELAKTNRDGTTASGIIAGTTK

SEQ ID NO: 17145 - protein, 1332 aa, Streptococcus agalactiae
ATGAATTCTACTCTATCCATCTTAGAGATAGCTTTAACGATAATATTAACAATATTTCTCTTTTCTAAAATCAGTGGACGTCAATTGACTTTAATAGAGATTGGAATTTGTATTGCTCTGAGATTAGGACTTGTAATTTTATTTATAGCAGCTAATACTATTATTAATCTTTCATTTCTAAAGTACTGGCTTCTCCCCATCTATATGTTAAGTCTGGCTTTCTTGTTGCTAAGACCTATATCTAAAACTTTAGTAGTCTTTTATGGCTTGTTTCCAATTGTTCTCAGAAATCTTTGTTCACGTTCTTTAGCTTTTTTTGTCTTTCCTTTGTTTAATATTGATTTTCATACAACCAACCAGGGGTTTTGGGGATATTTTGTTGATGTCTTGTCTACTCTTTGTGTTCTCCTATTTTTAAGATGGATGCAATACGACTTTAAAACTTTGCGAAGTAGTGAAGTTTCGCCCATAGATAAGAGAATTCTCCAATTTACGAATGGTTGTATGGTCAGTTATTACTTACTGATGCAGTTTTCAACTTATTTGGAATATGAATTAGCCATCAATACTGTTATTTACCGGCAATTTTTGCTTGTTGTTTATTGGATTATATTTACGGGAGCAATAGCCAGTTTAGACCGGAGACTTCGAAATTCTTTACAGGAGAGGTTAGCTGTTCAAAGAGAACTCCAATTGGCTAATATGATAGATTATAGCCACCATATTGAGGGGTTGTATAAAGAAGTTAGGAGCTTCCGACATGATTATAGTAACATGTTAACGACCTTGAAACTAGGGATTGATAATGAAGATATATCTATTGTCAAATCAGTTTATCAGTCTATCTTTAAAGAATCTAATACACATTTCCGACATCCTAAGTATAATATAGACCGGTTGGTTAATGTAGATAACCCAGCCTTAAAAAGTCTTTTAGCAGCCAAGCTTTCACAAGCGATAGACAATCATATTATGGTATCTATAGAAGTACCAGACAGTATTAAACCTCAAGGGATGGAACTGATTGATTTTATTACCATTGTATCTGTTTTATGGGATAACGCTATTGAGGCATCTTTAGAGACAGACGATCCTAAGATAGCCATGTCTTATTTTACATTAAAACATAAACAAATTTTTATCATAGAAAATTCAACTAAGGAAAAGGCAATAGATACGTCAACGATATTCAATTATGAGATAAGTAGTAAGGGGCGGAATAGAGGAATAGGTCTTTACAATGTCAGGGGAGTTATCAATCGTTATCCAAATATTTCTATTGCAACAAGTAGCCAAGATTTTAGTTTCTGCCAAACTTTCGAAATCATATTA

SEQ ID NO: 17146 - protein, 444 aa, Streptococcus agalactiae
MNSTLSILEIALTIILTIFLFSKISGRQLTLIEIGICIALRLGLVILFIAANTIINLSFLKYWLLPIYMLSLAFLLLRPISKTLVVFYGLFPIVLRNLCSRSLAFFVFPLFNIDFHTTNQGFWGYFVDVLSTLCVLLFLRWMQYDFKTLRSSEVSPIDKRILQFTNGCMVSYYLLMQFSTYLEYELAINTVIYRQFLLVVYWIIFTGAIASLDRRLRNSLQERLAVQRELQLANMIDYSHHIEGLYKEVRSFRHDYSNMLTTLKLGIDNEDISIVKSVYQSIFKESNTHFRHPKYNIDRLVNVDNPALKSLLAAKLSQAIDNHIMVSIEVPDSIKPQGMELIDFITIVSVLWDNAIEASLETDDPKIAMSYFTLKHKQIFIIENSTKEKAIDTSTIFNYEISSKGRNRGIGLYNVRGVINRYPNISIATSSQDFSFCQTFEIIL

SEQ ID NO: 17147 - protein, 654 aa, Streptococcus agalactiae
ATGGTAAATACCTTTGAAAAACCAGTTCAATTATTGGAATCAATCTGTGAAAAAGGTATGCATAATTTATATTTCTTAGACATTGAAATAAAAAATGATGAGCAGAGGGGCTTAGAGGTCGCAAAACAAATTAGACAAATTGATCCTTATGCTCAGATTGTTTTTGTTACAACTCATTCGGAATTAATGCCTTTAACCTTTCGTTATCAGGTATCAGCTTTAGACTATATCGATAAAGGACTTTCACAGGAAGCATTTAGCAGAAGGATTGAAGACGTTTTACTATATGCTAATAATGCTTGCAGTAAAAACTTACTAGAAGATTCTTTTTATTTTAAATCACGCTATAGTCAAGTACAAGTACCTTTTAACGATATCCTTTATATAGAAACGTCATTAAGGTCACATAGAGTTGTCCTTTATACTGCAAAAGACAGAATGGAATTCACAGCCACTTTGGGGGATATTTTAAAACAAGAACCTAGGCTCTTTCAATGTCATCGCTCTTTTTTAGTAAATCCCTTGAATATTTTTAAAGTGGATAGGTCAAATAAACTAATCTATTTAAAAAATGGTTCGAATTGTTTGATTTCTCGTAATAAAATAAAAGATATTATGGTAGTAATAGAGGAAAATCAAAGAGGTAGAGGAATA

SEQ ID NO: 17148 - protein, 218 aa, Streptococcus agalactiae
MVNTFEKPVQLLESICEKGMHNLYFLDIEIKNDEQRGLEVAKQIRQIDPYAQIVFVTTHSELMPLTFRYQVSALDYIDKGLSQEAFSRRIEDVLLYANNACSKNLLEDSFYFKSRYSQVQVPFNDILYIETSLRSHRVVLYTAKDRMEFTATLGDILKQEPRLFQCHRSFLVNPLNIFKVDRSNKLIYLKNGSNCLISRNKIKDIMVVIEENQRGRGI

SEQ ID NO: 17149 - protein, 813 aa, Streptococcus agalactiae
ATGGCAAAATGCTTAACGTTAAATACTCATTCATGGATGGAAGTAAATGCTCTAAAGAAATTATTTGATTTAGCAGAGCATATCTTCCGTGAAAAATATGATATCATCTGCCTACAAGAGGTGAACCAGAGCATATCTTCCCCTCTTGCTACGAGTAGTCCAAATTATCATCCGATTGAAGGTACACCAGCTCTTCATCAAGATAACTTTGCCTTGCAATTAGTGCATTACCTAAATCTTCAAGGTCTACACTATCATTGGACATGGGCTTATAATCATATTGGTTATAGTAAGTACCATGAAGGGGTAGCGATACTTTCTCTGAAACCATTAAAGCCAGATGATATTTTAGTTTCAGCTGTAGACGATGAGACTGATTATCATACTCGTCGTGCTCTGGTAGCTGAGACCACTCTGAATGACAAAGTCGTTACAGTAGTTAGCCTCCATTTATCATGGTTTGAGAAAGGATTTGCGGAGGAGTGGAAACGACTAGAAACTACCCTACTTGAGGTAGAAACTCCACTTTTACTCATGGGTGACTTTAATAATCCTACTGGAAATCAGGGTTATGAACTTGTTCTTAATAGTCCATTAGCATTAAAGGATAGCCACCAAATAGCCAATCATGTATTTGGAGACCATACTATTATGGCTGATATTGATGGTTGGGAAGGGAATAAAAAGGCTCTTAAAGTTGACCATATTTTTACTAGCGAAGACCTTTCAATCAGTTCAAGTCAAGTAGTTTTTGAAGGTGGTGAAGCACCTGTCGTTAGTGATCATTACGGCTTGGAAATTACGTTAAATCTT

SEQ ID NO: 17150 - protein, 271 aa, Streptococcus agalactiae
MAKCLTLNTHSWMEVNALKKLFDLAEHIFREKYDIICLQEVNQSISSPLATSSPNYHPIEGTPALHQDNFALQLVHYLNLQGLHYHWTWAYNHIGYSKYHEGVAILSLKPLKPDDILVSAVDDETDYHTRRALVAETTLNDKVVTVVSLHLSWFEKGFAEEWKRLETTLLEVETPLLLMGDFNNPTGNQGYELVLNSPLALKDSHQIANHVFGDHTIMADIDGWEGNKKALKVDHIFTSEDLSISSSQVVFEGGEAPVVSDHYGLEITLNL

SEQ ID NO: 17151 - DNA, 2181 bp, Streptococcus agalactiae
atgaaaaataatgtcaaacagctctttagttttgaattttggcagaagtttgggaaggctttgatggttgttattgctgttatgccagcagcaggattgatggttagtattggtaactccattaggctattggatccatcaaatgttttattagggcgcatagctaatgttattgctcaaattggttggggagttattggtaacttacacatcttatttgcattggctattggtggtagctgggctaaagaacgtgccggtggtgcttttgcggctggcttatcctttattcttattaaccttattacagggaacttttttggtgtgaaaacagatatgttagcaaacagtaaagcaactgttcaaacggtatttggtgcgaccatcagagtttcagattactttgttaacgttcttggacaacctgctcttaatatgggtgtatttgtcggtattatttcaggtttcgttggtgcaactgcctttaataaatattataactatcgtaaattaccagatgctttaacttttttcaatggaaaacgttttgttccatttgttgttatttatcgttcagtcattgttgcattaattttatcagtattttggccggttgttcaatcaggtatcaatggctttggtaagtggattgcaagttcacaagacagtgctccaatattagcaccatttgtctacggtacgttagagcgtttattgctcccatttggtttacaccatatgttaactattccaatgaactacacgcaactaggtggcacatacactgtccttacaggtgcaactaaaggagcacaggtgttgggacaagatccactgtggttagcatgggttggtgatttaatcaacttaaaaggctcaaattcaagtcaataccatcacttattgacaagtgtcactccagcacgttttaaagtggggcaaatgattggtgcttcaggtattttgatgggattatcttatgctatgtatcgtaacgttgataaagataaaaaattgaaatacaagtcaatgtttatttcagcagcagcggctactttcttgacaggtgttactgagccaattgagtacatgttcatgtttgcagcaatgccactctaccttgtatatgctgtcgttcaaggatgtgcgtttgctatggcagatattgttaacctccgcgttcattcatttggtaatatagaatttttaacacgtgttcccatgggaataaaagcgggccttggtggtgatattttcaactttgtttgggtgacacttctttttgcagtattgatgtactttattgcaaactttatgattaaaaaattcaatttagcaacagcaggacgtaatggtaattatgataacgaagaggttgataatgctccttcaacagcttctggttctgctgatgcaaattctcaagttgtacaagttattaatttacttggtggtcgtgataacattgaagatgtagatgcatgtatgactcgtcttcgtgtcacagttaaagatgggaatagcgtgggttctgaagcagcttggaaaaaagctggtgcaatgggattggtgttaaaaggtaatggcgttcaagctatttacggacctaaagcagatgtccttaaatcagacattcaagatttgctagattcaggtacagtgattccaatagttgatttagaaacaggccagcctgtagcagcaacccaagttacaacttataaaggaataacagaagaaattgtttcggtggctaatggtcaagtagaagcattggatgttgttaaagaccctgtcttttctcaaaaaatgatgggtgatggctttgctgtggaaccaactgatggcaatatctatgttccagtttcaggtacagttactagtgtctttccaacaaaacatgcttttggtttattaacagaaagtggcctagaagttttagtacatatcggtctagatacagtagctcttgatggtcaaccatttgaggttaaaatttctagtggtcaaaaagtggtagcaggcgatcttgctgtagtagcagatttggaagctatcaaagcagctggtaaagagacaagtgtgattatcgtctttacaaatgtttcagatataaaaactgttaaacttgaaaaatcaggtccacaaatagctaaaacagttgtggcaaaagtcgaactg

SEQ ID NO: 17152 - protein, 727 aa, Streptococcus agalactiae
MKNNVKQLFSFEFWQKFGKALMVVIAVMPAAGLMVSIGNSIRLLDPSNVLLGRIANVIAQIGWGVIGNLHILFALAIGGSWAKERAGGAFAAGLSFILINLITGNFFGVKTDMLANSKATVQTVFGATIRVSDYFVNVLGQPALNMGVFVGIISGFVGATAFNKYYNYRKLPDALTFFNGKRFVPFVVIYRSVIVALILSVFWPVVQSGINGFGKWIASSQDSAPILAPFVYGTLERLLLPFGLHHMLTIPMNYTQLGGTYTVLTGATKGAQVLGQDPLWLAWVGDLINLKGSNSSQYHHLLTSVTPARFKVGQMIGASGILMGLSYAMYRNVDKDKKLKYKSMFISAAAATFLTGVTEPIEYMFMFAAMPLYLVYAVVQGCAFAMADIVNLRVHSFGNIEFLTRVPMGIKAGLGGDIFNFVWVTLLFAVLMYFIANFMIKKFNLATAGRNGNYDNEEVDNAPSTASGSADANSQVVQVINLLGGRDNIEDVDACMTRLRVTVKDGNSVGSEAAWKKAGAMGLVLKGNGVQAIYGPKADVLKSDIQDLLDSGTVIPIVDLETGQPVAATQVTTYKGITEEIVSVANGQVEALDVVKDPVFSQKMMGDGFAVEPTDGNIYVPVSGTVTSVFPTKHAFGLLTESGLEVLVHIGLDTVALDGQPFEVKISSGQKVVAGDLAVVADLEAIKAAGKETSVIIVFTNVSDIKTVKLEKSGPQIAKTVVAKVEL

SEQ ID NO: 17153 - DNA, 99 bp, Streptococcus agalactiae
ttgacctttctcatgattataggtgatagcattgtcacacaagttgtacaccaaggaattcataaaactggattccctcgcaaaatagcttcttctcca

SEQ ID NO: 17154 - protein, 33 aa, Streptococcus agalactiae
MTFLMIIGDSIVTQVVHQGIHKTGFPRKIASSP

SEQ ID NO: 17155 - DNA, 252 bp, Streptococcus agalactiae
gtgactttgaaaaattcacctgatacaattaccttagaagttagtgatacgggactaggcattgcagagaaggacaaaaaacgtattttcgaacgtttctatcgcgtcgataaaagtcgctcaaaaatagttggagggactggtttaggtttgtctattgtaaagagtgctttagattttcacaatggtagtataaaagtggacagccatttggggcagggaacaacaatgaccgttttacttcacaaacaa

SEQ ID NO: 17156 - protein, 84 aa, Streptococcus agalactiae
MTLKNSPDTITLEVSDTGLGIAEKDKKRIFERFYRVDKSRSKIVGGTGLGLSIVKSALDFHNGSIKVDSHLGQGTTMTVLLHKQ

SEQ ID NO: 17157 - DNA, 765 bp, Streptococcus agalactiae
ttggatattaaagacaaagaatttattgtttttgttggaccatcaggttgtgggaaatcaacaacacttcgtatgatcgcaggtcttgaagatattagtgaaggtgagctcaagattgatggcgaagttgtcaatgacaaatcacctaaagatcgtgatattgctatggttttccaaaactatgctctttatccacatatgactgtttacgataatatggcttttgggctcaaattgcgtaaattctcaaaacaagaaattgataagcgcgttcgtgaagcagcagctaatattggccttactgaattcttagagcgcaaacctgcggatttgtcaggtggacaacgccaacgtgttgctatgggacgtgctattgtgcgtgatgccaaagtgttcttaatggatgagcctttatctaacttagatgctaaattacgtgtttcaatgcgtgctgaaattgcaaaaattcatcaacgtattggttcaacaactatttatgttacccacgaccaaacagaggcgatgactttggcagaccgtattgtcattatgtcagctactaagaaccctgatggtgatggtacaattggtaaaattgagcaagttggttcaccacaagaactctataatcttcctgctaataaatttgttgcgggattcatcggtagtccatctatgaacttcttccaagttaaagttgaaaatggtatgattattagtgaagatggtcttcgaatcgctatccctgaaaggtcagaaaacttt

SEQ ID NO: 17158 - protein, 255 aa, Streptococcus agalactiae
MDIKDKEFIVFVGPSGCGKSTTLRMIAGLEDISEGELKIDGEVVNDKSPKDRDIAMVFQNYALYPHMTVYDNMAFGLKLRKFSKQEIDKRVREAAANIGLTEFLERKPADLSGGQRQRVAMGRAIVRDAKVFLMDEPLSNLDAKLRVSMRAEIAKIHQRIGSTTIYVTHDQTEAMTLADRIVIMSATKNPDGDGTIGKIEQVGSPQELYNLPANKFVAGFIGSPSMNFFQVKVENGMIISEDGLRIAIPERSENF

SEQ ID NO: 17159 - DNA, 663 bp, Streptococcus agalactiae
atgtaccaagccatgaatgctcttggttatgatgcatcaacactaggtaatcatgaatttaattacggtttagattacctcaaaaaaatcattgctacagccaaccttccaatcctcaacgcaaatgttttggatttcaaaacacatcaaccagtttttaaaacttatgacatcattactaaaaccttcaaagattcaacaggaagagctgttgcactaaatattggaattacaggaattgtacctcctcaaatcttaaactgggacaaggctaacttagagggaaaggttattgtcaaagattcagttaaagcaatcgaagaaatcgttcctactatgcgtgctaaaggagcagatgtcattctcgttttatcacactctggcattggagatgatcgatatgaagaaggtgaagaaaacgttggctatcaaattgccagcatcaagggagtggatgccgttgttacgggacactcacacgctgaatttccatcaggtaacggtactggcttctatgaaaaatacactggagttgatggtatcaatggaaaaataaatggaacacctgttacaatggcaggcaagtacggggatcaccttggtattattgatttaggacttagttatactaatggaaaatggcaagtctccgaaagcagtgct

SEQ ID NO: 17160 - protein, 221 aa, Streptococcus agalactiae
MYQAMNALGYDASTLGNHEFNYGLDYLKKIIATANLPILNANVLDFKTHQPVFKTYDIITKTFKDSTGRAVALNIGITGIVPPQILNWDKANLEGKVIVKDSVKAIEEIVPTMRAKGADVILVLSHSGIGDDRYEEGEENVGYQIASIKGVDAVVTGHSHAEFPSGNGTGFYEKYTGVDGINGKINGTPVTMAGKYGDHLGIIDLGLSYTNGKWQVSESSA

SEQ ID NO: 17161 - protein, 90 aa, Streptococcus agalactiae
ATGTTAGGAGACTTTGAATTGCGAGGAACTTCTAGCGACGTTGAACGTATCGCAAATATTATCGTTGAAACATTATCGAACTTTAAAGCC

SEQ ID NO: 17162 - protein, 30 aa, Streptococcus agalactiae
MLGDFELRGTSSDVERIANIIVETLSNFKA

SEQ ID NO: 17163 - protein, 684 aa, Streptococcus agalactiae
ATGGAAACAACATTAAACTACATTAAAACCCTGACATCAATCCCTTCACCAACAGGGTTTACCCAAACAATCATGACCTATATCATCAAAGAATTGGAAGCGTTTGGCTACTCACCAATTCGCACAAACAAGGGAGGCGTCATGGTTTCTCTAAAAGGAAAAAATAATACTAAACATCGCATGATAACTGCTCACCTTGATACACTTGGTGCTATGGTTAGGGCCATCAAACCAGATGGTCGGTTAAAAATTGACCTTATTGGCGGATACACATACAATGCCATTGAAGGAGAAAACTGTACTATACACCTCTCAAAAAATGGTAAAGAAATTTCTGGAACTGCTCTTATTCATCAAACTAGTGTCCATGTTTACAAAGATGCTGGAACTGCTGAACGTAATCAAACAAATATGGAAATTCGTTTAGATGAGAAAGTAACAACTGCTGACGAAACACGTGCTTTAGGCATCCAGGTCGGTGATTTCATTTCATTTGATCCGCGTACAATCATAACAGGCAGCGGCTTTATTAAATCACGTTACCTAGATGACAAGGTATCCGCTGGTATCCTAATGGAACTTCTTTCTGTTTACAAGAAAGAAGACATTCCACTTCCTTATACTACTCATTTCTACTTTAGTGCCTTTGAAGAGCTAGGACATGGAGCAATTTCAGCATCCCAA

SEQ ID NO: 17164 - protein, 228 aa, Streptococcus agalactiae
METTLNYIKTLTSIPSPTGFTQTIMTYIIKELEAFGYSPIRTNKGGVMVSLKGKNNTKHRMITAHLDTLGAMVRAIKPDGRLKIDLIGGYTYNAIEGENCTIHLSKNGKEISGTALIHQTSVHVYKDAGTAERNQTNMEIRLDEKVTTADETRALGIQVGDFISFDPRTIITGSGFIKSRYLDDKVSAGILMELLSVYKKEDIPLPYTTHFYFSAFEELGHGAISASQ

SEQ ID NO: 17165 - protein, 582 aa, Streptococcus agalactiae
ATGAAATCACAGGATAATTTGACTAAAGAAGACCGTAAAATGCTTCGCTCAGTCTTCTGGCGCTCATGGACGATGAATGCCAGTCGTACTGGGGCAACACAATACCACGCAGTAGGAGTTATTTATACTTTACTACCAGTCATCAATCGTTTTTATAAGACTGATAAGGATAAAGCAGAGGCACTGGTCCGTCATACAACATGGTTTAATGCCACCATGCACATTAATAATTTTATTATGGGTCTTGTTGCATCTATGGAAAAGAAAAACAGTGAAGATCCTGATTTTGACGCTAGTGCTATCACCGCAGTTAAGGCTTCTTTGATGGGACCTATATCTGGTGTTGGTGATTCATTCTTTTGGGGAATTCTAAGGGTTATTGCGGCAGGTATCGGTATCTCCTTAGCAAGTACAGGCTCAGCCATGGGAGCTGTTGTCTTTCTACTCTTGTATAACATTCCAGCTTTTCTGATTCATTATTATAGTCTCTATGGAGGTTACTCTGTAGGTGCAGGGTTTATCAAAAAATTGTATGAATCAGGTGGTATTAAATTGGTACTAAGACTTTCAGTATGCTTGGTT

SEQ ID NO: 17166 - protein, 194 aa, Streptococcus agalactiae
MKSQDNLTKEDRKMLRSVFWRSWTMNASRTGATQYHAVGVIYTLLPVINRFYKTDKDKAEALVRHTTWFNATMHINNFIMGLVASMEKKNSEDPDFDASAITAVKASLMGPISGVGDSFFWGILRVIAAGIGISLASTGSAMGAVVFLLLYNIPAFLIHYYSLYGGYSVGAGFIKKLYESGGIKLVLRLSVCLV

SEQ ID NO: 17167 - protein, 183 aa, Streptococcus agalactiae
TTGCTTGGTTTTGTTTTAACAGCTTATTTAAAATTACCAGCGGTTGCAGTTGCTGCCCTAGGAGCAGTTATTTGCGTCATTAGTTCACAACGTGATATAGAATTAGACGCAATTACTAGAGGTGCGATCAGTAAACAGACAACCTTTGACTCTAAAGAATCAGAAGAGGAGGACTTCTTCGCA

SEQ ID NO: 17168 - protein, 61 aa, Streptococcus agalactiae
MLGFVLTAYLKLPAVAVAALGAVICVISSQRDIELDAITRGAISKQTTFDSKESEEEDFFA

SEQ ID NO: 17169 - protein, 747 aa, Streptococcus agalactiae
TTGCTGCCGGGTTTTATTGTGGCATTTTTGTATTTAGGTATGTCACATACTCTTTGGTACATCCCTGCTGTTATTCTAGGTTGGTTCATTATTCAAGGATTATTGAAGTATGTAGGAACTAGGGGGACATTTATCACAGTTGTTGTACTCTATTGTATTGGAGCAGTAGAGACCTATTCTGTCTTTGTACAGTCAACAAAATTTTATCCCCTGATGTCCACTTATATGTCAATTTTTCAGACAACACGAAACGGATTATTTTACACTCCAGTTTATCTTCTAGCAGGATATTTACTCTATGATTATTTTAATACTGACCTATTTACCAAATCGCGTGGTCTTAAGTATATTCTCTTCCTTTTACTTCTAGCTTTAGAGAATGTTCTTATTTATTTTAATCAAGGGTTGGATAAAAATTTCTTCTTATTAGCTCCTTTATGTGCAGTATTCTTATTTAACTGGAGTATACGTACATCACTGTTTAAGGGCTATCGTTTAAGTCCTTTAAAACAGTTGAGTGTCTATTATTTCTTCCTTCACCCTCTTTTTGTTGGCATAGTGTCTTACTGTTTAAAATCAACTTCCTTAGTTGCACACCATCAAGGAAAAGTGATTTTTGTGGTGACCTTGGCATTAACACATGCTTGTGCTCTACTCATAATAAGGTTGTTAATAAGATACCCTATCAAAAATTATTCCATTATCTCTTTCGAAATAGTGATTCATATAAGAGAAAGGTTAAAGGTA

SEQ ID NO: 17170 - protein, 249 aa, Streptococcus agalactiae
MLPGFIVAFLYLGMSHTLWYIPAVILGWFIIQGLLKYVGTRGTFITVVVLYCIGAVETYSVFVQSTKFYPLMSTYMSIFQTTRNGLFYTPVYLLAGYLLYDYFNTDLFTKSRGLKYILFLLLLALENVLIYFNQGLDKNFFLLAPLCAVFLFNWSIRTSLFKGYRLSPLKQLSVYYFFLHPLFVGIVSYCLKSTSLVAHHQGKVIFVVTLALTHACALLIIRLLIRYPIKNYSIISFEIVIHIRERLKV

SEQ ID NO: 17171 - DNA, 642 bp, Streptococcus agalactiae
gtgaaccagagcatatcttcccctcttgctacgagtagtccaaattatcatccgattgaaggtacaccagctcttcatcaagataactttgccttgcaattagtgcattacctaaatcttcaaggtctacactatcattggacatgggcttataatcatattggttatagtaagtaccatgaaggggtagcgatactttctctgaaaccattaaagccagatgatattttagtttcagctgtagacgatgagactgattatcatactcgtcgtgctctggtagctgagaccactctgaatgacaaagtcgttacagtagttagcctccatttatcatggtttgagaaaggatttgcggaggagtggaaacgactagaaactaccctacttgaggtagaaactccacttttactcatgggtgactttaataatcctactggaaatcagggttatgaacttgttcttaatagtccattagcattaaaggatagccaccaaatagccaatcatgtatttggagaccatactattatggctgatattgatggttgggaagggaataaaaaggctcttaaagttgaccatatttttactagcgaagacctttcaatcagttcaagtcaagtagtttttgaaaggtgg

SEQ ID NO: 17172 - protein, 214 aa, Streptococcus agalactiae
MNQSISSPLATSSPNYHPIEGTPALHQDNFALQLVHYLNLQGLHYHWTWAYNHIGYSKYHEGVAILSLKPLKPDDILVSAVDDETDYHTRRALVAETTLNDKVVTVVSLHLSWFEKGFAEEWKRLETTLLEVETPLLLMGDFNNPTGNQGYELVLNSPLALKDSHQIANHVFGDHTIMADIDGWEGNKKALKVDHIFTSEDLSISSSQVVFERW

SEQ ID NO: 17173 - DNA, 201 bp, Streptococcus agalactiae
atgaaaaataatgtcaaacagctctttagttttgaattttggcagaagtttgggaaggctttgatggttgttattgctgttatgccagcagcaggattgatggttagtattggtaactccattaggctattggatccatcaaatgttttattagggcgcatagcttatggtattgctccaattggttgggggaagtattgg

SEQ ID NO: 17174 - protein, 67 aa, Streptococcus agalactiae
MKNNVKQLFSFEFWQKFGKALMVVIAVMPAAGLMVSIGNSIRLLDPSNVLLGRIAYGIAPIGWGKYW

SEQ ID NO: 17175 - DNA, 1653 bp, Streptococcus agalactiae
atgactaaaaaaattttccgtacaactttatccgctagtttgggaattgttttagttacaattttgatgattatgggatttctctataattacttcaatcgcattcagcgagaacagttgagaacacaaacggcactggcgtcacaaggaatttcctttgaaggtaaagattattttgaaaatcttaaaacttcaaatgtgcgtattacttgggtagataataagggacaagtgctttatgatacccaatcagatgcaaaacatatgaaaaatcacgccaatcgtcaagaaattaaagaagctatcaagagtggttatggtgagagcacgaggtggtcagcgacacttactgagaagtctatctatgctgcgcaacgtttaaataatggaacgatagttcgtttatcagttgcgcaacaaactattttttatcttctccttggtatgatgagtcccttagcaattatcatcttacttgctattattttatctgtattaattgcacgatatatagcaaaaaaagtatcagagcctttaaacaatattgacttagatcatcctttatcaaatgatagttacgaggagataacaccattattaaggcgtcttgatagccatcaggctaagattcaacatcaaaaactgttattacaaaagcgtcaaaaagaatttgataccattatttctaaaattaaggaaggaatgattcttttagatgatcaagcaagaatcgttagtatcaacgcagaagctttaaagttattccaaattaatgatgattggcatgggcgctttatgatggaagttagccgagatttaactctcaaagacttaattgatcaaggactaaaagggaaaaagaaagaggctaatattgacattgaaaataatcattaccgcgtcttggtaagaccaactacagataacaaccgagtaacaggattggttgttctactgtttgatgtgactgaccaactccaaatggaacaacttcaacgtgaatttactgccaatgtctctcatgaattgaaaaccccgcttcatgttatttctggttactcagaactgttagctaatcaaatggttccaaacgaagaagtcccacaatttgcagctaaaattcataaagaatctgaacgattagttaaattggttgaggatattatcaacctttctcaccttgatgaacaagaaaaattaccgcaagagacagtaaatctgtatgacttaacacaaaaagttttagaaggtttacaagctaaagcagataagaagcacatacaaatcaattttaatggagaagaagctattttgcgagggaatccagttttattgaattccttggtgtacaacttgtgtgacaatgctatcacctataatcatgagaaaggtcaagtaaatgtgactttgaaaaattcacctgatacaattaccttagaagttagtgatacgggactaggcattgcagagaaggacaaaaaacgtattttcgaacgtttctatcgcgtcgataaaagtcgctcaaaaatagttggagggactggtttaggtttgtctattgtaaagagtgctttagattttcacaatggtagtataaaagtggacagccatttggggcagggaacaacaatgaccgttttacttcacaaacaa

SEQ ID NO: 17176 - protein, 551 aa, Streptococcus agalactiae
MTKKIFRTTLSASLGIVLVTILMIMGFLYNYFNRIQREQLRTQTALASQGISFEGKDYFENLKTSNVRITWVDNKGQVLYDTQSDAKHMKNHANRQEIKEAIKSGYGESTRWSATLTEKSIYAAQRLNNGTIVRLSVAQQTIFYLLLGMMSPLAIIILLAIILSVLIARYIAKKVSEPLNNIDLDHPLSNDSYEEITPLLRRLDSHQAKIQHQKLLLQKRQKEFDTIISKIKEGMILLDDQARIVSINAEALKLFQINDDWHGRFMMEVSRDLTLKDLIDQGLKGKKKEANIDIENNHYRVLVRPTTDNNRVTGLVVLLFDVTDQLQMEQLQREFTANVSHELKTPLHVISGYSELLANQMVPNEEVPQFAAKIHKESERLVKLVEDIINLSHLDEQEKLPQETVNLYDLTQKVLEGLQAKADKKHIQINFNGEEAILRGNPVLLNSLVYNLCDNAITYNHEKGQVNVTLKNSPDTITLEVSDTGLGIAEKDKKRIFERFYRVDKSRSKIVGGTGLGLSIVKSALDFHNGSIKVDSHLGQGTTMTVLLHKQ

SEQ ID NO: 17177 - DNA, 675 bp, Streptococcus agalactiae
atgatatattgtgttgaagatgatgctgatattcgcgaaatgatgctctatactttgcaaatggcaggttttacagctcaaggattctcgagttcagagcttttttgggaagctgttcaggagaaagttccagacttgattttacttgatattatgttgccgggagatgatggtttgactattttagagcgtttaaggagaaaacatcaaacggaaatgataccagtaatcatgacaactgctaaaggtagtgagtatgataaagttaaagggttagatcttggagcagatgattatctcgtcaaaccttttgggatgatggaaatgatttcacgaataaaagcagtcttgagacgtagccgccaagtagattcaaaagctcatattatcattggaaatttagagattgacccgactaattattgggtcaaaaggggaacggaaaaaatccacttaaccctaaaggaatttgagttattagtattattcttccgtaatcccaatagagtctttacaaggcaagaacttctggataaggtttggggagaacaatttttaggagaaactagaactgtggatgttcacattgggacactgcgaacaaaacttggtgaggatggctatttgatcgctacagtaaggggagttggataccgtttggaggaaagacatgac

SEQ ID NO: 17178 - protein, 225 aa, Streptococcus agalactiae
MIYCVEDDADIREMMLYTLQMAGFTAQGFSSSELFWEAVQEKVPDLILLDIMLPGDDGLTILERLRRKHQTEMIPVIMTTAKGSEYDKVKGLDLGADDYLVKPFGMMEMISRIKAVLRRSRQVDSKAHIIIGNLEIDPTNYWVKRGTEKIHLTLKEFELLVLFFRNPNRVFTRQELLDKVWGEQFLGETRTVDVHIGTLRTKLGEDGYLIATVRGVGYRLEERHD

SEQ ID NO: 17179 - DNA, 654 bp, Streptococcus agalactiae
atgattcgttcacgatttgcaagtcaacttaatgaccttaataaagaaattatttttatgggggcattgtgtgaggacatcattgggaagtccttaggtgctctaacaaatagtaatgatgtttaccttgacgatatttctgaaacttatcacaagattgaacaaatggaacgggatattgaggagagatgtttaaaacttttacttcgtcagcaaccagttgccaaggatttacgccgtatttcttctgcattaaaaatggtttatgatatgaaacgtattggtgctcaagcttatgaaattgcggaaattgttagtttaggtcatattatccaaggtgcaggttctgaaagggatcaacttaacagcatgtctaataatgtcattagtatgctgactaagagtatagatgcttttatttatgacaatgaagaacaagcgcatcaagtaattgaacaagataggacagttaaccaggaatttgatacaataaagaaacagttagtgttatatttttcggtacaggatgttgatggtgaatatcccatagatgttttaatgatcgccaagtacctagagcgtattggtgatcatacagtaaatattgctaaatgggtgcttttctcaataacaggtaacctagatggagaagcg

SEQ ID NO: 17180 - protein, 218 aa, Streptococcus agalactiae; identical to SEQ ID NO: 3540

SEQ ID NO: 17181 - protein, 747 aa, Streptococcus agalactiae; identical to SEQ ID NO: 8227

SEQ ID NO: 17182 - protein, 249 aa, Streptococcus agalactiae; identical to SEQ ID NO: 3542

SEQ ID NO: 17183 - protein, 876 aa, Streptococcus agalactiae
ATGGAAAATATTAACCAAAGAACGTCAAAACAATATTTAGCATCTTTAAAAAAAGATCCCCTTTCCTTCTTTCTTTTTGCTATTGTCTATTTGGGAGCAATTCTAAGTTTTGCTACAATTGCATTTGTTGTTATTTATATTTTAGTTAAGGGGCTTCCTCATGTGAATACTGGCTTGTTTGCATGGACTTATAATACTCAGAACGTCTCACTATTACCAGCTTTCATTAACACTATCTTTATCATCGCCTTAACTTTATTATTTGCAGTTCCCCTTGGTATTGGTGGATCAATTTATCTAACGGAATATGCTAGACGTGATAATCCTTATCTCAAAATTATCCGTGTTGCAACCGAGACATTGGCAGGGATACCTTCAATTATTTATGGTTTATTTGGTGCATTATTTTTTGTAAAATACACACACTTAGGCTTATCTTTGATATCGGGTTCTCTGACTTTGAGCATCATGATTTTACCTTTGATTATGAGGACAACTGAAGAAGCTTTACTATCTGTTCCGGATTCTTATCGAGAAGGAGCCTTTGCGCTTGGTGCTGGTAAATTGAGAACCATATTTAAAATCGTATTACCTAGTGCTATGTCTGGTATTTTTGCTGGTATTATTTTAGCGATAGGACGTATCATTGGTGAGTCAGCAGCACTTATTTTCACAGCTGGAACAGTTGCAAAAGTAGTACATTCGGTATTTAGTTCATCTCGTACTTTAGCAGTACATATGTATGCTATTTCGGGTGAGGGCTTATATGTTGACCAAACTTATGCGACTGCGGTCATCTTATTGCTTTTAGTTATTATTGTCAATTTTGTATCTGGACTAGTAGCCAAACGATTAGGAAGTGAGTCGAACAGTGAG

SEQ ID NO: 17184 - protein, 292 aa, Streptococcus agalactiae
MENINQRTSKQYLASLKKDPLSFFLFAIVYLGAILSFATIAFVVIYILVKGLPHVNTGLFAWTYNTQNVSLLPAFINTIFIIALTLLFAVPLGIGGSIYLTEYARRDNPYLKIIRVATETLAGIPSIIYGLFGALFFVKYTHLGLSLISGSLTLSIMILPLIMRTTEEALLSVPDSYREGAFALGAGKLRTIFKIVLPSAMSGIFAGIILAIGRIIGESAALIFTAGTVAKVVHSVFSSSRTLAVHMYAISGEGLYVDQTYATAVILLLLVIIVNFVSGLVAKRLGSESNSE

SEQ ID NO: 17185 - protein, 843 aa, Streptococcus agalactiae
ATGAAACAAACAAAAGAAGGTCTTATGCAAGCTGTGTTTTTCATCACGGCTTGCGTCAGTGTTATATCAGCTATTTTAATTTGCCTCTTTCTCTTCTCTAGTGGTCTTCCAGCTATTACAAAAATCGGCTGGGGAAATTTTATATTTGGTAAAGTCTGGCATCCTAGTAATAATATTTTTGGCATCTTTCCAATGATTGTAGGTTCCTTATATGTTACAGCGGGAGCTTTACTTTTAGGAGGCCCGATAGGTATCCTTACTGCTGTTTTTATGGCTTATTTCTGCCCAGAAAATATTTATAGGCCTTTAAAGTCAGCTATCAATTTAATGGCGGGAATTCCTTCAGTTGTTTATGGTTTCTTTGGACTCGTTGTCATTGTCCCTATGATAAGGCAATATATTGGTGGCTTTGGTATGGGAGTCTTAGCAGCTTCAATTTTGCTAGGAATTATGATTTTACCAACAATTGTTAGCATTTCAGAATCTTCTTTAAGAGCTGTTCCAGAGAGCTATTATGAAGGCGGTATTGCCCTTGGTGCCTCTCATGAACGAAGTGTCTTCTTTGCTGTTTTACCAGCTGCTAAACGTGGTATTTTAGCATCGGTTGTTTTGGGAATTGGACGTGCTATTGGTGAAACAATGGCTGTCATCATGGTAGCGGGTAATCAAGCTGTCTTGCCTCAATCGCTGACATCAGGCGTTAGAACTCTAACCACTAATATTGTCATGGAAATGGGATATTCTTCTGGTTTGCATCGTCAAGCCTTAATTGGTACAGCTGTGGTACTCTTTATCTTTATATTAATGATTAATATCAGTTTTTCAGCATTACAGAAAGAGGAA

SEQ ID NO: 17186 - protein, 281 aa, Streptococcus agalactiae
MKQTKEGLMQAVFFITACVSVISAILICLFLFSSGLPAITKIGWGNFIFGKVWHPSNNIFGIFPMIVGSLYVTAGALLLGGPIGILTAVFMAYFCPENIYRPLKSAINLMAGIPSVVYGFFGLVVIVPMIRQYIGGFGMGVLAASILLGIMILPTIVSISESSLRAVPESYYEGGIALGASHERSVFFAVLPAAKRGILASVVLGIGRAIGETMAVIMVAGNQAVLPQSLTSGVRTLTTNIVMEMGYSSGLHRQALIGTAVVLFIFILMINISFSALQKEE

SEQ ID NO: 17187 - protein, 879 aa, Streptococcus agalactiae
ATGAAAAAACACAAAATGCTATCTCTTTTGGCGGTATCTGGTCTTATGGGAATTGGCATCCTAGCAGGATGCTCAAATGATTCATCATCTTCATCTAAAGGGACAATTAACATTGTTTCTAGAGAGGAAGGGTCTGGAACTCGTGGAGCTTTCATAGAGTTATTTGGGATCGAGTCAAAAAATAAAAAGGGCGAAAAAGTAGACCATACTTCTGATGCAGCAACTGTTACCAATTCAACTTCAGTTATGCTAACCACTGTCTCTAAAGACCCGTCAGCTATTGGTTATTCTTCACTAGGTTCATTAAATAGTAGCGTTAAAGTGCTTAAAATTGATGGCAAAAATGCGACTGTAAAAGATATTAAATCAGGAAGCTATAAGATTTCTCGTCCTTTCAATATTGTAACAAAAGAAGGTAAGGAAAAAGAAGCAACAAAAGATTTTATTGATTATATCTTAAGCAAAGATGGGCAAGCAGTCGTTGAGAAAAATGGCTATATTCCACTTGACAATGCTAAAGCATATCAAGCAAAAGTGTCATCTGGTAAAGTTGTTATAGCAGGTTCAAGTTCAGTAACGCCGGTTATGGAAAAGATTAAAGAAGCCTATCATAAAGTAAATACAAAAGTAGATGTTGAAATTCAACAAAGTGATTCTTCAACTGGGATTACAAGCGCAATTGATGGATCAGCAGATATAGGTATGGCATCACGTGAATTGGATAAGACAGAGTCATCCAAAGGGGTCAAAGCTACTGTTATTGCAACAGATGGTATTGCAGTAGTTGTTAATAAGAAAAATAAAGTTAATGATCTATCAACAAAACAAGTAAAAGACATTTTTACTGGAAAGACAACGTCTTGGTCTGACTTATCAAAG

SEQ ID NO: 17188 - protein, 293 aa, Streptococcus agalactiae
MKKHKMLSLLAVSGLMGIGILAGCSNDSSSSSKGTINIVSREEGSGTRGAFIELFGIESKNKKGEKVDHTSDAATVTNSTSVMLTTVSKDPSAIGYSSLGSLNSSVKVLKIDGKNATVKDIKSGSYKISRPFNIVTKEGKEKEATKDFIDYILSKDGQAVVEKNGYIPLDNAKAYQAKVSSGKVVIAGSSSVTPVMEKIKEAYHKVNTKVDVEIQQSDSSTGITSAIDGSADIGMASRELDKTESSKGVKATVIATDGIAVVVNKKNKVNDLSTKQVKDIFTGKTTSWSDLSK

SEQ ID NO: 17189 - protein, 282 aa, Streptococcus agalactiae
TTGACTTTACCTTCTAATTTGTTACTAGAGGTAAATAGGCTAAAGGAATGTTTTGCTGATTATATTATTTTTCTAGATGCAGATGAGACGGTCCTATACCAACGTCAAAAAAATGATTTTAATAGACGGCGTCATTTTTTCAAATGGTATACTCATCACCTGTTGCCTGCTAAAAAACATTATTTAGACACATTTTCCAATGTTATTCATATTAATACAAATCATTTAAATGCTGAAGAAGTGGCTGAAAAAATCATTGACATCATTCGTAAGTTAACTCTA

SEQ ID NO: 17190 - protein, 94 aa, Streptococcus agalactiae
MTLPSNLLLEVNRLKECFADYIIFLDADETVLYQRQKNDFNRRRHFFKWYTHHLLPAKKHYLDTFSNVIHINTNHLNAEEVAEKIIDIIRKLTL

SEQ ID NO: 17191 - DNA, 303 bp, Streptococcus agalactiae
atgattattgctattcaaggtgatatggctgtagggaaaaccacagctttgaaaatcattgagaaagtttacccgaaaatcgctattagttttgaggatatttcaccagtagttgataagattaataaacatcagcttgataacaataaattagacgattattgtgaaattcaacaactatttattcagcatgagcgagatagatacgaacttgttagagataatgaaatagtgttaatggattatggagctgaggaaattgctttctatacacaatactttccaaaggtggcgggttatagt

SEQ ID NO: 17192 - protein, 101 aa, Streptococcus agalactiae
MIIAIQGDMAVGKTTALKIIEKVYPKIAISFEDISPVVDKINKHQLDNNKLDDYCEIQQLFIQHERDRYELVRDNEIVLMDYGAEEIAFYTQYFPKVAGYS

SEQ ID NO: 17193 - DNA, 738 bp, Streptococcus agalactiae
atgcaacagtattttgtaaatggcaaagcagatgactttgtgaccatcgaggacaaggataccatcaagcacatgttcaatgtcatgcgattgacagaagatgaccaagtggtcttggtttttgatgatgccatcaagcgtctggcaaaggtggtggacagctctgcccatcgcttccaaattctagaagagctagacagcaatgttgaaatgcctgtccaagtgaccatcgcctcaggttttcccaagggagacaagttggattttgtgacgcaaaaggcaacagaattgggtgctgcggctatctggggattcccagctgactggtcagtcgtcaagtgggacggcaagaaactagctaaaaaagaagataagctggcaaaaattgctctgggcgcagcggagcagagcaagcgtaatcgtcttcctcaggttcgtttatttgagaagaaggctgattttcaagcggagcttgcaggctttgataagatttttatcgcctatgaagagtctgccaaggagggtgaaatgtcagcgttagcccagaatttgcagactgtaaaagcaggtgacaagctcctcttcatctttggaccagaagggggcatttctccaaaagaaatcgcagcttttgaagaggttggagctatcaaggtgggcctgggtccacgcatcatgcgcacagaaacagcaccgctctatgctctaagtgttattagttactcagcggagttatta

SEQ ID NO: 17194 - protein, 246 aa, Streptococcus agalactiae
MQQYFVNGKADDFVTIEDKDTIKHMFNVMRLTEDDQVVLVFDDAIKRLAKVVDSSAHRFQILEELDSNVEMPVQVTIASGFPKGDKLDFVTQKATELGAAAIWGFPADWSVVKWDGKKLAKKEDKLAKIALGAAEQSKRNRLPQVRLFEKKADFQAELAGFDKIFIAYEESAKEGEMSALAQNLQTVKAGDKLLFIFGPEGGISPKEIAAFEEVGAIKVGLGPRIMRTETAPLYALSVISYSAELL

SEQ ID NO: 17195 - DNA, 951 bp, Streptococcus agalactiae
atgaacacatggaatgaactaacggttcacgtgaatcgtgaggcagaggaagctgtctcgaatttattgattgaaactggcagtcagggggttgccattagcgactcggctgattatcttggacaggaggatcgtttcggcgagctttatcctgaggtggagcaatctgatatgatcgctattactgcctattatcctgatacgcttgatattgaggcggttaaggctgatctggctgatcgtttggctaattttgaaggctttggtcttgcgacgggtagcgtcaaccttgacagtcaggaattggttgaagaggactgggctgataactggaagaagtactatgagccagctcgcattacccatgatttgaccatcgtgccgtcatggacggactacgaggctaaggctggtgagaagattatcaagctggatcctggtatggcttttgggactgggactcacccaacgactaagatgagtctttttgccttggagcaagtgcttcgtggtggtgagacggttatcgatgtggggactggttctggcgttttgtctattgctagctctctcttgggtgccaaggacatctatgcttatgatttggatgatgttgcggtgcgcgtggctcaggaaaatatcgatatgaaccctggtactgataatattcatgtggctgctggtgacctgctcaaaggtgtccagcaagaggcagatgtcattattgccaatattttggcggatattttgatccatctgacagacgatgcctaccgtttggtcaaggatgagggttatctcatcatgtctggtatcatttctgaaaaatgggacatggtgcgtgagagtgctgaaaaagctggtttcttccttgagactcacatggttcaaggtgagtggaatgcctgtgttttcaaaaagacagatgatatttcaggagtgattggcggc

SEQ ID NO: 17196 - protein, 317 aa, Streptococcus agalactiae
MNTWNELTVHVNREAEEAVSNLLIETGSQGVAISDSADYLGQEDRFGELYPEVEQSDMIAITAYYPDTLDIEAVKADLADRLANFEGFGLATGSVNLDSQELVEEDWADNWKKYYEPARITHDLTIVPSWTDYEAKAGEKIIKLDPGMAFGTGTHPTTKMSLFALEQVLRGGETVIDVGTGSGVLSIASSLLGAKDIYAYDLDDVAVRVAQENIDMNPGTDNIHVAAGDLLKGVQQEADVIIANILADILIHLTDDAYRLVKDEGYLIMSGIISEKWDMVRESAEKAGFFLETHMVQGEWNACVFKKTDDISGVIGG

SEQ ID NO: 17197 - DNA, 306 bp, Streptococcus agalactiae
atggggtattttacagtattttggcagaaagatggaaatggtaaaaatattcctttttatgaacaagatgaagtggaagatttgattattgtcattaaagatggtaggaggaaaggtttgttcatcattcccaaagaggttgcagtgagtaagggtattctttcatctgctaactctcaaggaaagatggctatgcgattttactctccttggtgtagcgatttaaatagaacagctttggtgacacagcgatggcagttgaactattttattgatttaagtaaaaataatgaaggagttactaca

SEQ ID NO: 17198 - protein, 102 aa, Streptococcus agalactiae
MGYFTVFWQKDGNGKNIPFYEQDEVEDLIIVIKDGRRKGLFIIPKEVAVSKGILSSANSQGKMAMRFYSPWCSDLNRTALVTQRWQLNYFIDLSKNNEGVTT

SEQ ID NO: 17199 - DNA, 714 bp, Streptococcus agalactiae
atgaaaacagttaaagaagtcagtatcttaagcggtgtaagtgtgcgcaccttacatcactatgataaaatcggtttattcccacctaccgccctatccgaagcaggctatcgactttatgacgatgaagcattgattcgcctgcaagaaattttgctatttcgtgagttggaattccctctcaaagatatcaaatacctgcttgagcaagcaaaagaggaaaggcaagacttattagcccaacaaatcaaattgcttgaatggaaaagatcgcatcttgagcaggttatcacccatgcgaaacgattacaagaaaaaggatatgattatatgaatttcgatgtttataataaaacagaattagaacaattacaagctgaagcaaaagaaaaatggggacaaacagcagcctaccaagaatttgctcaaaaacatgcttcagatgactttgcacaaattagccaagaaatggcaaaaataatggtacaatttgggcaattaaagacacaaaatgtatctgatgaatctgttcaaatgtgtgtgaaacggctacaagactatatctctcagcatttttacacctgtaccaatgaaatccttgctggactaggacaaatgtatcaatcagatgaccggtttagtcaatcaattgacaaagctggtggagcaggaacaagtgaatttgtcagccaagctattgcttactattgccaa

SEQ ID NO: 17200 - protein, 238 aa, Streptococcus agalactiae
MKTVKEVSILSGVSVRTLHHYDKIGLFPPTALSEAGYRLYDDEALIRLQEILLFRELEFPLKDIKYLLEQAKEERQDLLAQQIKLLEWKRSHLEQVITHAKRLQEKGYDYMNFDVYNKTELEQLQAEAKEKWGQTAAYQEFAQKHASDDFAQISQEMAKIMVQFGQLKTQNVSDESVQMCVKRLQDYISQHFYTCTNEILAGLGQMYQSDDRFSQSIDKAGGAGTSEFVSQAIAYYCQ

SEQ ID NO: 17201 - protein, 468 aa, Streptococcus agalactiae
ATGATTACTTTACAAAAGGCGGAAGCTAGTGATTTAGAGAAGATTATTGCCATTCAGAGAGCTAGCTTTAAGGCAGTCTATGAGAAATACCACGATCAATACGATCCCTATGTGGAAGAAGTTGAGCAGATTCGATGGAAACTAGTGGAGCGACCAGATTGTTTCTATCATTTTGTCCTTGTTGATGAGACAATTGTTGGTTTTCTTAGATTGGTTATCAAGGACGAGGAGAAGCGTGCTTGGCTTGGTACGGCGGCTATTCTTCCCCAATATCAAGGACAGGGCTACGGCTCAGCAGCGATGGCTTTATTAGAGAAAACCTATCCTAAGCTTACAAAGTGGGATTTATGTACGATTGCGCAAGAAAAACTAATGGTCAGTTTTTATGAAAAATGTGGTTATCATTCAACCCATACCGAACCTGAGCAAGAAGGAATGGATATGGTCTATATGACAAAGAAGATAGAA

SEQ ID NO: 17202 - protein, 156 aa, Streptococcus agalactiae; identical to SEQ ID NO: 3568

SEQ ID NO: 17203 - protein, 456 aa, Streptococcus agalactiae
ATGGATATTTTTGATGAGTTATTTGATTTCTCAGGTGCAAAGATCGCTCTTTTCTGCGAGGGAAAGATTTTGACCAGCCTAAGAGATGATTTTCCAGATTTGCCCTATGCAGGCTTTTGGGACTTACCAGGCGATGGTCGTGAGGGCGATGAAACACCTTTGGAATGTCTTTTTCGAGAAGTTAGTGAAGAATTAAATCTGACCTTAACTCGAAACCATATTGATTGGGTCAAGACTTATAGGGGTATGCTGAACCCTGATAAATTATCGGTTTTTATGGTTGGACATATCAGTCAGAAAGAGTACGATAGCATTGTTCTAGGCGATGAAGGACAAGACTACAAGCTCATGTCCATTGACGAATTTTTAAGCCATAAAAAGGTCATTCCTCAGTTGCAGGAGAGGTTGAGAGATTATTTGGAGGTGGAAGATGATTACTTTACAAAAGGCGGAAGC

SEQ ID NO: 17204 - protein, 152 aa, Streptococcus agalactiae
MDIFDELFDFSGAKIALFCEGKILTSLRDDFPDLPYAGFWDLPGDGREGDETPLECLFREVSEELNLTLTRNHIDWVKTYRGMLNPDKLSVFMVGHISQKEYDSIVLGDEGQDYKLMSIDEFLSHKKVIPQLQERLRDYLEVEDDYFTKGGS

SEQ ID NO: 17205 - protein, 141 aa, Streptococcus agalactiae
ATGGATTTGCTAAAATGTGGATATACATTGGATGATATAGAAACAGCCAGACCAGAGGATATGGAACGTTATTATCCCCCTGAACAAATCAGAAAATATGGAGCTTTAGGAATAGAATTGAGGTTATTGCATGGATATTTT

SEQ ID NO: 17206 - protein, 47 aa, Streptococcus agalactiae
MDLLKCGYTLDDIETARPEDMERYYPPEQIRKYGALGIELRLLHGYF

SEQ ID NO: 17207 - protein, 468 aa, Streptococcus agalactiae
ATGGCTAAATTTGGATTTTTATCGGTACTAGAAGAAGAATTGGATAAGCATTTACAGTATGACTTTGCCATGGATTGGGATAAGAAAAATCATACTGTAGAAGTCACTTTTATATTAGAAGCACAAAACAGCTCTGCTATTGAAACCGTGGACGACCAGGGGGAGATGAGTAGCGAGGACATCGTTTTTGAGGACTATGTACTCTTTTACAACCCTGTCAAGTCTCGCTTTGATGCTGAGGACTATCTGGTGACTATCCCCTATGAGCCTAAGAAGGGCTTGTCGCGTGAGTTTCTGGCTTATTTTGCGGAGACTCTCAACGAGGTTGCCACTGAAGGGTTGAGCGACCTCATGGACTTCCTCACCGATGACAGTATCGAAGAGTTCGGTCTTTCTTGGGATACGGATGCTTTTGAAAATGGCAGAGCAGAACTGAAAGAGACAGAGTTTTACCCTTATCCGAGATAT

SEQ ID NO: 17208 - protein, 156 aa, Streptococcus agalactiae
MAKFGFLSVLEEELDKHLQYDFAMDWDKKNHTVEVTFILEAQNSSAIETVDDQGEMSSEDIVFEDYVLFYNPVKSRFDAEDYLVTIPYEPKKGLSREFLAYFAETLNEVATEGLSDLMDFLTDDSIEEFGLSWDTDAFENGRAELKETEFYPYPRY

SEQ ID NO: 17209 - protein, 489 aa, Streptococcus agalactiae
ATGATTATCAGACCTATGCAGAACTGCGACCGTGAGGCAGTTCTGACCTTACAAAATACTGGCTGGACTGCTCTTACCTCTCCTGTCTATGACCACAAGTGGACTGAGAGTGACTTGGAGAAGAATCTGGCAAATGGCATGTCCTTCTTTGTCGCTGAGATCGATGATAAGATCGCTGGCGTCTTGGACTTTGGTCCCTACTATCCTTTCCCAGCTGGCAAGCATGTTGCCACTTTCGGCATTCTCATCGCTGAACCCTACCAAGGTCAGGGGCTAGGTAAGGCTCTCTTGAAAGCTCTGCTAACTGAGGCTAAAGCTCAAGGTTACATCAAGATTGCCATGCACGTCATGGGCAACAATAGTAGAGCCATTTCCCTCTATCAAAAATACGGTTTTACCGAAGAGGCTCGAATCACTAAAGCCTTTTTCATTGAAAATCATTATGTTGATGCTTTAATTTTCGCAAAAGATTTGGAGAATAATCATGGC

SEQ ID NO: 17210 - protein, 163 aa, Streptococcus agalactiae
MIIRPMQNCDREAVLTLQNTGWTALTSPVYDHKWTESDLEKNLANGMSFFVAEIDDKIAGVLDFGPYYPFPAGKHVATFGILIAEPYQGQGLGKALLKALLTEAKAQGYIKIAMHVMGNNSRAISLYQKYGFTEEARITKAFFIENHYVDALIFAKDLENNHG

SEQ ID NO: 17211 - protein, 1266 aa, Streptococcus agalactiae
ATGGCTGACAATCTTGCTCTACGTATGCGTCCTCGCAATATTAATGAAGTCATTGGGCAGCAACATCTCGTTGGTAATGGCAAAATTATTGATCGAATGGTTGCAGCTAATATGTTATCTTCCATGATCCTATATGGACCACCAGGTATTGGGAAGACTTCTATTGCTTCTGCTATTGCTGGTACTACTAAATATGCCTTTCGTACTTTTAATGCCACTGTTGATAGTAAAAAACGTCTTCAAGAAATTGCAGAAGAAGCTAAATTTTCTGGTGGCTTAGTTTTATTACTTGACGAGATTCATAGACTTGACAAGACAAAACAAGATTTTCTTTTACCTTTACTTGAGAATGGCAATATTATTATGATTGGAGCAACAACTGAAAATCCTTTCTTTTCAGTAACTCCTGCCATTAGAAGTAGGGTACAAATTTTTGAGCTAGAACCTCTTTCTAACGAGGATATTAAAAAAGCCATTCAACTAGCAATTTCCGATAAAGAACGGGGATTTCCTTTTTTAGTGACAATTGATGATGGGGCGCTAGATTTCATTGTTACCGCCACAAATGGAGACCTACGATCTGCTTATAATTCCTTGGATCTAGCAGTCATGTCTACTTCTCCTAACGAAGATGGTAGCCGTCATATTAGTCTAGAGACAATGGAAAATAGTCTGCAACGTAGTTATATTACAATGGATAAAAACGGAGATGGGCATTATGATGTCCTATCAGCCTTACAAAAATCAATTAGAGGTTCTGATGTCAATGCCAGCCTGCACTATGCCGCTCGTTTAGTAGAAGCTGGAGATTTACCTAGTTTAGCAAGACGTTTGACCATTATTGCTTATGAAGATATCGGCTTAGCTAACCCCGAAGCACAAATACATACTGTGACTGCATTGGAAGCTGCCCAACGCATTGGTTTTCCAGAAGCTCGTATTCTTATTGCTAACATTGTTGTGGATTTAGCTCTATCACCTAAATCAAATTCAGCCTATTTGGCTATGGATGCAGCCTTAGCTGATTTACGTCGTTCAGGAAATTTACCTATTCCACGTCACCTAAGAGATGGACATTACAGCGGTAGTAAAACCTTGGGCAATGCAAGGGATTACAAGTACCCTCACGCCTATCCTGAAAAATGGGTTAAACAACAATACTTACCAGATAAACTAGTAGGACATAATTATTTTGAAGCCAATGAAACTGGTAAATACGAACGTGCACTTGGTTCAAATAAAGAGCGCATTGATAAGCTCTCAGAC

SEQ ID NO: 17212 - protein, 422 aa, Streptococcus agalactiae
MADNLALRMRPRNINEVIGQQHLVGNGKIIDRMVAANMLSSMILYGPPGIGKTSIASAIAGTTKYAFRTFNATVDSKKRLQEIAEEAKFSGGLVLLLDEIHRLDKTKQDFLLPLLENGNIIMIGATTENPFFSVTPAIRSRVQIFELEPLSNEDIKKAIQLAISDKERGFPFLVTIDDGALDFIVTATNGDLRSAYNSLDLAVMSTSPNEDGSRHISLETMENSLQRSYITMDKNGDGHYDVLSALQKSIRGSDVNASLHYAARLVEAGDLPSLARRLTIIAYEDIGLANPEAQIHTVTALEAAQRIGFPEARILIANIVVDLALSPKSNSAYLAMDAALADLRRSGNLPIPRHLRDGHYSGSKTLGNARDYKYPHAYPEKWVKQQYLPDKLVGHNYFEANETGKYERALGSNKERIDKLSD

SEQ ID NO: 17213 - protein, 192 aa, Streptococcus agalactiae
GTGGATTCGTATGCCACAGCAATGTTTCTATGTCTTTATGATACCACTTTTTATAAAATTTTCAAGCAAAATTATCGATTTTTGAAATCGATTGCGATTTTTAAAACTGGCAATCAGTCTGAGAGCTTATCAATGCGCTCTTTATTTGAACCAAGTGCACGTTCGTATTTACCAGTTTCATTGGCTTCAAAA

SEQ ID NO: 17214 - protein, 64 aa, Streptococcus agalactiae
MDSYATAMFLCLYDTTFYKIFKQNYRFLKSIAIFKTGNQSESLSMRSLFEPSARSYLPVSLASK

SEQ ID NO: 17215 - protein, 1119 aa, Streptococcus agalactiae
ATGGCAACATATAGACAAAGAGGTAAAAAGAAATTATGGGATTATAGAATATTCAATGAAAAAAGTGAGTTAGTTGCTTCTGGTTCAGGTTTTAAGACAAAGCGTGAAGCTATGAATGAAGCTATGAGGATAGAGCAACAAAAGTTATTAGTAAATTCTATATCTTCTGATATAACATTGTATGATTTGTGGTTTGAATGGTACAGTTTAATTATAAAGCCTAGCAATCTAGCAGAGACTACAAAGAACAAATATTTTACAAGAGGTTCTGTTATTCGTAAACTTTTTGGAAATCAGAAAGTAAATAAAATAAAGCATAGTGCGTATCAGAGGAAATTAAATACGTACGCTGAAAAATACACTAAAAACCATGTTAGAAGGTTAAATTCAGATATAAAAAAAGCTATCCAATTTGCTAAAAGAGATGGTGTCTTATTATCTGATTTTACTGATGGAGTTGTCATAGCTGGTAGGAAATTTGTTAAGGATGCAGATGATAAATATCTACATAGTATTTTTGATTACAAGAAAGTGATATCTTATTTAGAAAACAATTTGGATTATTCAAATAGTATCGTTTATTATTTATTACTGGTGCTATTTAAAACAGGTTTACGAGTGGGTGAAGCTTTAGCATTAACTTGGGATGATGTTAATTTTGAAGATCTAGAAATTAAGACGTATCGAAGATTTAGTGGCGATAAGGGAACTTTTAGTCCACCTAAAACAAAAACTTCTATCCGCACTATTCCTATTAGTCAATCTTTAGCATTAATCTTAAGAGATTTGAAGGATGATCAGCAAGTTATGTTGAAAAACTTAAAAATTGTAAACATGAATAATCAAATATTTTATGACTATAGATATGGTGTTTCGACAAATAGTGCGATAAATAAAAGTCTTAAAAATGTTTTAAAAATATTAAATATTAATTCAAAAATGACTGCAACAGGTGCAAGGCATACTTATGGAAGTTACTTATTAGCAAAAGGTGTAGATATTTGGGTAGTTGCAAGATTAATGGGTCATAAGGATATTACACAGTTACTTGAAACTTATGGTCACGTCTTGACAGAAGTAATAAATAAGGAATATGAAACGGTCAGAAGTTTAGTATCT

SEQ ID NO: 17216 - protein, 373 aa, Streptococcus agalactiae; identical to SEQ ID NO: 3584

SEQ ID NO: 17217 - protein, 324 aa, Streptococcus agalactiae
ATGCAACAGGTTTTTAATGTGAGTGTTCCTGTACCAGATGATGTTGTTATTATTTCAAAAGAAGAATATTTAAATTTATTAAGTGATAATGAACAAGGCAAGTGGTGGGATATTGATAACTTGCAAGAGTTATTGGGAATTGGAAGGTCAAAATTGATTAATGATATTTTGTTAAATCCAGATATAAAAAAAGAAGTAGATTTATCAATTAATCCAAATGGTTTTATTGTTTATCCGAAAGGTAAAGGTAGTCGATATAAAATATTAGCAACAAAAGCTAGAAAATATTTTGAAGATAATTTTGGTTCTATTTTATTAAATAGT

SEQ ID NO: 17218 - protein, 108 aa, Streptococcus agalactiae; identical to SEQ ID NO: 3586

SEQ ID NO: 17219 - protein, 630 aa, Streptococcus agalactiae
ATGATAGGGGATTATTCAGTAATGGATTGGGCTACTTTAGGTGGTGTTGTAGGAATTATTTTTACAAATGTGGGAGTTTTGATTTCAAACTCTAGGGATAATAAAGCTATTCAACGAGAACTTGAGCTTTTAGAAGAAGGTCAAGAGAAATTGGTAGACGAATTTTCCAAAATTTCGACAAATCAATATGATAAATATGTTCTGATACAAAGCAATTTATCAAACAATATTGAAAAGAATAAACAAGAATTAGTTCAAAAAAACTCATATGTTAAAGAAGATACTAAATATATCCGTGATGAAATGCTTATTGAGAAAAAGTCAAAGGAAGAAGTTTATAATCATGTGAAAAATGGAGATAAACTTATTGAAAAAATGGCTTTTGCTAATGAATTAATTTTGAAGTTTGGTGAAGTAAGCAGAGAAAATCAAATGTTAGGCTTAAAAGTTAATTCTTTAGAGGAAAAAATAGTCGATTTATCAAATCAACCTAAAAATGATGAAATATCAAAATTACGTAAATCAATTTCAAGTTTTGAAAGGGAATTATCTAGGTTTGAGGATGTCGGTTATAGCGAAGCAGAAGAAATAAAAAGTACTTTAAGAAGAATATTAAATGATCTTGAAGGA

SEQ ID NO: 17220 - protein, 210 aa, Streptococcus agalactiae; identical to SEQ ID NO: 3588

SEQ ID NO: 17221 - protein, 789 aa, Streptococcus agalactiae
ATGTCAAAAGTAAAAGTTTTAAGTTTAATTACTGTTTCAGGACTATTTTTAATGGCTGGTAATTTATCAGCAAGTGCAGATGTTGTAACTAGTGGAGGTGATACTATAATGCTATCAGGGGTAGATGCAGGTGTATCTGATTCTATAATGCCACCACCATCAAGTATAAATCCAGTAACAGATACCACAGAACCAAGTGCGCCAACACCAAGTACAGATCCAATAACAGATACCACAGAACCAAGTGCGCCAACACCAAGTACAGATCCAATAACAGATACCACAGAACCAAGTGCACCAACACCAAGTACAGATCAAACAACAGGTACGACAGATTCAAGTACTCCATCATCAAGTACAACAAATCCAGTAGATGGAATTACTGATAATGGTACTAAACCAAATGCCGGTATTGACAAACCTTCTACGAATAAACCTAGTGATCATTCAGAATCATCTATAAAACCAGTAACAAAGCCAACTATTAATCAACCTATTACAACTGTAACAGGAGATCAAGTCATTGGTACTCAAGATGGTAAAGTTTTAGTACAGACACCATCAGGTACGCAATTAAAAGATGCTGCTGAAGTTGGTGGAAATGTTCAAAAAGACGGTACTGTAGCAATTAAAAAATCAGATGGAAAAATAGAAGTATTGCCAAAAACTGGTGAGGGTAAGACTATCTTTACAATAGTAGGTCTCTTGTTAATTGCTGGAGCAGTTTGGATTGGTTTTAAAGATAATATAAAAAAGTATTTAACCTTTTTCAAAAAGAAAAGTGAAAAA

SEQ ID NO: 17222 - protein, 263 aa, Streptococcus agalactiae; identical to SEQ ID NO: 3590

SEQ ID NO: 17223 - protein, 189 aa, Streptococcus agalactiae
ATGGCTGGTTATCATTTTGATTTGGAAAGTTTACAAGTATATGAGTCAGATGCGAGTAATGTTTATCAGTTTACTATTAATTTAGTAACAGATAAAAGAGACAAATTAAGTTTAGCTGGTAATTATGTATTAGGTACAGACCAATTTGAGATTGCGAGTGTACATGGTACACCTGTAAATGTAGTATTT

SEQ ID NO: 17224 - protein, 63 aa, Streptococcus agalactiae
MAGYHFDLESLQVYESDASNVYQFTINLVTDKRDKLSLAGNYVLGTDQFEIASVHGTPVNVVF

SEQ ID NO: 17225 - protein, 626 aa, Streptococcus agalactiae
ATGGAAAATATTAACCAAAGAACGTCAAAACAATATTTAGCATCTTTAAAAAAAGATCCCCTTTCCTTCTTTCTTTTTGCTATTGTCTATTTGGGAGCAATTCTAAGTTTTGCTACAATTGCATTTGTTGTTATTTATATTTTAGTTAAGGGGCTTCCTCATGTGAATACTGGCTTGTTTGCATGGACTTATAATACTCAGAACGTCTCACTATTACCAGCTTTCATTAACACTATCTTTATCATCGCCTTAACTTTATTATTTGCAGTTCCCCTTGGTATTGGTGGATCAATTTATCTAACGGAATATGCTAGACGTGATAATCCTTATCTCAAAATTATCCGTGTTGCAACCGAGACATTGGCAGGGATACCTTCAATTATTTATGGTTTATTTGGTGCATTATTTTTTGTAAAATACACACACTTAGGCTTATCTTGATATCGGGTTCTCTGACTTTGAGCATCATGATTTTACCTTTGATTATGAGGACAACTGAAGAAGCTTTACTATCTGTTCCGGATTCTTATCGAGAAGGAGCCTTTGCGCTTGGTGCTGGTAAATTGAGAACCATATTTAAAATCGTATTACCTAGTGCTATGTCTGGTATTTTTGCTGGTATATTT

SEQ ID NO: 17226 - protein, 209 aa, Streptococcus agalactiae
MENINQRTSKQYLASLKKDPLSFFLFAIVYLGAILSFATIAFVVIYILVKGLPHVNTGLFAWTYNTQNVSLLPAFINTIFIIALTLLFAVPLGIGGSIYLTEYARRDNPYLKIIRVATETLAGIPSIIYGLFGALFFVKYTHLGLSLISGSLTLSIMILPLIMRTTEEALLSVPDSYREGAFALGAGKLRTIFKIVLPSAMSGIFAGIF

SEQ ID NO: 17227 - protein, 166 aa, Streptococcus agalactiae
TCCTCAATCGCTGACATCAGGCGTTAGAACTCTAACCACTAATATGTCATGGGAAATGGGATATTCTTCTGGTTTGCATCGTCAAGCCTTAATTGGTACAGCTGTGGTACTCTTTATCTTTATATTAATGATTAATATCAGTTTTTCAGCATTACAGAAAGAGGAA

SEQ ID NO: 17228 - protein, 56 aa, Streptococcus agalactiae
LPQSLTSGVRTLTTNMSWEMGYSSGLHRQALIGTAVVLFIFILMINISFSALQKEE

SEQ ID NO: 17229 - protein, 633 aa, Streptococcus agalactiae
ATGCTAACCACTGTCTCTAAAGACCCGTCAGCTATTGGTTATTCTTCACTAGGTTCATTAAATAGTAGCGTTAAAGTGCTTAAAATTGATGGCAAAAATGCGACTGTAAAAGATATTAAATCAGGAAGCTATAAGATTTCTCGTCCTTTCAATATTGTAACAAAAGAAGGTAAGGAAAAAGAAGCAACAAAAGATTTTATTGATTATATCTTAAGCAAAGATGGGCAAGCAGTCGTTGAGAAAAATGGCTATATTCCACTTGACAATGCTAAAGCATATCAAGCAAAAGTGTCATCTGGTAAAGTTGTTATAGCAGGTTCAAGTTCAGTAACGCCGGTTATGGAAAAGATTAAAGAAGCCTATCATAAAGTAAATACAAAAGTAGATGTTGAAATTCAACAAAGTGATTCTTCAACTGGGATTACAAGCGCAATTGATGGATCAGCAGATATAGGTATGGCATCACGTGAATTGGATAAGACAGAGTCATCCAAAGGGGTCAAAGCTACTGTTATTGCAACAGATGGTATTGCAGTAGTTGTTAATAAGAAAAATAAAGTTAATGATCTATCAACAAAACAAGTAAAAGACATTTTTACTGGAAAGACAACGTCTTGGTCTGACTTTATCAAG

SEQ ID NO: 17230 - protein, 211 aa, Streptococcus agalactiae
MLTTVSKDPSAIGYSSLGSLNSSVKVLKIDGKNATVKDIKSGSYKISRPFNIVTKEGKEKEATKDFIDYILSKDGQAVVEKNGYIPLDNAKAYQAKVSSGKVVIAGSSSVTPVMEKIKEAYHKVNTKVDVEIQQSDSSTGITSAIDGSADIGMASRELDKTESSKGVKATVIATDGIAVVVNKKNKVNDLSTKQVKDIFTGKTTSWSDFIK

SEQ ID NO: 17231 - protein, 246 aa, Streptococcus agalactiae
ATGGCAAAAATAATGGTACAATTTGGGCAATTAAAGACACAAAATGTATCTGATGAATCTGTTCAAATGTGTGTGAAACGGCTACAAGACTATATCTCTCAGCATTTTTACACCTGTACCAATGAAATCCTTGCTGGACTAGGACAAATGTATCAATCAGATGACCGGTTTAGTCAATCAATTGACAAAGCTGGTGGAGCAGGAACAAGTGAATTTGTCAGCCAAGCTATTGCTTACTATTGCCAA

SEQ ID NO: 17232 - protein, 82 aa, Streptococcus agalactiae; identical to SEQ ID NO: 3566

SEQ ID NO: 17233 - protein, 258 aa, Streptococcus agalactiae
TTGGTTATCAAGGACGAGGAGAAGCGTGCTTGGCTTGGTACGGCGGCTATTCTTCCCCAATATCAAGGACAGGGCTACGGCTCAGCAGCGATGGCTTTATTAGAGAAAACCTATCCTAAGCTTACAAAGTGGGATTTATGTACGATTGCGCAAGAAAAACTAATGGTCAGTTTTTATGAAAAATGTGGTTATCATTCAACCCATACCGAACCTGAGCAAGAAGGAATGGATATGGTCTATATGACAAAGAAGATAGAA

SEQ ID NO: 17234 - protein, 86 aa, Streptococcus agalactiae
MVIKDEEKRAWLGTAAILPQYQGQGYGSAAMALLEKTYPKLTKWDLCTIAQEKLMVSFYEKCGYHSTHTEPEQEGMDMVYMTKKIE

SEQ ID NO: 17235 - protein, 546 aa, Streptococcus agalactiae
ATGAAACGTAGAAAAATAGTTTTATTTTTAATGGTGTTAGTGATGGCTTTTATAGTTTATAAAGTTATTCAAAAAGATAATCCAGTGATTAAAACAAGTGGTAATCATACAAAAGTTGAACGAGTTGAACCGAAACATAAGGTTAAGTCTTATGATTCAACTAAAGAAGCAAAATCTACTTTGGAAGCTAGTGATCGTCAAGTATCTGATAAGGAAAAGGAGAAGGTTAAAAGATCTATAACTGTACCTATTGATTACCTTGTAAAAATCCCAACACAATCAGATATTAAGGGTGATTATCAAAATAAATTATCCATTACAAATCCTACAGTTGCCCAAACTGTAAAAACCATGTTGATGGCTGGTTATCATTTTGATTTGGAAAGTTTACAAGTATATGAGTCAGATGCGAGTAATGTTTATCAGTTTACTATTAATTTAGTAACAGATAAAAGAGACAAATTAAGTTTAGCTGGTAATTATGTATTAGGTACAGACCAATTTGAGATTGCGAGTGTACATGGTACACCTGTAAATGTAGTATTT

SEQ ID NO: 17236 - protein, 182 aa, Streptococcus agalactiae
MKRRKIVLFLMVLVMAFIVYKVIQKDNPVIKTSGNHTKVERVEPKHKVKSYDSTKEAKSTLEASDRQVSDKEKEKVKRSITVPIDYLVKIPTQSDIKGDYQNKLSITNPTVAQTVKTMLMAGYHFDLESLQVYESDASNVYQFTINLVTDKRDKLSLAGNYVLGTDQFEIASVHGTPVNVVF

SEQ ID NO: 17237 - protein, 1371 aa, Streptococcus agalactiae; identical to SEQ ID NO: 8275

SEQ ID NO: 17238 - protein, 457 aa, Streptococcus agalactiae; identical to SEQ ID NO: 8276

SEQ ID NO: 17239 - protein, 1997 aa, Streptococcus agalactiae
ATGGACAAAATAGATGATGGTTTGATTGCTTCGACCTTTGCGAAGGTAAAAGATGTGGATATATTTGCGTTAAAGGCTTATATGGAGATAACTCACGGAGCTGAGACTGGAGCTCAAAGCATTTTGTTAGATGTTTTTGTTAATTTTCCCTTTTTCCTACTTAACTTGATTGTGGTTTATTTTCTGTTATTCTACGCTTTTTTGAAAATTTCAGTTTGTATGATACCTATAAACAAACAGTTTATCATTCGTCTCAAAAATTATGGGAAAATCTATCAGGTAATGGGTCTTATACAAGCTCCTTGCTTTATTTATTGGTTGCGATTTCAGCTTTTTCAATATTTATTTCATATCTTTTTTCAAAAGGAGATTTTTCTAAACGTTTGATCCACTTGTTCGTGGTTATCATTTTAGGTATGGGTTACTTTGGTACGATTCAATCAACATCAGGTGGTATTTATATTTTAGATACCGTTCATCAACTAGCTGGTTCGTTTTCAGATGCGGTAACTAATTTATCACTGGATAATCCATCAGGTGGTAAAACAAAGATCACACAAAAATCATCAGTAGCTGATAATTATGTGATGAAAACTTCTTATACGGCTTATTTGTTTGTCAATACTGGTCAGTTAAATGGTAAGTTTCACAATAATCAAACAGGTAAAGAAGAAAAGTTTGATAACGAACAAGTTTTAGGTAAGTACGATAAATCAGGTAAATTTATCACTCCAAAACAAAAGGATATATTGAATTATACTGATAATTTGGGAGATAAGGCAACCGAAGGGGAGGAAAAAAATAGATGGCTTTCTGCAGTAAATGATTATCTTTGGATAAAATCAGGCTATGTTATCTTAAAGATTTTTGAAGCGGTTATACTCGCAGTTCCATTAATACTCATTCAGTTAATTGCTTTTATGGCAGATGTTTTAGTGATTATATTAATGTTTATTTTTCCATTAGCTTTATTAGTTTCATTTTTGCCTAGAATGCAAGATATCATTTTCAATGTTTTGAAAGTCATGTTTGGGGCTGTTTCCTTTCCTGCCTTAGCTGGTTTTTTAACCTTGATAGTCTTCTATACTCAAACTTTAATAGCCACCTTTGTTAAGAAAAAATTTACAGATGGTTCCCTGCTTAGTGGTAGTAATTTTAAAGGTCAGGCAATACTGTTTATGTTGCTAATAACAGTTTTCGTCCAAGGTTGTGTGTTTTGGGGAATTTGGAAATATAAAGAAACTTTCTTAAGACTGATTATAGGGTCTAGAGCTTCTCAAGTCATTAATCAGTCTGTAGATAAAATTAATGAAAAAGCAGAAAATCTAGGAATTACGCCAAAATCCATTTATGAGAGGGCACACGATATGTCAAGCCTTGCCATGATGGGAGCTGGCTATGGTGTTGGTACAATGATGAATGCACAAGATAATTGGAATGCTTTCAAAGAAAGACAACAAGCTAATTTAGATGATGGTCAGTCTAAAACTAATGATGCTGATAAGTATGATGAAGCTAATGCGGATGATACTGTTATTTCTAAAGAGGCTGAGCTGACTAATGAAGGTGAATATCAATCAGAGTTACCTAAAGAAGCAAGTAAAAGGATTGAACAATTGGGAAAGGAATCTTCTTATGAGCTATCGTTTATATCAGAAGGTAATTCAACAGAGGAAATTTTAAAAAATGTTAAGTCGGATAATCACACGTTTCAAGAAGGAGATGGAGATACTTCATTAACAAATCAGGATATGATAACAAATGATATAGAAAATCATTCAAATAACTATACTTCACCATTAAAACAGCGAAAGCTTAATAAGCTAGAGGGTGAATTAAGTCAATTTAATAGTGATGTATCCATGACAAAAAATCATGGTAAAAATGCTTTTGAAAAGGGATTTAATGCCAGTAAAACTAAGGAAGTTAGAAAGCAACATAATCTTGAACGACAGTCAAAAGTTTTGGAAGAACTAGAAAAGCTGAGAGAAGGTAAG

SEQ ID NO: 17240 - protein, 666 aa, Streptococcus agalactiae
MDKIDDGLIASTFAKVKDVDIFALKAYMEITHGAETGAQSILLDVFVNFPFFLLNLIVGLFSVILRFFENFSLYDTYKQTVYHSSQKLWENLSGNGSYTSSLLYLLVAISAFSIFISYLFSKGDFSKRLIHLFVVIILGMGYFGTIQSTSGGIYILDTVHQLAGSFSDAVTNLSLDNPSGGKTKITQKSSVADNYVMKTSYTAYLFVNTGQLNGKFHNNQTGKEEKFDNEQVLGKYDKSGKFITPKQKDILNYTDNLGDKATEGEEKNRWLSAVNDYLWIKSGYVILKIFEAVILAVPLILIQLIAFMADVLVIILMFIFPLALLVSFLPRMQDIIFNVLKVMFGAVSFPALAGFLTLIVFYTQTLIATFVKKKFTDGSLLSGSNFKGQAILFMLLITVFVQGCVFWGIWKYKETFLRLIIGSRASQVINQSVDKINEKAENLGITPKSIYERAHDMSSLAMMGAGYGVGTMMNAQDNWNAFKERQQANLDDGQSKTNDADKYDEANADDTVISKEAELTNEGEYQSELPKEASKRIEQLGKESSYELSFISEGNSTEEILKNVKSDNHTFQEGDGDTSLTNQDMITNDIENHSNNYTSPLKQRKLNKLEGELSQFNSDVSMTKNHGKNAFEKGFNASKTKEVRKQHNLERQSKVLEELEKLREGK

SEQ ID NO: 17241 - protein, 2268 aa, Streptococcus agalactiae
ATGTCGGATTTTGAAGCGGATCTAGCAGATGATGTTAAAGAATTAGGGTTAGAAACACTCGATTTTACAGTTGATACGTTAACACATGAAATGGAGATACCGTATCAGTTTGATTGGTTAATTGGAGTTGATCTTGGTAAAGGGCAATACAATGCTAATATAAAAGAATTTATTTATAATCAGTTTGAATCTATCGCATCAAACTTCGCTTCTTTAGCTGGTTATGAGGTAGAAGTAGATGAAGATTGGTATAAAGAACATTCAGAAGAAGAATTACTTGTCTATAGTTTATTGTCTACCCTGAAAGCCAAAAGATTAACGGATGTTGATTTATTTTATTATCAACGGATGCAATTTTTAAGATATGTTCCCCATACTAAAAGTGAGGTTATAGCTAATCGGAATATGTTAAATGTGACAGATACGTTGATTAAATCACTAGAAGGTGGTTTTTTAAAATTGGAGAGTGCTTATGGGAGTTCATTTGTATCCGTTCTTCCAGTAGGTCGGTTCTCTACCATATTTAATGGCTTTCATCTTGGTGAACTAGTTCAAAGAATGAGTTTTCCGGTTGAATTAAGATTTAAAGCGGAATTTATAGATAAGACAAAATTGGGTGGCACTATGGGTCGCTCAAATACACGCTATGATCAAATCATGAAAGAAGCTTATAACACAAATACGGTTCAACAAGATGATATCTTGATGGGAGCATATTCGCTTAAGGATCTTATGAAAAAAGTTGGAAATAAGGAAGAAATCATAGAGTATGGTTGTTATTTGGTAGTTGCTGGTTCTAGTTTAAATCAACTAAAACAACGTAGATATGCCATTTTAAGTTACTTTGATGATATGAAAGTCAATGTTTATGAAGCCAGTCATGATACACCATATTTATTTCAAGCGTTACTTTATGGTCAAGATTTACAAAAAACAACTCGTAAGTGGAATCATTTAGTAACTGCTCGAGGTTTTTCGGAGTTGATGCTTTTTACAAATACCCAATCAGGTAACAGGATTGGTTGGTATATTGGACGAGTAGATAATCGTTTAACTGCTTGGGATTCTATTGACGAAGCTATTATGGGATCTAAAAATCTTGTCTTATTTAATGCGACAGTCGCGAATAAAGAAGATGTTGCTGGTAAGGTTACTAAAAATCCTCACGTGATTATAACTGGGGCGACAGGTCAAGGGAAATCATACTTAGCACAGATGATCTTTTTACATACTGCTCAACAAAATGTTCGTGTCCTTTATGTTGACCCTAAACGAGAACTACGGCAACACTATTTAAAAGTTGTTTCTGATCCAGAGTATGCACGTAAGTTTCCTCTACGTAAGAAGCAAATTGAGGAAACGAATTTTGTCACTCTTGATAGTTCTGTCAAAGAAAATCATGGTGTATTAGATCCTATTGTTATTCTTGATAAGGAAGGTGCTTCCTCAACGGCTAAAAATATGTTGCTTTATTTGTTAAAAAACGCTACAGAGATTAAATTAGATCAAACAACAGCTTTAACAGAAGCAATTAGTCAAGTCATTGCAAAACGTGAAGCTGGTGAAGTCGTTGGTTTTAATCAGGTTATTGAAGTTCTTATTGATTCTGAAAGTGATGAAGTTCAGTCAGTTGGTCGTTATTTTAAAGCTATTATTCAGAATTCTATTTTAGAGTTGGCATTTTCAGATGGTGATGTTGCTGGTCTTTCTTACGAAGAACGTGTGACAGTTTTAGAAGTTGCGGATTTATCATTGCCTAAGGACGGTTCAGATCATATATCTGATCATGAAAGTAATTCGATTGCTTTAATGTTTGCTTTAGGTGCGTTTTGTAAGCATTTTGGTGAGCGTAGTGATGATGAAACAGTTGAAATTTTTGATGAAGCATGGGTACTTATGCAATCCTCAGAAGGTAAGGCTGTTATCAAGTCTATGCGTCGTGTTGGTCGCTCTAAGTATAATGTGTTGATGCTAGTATCTCAATCGGTTCATGATGCAGAAAACGATGATGATACGACCGGCTTTGGGACAATTTTTTCATTTTATGAAAAATCGGAACGTGAAGATATTTTAAGTCATGTTGGTTTAGAAGTAACACCTAAGAATCTAGAATGGATTGATAATATGATTTCAGGTCAATGTCTTTATTATGATGTTTACGGTAACTTGAATATGATTTCGATACATAACATTCATCCAGATATTGATCCATTGTTAAAACCTATGAAGAAAACAGTATCAAGTCACCTTGAAAATAAATATGCTTCG

SEQ ID NO: 17242 - protein, 756 aa, Streptococcus agalactiae
MSDFEADLADDVKELGLETLDFTVDTLTHEMEIPYQFDWLIGVDLGKGQYNANIKEFIYNQFESIASNFASLAGYEVEVDEDWYKEHSEEELLVYSLLSTLKAKRLTDVDLFYYQRMQFLRYVPHTKSEVIANRNMLNVTDTLIKSLEGGFLKLESAYGSSFVSVLPVGRFSTIFNGFHLGELVQRMSFPVELRFKAEFIDKTKLGGTMGRSNTRYDQIMKEAYNTNTVQQDDILMGAYSLKDLMKKVGNKEEIIEYGCYLVVAGSSLNQLKQRRYAILSYFDDMKVNVYEASHDTPYLFQALLYGQDLQKTTRKWNHLVTARGFSELMLFTNTQSGNRIGWYIGRVDNRLTAWDSIDEAIMGSKNLVLFNATVANKEDVAGKVTKNPHVIITGATGQGKSYLAQMIFLHTAQQNVRVLYVDPKRELRQHYLKVVSDPEYARKFPLRKKQIEETNFVTLDSSVKENHGVLDPIVILDKEGASSTAKNMLLYLLKNATEIKLDQTTALTEAISQVIAKREAGEVVGFNQVIEVLIDSESDEVQSVGRYFKAIIQNSILELAFSDGDVAGLSYEERVTVLEVADLSLPKDGSDHISDHESNSIALMFALGAFCKHFGERSDDETVEIFDEAWVLMQSSEGKAVIKSMRRVGRSKYNVLMLVSQSVHDAENDDDTTGFGTIFSFYEKSEREDILSHVGLEVTPKNLEWIDNMISGQCLYYDVYGNLNMISIHNIHPDIDPLLKPMKKTVSSHLENKYAS

SEQ ID NO: 17243 - protein, 193 aa, Streptococcus agalactiae
ATGGTAAAAAAATTGGAATATCCGATTGATAGAATACATCAGAATTTAGCTTTACGAAAAGATAAAGTTGTTGTCGCATACTATCGTATTCCAATACCCAATCACTATTACAGATAGTGATAAGAAAGATAGCACAAACGAAAGTAGCACAGGTTATCAAAAAATTAGCTAAATATAAAAATTTTGATATTTT

SEQ ID NO: 17244 - protein, 66 aa, Streptococcus agalactiae
  VARIANT 33: Xaa = Any Amino Acid
MVKKLEYPIDRIHQNLALRKDKVVVAYYRIPNXPITITDSDKKDSHKTKVAQVIKKLAKYKNFDIS

SEQ ID NO: 17245 - protein, 257 aa, Streptococcus agalactiae
ATGTTGATGCTGACGGATGTTCTCCATTAATGCAGGTGTTAAATGCTTTAACGCATTCCGTTTCATGCTCTTGTATTGGTTGTTCCAAGCAAGTTAGCGAAATTTTATGTAGAATATGAACCGCAAGGAAAAAAGATGCATATCTTTTTGTGGGATTATCTGGTTATCTCAAAGATTTTGGGTTAAATAAAAAAGGTATCTATCAAGGAGAACGTGTTGATATTGAAGAAGAAATAGTTTTTGAGAAAACGAAAATA

SEQ ID NO: 17246 - protein, 87 aa, Streptococcus agalactiae
  VARIANT 6, 28, 56: Xaa = Any Amino Acid
MLMLTXCSPLMQVLNALTHSVSMLLYWXVPSKLAKFYVEYEPQGKKMHIFLWDYLXYLKDFGLNKKGIYQGERVDIEEEIVFEKTKI

SEQ ID NO: 17247 - protein, 260 aa, Streptococcus agalactiae
ATGAATTTAGTAAAAGTGAATAGTGTTATTTTAGCAGGTGGTCCCAACGTTTCAGGACTAAAGCAATTTTTTCAAGGTGATGGGATTTACCTCATTAGTGTAATTGCTGCTTTATAATTATTAAGAATTGGAAAGAAGCTAATTGGTTAAAAGTTTTCTCAACCTTAGCTATTTATGCGATTATTGTATCAATGCTTAAGGTCAACAGATTCTATCTTTTTGGGTGGAATGCTCGCTGGTTTGGTGTTGAGACGGGGTTA

SEQ ID NO: 17248 - protein, 88 aa, Streptococcus agalactiae
  VARIANT 37: Xaa = Any Amino Acid
MNLVKVNSVILAGGPNVSGLKQFFQGDGIYLISVIAXFIIIKNWKEANWLKVFSTLAIYAIIVSMLKGQQILSFLGGMLRWFGVETGL

SEQ ID NO: 17249 - protein, 950 aa, Streptococcus agalactiae
ATGATTGATATACAAAAAATAAAAAAGTTTCTTTGAGATATACAAAGAAAGAAGAAGGAGGTAAACAGCCTAAGACAAAAGAAGTAAAGCAAAGGACAGCCAATTTTATTGTCTATGGTATCTTAGGTTTGTTATTTATTGTAGGATTTTTTGGATCATTGAGGGCAATTGGCTTATCTAATCAGGTACAACATTTAAAAGAAACAGTTATTGCTGTAGAAAAAAAGTCAAAACATAAGAAAACTGATGATTCATTAGATATATCTAGAATTCAGTATTACATGAATAATTTTGTCTACTACTATATCAACTATTCACAAGATACTGCAGATCAAAGAAAAACAGAATTAGAAAATTATTATTCTTTCTCAACTGCCAGTATGACAGATGATGTTAGAAAGTCTAGGACTTTGCAGACACAACGTTTAATAAGTGTTGAAAAAGAAAAAGATTACTATATAGCTTTGATGCGTATTGGTTATGAAGTTGATAAAAAATCATATCAGATGAACTTGGCTGTTCCTTTTCAGATGCAAAGAGGATTGCTTGCAATCGTTAGTCAACCTTATACTGTGGCAGAAGATTTGTATTTAGGTAAATCTAAAGCATTTGAGAAGAAAACATTAGATCAAGTCAAGGAACTATCGAAAGAACAAGTAAGTTCTATTCAAAAGTTTTTACCAGTTTTCTTTAATAAATATGCCTTAAGTAACAAGACAGACTTGAAACTGTTAATGAAAACTCCAGAACTGATGGGGAAAGGATTTAAAGTTAGTGAGCTAGATCTTAATAATGCGATTTATTATCAAGAAAAAAAGCATCAAGTCGTGCAATTATCAGTAACTTTTGAAGATCTTGTAACAGGTGGCACACGATCAGAAAACTTTACATTATATTTATTTAAAGCAGACAATGGTTGGTATGTTGAAGAGATGTATCATTATTTTAAA

SEQ ID NO: 17250 - protein, 317 aa, Streptococcus agalactiae
MIDIQKIKKFLLRYTKKEEGGKQPKTKEVKQRTANFIVYGILGLLFIVGFFGSLRAIGLSNQVQHLKETVIAVEKKSKHKKTDDSLDISRIQYYMNNFVYYYINYSQDTADQRKTELENYYSFSTASMTDDVRKSRTLQTQRLISVEKEKDYYIALMRIGYEVDKKSYQMNLAVPFQMQRGLLAIVSQPYTVAEDLYLGKSKAFEKKTLDQVKELSKEQVSSIQKFLPVFFNKYALSNKTDLKLLMKTPELMGKGFKVSELDLNNAIYYQEKKHQVVQLSVTFEDLVTGGTRSENFTLYLFKADNGWYVEEMYHYFK

SEQ ID NO: 17251 - protein, 186 aa, Streptococcus agalactiae
TTGAAACGAATTAATCGTTTGATAGAAGATATTAAAAGAGACCCATTTGAAGGCATTGGAAAACCAGAACCTTTAAAATACCATTATTCAGGGGCTTGGTCTCGAAGAATTACAGAAGAACATAGGTTGATTTATATGATAGAAGATGGAGAAATCTATTTTTTATCTTTTAGAGATCATTATAAG

SEQ ID NO: 17252 - protein, 62 aa, Streptococcus agalactiae
MKRINRLIEDIKRDPFEGIGKPEPLKYHYSGAWSRRITEEHRLIYMIEDGEIYFLSFRDHYK

SEQ ID NO: 17253 - protein, 252 aa, Streptococcus agalactiae
ATGGAGGCTATTGTTTATTCACATTTTAGAAATAATTTAAAAGATTATATGAAGAAGGTCAATGATGAATTTGAGCCTTTGATTGTAGTTAATAAAAATCCTGATGAAAATATAGTGGTTTTATCTCAAGATAGCTGGGAAAGTTTACAAGAAACGATTCGTTTGATGGAAAATGATTATCTATCACATAAGGTTATTAATGGTATATCACAAGTTAAAGAGAAGCAAGTCACTAAACATGGTTTANNNNNT

SEQ ID NO: 17254 - protein, 84 aa, Streptococcus agalactiae
  VARIANT 83, 84: Xaa = Any Amino Acid
MEAIVYSHFRNNLKDYMKKVNDEFEPLIVVNKNPDENIVVLSQDSWESLQETIRLMENDYLSHKVINGISQVKEKQVTKHGLXX

SEQ ID NO: 17255 - protein, 408 aa, Streptococcus agalactiae
ATGCAGTTTACGGAAAATCAAGTAAGAAACCGTATGATAGAAAAAGGCATTAAGGATGATGCCTTTTTTATTTGTGGTTTTTCTGATTGGAATGTTGATAGGATTATGTCACTTACAGAAGTCTATCTTTTAAAAAGATGTATTGAAGGACTTTATGATGGTGATGACTATATTGTTCAATATCTTTTGAAAAAAGGTTTATCAGTTCATTCAATAGTGACAAAATATTATATATTTTTGTCAAATAATGAAAATAAAGTAATGAAATATATCTTAAGGAAAGTTGAATTTGATTCTTTAATTGATTTTTGGCAACGGTCAGTAACTTGGGTAAATGCTTTAAATGCTTATATTGAAGAAGGAATAGTATTAAACACCTCAAAAGGTTTTTACGTGTTAAAAACAGAA

SEQ ID NO: 17256 - protein, 136 aa, Streptococcus agalactiae
MQFTENQVRNRMIEKGIKDDAFFICGFSDWNVDRIMSLTEVYLLKRCIEGLYDGDDYIVQYLLKKGLSVHSIVTKYYIFLSNNENKVMKYILRKVEFDSLIDFWQRSVTWVNALNAYIEEGIVLNTSKGFYVLKTE

SEQ ID NO: 17257 - protein, 342 aa, Streptococcus agalactiae
ATGGATGTTAGTGCAATTGTTAGAGATATAAAAACTGGTAGAGCTACGTTAGTTTGTTTTCCTGTGGAAATGAGTGAGCTTAAGTTAGCTTTGGGGCTTCGTGAAGAAGATGATTTAGAGTATATTATTGCAGATTCGGATTGTCAGTTACTAAAAGAACATGATTCTATTGAGATGATTAATCAATTTGTTGAACTGGTAGAGAATGTTGATAGTGAACTTGTTAAAGCAGTGCATCAGGTAATAGGTTATACTGCCTCAGACTTTGTGGATTATGATTTTAATTTTGGGGGATGTTGGTTACTGTCTGATGTCACACTAGACGAGANNNNNTTAATTAAT

SEQ ID NO: 17258 - protein, 114 aa, Streptococcus agalactiae
  VARIANT 110, 111: Xaa = Any Amino Acid
MDVSAIVRDIKTGRATLVCFPVEMSELKLALGLREEDDLEYIIADSDCQLLKEHDSIEMINQFVELVENVDSELVKAVHQVIGYTASDFVDYDFNFGGCWLLSDVTLDEXXLIN

SEQ ID NO: 17259 - protein, 270 aa, Streptococcus agalactiae
ATGTCAGGAACACGTTCAGAAGCAGATAAAAAGTTGTTAGTGGTTACTCAGGAGCTTTCAGAGCTGTTGGTCAGCCATCAGTATGAACAGTCATGGGAAAAAGCTGGAGAGTTAAATAGCTTACTTAAAAAGCGTGAAGAATTGACTTTACCAGGTTATATGGTCGACATGATTCAACAACATTTGAAATCATACTACTACCAAAATAATATGATTAATAAGGCTCATAAGTCTATGTCAGCGATTGGTCATAAACTACAAGAATTTCAT

SEQ ID NO: 17260 - protein, 90 aa, Streptococcus agalactiae
MSGTRSEADKKLLVVTQELSELLVSHQYEQSWEKAGELNSLLKKREELTLPGYMVDMIQQHLKSYYYQNNMINKAHKSMSAIGHKLQEFH

SEQ ID NO: 17261 - protein, 801 aa, Streptococcus agalactiae
TTGACTGAACAAATAGAAAAATATTGGGGTAAACATACATTCCTATCAATATTTAATAATTATTGTCTAGAAGTAAATGAAGAGTTTATTAATGAACAAGTTTCTATAAATTTTCAAAAAGTAGTTGATGAATTTGATAAAATTTTTATTTGGAGTGGTAATTTTAGAGGTCCTTTTCATTCGACAGAATTATTATTGAAAGATATTTCAAAAGGTAAAATTGATAAGTCGGAAAAAGAAAAACTTTCCTATACTGAGGAAATTATTTATAAATATTTTAGTGCATTATATATTGATATAAAAGATGTTAAATATAAGCAGGATGCTCAAGGTCAAGAAATAAAATATGAACTCATGATCCGAAAAAATATTGGAGGTGATCTTGTAGATGTACCAATAAGTTTAGAATCTCAGGGAACAAAAAATCTTCTGGATCTTCTAAAAGTTTTTAACAATGTGTTGGATGGGAAAATATGTATCGTTGATGAAATTGACTCAGGTATTCATGATCTTTTAATGAATAGTATTCTGAATGACTTGAAAGGAAGTGTGAATGGTCAGTTAATATTTACAACGCATGATACAACGTTATTGAAGGAATTATCACCGAGCTCAGCTTATTTTTTAAATGTAGATATTAAAGGTAATAAAGTTATCATTTCTGGCAATGAGGCAGATAAAAAAATAGGAGTAAATAACAATTTAGAAAAATTATATTTGTCTGGTTTCTTTGGTGCTGTACCAGATCCATTAGATATTGATTTTTCAGATTTATTTCTTGATCATAATTTAAGCGAGGAC

SEQ ID NO: 17262 - protein, 267 aa, Streptococcus agalactiae
MTEQIEKYWGKHTFLSIFNNYCLEVNEEFINEQVSINFQKVVDEFDKIFIWSGNFRGPFHSTELLLKDISKGKIDKSEKEKLSYTEEIIYKYFSALYIDIKDVKYKQDAQGQEIKYELMIRKNIGGDLVDVPISLESQGTKNLLDLLKVFNNVLDGKICIVDEIDSGIHDLLMNSILNDLKGSVNGQLIFTTHDTTLLKELSPSSAYFLNVDIKGNKVIISGNEADKKIGVNNNLEKLYLSGFFGAVPDPLDIDFSDLFLDHNLSED

SEQ ID NO: 17263 - protein, 828 aa, Streptococcus agalactiae
ATGTTTAGTAAAATAGAATTTAAAAACTTTATGTCCTTTTCAAATTTGACTTTTGATTTGCTGAATAGAGGAAAATGTAAGGATATTATTGCAATCTATGGAGAAAACGGTTCAGGAAAAACAAATATTGTTGAAGCTTTTAAGTTACTAGTTTTGTCATTACAATCAATGGAATCCTTAAATGAAAATACACGATTACAATCATTATTAAAAGAACAAACAAATAAAGAAGAAAATCAAAAAACTAACTTTGGTGATATATCAGAAATCTTAGATAAAATCAGTTTCTTCACCACTTTTAAGGGCATAGCGAAAAATACTCATAGAATTGCATCTGAAGGTAATACGATTCTAAAATATTATTTTAATATCGAAAAAGATAATGGTTATTACCTTCTAGAATATAATGAAAATAATGAACTAGTAAAAGAGGAGCTAGTATTTAAGATAAAATCCAATAAGGGAGTTCATTTCAGTATTACTAACATAGATGGTTTATCTCAATCATTAAATAAGACAATTTTTAAGAATACTATTTTTAAAGATTTGACTGAACAAATAGAAAAATATTGGGGTAAACATACATTCCTATCAATATTTAATAATTATTGTCTAGAAGTAAATGAAGAGTTTATTAATGAACAAGTTTCTATAAATTTTCAAAAAGTAGTTGATGAATTTGATAAAATTTTTATTTGGAGTGGTAATTTTAGAGGTCCTTTTCATTCGACAGAATTATTATTGAAAGATATTTCAAAGGTAAAATTGATAAGTCGGAAAAAGAAAAACTTTCCTATACTGAGGATATTTATAAATATTTTAGTGCAT

SEQ ID NO: 17264 - protein, 277 aa, Streptococcus agalactiae
MFSKIEFKNFMSFSNLTFDLLNRGKCKDIIAIYGENGSGKTNIVEAFKLLVLSLQSMESLNENTRLQSLLKEQTNKEENQKTNFGDISEILDKISFFTTFKGIAKNTHRIASEGNTILKYYFNIEKDNGYYLLEYNENNELVKEELVFKIKSNKGVHFSITNIDGLSQSLNKTIFKNTIFKDLTEQIEKYWGKHTFLSIFNNYCLEVNEEFINEQVSINFQKVVDEFDKIFIWSGNFRGPFHSTELLLKDISKGKIDKSEKEKLSYTEEIFINILVH

SEQ ID NO: 17265 - protein, 297 aa, Streptococcus agalactiae
ATGAAGAAGTTGACTAATTTTCCACAAAAACTAAAAGAATTGCGTAAAGAAAAAAAACTAACTCAAACTGAGCTAGCGTCTAAATTAAATATAAGTCAAAAGTCATATAGTAATTGGGAAAGTGGTAAAGCTGAACCTACTTTAGATAATATAATAAAGTTAGCAAATATCCTAGATGTTACTGTAGATTATTTACTTGGTAGAAGTGATAATTTTAGTAATACTATTGTGCTTTCAAAAAACAATATGAAAAGTTTTTCTAAAAGACTGAAAGAGTTAAGGTTAGAAAAAGAATAT

SEQ ID NO: 17266 - protein, 99 aa, Streptococcus agalactiae; identical to SEQ ID NO: 3614

SEQ ID NO: 17267 - protein, 375 aa, Streptococcus agalactiae
TTGTATAGTAACCGAGAATTTGCTTATTTTGTTAATAGACGAAATAATTTAGATAAAATGATTGATTTACTAGTTTTTATGATTCCTGATCGTGAGTTTTATTATCCTGAGATTCAAACAGGTGAGCTTAGAGATTATCAGATAGACATTTATGATTTGATTAAGATTGGTTATGTTGGTGTTTATGAAATTCAAAAAGACTACGAAGATAAGTTAAGGGAACTTGCTGATTTTAAACGGAAACTTTTAAAGTTTGGTTTGCTTATGCAACCTTTAGAAAAGCAAAAAGAGATAGTTATTCGTTTAGCTGGTAAATATCGTTTGGAAAAAAGAATTCTGATGAGAAGGGAAATGTTTAGAGATGAAGAAGTTGAC

SEQ ID NO: 17268 - protein, 125 aa, Streptococcus agalactiae
MYSNREFAYFVNRRNNLDKMIDLLVFMIPDREFYYPEIQTGELRDYQIDIYDLIKIGYVGVYEIQKDYEDKLRELADFKRKLLKFGLLMQPLEKQKEIVIRLAGKYRLEKRILMRREMFRDEEVD

SEQ ID NO: 17269 - protein, 1230 aa, Streptococcus agalactiae; identical to SEQ ID NO: 8303

SEQ ID NO: 17270 - protein, 410 aa, Streptococcus agalactiae; identical to SEQ ID NO: 3618

SEQ ID NO: 17271 - protein, 1659 aa, Streptococcus agalactiae; identical to SEQ ID NO: 8305

SEQ ID NO: 17272 - protein, 553 aa, Streptococcus agalactiae; identical to SEQ ID NO: 3632

SEQ ID NO: 17273 - protein, 459 aa, Streptococcus agalactiae; identical to SEQ ID NO: 8307

SEQ ID NO: 17274 - protein, 153 aa, Streptococcus agalactiae; identical to SEQ ID NO: 8308

SEQ ID NO: 17275 - protein, 294 aa, Streptococcus agalactiae; identical to SEQ ID NO: 8309

SEQ ID NO: 17276 - protein, 98 aa, Streptococcus agalactiae; identical to SEQ ID NO: 3638

SEQ ID NO: 17277 - protein, 2589 aa, Streptococcus agalactiae; identical to SEQ ID NO: 8311

SEQ ID NO: 17278 - protein, 863 aa, Streptococcus agalactiae; identical to SEQ ID NO: 8312

SEQ ID NO: 17279 - protein, 2259 aa, Streptococcus agalactiae; identical to SEQ ID NO: 8313

SEQ ID NO: 17280 - protein, 753 aa, Streptococcus agalactiae; identical to SEQ ID NO: 8314

SEQ ID NO: 17281 - protein, 261 aa, Streptococcus agalactiae; identical to SEQ ID NO: 8315

SEQ ID NO: 17282 - protein, 87 aa, Streptococcus agalactiae; identical to SEQ ID NO: 8316

SEQ ID NO: 17283 - protein, 458 aa, Streptococcus agalactiae
ATGGGATATAGATTGAATAGGTATGTTTGTGTTAGGAAGGATGTCTTTTTAGCTTTAGTGATGCTACTAGTGACGTTAATTGTATCACTTGTTTTTTTATTAAAGAGTGATGGCATCTCATTTTTTAGTGATCAGTACTATAGGTCTCAATTGACTGCTAAAGAAGCTAAAAATGTGATTAATAAAAACTATAATATTGTTTTTTATAAAAAGAGTTGCCCTTACTGCAAAATAGCGAAAAAAGAAATTTTAGAGAAAAGTAAAGGTAGTGATATAACTACTTTTTTTGCTGACGTGGAGACTGTTAGTGGCAGGAGCTAGTACGTAAATATAGAATATCCAAAGCGCCAAGCATAGTTGCTGTAAGAGGAGACAACTTGAAAGTTAATTTGTATGCAAAAGATGATGAGGATGGTCGTATGATTGTAGAAAAGAAAGTAATAAAAGATAGTTTTAGA

SEQ ID NO: 17284 - protein, 153 aa, Streptococcus agalactiae; identical to SEQ ID NO: 8318

SEQ ID NO: 17285 - protein, 309 aa, Streptococcus agalactiae; identical to SEQ ID NO: 8319

SEQ ID NO: 17286 - protein, 103 aa, Streptococcus agalactiae; identical to SEQ ID NO: 8320

SEQ ID NO: 17287 - protein, 429 aa, Streptococcus agalactiae; identical to SEQ ID NO: 8321

SEQ ID NO: 17288 - protein, 143 aa, Streptococcus agalactiae; identical to SEQ ID NO: 8322

SEQ ID NO: 17289 - protein, 312 aa, Streptococcus agalactiae; identical to SEQ ID NO: 8333

SEQ ID NO: 17290 - protein, 104 aa, Streptococcus agalactiae; identical to SEQ ID NO: 8334

SEQ ID NO: 17291 - protein, 150 aa, Streptococcus agalactiae
GTGAAAAAACAGTTGACAATAAAAGCTAAAGGTTATGTAATTAAAATACAAGCGATAGCTTATCAAAAACTCTTGCAAAAAAGTGTTAAAGTATTTATCAATAATCCTAAAAAGCACTTATTTGAGTACAGAGTTAAAAATTTAGATCAT

SEQ ID NO: 17292 - protein, 50 aa, Streptococcus agalactiae
MKKQLTIKAKGYVIKIQAIAYQKLLQKSVKVFINNPKKHLFEYRVKNLDH

SEQ ID NO: 17293 - protein, 336 aa, Streptococcus agalactiae; identical to SEQ ID NO: 8337

SEQ ID NO: 17294 - protein, 112 aa, Streptococcus agalactiae; identical to SEQ ID NO: 8338

SEQ ID NO: 17295 - protein, 420 aa, Streptococcus agalactiae; identical to SEQ ID NO: 8339

SEQ ID NO: 17296 - protein, 140 aa, Streptococcus agalactiae; identical to SEQ ID NO: 8340

SEQ ID NO: 17297 - protein, 366 aa, Streptococcus agalactiae; identical to SEQ ID NO: 8341

SEQ ID NO: 17298 - protein, 122 aa, Streptococcus agalactiae; identical to SEQ ID NO: 8342

SEQ ID NO: 17299 - protein, 335 aa, Streptococcus agalactiae
ATGAACAATATTGAGGTATATTCTGTTTTAGTTTCATGTATTGATTATGCAGATGGTACTGGTTCAAAAATAAGACCTGCAGTAGTAGTGAAATTTAATAATGAGGTTATTAGGACTTATAGACTAACTACAAAATATGAGAATAAGTCTGATTATATAAAAAGTCAGTATCTAGAAGTTATTGATTGGGCAAAAGCAAATTTAAAAAGACGTTCTTGATTGATACAATTCAGTATTATGATTTAGAGAATAAGGGATTCAATATTAAAATTATTGGTAAGTTAAGTGATAGAGATATTGAAAGATTAAAAGATTTTCTTAAGGGTAGAGGTTTA

SEQ ID NO: 17300 - protein, 112 aa, Streptococcus agalactiae
  VARIANT 73: Xaa = Any Amino Acid
MNNIEVYSVLVSCIDYADGTGSKIRPAVVVKFNNEVIRTYRLTTKYENKSDYIKSQYLEVIDWAKANLKRRSXIDTIQYYDLENKGFNIKIIGKLSDRDIERLKDFLKGRGL

SEQ ID NO: 17301 - protein, 289 aa, Streptococcus agalactiae
ATGTCAACAGTAGCAGTAAGAGTTGATGCTCAGTTAAAAGATGAAGCAACAAAGCTTTTTCAATCTTTAGGTTTAGATATGAGTACAGCTGTAAAAATGTTTTTAATTCAATCGGTTAAAACTCAAAGTATTCCATTTGAGATAAAAAATAAGTCATTTATTTCTGATGAGGAATTTCAAAAATTAGTAGAATTAAACTCTAAGGAATAGAGTTAGAGCTGATGATCCGGAAAGTGTAAAAGAATTTTTTGGTGATGAGGATTTTTCAGAATATGAGGAATATTTTAAA

SEQ ID NO: 17302 - protein, 97 aa, Streptococcus agalactiae; identical to SEQ ID NO: 8346

SEQ ID NO: 17303 - protein, 756 aa, Streptococcus agalactiae; identical to SEQ ID NO: 8347

SEQ ID NO: 17304 - protein, 252 aa, Streptococcus agalactiae; identical to SEQ ID NO: 8348

SEQ ID NO: 17305 - protein, 1304 aa, Streptococcus agalactiae
ATGTCAGACTTATTATCCCTACCAGACATTAAAACAATAGAACCGCCACAAGAAAATGAAACCGATATGATGTTTAAAGTTGAAGCAGTCGGACCACCTGAACGTTGTCCTGAATGTGGTTTTGACAAGTTGTACAAACACAGTTCAAGAAATCAACTAATTATGGATTTGCCCATTCGTTTAAAGCGAGTGGGCTTACATTTGAACCGTAGACGATACAAGTGTCGTGAATGCGGATCTACCATATCTGTAGATGAAAAGCGTAGTATGACCAAAAGGCTTTTAAAGTCCATTCAAGAGCAATCCATGTCTAAGACCTTTGTAGAAGTCGCAGAAAGCGTTGGTGTTGACGAGAAAACCATTAGGAACGTTTTTAAGGACTATGTGGCACTCAAAGAACGTGAATACCAGTTTGAAACTCCTAAGTGGCTTGGGATAGACGAGATACATATTATCCGTAGACCTCGGCTTGTATTGACTAATATTGAACGCAGGACTATTTATGACATCAAGCCTAACCGTAACAAGGAAACAGTCATCCAACGTCTTTTAGAAATCAGTGACAGGACTTACATTGAGTACGTCACAATGGATATGTGGAAGCCCTACAAAGACGCAGTGAACACTATCCTTCCACAAGCTAAAGTTGTCGTAGATAAGTTTCATGTAGTTAGAATGGCTAATCAAGCCTTAGATAACGTCAGAAAGTCTTTGAAAGCCCATATGAGCCAAAAAGAAAGACGTACCCTTATGCGTGAAAGGTTTATCCTTCTAAAGCGTAAACACGATCTAAATGAACGTGAATCATTCCTCTTAGATACTTGGTTAGGTAATCTTCCTGCTTTAAAGAAGCCTATGAACTCAAAGAAGAGTTTTACTGGATATGGGATACTCCTGATCCAGATGAAGGTCATCTTCGTTATAGTCAATGGAGACACCGTTGTATGTCCAGCAACTCTAAAGACGCATATAAAGACCTCGTGAGAGCCGTAGACAACTGGCATGTTGAAATATTCAACTACTTTGATAAAAGGCTCACTAATGCTTATACGGAGTCAATTAACAGCATTATTAGGCAGGTAGAGCGAATGGGTAGAGGTTACTCGTTTGATGCCTTACGAGCCAAAATCCTTTTCAATGAGAAGCTCCATAAAAAGCGTAAGCCACGATTTAATTCAAGTGCTTTCAATAAAGCTATGTTATACGATACTTTCAATTGGTATGAAGTGAATGATCACGACATTACAGACAACTTAGGTGTCGATTTTTCCACACTTATTAAGAATTTGGAGAAGGGTGATTTA

SEQ ID NO: 17306 - protein, 435 aa, Streptococcus agalactiae
MSDLLSLPDIKTIEPPQENETDMMFKVEAVGPPERCPECGFDKLYKHSSRNQLIMDLPIRLKRVGLHLNRRRYKCRECGSTISVDEKRSMTKRLLKSIQEQSMSKTFVEVAESVGVDEKTIRNVFKDYVALKEREYQFETPKWLGIDEIHIIRRPRLVLTNIERRTIYDIKPNRNKETVIQRLLEISDRTYIEYVTMDMWKPYKDAVNTILPQAKVVVDKFHVVRMANQALDNVRKSLKAHMSQKERRTLMRERFILLKRKHDLNERESFLLDTWLGNLPALKEAYELKEEFYWIWDTPDPDEGHLRYSQWRHRCMSSNSKDAYKDLVRAVDNWHVEIFNYFDKRLTNAYTESINSIIRQVERMGRGYSFDALRAKILFNEKLHKKRKPRFNSSAFNKAMLYDTFNWYEVNDHDITDNLGVDFSTLIKNLEKGDL

SEQ ID NO: 17307 - protein, 1638 aa, Streptococcus agalactiae; identical to SEQ ID NO: 8351

SEQ ID NO: 17308 - protein, 546 aa, Streptococcus agalactiae; identical to SEQ ID NO: 3644

SEQ ID NO: 17309 - protein, 390 aa, Streptococcus agalactiae; identical to SEQ ID NO: 8353

SEQ ID NO: 17310 - protein, 130 aa, Streptococcus agalactiae; identical to SEQ ID NO: 3646

SEQ ID NO: 17311 - DNA, 1566 bp, Streptococcus agalactiae
atgaatctacaaaaaaatgataaaacaaatagttttatccattatgcaaacggtccttccctagaagaaataaatgggacaattgaagttcctaaagatttgagcttttttaaaactttactagcttattctggaccgggtgcacttgttgctgttggttatatggatcctggaaattggtccacttccataactggcggtcaaaattttcaatatttactaatttcaattatcttaatgtctagtttaattgctatgctacttcaatacatgtcagctaagctaggtattgttactcagatggatcttgctcaagctatccgagcaaggaccagtaaacagttgggaattgtcttatggattctcactgagcttgctataatggcaacagatattgctgaagttattggtggggctattgcactttatttactgtttcatattccacttgcgattgctgttttcattacagtatttgatgtattactcttattattgttgacaaaaataggatttcgaaaaattgaagctctagtagttgctttaatattggttattttcttagtttttgcatatcaagtggctctttctcatcctatatggacggatatttttaaaggtttagtacctacatctgaagctttctcaacctctcatacagtaaatggacaaacaccactttcaggtgccttaggcattattggggcaactgttatgccacataatctttatctacattcttcagttgttcaaagtcgaaaactagatcataataacaaaaaagatatcgctagagcaattaggttttcaacttttgattcaaatattcaattaacagtagccttttttgttaattcactattactcattatgggcgttgctgttttcaaaacaggaagtgttactgatccatcattctttggtctatttaaagcactatctaattctactattatgagtaattctattttagctcatatagcaagttcaggtattttatcacttttatttgcaatagctttattagcatctggacagaattcaactattactggaacattaacaggtcaaattattatggaaggatttattcatatgaaagttccaatttggttccgtcgtatcattactcgcctaatttctgttattcctgtaatgatttgtgtcttagtaactagtggtagaagtactgttgaagaacatatagctattaataacttaatgaataactctcaagtcttcttagcatttgcattaccattctcaatgttacctctactaatatttactaatagtaaagttgaaatggatgatgattttaaaaatacttggataattaagattcttggttggctttcagttataggattaatttatctcaatatgaagggattgccaaatcaaattgaaggtttttggggagataacccaactcatcaacaaattattcttgcgcatcaaatagctcatatcatcattattagtgtaatactaactttaatatggactattgttgaattgtataaaggaaataaaaaatacagtacgatgcaacaaagtgcaact

SEQ ID NO: 17312 - protein, 522 aa, Streptococcus agalactiae; identical to SEQ ID NO: 3650

SEQ ID NO: 17313 - DNA, 720 bp, Streptococcus agalactiae
atgttaggattggagtttagaaagtctataagaggtagaacattattttatattatatctactgtagctttgacctatgtattaggatatattttaccagtagggatagataaaataagacatttaactttgggagaattttactttagtacctacacagtatttacccaatttggatttttaatattcggctttgtcattgtatatttctttaataaagattactctgacaaatgtattttatatcactatttttcagggtatcatctaactaaatacttttatactaaactgttagtattattttcagaattttttattgctataatagtttgcaatatattagcttcattgctttggggatattcactattttattttttaacaactacaatcttattttcactcgttgttctacagtatctactagtcgtctcaactattagtatcctgttttctaatatgctagtttctattggagttactattttttattggattacatccattattttagtggcaattggaggaatttttaaagtatctgctatttttgatgcttcaaattctctctataaaataatagggaaacttttctcacatccgatgactattgatttaaccgacttttttataattgttccttatatgatatgccttagtgtaattagttttttgatagtgtgcttatcaaatagaagatggttattaaatggaatg

SEQ ID NO: 17314 - protein, 240 aa, Streptococcus agalactiae; identical to SEQ ID NO: 3652

SEQ ID NO: 17315 - DNA, 615 bp, Streptococcus agalactiae
atgtttattaataattacaccttaaaaataggaaatagaatacttttagagaatactaacttagactttgaagaaggggaaataaatcatcttttaggtaggaatggatcaggtaaatctcaactagctaaagattttatcataaatagagggaattatttttcaaatgatatttatgaagacacgctgattatttcgagttattctaatcttcctagtgatgttaccattaacgatttagaaaggacaattccgtggaagctttctaaagaaatttatcagttattgaatattaatcaaataagtaaaacggttaagttaaagcaattaagtgatgggcagaaacaaaaggtgaaattattagttttgttgtctttagacaagcatattattatacttgatgaaattactaatgctttagataaaaagtctgttgatgagataaacgtatttttgcaaaactatattcagtattatcccgaaaaaattattattaatatttcacatgatatcaataatatcaggtctttaaagggaaactattttctaattgataatcaaaaaatttgtaaagtagacacattagatgatgctattagttggtatttaggagaa

SEQ ID NO: 17316 - protein, 205 aa, Streptococcus agalactiae; identical to SEQ ID NO: 3654

SEQ ID NO: 17317 - DNA, 156 bp, Streptococcus agalactiae
atgaaacaaaaaaatattcagagagaagtaaaaccaattctaaatgatatgagctttgcaaaagttctaactaagaaaaacgaattagacaatgtaaacgatttatggtattttgtaagaagttcaaaaaatagatgggttgctggttcagcccat

SEQ ID NO: 17318 - protein, 52 aa, Streptococcus agalactiae
MKQKNIQREVKPILNDMSFAKVLTKKNELDNVNDLWYFVRSSKNRWVAGSAH

SEQ ID NO: 17319 - DNA, 747 bp, Streptococcus agalactiae
atgtcaaagaatttgaaaacatcggagtatcaaaattatgagatatttggtgaagatgatttatatataattaaggataaagttagaaaaaaatattataaattggactattctgatgtactaagtatgggtgttattttcaaagatagggaagaaaaaatttcaaattttaattatatttttttcgtatgttcaataatagctttggaaatagtaaatgtgttaatactgttttattcccatgaagaggtagtaggtataacgagagatgactttattaaatatcttctgatttactttcccttctttatttattttcatgaattaggtcatataactttttttaagtattttggtagacgtgtagataaaattggttttaaattaaattatatttttccttcgttttatgtaagaatgaatgatacatatatgttaagtaaaaaggagaagatagttgttcatttaggtggaatattttttagtttaattttgaataatatcatgtttactctgggagtatgtttaaaatgtacaattttaatttatttagcaaaatatatggcaatagacattctttataattctatccctttaatgaattcagatggttataaagtaataattgcaaccagaggtgttctagaagctaagtcgtttaatgagaattcaatgctagttaaagtaattaaactttgtaatattatttttgttattctatacacagtttggtttatatttaatatt

SEQ ID NO: 17320 - protein, 249 aa, Streptococcus agalactiae
MSKNLKTSEYQNYEIFGEDDLYIIKDKVRKKYYKLDYSDVLSMGVIFKDREEKISNFNYIFFVCSIIALEIVNVLILFYSHEEVVGITRDDFIKYLLIYFPFFIYFHELGHITFFKYFGRRVDKIGFKLNYIFPSFYVRMNDTYMLSKKEKIVVHLGGIFFSLILNNIMFTLGVCLKCTILIYLAKYMAIDILYNSIPLMNSDGYKVIIATRGVLEAKSFNENSMLVKVIKLCNIIFVILYTVWFIFNI

SEQ ID NO: 17321 - protein, 945 aa, Streptococcus agalactiae
ATGAAGAGTTTAGTAATTAATCTCTCCCAAAAGTGTAATGCAAAGTGCGATCATTGTTGTTTTAGTTGCTTACCTAACTCTGTCAATTGTCTTACGGATGAAGAAATTGAAGCAGTAGTACGCTATGCGGAAACTCATGAAGATGTTGAACTAGTTTCTTTGACTGGCGGAGAAGCACTATTAAGAAAGAGCAAAGTCTTAGAAACTATTCATCGCTTATCGATTTTAGGTAAAGATGTTACGTTAATTACAAATGGCTTCTGGGCAACTAATGATAAAAATACGAAGAGTTTACTAACTTCTTTAAGAACAGCCGGTTTACGTTATTTAACCGTTAGTTATGACAACTATCATTCAGAGTATATCCCAGTAGATAATATAAAAAGATTATTTTTACATATAAAGAAGTTTGATATTGAAGTTGCACTTAATATGGTAGTAGATAAGAAAAATCGTGGTGTTGATTTATTAGATAAGTTAGGTGAGTCAATATTTGGTGTTCCTATTACGATTGTTCCTGCATCTCCAGTAGGTAGAGCCAAAAATCTAAATATGGAAGATTTGTATTTAAAAACGATAGATGAATTAGAACTTACATGTCCTGCAACGGGCTGGGAATTTGTGATTCATCATGATGGTTATGTTTATCCTTGTTGCTCTCCATCAGTTTTTGAGACGAATTTGAGAATTGGAAGTATTGGTGATGCTGATATATCAGAATTAGAGGATAAATTTTACTCTAATATGTTGTTGTATATATTAAAACGAGAAGGGTTTACTTGGTTTATAGACAAAATGAAATTAGATTTGACTGGTAAGAAATTTGTATCAAGTTGTGAGGTCTGTAAATTTATTTTTTCCGATATGAATAAAATAAAGAGTATTACAGATGATATAAAGGAGTATTATGTCAAAGAATTTGAAAACATCGGAGTATCAAAATTA

SEQ ID NO: 17322 - protein, 315 aa, Streptococcus agalactiae
MKSLVINLSQKCNAKCDHCCFSCLPNSVNCLTDEEIEAVVRYAETHEDVELVSLTGGEALLRKSKVLETIHRLSILGKDVTLITNGFWATNDKNTKSLLTSLRTAGLRYLTVSYDNYHSEYIPVDNIKRLFLHIKKFDIEVALNMVVDKKNRGVDLLDKLGESIFGVPITIVPASPVGRAKNLNMEDLYLKTIDELELTCPATGWEFVIHHDGYVYPCCSPSVFETNLRIGSIGDADISELEDKFYSNMLLYILKREGFTWFIDKMKLDLTGKKFVSSCEVCKFIFSDMNKIKSITDDIKEYYVKEFENIGVSKL

SEQ ID NO: 17323 - protein, 303 aa, Streptococcus agalactiae
ATGGGAATCCTTGGTGATTATGTTTTATCAGAAGCCTCTGATTATATCAGTGGAAAAAAAGATATCAAGGCTTTAAAAAAGAAACTTGATAAAATGTTAGTGACAGGTGTTTATGCTCCAAGAATCAAGTCTAAACGTAGAAGTATTGTCTCTACCTATGATGCAGAGATAACGACTACTGCAACAAACGCAAAAGCTAGTATAACTGCCATTGCAGGTCAAATAGACACTGCAATAAAGGGACAGTTTAGAACTAAAGTTGAAACTGTATTGGATAATAACAGTACAAAGTATGATGAAATT

SEQ ID NO: 17324 - protein, 101 aa, Streptococcus agalactiae
MGILGDYVLSEASDYISGKKDIKALKKKLDKMLVTGVYAPRIKSKRRSIVSTYDAEITTTATNAKASITAIAGQIDTAIKGQFRTKVETVLDNNSTKYDEI

SEQ ID NO: 17325 - protein, 399 aa, Streptococcus agalactiae
ATGGGAAAATTAGACGCTAAAGATGATAAATTAAGTAACAGTAAAAAGGATTTAGAAAAGTTGGAAGATGATTACCATCATAAAACCATAGCTATTTCAGATAAATTCTTTGAACTGGAAGATAAACGATGTGAGTTTGAGACGATGCTTCAGGAAACTTACGAAGCAACAAGTTATCATCTTCGTCAGGATGAGATGATTAATGAAGAGTCCTTTATGACCATGAATCACATTATAGAAGCTTTTCAAAGTGATTTTGATACAGAATATACTAAAGAGAAAAGAAGATTGACTGCCTTAGAAGAAGAAACTAATCAAAAGTACTCTAAAAAGAGACAATTGCTTGAAGAAAAAATAGATCATTTAATGTCAGAAAGGAGAGACTATGGGAATCCTTGG

SEQ ID NO: 17326 - protein, 133 aa, Streptococcus agalactiae
MGKLDAKDDKLSNSKKDLEKLEDDYHHKTIAISDKFFELEDKRCEFETMLQETYEATSYHLRQDEMINEESFMTMNHIIEAFQSDFDTEYTKEKRRLTALEEETNQKYSKKRQLLEEKIDHLMSERRDYGNPW

SEQ ID NO: 17327 - protein, 1215 aa, Streptococcus agalactiae
ATGTCAGAATATAAAACAATCCATCCCAACGCCAGATTAAAGGATCAATATGATAACACAATTGGAGTTGTTTCGGAGGTTTACGACAATACTTCTCATTCTGGAGAACAGATTTATGCTGTGGTTGATAATCGTCATATTCCAAAAGAAGATGTAAAAGAGGTGACGGTACTTTTTCGTGGATCAACATCTCCTCAGGAATTTATTAATAATCCTGCAGATGTGACTTTGGATTGGTTAGAAAATGACATTCCTATGGCAAGTAATATTTGGGTAATGAAAGATTTTGGGAATCCTCATAATTTCAGTGCTGTATCACCACAGTTGAAAGCTTCATCAGAACATTTAAAAGAGATTATGAAAAAATATCCAAATGCAAAAATAAACATTGGTGGACATTCATTAGGAGGTATGGATGCTCAATATGCTGTTGTAGATATTACAGATAAGAAAGACTTGAAACGGATTAACTCTGTACATGTTTATAATGCTCCAGATATATATCCTACACTTACTAAAGGACAGAAAAAGACGGCAGATTCACTGAAATCTAAGATTGTTGTTTATGTTGATCCTAATGATTTTATTGGCATGGTGGGGCGTGAAGGAAAAAAAGGAAGTGAAGACTCTGTAGGAACAGTCTATTATACAGAAAGTCCAGATATCAACTGGATAGATCAACACATGACCTATGGCTATCGTATGGAAAATGGTCAGATTAAAGTTATTGAAACGAATTTACCACCGGAAGTTAGGACTACTAGAAAAGCTATGGGATCTTTTTATAAGGACAAGAAAAAATTTAAAAAATCTGGTAAGGGTCTAAGTTCGCATGAAAAAATCTTCTTGGATGCTGAACAAGCTGCTGTTATTGCAAGTGGTTTAGTCTCTACTGCTGAAACTGCTTTAGAGGATATCAAAACATCTGCGAAAACAGCTGTTGGAGAAGCAGAAGAATTGTGGAATACGACTAAATCGATTCCTTTTGGTATTACGGAGCTTACAGAAGCAGAGTTGGCAGAAGCTTATGCAGAAGGTGGTGTCACTTATGATAGCATAGTAACTAAAACTGATACTCATTTTGATGAGAAAGTCAAAAATGCAGGAGATTTAGTAACAACATATACGACTTTGAAAAGTGATATTCAATCAGGTGTTGAAACCATGTTATCTAAGGATAGTGAATTAGCTGGAGATTTTAAAGCATGGGAAAAT

SEQ ID NO: 17328 - protein, 405 aa, Streptococcus agalactiae
MSEYKTIHPNARLKDQYDNTIGVVSEVYDNTSHSGEQIYAVVDNRHIPKEDVKEVTVLFRGSTSPQEFINNPADVTLDWLENDIPMASNIWVMKDFGNPHNFSAVSPQLKASSEHLKEIMKKYPNAKINIGGHSLGGMDAQYAVVDITDKKDLKRINSVHVYNAPDIYPTLTKGQKKTADSLKSKIVVYVDPNDFIGMVGREGKKGSEDSVGTVYYTESPDINWIDQHMTYGYRMENGQIKVIETNLPPEVRTTRKAMGSFYKDKKKFKKSGKGLSSHEKIFLDAEQAAVIASGLVSTAETALEDIKTSAKTAVGEAEELWNTTKSIPFGITELTEAELAEAYAEGGVTYDSIVTKTDTHFDEKVKNAGDLVTTYTTLKSDIQSGVETMLSKDSELAGDFKAWEN

SEQ ID NO: 17329 - protein, 384 aa, Streptococcus agalactiae
ATGAAGAAAAAATATTGGATATTACTAATATTACTATTAACAGTTTTATCAGGAGGCGGATATATGGTTTTTAAACAACATACAGAAAAAGAAAAAATGATTGCAATTGCACACAGTGCAGAAGCGATGCAAATTTATGAGAAGCATATGAAAGCAAATGATTCGCGAGCTTTTTCAGAGCAAGGAATTATTCATAATTATAAAATTAACGATTCAGAACTCAATTATAATCCTATGGGAGGAATGGAGGTTACTGTTTATGTGAATAATGATACCAATAAATATTTTCAATTTACTATTTTAGATAATGGAAATGGTAAACTTGAATCTGGGAGCTATATTATAAGTGCAGATTTAGATAATGATTTAGAAACCAATAAAAAA

SEQ ID NO: 17330 - protein, 128 aa, Streptococcus agalactiae
MKKKYWILLILLLTVLSGGGYMVFKQHTEKEKMIAIAHSAEAMQIYEKHMKANDSRAFSEQGIIHNYKINDSELNYNPMGGMEVTVYVNNDTNKYFQFTILDNGNGKLESGSYIISADLDNDLETNKK

SEQ ID NO: 17331 - DNA, 507 bp, Streptococcus agalactiae
atgatttcagaagaaagttacagatatttagttgaggatgcttatcgagttgattcaaaaaaagtaaaaatacctctgaaaagaagtgatattgtagggaacagtgactatgttattattgaaccacctatagataatacttcaaatggtatgcaagctatggtagttgctccgataaaagaaggaatgacagctgaaccagatactagtgaaatagtgattgtttatgcaggtactaatttaggtgagcgtttagacatagctacagatgttgaaatggttgctggaggggatacatatttacttgctgatcctaaaaccaagacttttaggaaatctcagggaaaatcagcactagagtacgcagaaaaaatatcgagtaaatatcctaattcagaaattactacaaccggtcactccttaggggaatcagaggcactatatgtcgctttaaaaatgggttggatgaatgttggttataatggtccagatattcataacatgata

SEQ ID NO: 17332 - protein, 169 aa, Streptococcus agalactiae
MISEESYRYLVEDAYRVDSKKVKIPLKRSDIVGNSDYVIIEPPIDNTSNGMQAMVVAPIKEGMTAEPDTSEIVIVYAGTNLGERLDIATDVEMVAGGDTYLLADPKTKTFRKSQGKSALEYAEKISSKYPNSEITTTGHSLGESEALYVALKMGWMNVGYNGPDIHNMI

SEQ ID NO: 17333 - DNA, 330 bp, Streptococcus agalactiae
atgaaaaacttatttgcaacaacagaagcatcatcaaggaaacaggaacaagatagaattgtcaattacataaaacaacatgttgagttaacaaatggtaatcaaataaaaaaaattgagtttatcgactttcaaaaaaatgagatgacaggtacatggggaatttctactaaaattaatgaacaattttcgattagtttttctgaagatagaattggtggtaaacttagagcattaggatatcaaccgaatgaaataggtttttcaaaggacatcaatagtaataatcaaaatgttaatgatattgaagtgatttatatgaagaaagaa

SEQ ID NO: 17334 - protein, 110 aa, Streptococcus agalactiae
MKNLFATTEASSRKQEQDRIVNYIKQHVELTNGNQIKKIEFIDFQKNEMTGTWGISTKINEQFSISFSEDRIGGKLRALGYQPNEIGFSKDINSNNQNVNDIEVIYMKKE

SEQ ID NO: 17335 - DNA, 351 bp, Streptococcus agalactiae
gtggtagtagttggcatacttaatcataaaaaaatgccagatgaaggaagatattatttgactgaaaaaaattataataatcatactatctcattaaataaaactgaattttttaccataaccgatgatcaagttacctatacaaaaaatgaggagttagaaaaaatatcttatgatagcaaaaataatgaattgcttttaaatggtaaaaagttttggactcatctcacttctggtgagcttcagttaacagatcctaagaacactgatatgacattaaattatgctagtaaaaatagtcctttattcaaatcatatgaaaaaggaacagcaaaatttaaagaggaaaat

SEQ ID NO: 17336 - protein, 117 aa, Streptococcus agalactiae
MVVVGILNHKKMPDEGRYYLTEKNYNNHTISLNKTEFFTITDDQVTYTKNEELEKISYDSKNNELLLNGKKFWTHLTSGELQLTDPKNTDMTLNYASKNSPLFKSYEKGTAKFKEEN

SEQ ID NO: 17337 - DNA, 852 bp, Streptococcus agalactiae
atgagagatgagcaagaaatatataatttggttttaaacatagcaaatcaagataagagaatcgaagctgtactattgaatggatctcgggctaacccaaatgtaccgaaagatgattttcaagattatgatattgtttttgttactaattttatagaagatattatttctgatactaattatcataaaaaattcggtgatattcttataatgcagaaaccaaatgagtttagaaataagacggaatacaattgctttgcttacttaatgcagtttcaagatctgacgaggattgatttaagacttattaaaccagaattcttggaggattatttagatgatgctttttcaaaagtacttttagataaaaagaataaatatcttgattataattttgaaagaagttctctgtacgaaacaaagcaattgtcagaagatgaaatcaacaaaattcttaatgaaatatattgggttagtacttatgtagtcaaggggatagcaagaaatgatattatgtattcagagtttatgatatctaatcctattaaaaatgcttttattaaacttctaaaacaaaaaatattaatagaaaaagagcttgattcattatcttttggaaagctcgacaaggatatcttgcaatatattacagataaagatcaactattgaaaattttttcaaataaatctttaaaagacattgagtctaatttgcgatttttattggatgaaacaaatcaaatggcgaaatatatttctattaataggaaacttaatctgaaccaaggagaataccaatcagcaatgaaatttatgaatatctttttgtcaaattcatatcaaaatttcaac

SEQ ID NO: 17338 - protein, 284 aa, Streptococcus agalactiae
MRDEQEIYNLVLNIANQDKRIEAVLLNGSRANPNVPKDDFQDYDIVFVTNFIEDIISDTNYHKKFGDILIMQKPNEFRNKTEYNCFAYLMQFQDLTRIDLRLIKPEFLEDYLDDAFSKVLLDKKNKYLDYNFERSSLYETKQLSEDEINKILNEIYWVSTYVVKGIARNDIMYSEFMISNPIKNAFIKLLKQKILIEKELDSLSFGKLDKDILQYITDKDQLLKIFSNKSLKDIESNLRFLLDETNQMAKYISINRKLNLNQGEYQSAMKFMNIFLSNSYQNFN

SEQ ID NO: 17339 - DNA, 105 bp, Streptococcus agalactiae
atgtcatcagttatcatcactctttttatgatagttaagatttttgaactgtcatcttttgaaaaacatttcatcttgactatttctgttaataaatcagctcca

SEQ ID NO: 17340 - protein, 35 aa, Streptococcus agalactiae
MSSVIITLFMIVKIFELSSFEKHFILTISVNKSAP

SEQ ID NO: 17341 - protein, 606 aa, Streptococcus agalactiae
ATGATAAAGTTTAAATTATTTTTTAAATCCACAGAAAAAGAGGAAGAATGGATCGATAAGGTTCAAAAAAGTGGCTATACTTTTACAGGCATTAACTCATTTCTTCCAGCCTTCTATTATTTTAAGAGAGATAAAGAAAAAGACAAGATGTCAATAAAAATGGATTTTAAAAAATACATGTCGAAAGATGACTATACTAACTATATCACTTTATTTGAGGACAGTGGATGGAAGCATATTAGCGGTAGTCGTTGGGGAGGGCTGCATTATTTTCAAAAAATAAAGCCTGAAACCAGTTCAGAGATTTTTTCTGATCAAGAATCAAAATCAGCGATGGCTATGAGTTATTATAAATATACTTGTGAGCATGCGTTTTTCTCTTTATTTTATTTCTTTCTCTTGATAAGAACAACTTCTATCACCATATTTGATCCAAAAAGTTGGTATCTGACGCAAGGTCTATGGGAAATGCAAGGGAAAATATTTTGGTTAGGGTTCTTATTTGAAACACCATTTGCCTTATTAAGAATATTACCTATGTTTTACTTTTTAATTTCTGGAATATACTATATTACACGAGCTGTAAAACCCAAGGAAATTATAAAT

SEQ ID NO: 17342 - protein, 202 aa, Streptococcus agalactiae
MIKFKLFFKSTEKEEEWIDKVQKSGYTFTGINSFLPAFYYFKRDKEKDKMSIKMDFKKYMSKDDYTNYITLFEDSGWKHISGSRWGGLHYFQKIKPETSSEIFSDQESKSAMAMSYYKYTCEHAFFSLFYFFLLIRTTSITIFDPKSWYLTQGLWEMQGKIFWLGFLFETPFALLRILPMFYFLISGIYYITRAVKPKEIIN

SEQ ID NO: 17343 - protein, 333 aa, Streptococcus agalactiae
ATGAAAAGGAATAAACATTTACCGTTAACAGAAACTACCTATTATATTTTATTAGCTTTGTTTGAGGAAGCGCATGGCTATGCTATTATGAAAAAAGTTGAAGAAATGAGTGGCGGTGATGTTAGAATAGCCGCAGGGACAATGTACGGTGCCATTGAAAATTTACTTAAACAAAAATGGATAAAGTCTATCTCAAGTGACGATAGAAGAAGAAAAGTTTATATTATTACTGAGACAGGAAAAGAAATAGTAGAACTTGAAACGAATCGATTAAGAAAGTTACTTAATACTGCTAATCAGTTGGGTTTTGGAGGAGATGGTTATGATAAAGTT

SEQ ID NO: 17344 - protein, 111 aa, Streptococcus agalactiae
MKRNKHLPLTETTYYILLALFEEAHGYAIMKKVEEMSGGDVRIAAGTMYGAIENLLKQKWIKSISSDDRRRKVYIITETGKEIVELETNRLRKLLNTANQLGFGGDGYDKV

SEQ ID NO: 17345 - protein, 549 aa, Streptococcus agalactiae
ATGATATCCTATGCATATCTCATTGCAGAAATATACTTTAAAGTCAAAATAAGGAAATATATTATGGAAATTAAAGAATACGAGAATAATCCGTACCATTTAGCACAGCTAGTAGATTTAATTAATTATTGTCAGAATATAGAAGCTAAACTTGATATAAAGATGGCTGAACAAGACGATATTTTTCAAATAGAAAATTATTATCAAAACAGAAAAGGTCAATTTTGGATTGCATTAGAAAATGAAAAAGTAGTTGGTTCGATTGCGTTACTGCGTATTGATGATAAAACAGCTGTTCTAAAAAAATTTTTTACATATCCAAAATATAGAGGAAATCCTGTTCGACTCGGTCGAAAATTATTTGAAAGATTTATGCTTTTTGCTCGAGCTAGTAAATTCACAAGAATTGTCTTGGATACTCCAGAAAAAGAGAAAAGATCTCACTTCTTTTATGAAAATCAAGGATTTAAGCAAATAACAAGAGATAAACTAGATGTAGACTACATTTTTCCAGATAGAGATTCAAGGATATATGTAAAACTTCTTGAT

SEQ ID NO: 17346 - protein, 183 aa, Streptococcus agalactiae
MISYAYLIAEIYFKVKIRKYIMEIKEYENNPYHLAQLVDLINYCQNIEAKLDIKMAEQDDIFQIENYYQNRKGQFWIALENEKVVGSIALLRIDDKTAVLKKFFTYPKYRGNPVRLGRKLFERFMLFARASKFTRIVLDTPEKEKRSHFFYENQGFKQITRDKLDVDYIFPDRDSRIYVKLLD

SEQ ID NO: 17347 - protein, 759 aa, Streptococcus agalactiae
ATGAAATCTTTAGCAGTAATGTTAAAAAAAGAATGGATGGAGAATGTTAGGACATACAAAGTTATATCTATTCTGATTACTTGTTCAATATTTGGTATATTAGGTCCCTTAACTGCACTTATGATGCCTGATATTATGGCAGGAATTTTACCTAAAAAACTACAGGGAGCGATACCAGAGACTACCTATATTGATTCTTATATTCAGTATTTTAAAAATATGAATCAGCTTGGTTTAGTTATTTTAGTATTTTTATTTAGTAGTACACTGACGCAAGAATTTTCAAAAGGAACCTTAATTAATCTAGTTACGAAGGGATTAGCCAAAAAAGTTATAATCCTTGCTAAATTTATAGTAATTACCCTTCTATGGACAGTGTCATACTTATTAAGTGTTGTCATCCATTTTAGTTATACGTTATATTACTTTAGTAACGAAGGAAGTCATAAATTAATGGTTTACGGTGCAACATGGTTTATCGGTATTCTTTTCATAAGCTTAATACTCTTTTTTTCAGTTCTTTTTCGTAAAACTTTAGGGATTTTGTTAGGTTGTCTTTTTATGGTGGTGTTATGTGTAGTATCTGGATTTTTTAAAATCAGTAAAAGCTATAATCCTATGCTTCTTATCCAAAAACAAGGAGAAATGTTAAGTGGAAAGTTTAAAGTTCAAGACTTAATGGAACCGAGCATATTAGTGTTTTTGCTTATTATAATGACGTTATTACTTAGCATGTACATTTTTGAAAAAAGTGAAGTT

SEQ ID NO: 17348 - protein, 253 aa, Streptococcus agalactiae
MKSLAVMLKKEWMENVRTYKVISILITCSIFGILGPLTALMMPDIMAGILPKKLQGAIPETTYIDSYIQYFKNMNQLGLVILVFLFSSTLTQEFSKGTLINLVTKGLAKKVIILAKFIVITLLWTVSYLLSVVIHFSYTLYYFSNEGSHKLMVYGATWFIGILFISLILFFSVLFRKTLGILLGCLFMVVLCVVSGFFKISKSYNPMLLIQKQGEMLSGKFKVQDLMEPSILVFLLIIMTLLLSMYIFEKSEV

SEQ ID NO: 17349 - protein, 813 aa, Streptococcus agalactiae
ATGATTTATGGATTCGTAGGACCAAATGGAGCAGGTAAAACAACGACAATAAAAATGATTTTAGGATTGTTAAAATTTGATACGGGTTTCATAACAATTTTTGGTAAAAAAGTTAATTTTGGAAGAACAGATACCAATCAACTGATTGGCTATCTCCCAGATGTTCCCGAGTACTACGATTATATGACAGCTCTAGAATATCTTGATTTATGTTCTGGTTTAGCGAGATCAAAGCATAAGCTTTCTAACAAAGAACTACTTAGGTCAGTTGGACTTGACGATAATCACCAAAAGATTGCTACTTATTCTCGAGGAATGAAACAACGTCTTGGATTAGCCCAAGCACTGGTCCATGATCCTAAAATTATTATTTGCGATGAACCAACCTCTGCATTAGACCCGAAAGGTCGCCAAGATATTTTAGATATTATTTCAAATCTTAGAGGAGAAAAAACTGTGATTTTTTCTACCCATATTCTCTCTGATGTCGAAAAAATATGTGATCACGTTCTGGTGTTAACTAAGTGTGGGATTTATTCTCTTGAAGAGTTAAAAGGAAAAAAATCAGAGGAAAATTATTCGGTTCGTATTTTAATAAAAGTGACAAAGTCTGAAGCTAAGGTACTATCTCATAACTATCAGATAGAAAAGAAAGATAATGAGTATGCACTGACTCTCAAAGGCTCTAAAATGGATAACAAAGCAGATTTACTAGCTGGTTTTTACCAAGATTTAGTTTCTTTAAAGATTAGCCCATCAGCTATTGAAGTCATTGACAATAGTTTAGAGGAGCTTTATTTGGAGGTTACCAAA

SEQ ID NO: 17350 - protein, 271 aa, Streptococcus agalactiae; identical to SEQ ID NO: 3666

SEQ ID NO: 17351 - DNA, 204 bp, Streptococcus agalactiae
atgaatacagaaataccaaatcaattattaccattcctagttccgttgattatgttgcaaggagctttaattatcatttctctagtcaaactaagtaaacttaagatgactaaacacctttcaaagccagtttggtttttggtcattatatttcttaatataattgggccaattgcatttcttattttggaagggaataatgaa

SEQ ID NO: 17352 - protein, 68 aa, Streptococcus agalactiae; identical to SEQ ID NO: 8376

SEQ ID NO: 17353 - DNA, 1074 bp, Streptococcus agalactiae
atgcttggagagaatatctatttacaacgtactcagattggtatgacgcaagagaatttgagtgattatttgcatttaacaaaaactacaatttcaaagtgggaaaataatcaagctaaaccggatattgactatcttattttgatggctaatctttttgatattagcttggatgacttagtcggttatcaaaaaacattgtcagatgatcaaagaaatcagctcattaaggatctaaaaataaaagcaaatgtattgtctgagagagatttctttcaggaagttaaggaattatcaaaacagttccctaacgattttaagactctgttgataatgattaatatggtcttgagcaacctaaccaaccttaatgattcagaaatgaaagagtggtcactaagtacactaaataaaattattagtaaaacagtagttgagtctgacctccagacggcgataatgttcaaaacggtcgttctttttcacaaccttgaatatgatgaagtgataaacctttaccagaatagtccctataaattaggtgaagaattacttttagctaatagcttttttgcaaaaggcgatgtttaccgagctaagcaagtattacaggttgaaatttatcagcagattctacttgtatgcgagtatctattgagtttatcaacttttgaagttgaagaaaacaaaggcgatatttttgaaaggcttgaacatatgatagaagcgtttcaattaaactctttgcatcccaacacagtcatcaagtgttattatagtttagcttgtcattatagtaaaagtgatgatgataaggcattaggatatttaaaacaatgttttaaatctttaaaacagttgctccaaagatttgaattacacggtgatactttcttttataccatcgatgattggttagagacaatacctactggtattgcaccaccgacgagtcaattacaggtaatagaacgagttgaggacttatttcaaaattcacaatttaaagaactatcagggcgtaaagaatttcaacaaattattcaaaaacttaacgatttaaaaaaggattac

SEQ ID NO: 17354 - protein, 358 aa, Streptococcus agalactiae
MLGENIYLQRTQIGMTQENLSDYLHLTKTTISKWENNQAKPDIDYLILMANLFDISLDDLVGYQKTLSDDQRNQLIKDLKIKANVLSERDFFQEVKELSKQFPNDFKTLLIMINMVLSNLTNLNDSEMKEWSLSTLNKIISKTVVESDLQTAIMFKTVVLFHNLEYDEVINLYQNSPYKLGEELLLANSFFAKGDVYRAKQVLQVEIYQQILLVCEYLLSLSTFEVEENKGDIFERLEHMIEAFQLNSLHPNTVIKCYYSLACHYSKSDDDKALGYLKQCFKSLKQLLQRFELHGDTFFYTIDDWLETIPTGIAPPTSQLQVIERVEDLFQNSQFKELSGRKEFQQIIQKLNDLKKDY

SEQ ID NO: 17355 - DNA, 831 bp, Streptococcus agalactiae
atggtcacaggaggattccgactagacctcttacttgagataactaagatagctcgtgcaacttactattatcaactaaagaaactgaataaaccagataaagacaaagcaatcaaatctgacattcaatccatttatgatgaacatagaggaaactatggctatcgtcggatttatttagaactgcgaaatcgtggctttgtcatcaaccacaaaagggtgcaaggcttgatgaaaagtatgggcttgactgctcgtattcgtcgtaagcgcaagtatgcctcttacaaaggtgaggttggtaagaaggctgataacctgattcaacgccagtttgaggggtcgaagccctatgagaagtgctataccgatgtgacggagtttgctttacctgaagggaaactttatctatcgcctgttcttgatggctataacagtgagataattgattttaccctgtctcggtctcctgccttgaaacaggttcaaaccatgcttgagagggcttttcctgcggcttcatacagcgaaaccattctccacagcgaccaaggctggcagtaccagcacaagtcctaccatcaatttctggaggacaaaggcattcgtccttctatgtcacggaaggggaacagtcctgacaacggtatgatggaatctttctttgggattctaaagtctgagatgttctatggcttggagaagtcttacaaatcacttgatgaccttgagcaagctatcacagattacattttttactacaacaacaagcgaatcaaagcaaaactaaaaggacttagtcctgtgcaatacagaactaaatccttcact

SEQ ID NO: 17356 - protein, 277 aa, Streptococcus agalactiae; identical to SEQ ID NO: 14132

SEQ ID NO: 17357 - DNA, 534 bp, Streptococcus agalactiae
atgaaattaagttatgaagataaactagaaatatacgagttaagaaagatcgggatgtcctggtctcagattagtcaacgatatgatgttcgtatctcgaatcttaaatacatgataaaactcatggataggtatggtgtagaaatcgtcgaaaaaggtagaaatgagtattatccacctgaattaaagcaggaaatgatagataaagtcttgattcatggttgttctcaactctctgtttctcttgattatgctctctctaattgttctatactcacaaattggctttcccaatttaagaaaaatggttatactattgttgagaaaacaagagggagaccgagtaaaatgggacgtaagcgtaagaaaacttgggaagaaatgacagagctcgagcgacttcaggaagaaaatgagcgcttgagaacggagaatgcctttctaaaaaagttgagggatttgcgcttgagggacgaagccttacagagcgaacggcagaaacaattagagaaatggtcacaggaggattccgac

SEQ ID NO: 17358 - protein, 178 aa, Streptococcus agalactiae; identical to SEQ ID NO: 2808

SEQ ID NO: 17359 - DNA, 612 bp, Streptococcus agalactiae
gtgaacaagaaatcctttttccagtgtgttatactacttgtttcttttttagtgttaacattagcagttaaatctcaaagtgatatgataagttatttggataatatcacttcagctttttttcaaagcatacgaaactccgatttaactaacttaatgacgataatatcaacagttgtcagccctttgacaacgtcattaatagcacttgttatccttgggtatcaatattttttaaaccaaaggatagctgtgtggctatttatgttattttttggtaccaatgctttggcattgcttttaaaagatatcatcgcacgtcatagacctatgaatcaacttatttttgactcaggttatagttttcccagtggacatacgatatcaacgtttttattaatgattcttgttttagtggttgcaagacagagattgagaagagtattgtcacaagtagttttcgtaatatttgcattagtaatccttgcatcagttattttttcaagactttatttagaaaatcattttttaacggatattttagggtcgttgttactaggagcatcgtcatattgtggtttgtctgctattgtatctttgaaagagttacaa

SEQ ID NO: 17360 - protein, 204 aa, Streptococcus agalactiae
MNKKSFFQCVILLVSFLVLTLAVKSQSDMISYLDNITSAFFQSIRNSDLTNLMTIISTVVSPLTTSLIALVILGYQYFLNQRIAVWLFMLFFGTNALALLLKDIIARHRPMNQLIFDSGYSFPSGHTISTFLLMILVLVVARQRLRRVLSQVVFVIFALVILASVIFSRLYLENHFLTDILGSLLLGASSYCGLSAIVSLKELQ

SEQ ID NO: 17361 - protein, 315 aa, Streptococcus agalactiae; identical to SEQ ID NO: 12583

SEQ ID NO: 17362 - protein, 105 aa, Streptococcus agalactiae; identical to SEQ ID NO: 12584

SEQ ID NO: 17363 - protein, 558 aa, Streptococcus agalactiae
ATGAGAATAACTATTTTTTGTGGAGCAAGTACTGGGGAAAATCCTGTTTATAGTGAAAAAACAGTTGCCTTGGCACAATGGATGGCACAAAACAAACATGCTCTGGTGTATGGTGGAGGAAAAGTTGGCTTAATGGGAGTCATGGCTGATACTGTGATTGCAAATGGTGGCTATACTACTGGTGTTATTCCGACATTTTTAAGAGATCGTGAAATTGCACATGAAAATTTATCAGAGCTTATCATAGTAAATAATATGCCTGAACGTAAGGCAAAAATGATGCTACTTGGAGATGCCTTTATCGCTCTACCTGGTGGACCTGGTACCCTTGAAGAAATTTCCGAAGTTATCTCTTGGTCTCGCATCGGTCAAAATGATAATCCTTGCATTTTATATAATGTTAATGGCTACTTTAATGATTTAAAAAATATGTTTGATCATATGGTTAGTGAGGGTTTTCTTAGTCTGGAAGATAGAGAAAATGTCCTATTCTCAGATGATATTGCTGAAATCGAAGATTTTATAACGAATTATAAAGTCCCTAGCACGCGCCAATAC

SEQ ID NO: 17364 - protein, 186 aa, Streptococcus agalactiae
MRITIFCGASTGENPVYSEKTVALAQWMAQNKHALVYGGGKVGLMGVMADTVIANGGYTTGVIPTFLRDREIAHENLSELIIVNNMPERKAKMMLLGDAFIALPGGPGTLEEISEVISWSRIGQNDNPCILYNVNGYFNDLKNMFDHMVSEGFLSLEDRENVLFSDDIAEIEDFITNYKVPSTRQY

SEQ ID NO: 17365 - protein, 861 aa, Streptococcus agalactiae
TTGAATCAAGAAAAAAAGAGACTTAACCTAATCGGGCTGATACTTTTAGCTCAGGCTATTGTTTTAAGTTTGGCGACTACACTATTTGCTGAAATCTTACAAAATGATGTCTGGATAGGTATAGCAAGTACTTTAATCGCCTTACTCATTCCTTGTTTTTTTATGGGTTTTAAAAATTTAAAAAAACATCTAACGGCAACTCATCATACAATCACTTTCACCACTATTTTATTCTTGTTAAGCATTATATATACTACTAATAATATAGTCTCCACAATATGGGATGCTGTGCTAAATCATCTCAATATTATGGAATCGGAAAGTCAAAATTATGATGCCACATTCAGTATACTTATGATTAGTTATTCTGTTGTTGTAGGTCCTTTTTTTGAAGAAGTTTTATACCGAGGAATAGTATTGAATTTATTATCCAAGTATGGTAAATGGTTTGCCATTATCACTTCTGGCATCCTATTTGGTTTAATGCACCAAGACATTTCTCAGCTATTGACTACATCTATTGCGGGTATCATAATGGGTTTTATCGCTTACCATTATTCCTTTAAGGTAGCCCTACTCCTTCATATCTGCAATAACTTTATCGTAGAAATTTTCACCCAGCTATCAACAGTAAACGAGTTATACGGGACTTATTTTGAAAATATATTGCTAATTTTAGCAATCTTATTTATATTATATTACCTTTTTACGCATAGGAATACTGCTCGCCGTCGTATAAGTCTGCACTCTAACGTTCGAGAGGCTGACTCAATAAACTCTAAACAACACACAAAATTATTACTTACTAGTTGGCCTTTTATTCTCCTTGTCATTTACGACATTGTCCTAACAACTATTAAT

SEQ ID NO: 17366 - protein, 287 aa, Streptococcus agalactiae
MNQEKKRLNLIGLILLAQAIVLSLATTLFAEILQNDVWIGIASTLIALLIPCFFMGFKNLKKHLTATHHTITFTTILFLLSIIYTTNNIVSTIWDAVLNHLNIMESESQNYDATFSILMISYSVVVGPFFEEVLYRGIVLNLLSKYGKWFAIITSGILFGLMHQDISQLLTTSIAGIIMGFIAYHYSFKVALLLHICNNFIVEIFTQLSTVNELYGTYFENILLILAILFILYYLFTHRNTARRRISLHSNVREADSINSKQHTKLLLTSWPFILLVIYDIVLTTIN

SEQ ID NO: 17367 - protein, 300 aa, Streptococcus agalactiae
ATGACTAAAAAGATAACTGTTGTAGCATTAGAAACATTGATTGCCCAGCATAATAATATCCATTTGATAGACGTTCGTGAAGAGCATGAGTATCGTGGAGGGCATATTCCAGGTGCGATAAATCTTCCTTTGAGTCAACTCAGTCATAAGTTTGAACAGTTAGATAAAAATAAGGAATATTATCTTGTTTGTCAACGAGGGGGAAGATCTATTAGAGCATGCCAATTTCTCGAGTTGAAAGGCTACAAAGTAATCAATGTAGATGGTGGCACAGAAGCGTGGAGAGGAAATCTAGAAGTG

SEQ ID NO: 17368 - protein, 100 aa, Streptococcus agalactiae; identical to SEQ ID NO: 12590

SEQ ID NO: 17369 - protein, 656 aa, Streptococcus agalactiae
GTGGTAAATCATGTAAATAGTAATAATCAAGCCCAGCAAATGGCTCAAAAGCTTGATCAAGATAGCATTCAGTTGAGAAATATCAAAGATAATGTTCAGGGAACAGATTATGAAAAACCGGTTAATGAGGCTATTACTAGCGTTGAAAAATTAAAGACTTCATTGCGTGCCAACCCTGAGACAGTTTATGATTTGAATTCTATTGGTAGTCGTGTAGAAGCCTTAACAGATGTGATTGAAGAATCACTTTTTCAACTCAACATTTAACAAATAAGGTTAGTCAAGCAAATATTGATATGGGATTTGGGATAACTAAGCTAGTTATTCGCATTTTAGATCCATTTGCTTCAGTTGATTCAATTAAAGCTCAAGTTAACGATGTAAAGGCATTAGAACAAAAAGTTTTAACTTATCCTGATTTAAAACCAACTGATAGAGCTACCATCTATACAAAATCAAAACTTGATAAGGAAATCTGGAATACACGCTTTACTAGAGATAAAAAAGTACTTAACGTCAAAGAATTTAAAGTTTACAATACTTTAAATAAAGCAATCACACATGCTGTTGGAGTTCAGTTGAATCCAAATGTTACGGTACAACAAGTTGATCAAGAGATTGTAACATTACAAGCAGCACTTCAAACAGCATTAAAA

SEQ ID NO: 17370 - protein, 219 aa, Streptococcus agalactiae
MVNHVNSNNQAQQMAQKLDQDSIQLRNIKDNVQGTDYEKPVNEAITSVEKLKTSLRANPETVYDLNSIGSRVEALTDVIEAITFSTQHLTNKVSQANIDMGFGITKLVIRILDPFASVDSIKAQVNDVKALEQKVLTYPDLKPTDRATIYTKSKLDKEIWNTRFTRDKKVLNVKEFKVYNTLNKAITHAVGVQLNPNVTVQQVDQEIVTLQAALQTALK

SEQ ID NO: 17371 - DNA, 171 bp, Streptococcus agalactiae
atgagagatgagcaagaaatatataatttggttttaaacatagcaaatcaagataagagaatcgaagctgtactattgaatggatctcgggctaacccaaatgtaccgaaagatgattttcaagattatgatattgtttttgttactaattttatagaagaaaattatttc

SEQ ID NO: 17372 - protein, 57 aa, Streptococcus agalactiae
MRDEQEIYNLVLNIANQDKRIEAVLLNGSRANPNVPKDDFQDYDIVFVTNFIEENYF

SEQ ID NO: 17373 - DNA, 105 bp, Streptococcus agalactiae; identical to SEQ ID NO: 17339

SEQ ID NO: 17374 - protein, 35 aa, Streptococcus agalactiae; identical to SEQ ID NO: 17340

SEQ ID NO: 17375 - DNA, 261 bp, Streptococcus agalactiae
gtggaggactcaaataataaaagttggatatctgaagaagatcagataaaaattatgaatcaggcattctcctggcttatagatgaacttgattttagaggctttgacgaagagcttggatggatacatgtctttgctcatggagctgatttattaacagaaatagtcaagatgaaatgtttttcaaaagatgacagttcaaaaatcttaactatcataaaaagagtgatgataactgatgacatactaacattaaacggt

SEQ ID NO: 17376 - protein, 87 aa, Streptococcus agalactiae
MEDSNNKSWISEEDQIKIMNQAFSWLIDELDFRGFDEELGWIHVFAHGADLLTEIVKMKCFSKDDSSKILTIIKRVMITDDILTLNG

SEQ ID NO: 17377 - DNA, 537 bp, Streptococcus agalactiae
atgaaaatagcaataatcggatatagtgggtcaggtaagtccactttagcgagaaaattgggaaattactataattgcaatgtattacaccttgatagtattcacttcgccccaaattgggaagagagaaaatatgatgacatgattgacgatgtcagcagcatgttagaaaaaagaacatggattatagaaggtaactacaaaaaactgctatatcaagaacgtctagcagatgcagatgagattattttttttgactttaatcgcttcaactgcttgtggagagcattcaaacgttactgtaagtttcgtggtaagactagacctgatatggccaatggatgcccggaaaaattagattttgaatttatcagttggattcttaaagacggtcgctctgacaaacaaaaatcaaactataaacaagttgttgaggactaccctcaaaaaataaaggtgctaaaacaccaacgcgatcttgatcaatacctaaaagaactccctgttgcatccaatacagaccctctcaagagctta

SEQ ID NO: 17378 - protein, 179 aa, Streptococcus agalactiae
MKIAIIGYSGSGKSTLARKLGNYYNCNVLHLDSIHFAPNWEERKYDDMIDDVSSMLEKRTWIIEGNYKKLLYQERLADADEIIFFDFNRFNCLWRAFKRYCKFRGKTRPDMANGCPEKLDFEFISWILKDGRSDKQKSNYKQVVEDYPQKIKVLKHQRDLDQYLKELPVASNTDPLKSL

SEQ ID NO: 17379 - DNA, 1083 bp, Streptococcus agalactiae
atgacaacaaatgtaatggcaaattatagctacggagaagattgcttcaaagaaattcctagcgttttggcaacttaccgtattcaaagcattgctttcgtgggtggcaaacgtgccctagacagctcagaagccgaggttcgctctattttagaggaagcaaatattaaagtcacaggaagctttgtctatggaacggattcaacacaatctaacattgacaagttagtagccaacccacaagttcaagctgctgatgctatcttaggttttggcggtggaaaagctttagacacagctaaaatggtagcaaaagagttaggtaaaaatagctttactatcccaactatttgttctaattgctccgcaggtactgccattgcagttgtatataatgatgaccattctttcttaagatacggctatcccgagtctccacttcatatttttatcaatacacggatcattgcacaggcaccaagcaaatatttttgggctggtattggggacggtatttcaaaagcccctgaagtagaacgtgctaccttagaggctaagaccaataaactaccacatactgcagtgttaggacaagcagtcgctctgtcttcaaaggaagctttttatcaatttggtgaacaaggtctaaaagacgttgaagctaatttagcttcgcgtgcagttgaagaaattgcgcttgatatcttaatctcaactggctatgcttctaatttagttaatcaacctgatttctactacaattcttgtcacgcgcatgcattttactatggtacaaccgctattcaaagacaaggtgaattcttacatggcgttgtagttgcgtttggtgtgttagttttacatgcttatttcaacgaactagaagaacttgaaaaagtagctcgttttaataagtcactaggtttgccaacaactctagctgacgtctctttatcagaaaaagatattccaaaaattgttgaaattgcaatgactactaatgaatacaaaaatacccctttcgatcccaaaatgtttgctcaagctattttagcagcagacgctttcggacagacactagcc

SEQ ID NO: 17380 - protein, 361 aa, Streptococcus agalactiae; identical to SEQ ID NO: 3688

SEQ ID NO: 17381 - protein, 705 aa, Streptococcus agalactiae
ATGGTATGTGTCGATTTTATTGATCAAAAAGTTTATAGTGAAGCAGAAGGTCTATTTGTTTCCGATTTAGACTTAGGCATTAAAGGTTTAATAAGAGCACGTTATCCTTTCGCTCTGGATAGTGACTTTATTTCGTATGGGAATTTAAGTCATTATTGTATGAATTATCTTGATGAAATTGTTCAGCGAGCGAATCAGAAAAATGAGAAGATAAAATATAATGTGACTACCTTGATGAAAGAAGAAGAGAAGCCCTTCAACGTTGAAGAGCGTTTGAACAAGCAAGCAACTATCGGTCAACGAATTGCTGATGATGTTGCACGTTTTGGCGGATCTTGGACTTTTATTATCGTTTTTGTATCCATTATGGCTATTTGGATGTTGGTTAATATCATGAAGCCTTTTGGTATTCAATTTGATCCTTACCCATTTATCCTGTTAAACTTAGCTTTATCAACGATTGCTGCGATCCAAGCACCACTTATTATGATGAGTCAAAATCGTGCTGCTGATTATGATCGTTTGCAAGCTCGAAATGACTTTAATGTCAATAAAACCTCTGAGTTAGAAATTAGATTATTGCACGAAAAAATTGACCATATGGTACAACAAGATCAGTTTGAATTGTTAGAGATTCAAAAGTTACAGACAGAAATGCTAGTATCATTGGGAAATCAGTTAGCACAATTGAAACAACTACAAAAA

SEQ ID NO: 17382 - protein, 235 aa, Streptococcus agalactiae; identical to SEQ ID NO: 3690

SEQ ID NO: 17383 - protein, 1842 aa, Streptococcus agalactiae
ATGTCCAAGTTTTTAGAGAAATTAAAAACAGATATTCTAGTAGCTGACGGTGCAATGGGAACTCTCCTTTATACTTATGGGCTAGATACTTGTCATGAATCCTACAATGTAACACATCCAGAAAAGGTTCTAGCCATTCATCAAGCTTATATTGAAGCGGGTGCAGATGTTATTCAGACGAATACCTATGGGGCTCAACGTCATCGATTAAAGAACTACGGTTTGGAAGATCAGGTTGTCTCTATCAATCAAGCAGCAGTTAATATAGCTCATCAAGCGACTTTGGGTAAAGAAACATTTATTTTAGGTACTGTTGGAGGTTTTCGTTCTCAAAGACAATGCGATTTAACATTGGATAATATTGTAGAAGAAACTTTGGAACAAGTTGAGGCTTTATTGGTGACAGGACAGCTAGACGGATTATTGTTTGAAACTTATTATGATATTGAGGAGATAACGACAGTTTTAAAAATTGTGAGGGAGATGACTGATCTACCAATTATTACTAATATTTCTCTTCATGAAGCAGGGGTAACATCAAATGGAAAGCCTATTGTAGAGGCGCTCAGCCAATTAGTTATGCTAGGTGCAGATGTGATTGGCTTAAATTGTCACCTTGGACCCTATCATATGATCCAATCATTGAAGCAAGTTCCTTTATTTGCCCAGTCTTATTTGTCAGTTTATCCTAATGCAGGTCAGTTATCTTTAGATGGTGAGAATAGTCAATACCAGTTTAGTCAGAATTCAGAGTATTTTGGAAAATCTGCAGAACTTCTCGTAGCAGAAGGAGTTAGGCTTATTGGTGGTTGTTGTGGGACAACTCCAGATCATATTAGAGCTGTGAAACGATCTATTAGAGGATTGAAACCTATTGAACGAAAGGTTGTTACTCCTATAATACCTGTAAAAGATTTTGTTAGGCGTATCAGACGAACAGATACTCTAGTGGATAAGGTAAAAAAAGAAGTAACAATTATCGCAGAATTAGATCCTCCAAAACATTTAGATATCGTTCAGTTTCAAAAGGCTATACGAGCGATTGACCAAAAAGGTATTGCAGCAATTACTTTAGCAGATAATTCACTATCTAATACACGTATTTGTAATTTAAGTATAGCTAGCTTGCTTAAAGACGAAATTAGTACACCCTTTTTACTACATATAGCTTGTCGTGACCATAATTTAATTGGTTTACAGTCTAGACTGTTGGGCATGGAATTATTAGGTTTTAACCATATTTTAGCCATAACAGGAGATCCGACTAAACTTGGTGATTTCCCAGGAGCGACTAGTGTTTATGATGTGACTTCCTTTAAACTCCTTTCTCTGATTAAACAACTTAATCAAGGTTTATCTTATAGTGGTGCTAGCTTGAGACGTCCAACAGATTTTACAGTTGCTGCTGCCTTTAATCCTAATGTGAAAAACCTTACTCGAACCGTAAAATTGATTGAGAAAAAAGTAGCTTCTGGTGCTGATTATTTTATGACACAACCAATATTTGATCACTCTGTGTTAAGGGAATTAGCTGATCTTACTAAAACAGTTGAACAACCCTTTTTTATCGGAATTATGCCAATAACAAGTTATAATAACGCTGTTTTTCTACACAATGAAGTTCCTGGTATTAAACTTTCTGAGTCATTTTTATCTGCTCTTGAAAAGGTAAAGGACGACAAAGAAGCTTGTTTAACTTTGGCCTTAAACGAGAGTAAGTCCTTGATTGATGAAGCCTTGAACCATTTTAATGGTATCTATTTGATTACTCCCTTTTTACGCTATGATCTGACTCTTGAGTTAATTGACTATATACAAAAAAAGCAAGTAAGAAAGTCCTCT

SEQ ID NO: 17384 - protein, 614 aa, Streptococcus agalactiae
MSKFLEKLKTDILVADGAMGTLLYTYGLDTCHESYNVTHPEKVLAIHQAYIEAGADVIQTNTYGAQRHRLKNYGLEDQVVSINQAAVNIAHQATLGKETFILGTVGGFRSQRQCDLTLDNIVEETLEQVEALLVTGQLDGLLFETYYDIEEITTVLKIVREMTDLPIITNISLHEAGVTSNGKPIVEALSQLVMLGADVIGLNCHLGPYHMIQSLKQVPLFAQSYLSVYPNAGQLSLDGENSQYQFSQNSEYFGKSAELLVAEGVRLIGGCCGTTPDHIRAVKRSIRGLKPIERKVVTPIIPVKDFVRRIRRTDTLVDKVKKEVTIIAELDPPKHLDIVQFQKAIRAIDQKGIAAITLADNSLSNTRICNLSIASLLKDEISTPFLLHIACRDHNLIGLQSRLLGMELLGFNHILAITGDPTKLGDFPGATSVYDVTSFKLLSLIKQLNQGLSYSGASLRRPTDFTVAAAFNPNVKNLTRTVKLIEKKVASGADYFMTQPIFDHSVLRELADLTKTVEQPFFIGIMPITSYNNAVFLHNEVPGIKLSESFLSALEKVKDDKEACLTLALNESKSLIDEALNHFNGIYLITPFLRYDLTLELIDYIQKKQVRKSS

SEQ ID NO: 17385 - protein, 2235 aa, Streptococcus agalactiae
ATGGTAAAAGTTTCAAATTTAGGGTATCCACGTCTTGGTGAACAGCGCGAATGGAAGCAAGCGATCGAAGCTTTCTGGGCAGGGAATCTTGAACAAAAAGATTTAGAAAAACAACTAAAACAATTACGTATCAATCATTTAAAGAAACAAAAAGAGGCAGGTATTGACCTTATTCCAGTGGGGGATTTTTCTTGTTATGATCATGTTTTGGATTTGTCATTTCAATTCAATGTAATCCCAAAGCGTTTCGATGAGTATGAGAGGAATTTAGACCTTTATTTTGCTATTGCAAGAGGTGACAAAGATAATGTCGCATCATCTATGAAAAAGTGGTTTAATACCAACTACCACTACATAGTCCCAGAATGGGAGGTTGAGACTAAACCTCACTTGCAGAATAATTACTTACTTGATCTTTATCTAGAAGCTAGGGAAGTAGTTGGTGATAAAGCAAAGCCGGTTATCACTGGTCCAATAACCTATGTTTCCTTATCATCAGGAATTGTCGACTTTGAAGCGACTGTTCAGCGGTTATTACCACTTTATAAGCAGGTCTTTCAAGATCTGATAGATGCAGGCGCCACCTATATTCAGATTGATGAGCCGATATTTGTAACTGATGAAGGTGAACTTTTAGTAGATATAGCTAAGTCTGTCTATGATTTTTTTGCAAGAGAAGTACCACAAGCCCACTTCATCTTTCAAACCTACTTTGAATCAGCAGTCTGTTTAGATAAACTCTCTAAGCTGCCAGTAACGGGATTTGGCCTTGATTTTATACATGGTAGGGCGGAAAATGTAGCTGCTGTTAAGCAAGGTCTATTCCGCGAAAAAGAATTATTTGCAGGAATTGTTAATGGTCGAAATATCTGGGCAGTAAATTTAGAAGAAACGTTGGCTTTATTGGAAGAGATAGGTCCCTTTGTTAAACGTTTGACCCTTCAACCTTCTTCAAGTCTTTTACATGTACCGGTGACGACTAAATACGAAACACATTTAGACCCTGTGTTAAAGAATGGCTTATCATTTGCTGATGAAAAACTAAAGGAATTAGAACTATTAGCGAGTGCTTTTGATGGTAATAAAACAAAGGGATATCACGAAGCTTTATCTCGTTTTTCAGCTCTTCAAGCTGCTGATTTTCGTCATGTAGCGTTGGAATCATTAGCAGAAGTAAGGCTTGAACGAAGTCCGTATAAATTACGCCAAGCTTTGCAAGCTGAAAAATTACAGTTACCGATTTTACCAACAACAACTATTGGGTCCTTTCCTCAATCACCTGAAATTAGGAAGAAACGCCTTGCTTGGAAAAGAGAAAATCTATCTGACTCAGATTATAAAGATTTCATAAAAACTGAAATTAGAAGATGGATTGCTATTCAAGAAGATCTTGATCTTGATGTGTTAGTACATGGCGAATTTGAGCGCGTGGATATGGTTGAATTTTTTGGTCAAAAGTTAGCTGGTTTTACGACAACCAAATTAGGCTGGGTACAGTCTTATGGTTCAAGGGCGGTCAAACCACCTATCATTTATGGTGATATCAAACATATTCAACCCTTAAGCCTTGAAGAAACGGTTTATGCCCAAAGCTTGACTAAGAAACCTGTTAAAGGCATGTTGACAGGTCCTATTACTATAACGAACTGGTCATTTGAGCGAGATGATATCAGCCGATCTGATCTTTTTAATCAAATTGCTTTGGCTATAAAAGATGAGATTCAACTTTTGGAACAATCAGGTATTGCTATTATACAAGTGGATGAAGCAGCCCTTCGAGAAGGCTTACCCTTACGCCAGCAAAAGCAACAGGCTTACTTAGATGATGCTGTTGCGGCCTTTAAAATTGCAACTTCATCTGTGAAAGATGAGACACAAATTCATACACATATGTGTTATTCAAAATTTGACGAAATTATTGATTCTATCCGTTCACTAGATGCAGATGTTATTTCTATTGAAACGAGTAGAAGTCATGGGGACATCATTGAAAGTTTTGAAACAGCAGTTTATCCTCTAGGAATTGGTCTGGGTGTTTATGATATTCATTCTCCTCGCATACCTACTAAGGAAGAAATTATTGTCAATATTCAACGATCACTAAAATGTCTATCAAAAGAGCAATTTTGGGTAAACCCTGACTGTGGCTTAAAAACACGTCGTGAAGCAGAAACAATTGCTGCCTTGGAGGTTCTTGTTTCAGCTACCAAAGAGGTTCGTCAGCAATTAGATAAT

SEQ ID NO: 17386 - protein, 745 aa, Streptococcus agalactiae
MVKVSNLGYPRLGEQREWKQAIEAFWAGNLEQKDLEKQLKQLRINHLKKQKEAGIDLIPVGDFSCYDHVLDLSFQFNVIPKRFDEYERNLDLYFAIARGDKDNVASSMKKWFNTNYHYIVPEWEVETKPHLQNNYLLDLYLEAREVVGDKAKPVITGPITYVSLSSGIVDFEATVQRLLPLYKQVFQDLIDAGATYIQIDEPIFVTDEGELLVDIAKSVYDFFAREVPQAHFIFQTYFESAVCLDKLSKLPVTGFGLDFIHGRAENVAAVKQGLFREKELFAGIVNGRNIWAVNLEETLALLEEIGPFVKRLTLQPSSSLLHVPVTTKYETHLDPVLKNGLSFADEKLKELELLASAFDGNKTKGYHEALSRFSALQAADFRHVALESLAEVRLERSPYKLRQALQAEKLQLPILPTTTIGSFPQSPEIRKKRLAWKRENLSDSDYKDFIKTEIRRWIAIQEDLDLDVLVHGEFERVDMVEFFGQKLAGFTTTKLGWVQSYGSRAVKPPIIYGDIKHIQPLSLEETVYAQSLTKKPVKGMLTGPITITNWSFERDDISRSDLFNQIALAIKDEIQLLEQSGIAIIQVDEAALREGLPLRQQKQQAYLDDAVAAFKIATSSVKDETQIHTHMCYSKFDEIIDSIRSLDADVISIETSRSHGDIIESFETAVYPLGIGLGVYDIHSPRIPTKEEIIVNIQRSLKCLSKEQFWVNPDCGLKTRREAETIAALEVLVSATKEVRQQLDN

SEQ ID NO: 17387 - protein, 210 aa, Streptococcus agalactiae; identical to SEQ ID NO: 8403

SEQ ID NO: 17388 - protein, 70 aa, Streptococcus agalactiae; identical to SEQ ID NO: 8404

SEQ ID NO: 17389 - protein, 231 aa, Streptococcus agalactiae
ATGCCAGCCAATAAATCTAACCATTTTAGTGTTGGCAATTGTCCTAATTTAACTGAAAAAAAGCTAGAGAATGTTAGGGCAAATAAAATAGAAAGAGGAAGAAATTTTAAAAATTTCACAAGACTATTTGGTAGCCCTTTGTATTTTACAAATATGAATGGAGCGACTCTTGGCACCCAAGAAACAACAAAACCTAAAAGAATAGCAAGAAAAACGGTACTATTTATCATC

SEQ ID NO: 17390 - protein, 77 aa, Streptococcus agalactiae
MPANKSNHFSVGNCPNLTEKKLENVRANKIERGRNFKNFTRLFGSPLYFTNMNGATLGTQETTKPKRIARKTVLFII

SEQ ID NO: 17391 - DNA, 690 bp, Streptococcus agalactiae
atggaaaaaggatttaaagagggagtgaaagatgccttgcccacagctttagggtatatctcaataggcttggcgtttgggatagttgcttcagcatcagatttatctgcaatagaagttggtcttatgagtgccttggtatatgggggatctgctcagtttgctatgtgtgcgctattattagcaaaagcagacttgatgactattacgatgacagtatttttagttaatttgagaaatatgttaatgagtttacacgcgactactatcttcaagtctgctcacctaatgaatcaattagccataggaactctaataacagatgagagctacggcgttttacttggagaagcattgcatcacaaagtcgtatcgcctagttggatgcatggtaataatgtgatgagttatttgacatgggtaatctcaacgataataggaactttactggggagtactattcctaatccagaaatgtttggtttagactttgcattagtcgccatgtttataggtctctttgtatttcagttgtttgggatgttatctgatggaaagcgacttgttgtatatgttcttgcttctgtaggtttaagttacttcttattatccacttttttgtcaggagccttatcagtattgcttgcgactgttgttggatgtagtgtaggagttgttttagatgataaa

SEQ ID NO: 17392 - protein, 230 aa, Streptococcus agalactiae
MEKGFKEGVKDALPTALGYISIGLAFGIVASASDLSAIEVGLMSALVYGGSAQFAMCALLLAKADLMTITMTVFLVNLRNMLMSLHATTIFKSAHLMNQLAIGTLITDESYGVLLGEALHHKVVSPSWMHGNNVMSYLTWVISTIIGTLLGSTIPNPEMFGLDFALVAMFIGLFVFQLFGMLSDGKRLVVYVLASVGLSYFLLSTFLSGALSVLLATVVGCSVGVVLDDK

SEQ ID NO: 17393 - DNA, 4713 bp, Streptococcus agalactiae
atgaacacaaaacagcgtttttcaatccggaaatataagttaggtgccgtatctgtacttttgggaaccctattttttttaggcggtatcacaaatgtagctgctgattctgtcataaataagccatctgatattgcagttgaacagcaagtaaaagacagtccaacgagcatagcaaatgagacacctactaacaacacgtcatcagcccttgcgtcaacagctcaagacaatcttgttacaaaggctaataataatagtccaacagaaacacaaccagtaactgagcctcactctcaagccaccgagacattttccccagccgcaaatcaaccggttgaaagcactcaagaagtttctaaaactcctttaaccaaacaaaatttagcagtcaaacctacaccagctatttctaaagaaacccctcaaaacattgatagtaataaaattatcactgtccccaaagtatggaacacaggctacaaaggagagggaactgttgtagcaattattgactcaggactagataccaatcacgatgctctccaattaaatgattcgacaaaagcaaaataccaaaacgaacagcaaatgaatgctgctaaagcaaaagctggtataaactatggaaaatggtataacaacaaagtaatctttggtcacaactatgttgatgtcaatacagagctaaaagaggtgaaaagcacttctcatggtatgcacgtaaccagtatcgcaacagctaatcctagcaagaaagatacaaatgaattaatctatggtgttgctcctgaagcacaagtaatgtttatgagagtcttctctgatgaaaaaagaggaactggaccagccctttatgttaaagctattgaagatgccgttaaactcggtgctgatagcattaatttaagtttaggtggagctaatggctctttagttaatgccgatgaccgacttataaaagctttagagatggctagactcgctggcgtttctgttgttatagcagcaggtaacgacggtacatttgggagtggagcatcaaagccttctgctctttatcctgattatggtttagttggtagtccatcaacagctcgtgaggccatttctgtagcatcatataataatacaacactggttaataaagtcttcaacattatcggattagaaaacaacaaaaatctcaacaacggattagctgcttatgcagatcctaaagttagtgataagacctttgaagtagggaagcaatatgattatgttttcgtaggaaaaggaaacgacaatgattataaggacaaaactttaaatggtaaaatcgccttaattgaacgtggagatattacttttacaaaaaaagtcgtcaacgctattaatcacggtgctgtgggagctattatctttaataacaaagctggagaagctaatctaacaatgagtttagatcctgaagcaagcgctattcctgccatttttactcaaaaagagtttggagatgttttagctaaaaacaactataaaattgtatttaacaatatcaaaaataaacaagccaaccctaatgcaggtgtcctatctgacttttcaagctggggattaacagcagacggacaattaaaacctgacttatctgctcctggaggctctatttacgccgctatcaatgataatgaatatgatatgatgagtgggacaagtatggcttctccccatgtcgctggtgctactgctctagttaaacaatacttattgaaagaacatccagaacttaaaaaaggtgacattgaaagaactgtcaaataccttcttatgagtactgctaaagcacacctaaacaaagatacaggcgcttacacctcaccacgccaacaaggagcaggtattatcgatgtcgcagcagcagttcagacaggattatacctaactggtggggaaaacaactatggtagcgttacattaggaaatattaaagataaaatttcctttgatgttactgttcataatatcaataaagttgcaaaagatttacactatacaacctatttaaatactgatcaagttaaagatggctttgtcacattagctcctcaacaacttggtacatttacagggaaaacgatacggattgaaccagggcaaactaaaacgattacaattgatatagatgtttcgaaataccatgacatgttaaaaaaagtaatgccaaacggctatttcctagaaggctacgtacgttttacagaccctgttgatggtggggaagttcttagtattccttatgttggatttaagggagaattccaaaacttagaagttttagaaaaatccatttataagcttgttgctaacaaagaaaagggattttatttccaaccgaaacaaacaaacgaagttcctggttcagaagattatactgccttaatgactacaagttcagagcctatctactcaacagacggtactagtcctatccaattgaaagccttgggaagctataagtctatagatggaaaatggatcttacaactagagcaaaaaggccagcctcatctagccatttcacctaatgatgaccaaaatcaagatgccgttgcactgaaaggtgttttcttacgtaatttcaataatttaagagccaaagtctatcgtgcagatgatgttaatttacaaaaaccactatgggtaagtgctccccaagcaggagataaaaattactacagcggaaatactgaaaatccaaaatctacatttttatatgacacagaatggaaaggaaccactactgatggtattcctttagaagatggaaaatacaaatacgttttaacatactactctgatgtccctggctctaagccacaacaaatggtatttgatatcactttggatagacaagctcctacactaacaacagcaacttatgacaaagatagacgtatcttcaaagctcgtcctgcagtagaacacggggaatctggtatctttagagaacaagttttttacttaaaaaaagataaagatggtcattataatagcgtcttacgtcaaaaaggagaagacggtatccttgttgaagataacaaagtatttatcaaacaagaaaaggatggtagctttattctacctaaagaggttaatgatttctctcatgtctactacactgttgaagattatgcaggcaatctagtgtcagcaaaactcgaagatttgatcaatattggcaataaaaatggtttagtaaacgtcaaagtgtttagccctgagcttaacagtaatgtcgatattgatttctcttactctgtcaaagatgacaaaggtaatgtcatcaaaaagcaacatcacgggaaagacctcaatttactgaaattgccttttggtacctatacgtttgacctattcttatacgatgaggaacgagcaaatctaatcagtccccaaagtgtcactgtaactatttctgaaaaagatagccttaaagacgtcttatttaaagttaacttactcaagaaagcagccttactcgttgaatttgacaagcttttaccaaaaggagcaacagtccagttggttactaagacaaatactgttgttgatctaccaaaagcaacttattctcctactgactatggtaaaaacatacctgtaggagactatcgtttaaacgtaacgctgcctagtgggtatagcactttagagaacttagatgatttacttgtatccgtaaaagaaggtcaagtaaatctaacaaaattgacgctgattaataaagctcctctaattaatgccctagcagaacaaactgacattatttcccaacctgtgttttataatgctggaactcacttaaaaaataattacctagctaatcttgaaaaggcacaaactttaattaaaaatagagtggaacaaacaagtattgataatgctattgctgctttgagagaaagtcgccaagctcttaacggtaaagaaacagatacttctttactggcaaaagctattttagctgaaacagaaatcaagggaaactatcaatttgttaatgctagtccattaagccaatcaacttatatcaatcaagtccaattggcgaaaaatcttctacaaaaacctaacgtcactcaatcagaagtagacaaagccttagaaaatcttgatattgctaaaaatcaattaaatggtcatgaaactgattactctggtttacaccatatgataattaaagcaaatgttctgaaacaaacatcatctaaatatcagaacgccagtcaatttgctaaagaaaattataataaccttatcaagaaagcagaattgctgctttccaatagacaagctacacaagctcaagttgaagagttattaaaccaaataaaagcaaccgaacaagaacttgatggtcgcgatagagtttcttccgcagagaattatagtcaatcactcaatgataatgactctctcaataccacacctatcaatccgccaaatcagccccaggcgttgatattcaaaaaaggcatgactaaagaaagtgaggttgctcagaagcgtgtcttaggggtgactagccaaaccgataatcaaaagataaagacaaacaagcttcctaaaacaggcgaaagcactcctaaaataacctatacaatattgctatttagtctctctatgctaggtctggcaacaatcaaactaaagtctatcaaaagagaa

SEQ ID NO: 17394 - protein, 1571 aa, Streptococcus agalactiae
MNTKQRFSIRKYKLGAVSVLLGTLFFLGGITNVAADSVINKPSDIAVEQQVKDSPTSIANETPTNNTSSALASTAQDNLVTKANNNSPTETQPVTEPHSQATETFSPAANQPVESTQEVSKTPLTKQNLAVKPTPAISKETPQNIDSNKIITVPKVWNTGYKGEGTVVAIIDSGLDTNHDALQLNDSTKAKYQNEQQMNAAKAKAGINYGKWYNNKVIFGHNYVDVNTELKEVKSTSHGMHVTSIATANPSKKDTNELIYGVAPEAQVMFMRVFSDEKRGTGPALYVKAIEDAVKLGADSINLSLGGANGSLVNADDRLIKALEMARLAGVSVVIAAGNDGTFGSGASKPSALYPDYGLVGSPSTAREAISVASYNNTTLVNKVFNIIGLENNKNLNNGLAAYADPKVSDKTFEVGKQYDYVFVGKGNDNDYKDKTLNGKIALIERGDITFTKKVVNAINHGAVGAIIFNNKAGEANLTMSLDPEASAIPAIFTQKEFGDVLAKNNYKIVFNNIKNKQANPNAGVLSDFSSWGLTADGQLKPDLSAPGGSIYAAINDNEYDMMSGTSMASPHVAGATALVKQYLLKEHPELKKGDIERTVKYLLMSTAKAHLNKDTGAYTSPRQQGAGIIDVAAAVQTGLYLTGGENNYGSVTLGNIKDKISFDVTVHNINKVAKDLHYTTYLNTDQVKDGFVTLAPQQLGTFTGKTIRIEPGQTKTITIDIDVSKYHDMLKKVMPNGYFLEGYVRFTDPVDGGEVLSIPYVGFKGEFQNLEVLEKSIYKLVANKEKGFYFQPKQTNEVPGSEDYTALMTTSSEPIYSTDGTSPIQLKALGSYKSIDGKWILQLEQKGQPHLAISPNDDQNQDAVALKGVFLRNFNNLRAKVYRADDVNLQKPLWVSAPQAGDKNYYSGNTENPKSTFLYDTEWKGTTTDGIPLEDGKYKYVLTYYSDVPGSKPQQMVFDITLDRQAPTLTTATYDKDRRIFKARPAVEHGESGIFREQVFYLKKDKDGHYNSVLRQKGEDGILVEDNKVFIKQEKDGSFILPKEVNDFSHVYYTVEDYAGNLVSAKLEDLINIGNKNGLVNVKVFSPELNSNVDIDFSYSVKDDKGNVIKKQHHGKDLNLLKLPFGTYTFDLFLYDEERANLISPQSVTVTISEKDSLKDVLFKVNLLKKAALLVEFDKLLPKGATVQLVTKTNTVVDLPKATYSPTDYGKNIPVGDYRLNVTLPSGYSTLENLDDLLVSVKEGQVNLTKLTLINKAPLINALAEQTDIISQPVFYNAGTHLKNNYLANLEKAQTLIKNRVEQTSIDNAIAALRESRQALNGKETDTSLLAKAILAETEIKGNYQFVNASPLSQSTYINQVQLAKNLLQKPNVTQSEVDKALENLDIAKNQLNGHETDYSGLHHMIIKANVLKQTSSKYQNASQFAKENYNNLIKKAELLLSNRQATQAQVEELLNQIKATEQELDGRDRVSSAENYSQSLNDNDSLNTTPINPPNQPQALIFKKGMTKESEVAQKRVLGVTSQTDNQKIKTNKLPKTGESTPKITYTILLFSLSMLGLATIKLKSIKRE

SEQ ID NO: 17395 - DNA, 399 bp, Streptococcus agalactiae
atgacaaaaataatttatttcgctgatgatgaaaagaatattcgtgacttggtggttccttttttagaacatgatggtttcactgttcgagcatttgaaactggagaccttctcttagaagcctataaaaaccaaaaacccgatttagttatattagacataatgatgcctggaactaatggtttagatgttatgaaaagcatccgccaatatgataatattcctattatcatgttaacagctagagattctgatgttgatttcattacggcttttaatttaggaactgacgattacttcaccaagcctttttcacctataaaacttagtctacatgttaaagcattgttcaaacgccttgatgaaaaagcaatcaaaaatgacactcagtatcagttc

SEQ ID NO: 17396 - protein, 133 aa, Streptococcus agalactiae
MTKIIYFADDEKNIRDLVVPFLEHDGFTVRAFETGDLLLEAYKNQKPDLVILDIMMPGTNGLDVMKSIRQYDNIPIIMLTARDSDVDFITAFNLGTDDYFTKPFSPIKLSLHVKALFKRLDEKAIKNDTQYQF

SEQ ID NO: 17397 - DNA, 231 bp, Streptococcus agalactiae
atgcccttaaccaagacagaatttgattttcttttagtattaattgaaaaacctgaaactgctttttctagggaaacactgcttaatcgtatttggggatttgatgatattgaaagcagagcagttgatgacactattaaacgattacgtaaaaaacttaagcaataccacagtcaggttagtatcaaaactgtctggggttacggcttcaaattaatcaaagaggacaaa

SEQ ID NO: 17398 - protein, 77 aa, Streptococcus agalactiae
MPLTKTEFDFLLVLIEKPETAFSRETLLNRIWGFDDIESRAVDDTIKRLRKKLKQYHSQVSIKTVWGYGFKLIKEDK

SEQ ID NO: 17399 - DNA, 1386 bp, Streptococcus agalactiae
atgaaaaagaaaagtttaattagcaatcttatccttattaatagcatcactctatttcttggtttttacctcatctatttttctgtcaactatgtcattaaagactatgtccatcaaatgacaaggaattccatgcaggcgaatttcaccattttagatagtatctataacaacaagaaaataccagatgaaaatatggttaaccaagatagcatctttgtttggtcttactatgctatttttgaccagcattatcgtatgaaatatggcactgataatcataaaaaagagagccatgatattattcgctatcttacccaaaaaagattgtggcaaatttccaaggaaaaagatggtatgtttataaccatcaagaaaaaaacctattatgtaatgaccaaagactactctggtatccttgttgatggtagcataaaaaaagctcctaaagcacagtcgcaactttttcatgtgattaacttttcagacattacttacacccagcatctaattactaaaattaatcattttcttatagttatcttagtactaacctatattcccatgctatttattatgaggaagactttcactggaattagagaatctattcaatcagtacaaacttatatttccagcctttggaaaaatcaaggcaatcatcaatctagtcaaaaagaaattgtcttttctgatttcgatcctcttctacttgagagccaagaaatggcaaatcgaatctaccaggcagaagagagccaaagaaacttctttcaaaatgcctcccacgagttacggacacctttaatgtccatccaaggatatactgagggagttcaagagggtattattgatgccgagctcgcacactctgttattctgcaagagagcaaaaaaatgaaacagctcgtagacgatattatcttactctctaaattagatagtaacttaagtgatcaaaaagatgaattttctttaaatgaattacttaatagtattattgcttatttcaaacccctagctaataaacaaaagattagtatcacttatagaccagacaagcatgaaaagttactaaaaggtaacgaagagttgattcaacgagctatcaataatatccttagtaacgcactacgctatgctgtttctcatattgaaatctcttacacaaatcaaaaactaactatctcaaacgacggaccagccatttcaaaagaagacttgccttatattttcgatcgcttctataaaggacatggcggccaaacaggtattggacttgcaatgactaaagaaattatcaagcaacatcatggtaatatcatcgctgagagtgattcgacctcaacaacttttacgatttatttcaattgccacaaaattgcc

SEQ ID NO: 17400 - protein, 462 aa, Streptococcus agalactiae
MKKKSLISNLILINSITLFLGFYLIYFSVNYVIKDYVHQMTRNSMQANFTILDSIYNNKKIPDENMVNQDSIFVWSYYAIFDQHYRMKYGTDNHKKESHDIIRYLTQKRLWQISKEKDGMFITIKKKTYYVMTKDYSGILVDGSIKKAPKAQSQLFHVINFSDITYTQHLITKINHFLIVILVLTYIPMLFIMRKTFTGIRESIQSVQTYISSLWKNQGNHQSSQKEIVFSDFDPLLLESQEMANRIYQAEESQRNFFQNASHELRTPLMSIQGYTEGVQEGIIDAELAHSVILQESKKMKQLVDDIILLSKLDSNLSDQKDEFSLNELLNSIIAYFKPLANKQKISITYRPDKHEKLLKGNEELIQRAINNILSNALRYAVSHIEISYTNQKLTISNDGPAISKEDLPYIFDRFYKGHGGQTGIGLAMTKEIIKQHHGNIIAESDSTSTTFTIYFNCHKIA

SEQ ID NO: 17401 - protein, 606 aa, Streptococcus agalactiae
ATGTTACATTCTAAAAAAATACATTCCTTATCGCTTATTGCCGTTCTCTCTTTAGCAACATATACGAGTTTACAACCAAATCATGTAGCGGCTGAACAATCACAAAAAACATCAACTGTTCATATGAGTCAAAAAACTATTGAACATAAGTTAAAAGTTGCAGATAAAGAAGCTGCTCCTCTCTACGCTAAAATCGACCATATCCAACGACATATTGAAGTCAAAAAAGCAAAAGATTTAAAAGTTATTGAATTGTATATTAACAAAGATATCAACCAACTAGAGAAGCAAAATAAACGTCTACTAACTAAATTCTATACTTCTATTGATAATCAAACATGGGATAGCACAAGTGAAGTCAAAAAATTGATTGATAAGACAACCCTATCCACTAACGAAAAAGATAGATTAAAATTATATTTTGAACAACGTGCTTACCTTGAGACAAGGTTGAACGACCGCTATCAAAAATTTGATAACTCTATTGAAAACCAAAATAAAGAACTAAAAATATTAACGTCAAAAATAGAAAAAATCTATCAAAAACATGGTATTACAAAAGAGGTATTAAAAACTTACTATGCTAAAAAAACAGTACGAGCTGAC

SEQ ID NO: 17402 - protein, 202 aa, Streptococcus agalactiae
MLHSKKIHSLSLIAVLSLATYTSLQPNHVAAEQSQKTSTVHMSQKTIEHKLKVADKEAAPLYAKIDHIQRHIEVKKAKDLKVIELYINKDINQLEKQNKRLLTKFYTSIDNQTWDSTSEVKKLIDKTTLSTNEKDRLKLYFEQRAYLETRLNDRYQKFDNSIENQNKELKILTSKIEKIYQKHGITKEVLKTYYAKKTVRAD

SEQ ID NO: 17403 - protein, 102 aa, Streptococcus agalactiae; identical to SEQ ID NO: 12617

SEQ ID NO: 17404 - protein, 34 aa, Streptococcus agalactiae; identical to SEQ ID NO: 12618

SEQ ID NO: 17405 - protein, 2499 aa, Streptococcus agalactiae
ATGACATTCTATAATCACAAAGAAATCGAACCCAAATGGCAAGCTTTTTGGGCAGATAATCACACCTTTAAAACAGGAACAGACGCATCAAAACCTAAGTTTTATGCCCTAGATATGTTCCCATACCCATCTGGAGCTGGTCTCCACGTTGGTCACCCAGAAGGCTATACAGCAACGGATATTCTCAGCCGTTTCAAACGTGCCCAAGGTCACAATGTCCTCCACCCAATGGGTTGGGATGCTTTTGGACTTCCTGCTGAGCAGTACGCTATGGATACTGGTAATGACCCAGCTGAGTTTACAGCTGAAAACATCGCTAACTTCAAACGCCAGATTAATGCTCTTGGTTTCTCATACGACTGGGATCGTGAAGTTAACACAACTGACCCTAACTACTACAAGTGGACACAGTGGATCTTTACCAAGCTTTATGAAAAAGGTCTAGCTTACGAAGCTGAAGTTCCAGTTAACTGGGTTGAAGAATTGGGAACAGCTATCGCCAACGAAGAGGTTCTTCCAGATGGTACATCAGAACGTGGTGGCTACCCAGTTGTCAGAAAACCAATGCGCCAATGGATGCTCAAAATCACTGCCTATGCAGAGCGCTTGCTAGAAGACTTGGAAGAAGTTGACTGGCCAGAATCAATCAAAGACATGCAACGCAACTGGATTGGTAAATCAACTGGTGCTAATGTAACCTTCAAGGTTAAGGATACAGATAAGGACTTCACTGTCTTTACAACACGTCCTGACACCCTTTTTGGTGCAACTTACGCAGTTCTTGCTCCTGAGCATGCCTTGGTTGATGCTATTACAACAGCTGACCAAGCAGAAGCCGTTGCCGAATACAAACGTCAAGCAAGTCTCAAATCAGACCTTGCTCGTACAGACCTTGCCAAAGAAAAAACAGGTGTCTGGACAGGTGCCTATGCCATTAACCCAGTTAATGGTAAAGAAATTCCAGTTTGGATTGCGGACTATGTCCTTGCCAGCTACGGTACAGGTGCTATCATGGCTGTTCCAGCCCACGATGAACGTGACTGGGAATTCGCAAAACAATTTAAGCTAGACATCATTCCAGTTCTTGAAGGTGGTAATGTTGAAGAGGCTGCCTTTACAGAAGACGGTCTTCACATCAACTCAGACTTCCTAGATGGTCTCGATAAAGCGTCAGCTATTGCCAAAATGGTCGAATGGCTTGAAGCAGAAGGTGTTGGTAATGAGAAAGTCACTTACCGTCTCCGCGACTGGCTCTTCAGCCGTCAACGTTACTGGGGTGAGCCAATCCCAATCATCCACTGGGAAGATGGTACATCAACAGCGGTTCCTGAGAGTGAATTGCCATTGGTTCTTCCAGTAACTAAGGATATCCGTCCTTCAGGTACTGGTGAGAGCCCACTTGCTAACTTGACAGACTGGTTGGAAGTGACTCGTGAAGATGGTGTTAAAGGTCGTCGTGAGACTAACACCATGCCACAATGGGCAGGTTCAAGCTGGTACTATCTCCGTTACATCGATCCACACAATACTGAAAAATTGGCTGACGAGGAACTCCTCAAACAATGGTTGCCAGTTGATATCTATGTCGGTGGTGCAGAGCACGCCGTGCTTCACCTTCTCTACGCTCGCTTCTGGCACAAGGTTCTTTACGATCTCGGTGTCGTACCTACCAAAGAGCCATTCCAAAAACTCTTTAACCAAGGGATGATTTTGGGAACAAGCTACCGCGATAGCCGTGGTGCTCTTGTGGCAACTGATAAGGTTGAAAAACGTGATGGTAGCTTCTTCCATGTGGAAACTGGGGAAGAGCTTGAACAAGCACCAGCTAAGATGTCTAAATCACTTAAGAACGTTGTCAACCCAGATGATGTTGTTGAACAGTACGGTGCTGACACCCTTCGTGTTTACGAGATGTTCATGGGACCACTTGACGCTTCAATCGCTTGGTCTGAAGAAGGTCTTGAAGGCTCACGTAAGTTCTTGGATCGTGTTTACCGTTTGATCACGACTAAAGAGATTACTGAAGAAAATAGCGGAGCCCTTGACAAGGTTTACAACGAAACCGTTAAGGCAGTTACTGAGCAAGTTGACCAAATGAAATTCAACACAGCTATCGCTCAACTCATGGTCTTTGTCAATGCAGCCAACAAGGAAGACAAACTCTTTAGCGACTATGCCAAAGGCTTTGTTCAATTGATTGCACCATTCGCACCACACTTGGGTGAGGAACTCTGGCAAGTCTTGACAGCCTCAGGTGAGTCAATCTCTTACGTACCATGGCCAAGTTATGACGAAAGCAAATTGGTTGAAAACGAAATTGAAATCGTTGTCCAAATCAAAGGTAAGGTCAAAGCTAAACTTGTAGTTGCTAAAGACCTTTCACGCGAAGAATTACAAGAAGTTGCCCTTGCTAACGAAAAAGTCCAAGCCGAAATCGCAGGCAAAGACATCATCAAAGTCATCGCAGTACCAAACAAACTGGTTAATATTGTGGTGAAA

SEQ ID NO: 17406 - protein, 833 aa, Streptococcus agalactiae
MTFYNHKEIEPKWQAFWADNHTFKTGTDASKPKFYALDMFPYPSGAGLHVGHPEGYTATDILSRFKRAQGHNVLHPMGWDAFGLPAEQYAMDTGNDPAEFTAENIANFKRQINALGFSYDWDREVNTTDPNYYKWTQWIFTKLYEKGLAYEAEVPVNWVEELGTAIANEEVLPDGTSERGGYPVVRKPMRQWMLKITAYAERLLEDLEEVDWPESIKDMQRNWIGKSTGANVTFKVKDTDKDFTVFTTRPDTLFGATYAVLAPEHALVDAITTADQAEAVAEYKRQASLKSDLARTDLAKEKTGVWTGAYAINPVNGKEIPVWIADYVLASYGTGAIMAVPAHDERDWEFAKQFKLDIIPVLEGGNVEEAAFTEDGLHINSDFLDGLDKASAIAKMVEWLEAEGVGNEKVTYRLRDWLFSRQRYWGEPIPIIHWEDGTSTAVPESELPLVLPVTKDIRPSGTGESPLANLTDWLEVTREDGVKGRRETNTMPQWAGSSWYYLRYIDPHNTEKLADEELLKQWLPVDIYVGGAEHAVLHLLYARFWHKVLYDLGVVPTKEPFQKLFNQGMILGTSYRDSRGALVATDKVEKRDGSFFHVETGEELEQAPAKMSKSLKNVVNPDDVVEQYGADTLRVYEMFMGPLDASIAWSEEGLEGSRKFLDRVYRLITTKEITEENSGALDKVYNETVKAVTEQVDQMKFNTAIAQLMVFVNAANKEDKLFSDYAKGFVQLIAPFAPHLGEELWQVLTASGESISYVPWPSYDESKLVENEIEIVVQIKGKVKAKLVVAKDLSREELQEVALANEKVQAEIAGKDIIKVIAVPNKLVNIVVK

SEQ ID NO: 17407 - protein, 90 aa, Streptococcus agalactiae
ATGAGTTTATCCATCATGACAAAACACAAACACCTAACTCTCTCAGACCGTAATGACATCCAATCTGGTTTGGATAGAGGAGAAACCCTT

SEQ ID NO: 17408 - protein, 30 aa, Streptococcus agalactiae
MSLSIMTKHKHLTLSDRNDIQSGLDRGETL

SEQ ID NO: 17409 - protein, 396 aa, Streptococcus agalactiae
ATGATTGACGATGTCAGCAGCATGTTAGAAAAAAGAACATGGATTATAGAAGGTAACTACAAAAAACTGCTATATCAAGAACGTCTAGCAGATGCAGATGAGATTATTTTTTTTGACTTTAATCGCTTCAACTGCTTGTGGAGAGCATTCAAACGTTACTGTAAGTTTCGTGGTAAGACTAGACCTGATATGGCCAATGGATGCCCGGAAAAATTAGATTTTGAATTTATCAGTTGGATTCTTAAAGACGGTCGCTCTGACAAACAAAAATCAAACTATAAACAAGTTGTTGAGGACTACCCTCAAAAAATAAAGGTGCTAAAACACCAACGCGATCTTGATCAATACCTAAAAGAACTCCCTGTTGCATCCAATACAGACCCTCTCAAGAGCTTA

SEQ ID NO: 17410 - protein, 132 aa, Streptococcus agalactiae
MIDDVSSMLEKRTWIIEGNYKKLLYQERLADADEIIFFDFNRFNCLWRAFKRYCKFRGKTRPDMANGCPEKLDFEFISWILKDGRSDKQKSNYKQVVEDYPQKIKVLKHQRDLDQYLKELPVASNTDPLKSL

SEQ ID NO: 17411 - protein, 624 aa, Streptococcus agalactiae
ATGACTGATCTACCAATTATACTAAATATTCTCTTTCATGAAGCAGGGGTAACATCAAATGGAAAGCCTATCGTAGAGGCGCTCAGCCAATTAGTTATGCTAGGTGCAGATGTGATTGGCTTAAATTGTCACCTTGGACCCTATCATATGATCCAATCATTGAAGCAAGTTCCTTTATTTGCCCAGTCTTATTTGTCAGTTTATCCTAATGCAGGTCAGTTATCTTTAGATGGTGAGAATAGTCAATACCAGTTTAGTCAGAATTCAGAGTATTTTGGAAAATCTGCAGAACTTCTCGTAGCAGAAGGAGTTAGGCTTATTGGTGGTTGTTGTGGGACAACTCCAGATCATATTAGAGCTGTGAAACGATCTATTAGAGGATTGAAACCTATTGAACGAAAGGTTGTTACTCCTATAATACCTGTAAAAGATTTTGTTAGGCGTATCAGACGAACAGATACTCTAGTGGATAAGGTAAAAAAAGAAGTAACAATTATCGCAGAATTAGATCCTCCAAAACATTTAGATATCGTTCAGTTTCAAAAGGCTATACGAGCGATTGACCAAAAAGGTATTGCAGCAATTACTTTAGCAGATAATTCACTATCTAATACACGTATTAGA

SEQ ID NO: 17412 - protein, 208 aa, Streptococcus agalactiae
MTDLPIILNILFHEAGVTSNGKPIVEALSQLVMLGADVIGLNCHLGPYHMIQSLKQVPLFAQSYLSVYPNAGQLSLDGENSQYQFSQNSEYFGKSAELLVAEGVRLIGGCCGTTPDHIRAVKRSIRGLKPIERKVVTPIIPVKDFVRRIRRTDTLVDKVKKEVTIIAELDPPKHLDIVQFQKAIRAIDQKGIAAITLADNSLSNTRIR

SEQ ID NO: 17413 - protein, 261 aa, Streptococcus agalactiae
ATGTCCAAGTTTTTAGAGAAATTAAAAACAGATATTCTAGTAGCTGACGGTGCAATGGGAACTCTCCTTTATACTTATGGGCTAGATACTTGTCATGAATCCTACAATGTAACACATCCAGAAAAGGTTCTAGCCATTCATCAAGCTTATATTGAAGCGGGTGCAGATGTTATTCAGACGAATACCTATGGGGCTCAACGTCATCGATTAAAGAACTACGGTTTGGAAAGATCAGGTTGTCTCTATCAATCAAGCAGCAGT

SEQ ID NO: 17414 - protein, 87 aa, Streptococcus agalactiae
MSKFLEKLKTDILVADGAMGTLLYTYGLDTCHESYNVTHPEKVLAIHQAYIEAGADVIQTNTYGAQRHRLKNYGLERSGCLYQSSSS

SEQ ID NO: 17415 - protein, 345 aa, Streptococcus agalactiae
ATGTGTTATTCAAAATTTGACGAAATTATTGATTCTATCCGTTCACTAGATGCAGATGTTATTTCTATTGAAACGAGTAGAAGTCATGGGGACATCATTGAAAGTTTTGAAACAGCAGTTTATCCTCTAGGAATTGGTCTGGGTGTTTATGATATTCATTCTCCTCGCATACCTACTAAGGAAGAAATTATTGTCAATATTCAACGATCACTAAAATGTCTATCAAAAGAGCAATTTTGGGTAAACCCTGACTGTGGCTTAAAAACACGTCGTGAAGCAGAAACAATTGCTGCCTTGGAGGTTCTTGTTTCAGCTACCAAAGAGGTTCGTCAGCAATTAGATAAT

SEQ ID NO: 17416 - protein, 115 aa, Streptococcus agalactiae
MCYSKFDEIIDSIRSLDADVISIETSRSHGDIIESFETAVYPLGIGLGVYDIHSPRIPTKEEIIVNIQRSLKCLSKEQFWVNPDCGLKTRREAETIAALEVLVSATKEVRQQLDN

SEQ ID NO: 17417 - protein, 240 aa, Streptococcus agalactiae
TTGATTGATAAGACAACCCTATCCACTAACGAAAAAGATAGATTAAAATTATATTTTGAACAACGTGCTTACCTTGAGACAAGGTTGAACGACCGCTATCAAAAATTTGATAACTCTATTGAAAACCAAAATAAAGAACTAAAAATATTAACGTCAAAAATAGAAAAAATCTATCAAAAACATGGTATTACAAAAGAGGTATTAAAAACTTACTATGCTAAAAAAACAGTACGAGCTGAC

SEQ ID NO: 17418 - protein, 80 aa, Streptococcus agalactiae
MIDKTTLSTNEKDRLKLYFEQRAYLETRLNDRYQKFDNSIENQNKELKILTSKIEKIYQKHGITKEVLKTYYAKKTVRAD

SEQ ID NO: 17419 - protein, 102 aa, Streptococcus agalactiae; identical to SEQ ID NO: 12617

SEQ ID NO: 17420 - protein, 34 aa, Streptococcus agalactiae; identical to SEQ ID NO: 12618

SEQ ID NO: 17421 - protein, 282 aa, Streptococcus agalactiae
TTGGGTGAGGAACTCTGGCAAGTCTTGACAGCCTCAGGTGAGTCAATCTCTTACGTACCATGGCCAAGTTATGACGAAAGCAAATTGGTTGAAAACGAAATTGAAATCGTTGTCCAAATCAAAGGTAAGGTCAAAGCTAAACTTGTAGTTGCTAAAGACCTTTCACGCGAAGAATTACAAGAAGTTGCCCTTGCTAACGAAAAAGTCCAAGCCGAAATCGCAGGCAAAGACATCATCAAAGTCATCGCAGTACCAAACAAACTGGTTAATATTGTGGTGAAA

SEQ ID NO: 17422 - protein, 94 aa, Streptococcus agalactiae
MGEELWQVLTASGESISYVPWPSYDESKLVENEIEIVVQIKGKVKAKLVVAKDLSREELQEVALANEKVQAEIAGKDIIKVIAVPNKLVNIVVK

SEQ ID NO: 17423 - protein, 1243 aa, Streptococcus agalactiae
ATGTCACCATTAAATATCATAAGAATAATTGGGCGCCCTAATCGCTGCCATTGTCGCATCCGGAACCGATGATTTAAATATCATGTTCCTTGCATTTTCTATGTCAACTATCATTACTGATCTTCATTTATCTGCGGCACAGGCTGGTTGGATTGGGACAATTACCAACTTGGGAATGCTCGTGGGAGGACTAATCTTTGGTTTATTAGCTGATCGCTACAATAAATTCAAAGTTTTCAAATGGACGATTCTAATCTTTTCAATCGCAACTGGTTTAGTTTTCTTCACTACTAATTTATCATATCTCTATATCATGCGCTTCATTGCAGGAATTGGCGTTGGTGGCGAATATGGTATCGCTATTGCCATTATGGCAGGAATTGTCCCAGCTAATAAAATGGGCCGGATTTCTTCACTAAATGGTATCGCTGGTCAAGTCGGATCTATTAGCTCAGCACTCTTAGCAGGATGGCTAGCACCAGCACTCGGTTGGCGGGGACTTTTTCTCTTTGGCCTTCTTCCTATAGTTCTCGTCCTATGGATGCAATTTGCTATTGATGATAAAGATATCTTAGATCAATATAATACAGACGCAGATGATGAACCTCTAGATATCAGTATAAAAGCTTTATTTGATACTCCTGTATTAGCCACACAGAGCCTAGCACTAATGGTTATGACAACTGTTCAGATTGCCGGATACTTTGGCATGATGAACTGGTTACCAACTATTATCCAAACCAACTTAAACGTTTCTGTCAAGAATTCATCATTATGGATGATTGCAACCATTTTTGGAATGTGTCTTGGCATGCTAGTATTTGGTCAATTGTTAGATAAATTTGGACCGCGTTTAGTATACGGGTGTTTCCTTCTATCATCTGCAATTTGTGTCTATCTCTTTCAATTTGCAACAACAATGCCTTCTATGATTATAGGCGGGGCAGTTGTCGGCTTCTTTGTTAATGGTATGTTTGCAGGCTATGGTGCCATGATTACACGTCTCTATCCACATCATATTCGTTCAACAGCTAACAATCTTATCTTAAATGTTGGTCGTGCAATAGGTGGCTTTTCGTCTGTTATCATCGGAATGATTCTAGACGTTTCAAATGTCTCTATGGTCATGCTTTTCTTAGCAAGTCTCTATATCGTTAGTTTCTTATCAATGCTAAGCATTAAGCAATTAAAACGTCAAAAATATCACACTAATTTAACACAATTAGATGTCAAACCAACTGAC

SEQ ID NO: 17424 - protein, 415 aa, Streptococcus agalactiae
  VARIANT 12: Xaa = Any Amino Acid
MSPLNINKNNWXALIAAIVASGTDDLNIMFLAFSMSTIITDLHLSAAQAGWIGTITNLGMLVGGLIFGLLADRYNKFKVFKWTILIFSIATGLVFFTTNLSYLYIMRFIAGIGVGGEYGIAIAIMAGIVPANKMGRISSLNGIAGQVGSISSALLAGWLAPALGWRGLFLFGLLPIVLVLWMQFAIDDKDILDQYNTDADDEPLDISIKALFDTPVLATQSLALMVMTTVQIAGYFGMMNWLPTIIQTNLNVSVKNSSLWMIATIFGMCLGMLVFGQLLDKFGPRLVYGCFLLSSAICVYLFQFATTMPSMIIGGAVVGFFVNGMFAGYGAMITRLYPHHIRSTANNLILNVGRAIGGFSSVIIGMILDVSNVSMVMLFLASLYIVSFLSMLSIKQLKRQKYHTNLTQLDVKPTD

SEQ ID NO: 17425 - protein, 807 aa, Streptococcus agalactiae
ATGAGAGGTCTTTATACTGCTGGAGTTTTAGATGCTTTTCTAGATGCAGGAATAAAAATAGATGGTATCGTATCTGTCTCTGCGGGTGCATTGTTTGGTGTTAATTTTGTATCTAGACAACGAGAGAGGGCTTTGCGATACAATAAAAAGTATTTATCCCACCCTGAATATATGAGTCTAAGATCATGGCTTCGAACAGGGAATTTTGTTAATAAAGATTTCACCTATTATGAAGTTCCTATGAAATTGGATGTATTTGACGATGAAGCATTTAAAAAATCAAGTATTGATTTTTACGTAGTTGCTACAGAGATGACATCTGGTAAACCTGAATATTTTAAAATTGATAGTGTTTTTGAACAAATGGAAATTTTACGTGCTAGTTCAGCATTACCAGTAGTCTCAAAGATGGTTGATTGGCAGGGGAAAAAGTACTTAGATGGTGGTTTATCTGATAGTATTCCCGTTGATTTTGCCCGTGGTTTAGGATTTGACAAGTTGATTGTTGTGATGACTAGGCCGCTCAATTATCAGAAAAAGCCTTCAAGTGGACGATTGTATAAAACTCTGTATAGGAAATATCCTAATTTTGTAAAGACAGCCTCGAATCGGTACCAACAGTATAATAATAGTCTTGAAAAGGTCATGAGCCTTGAAAAAACAGGCGATCTATTTGCAATTAGACCGAGTAAGAGCTTGGTTATTGGCCGCTTAGAGAAGAATCCGGATAAACTTGATAGTATTTATCAGCTTGGTATGAAATATGCTAAAAGTGTGATGCCTGAGCTGAATAGTTATCTAATGAAA

SEQ ID NO: 17426 - protein, 269 aa, Streptococcus agalactiae
MRGLYTAGVLDAFLDAGIKIDGIVSVSAGALFGVNFVSRQRERALRYNKKYLSHPEYMSLRSWLRTGNFVNKDFTYYEVPMKLDVFDDEAFKKSSIDFYVVATEMTSGKPEYFKIDSVFEQMEILRASSALPVVSKMVDWQGKKYLDGGLSDSIPVDFARGLGFDKLIVVMTRPLNYQKKPSSGRLYKTLYRKYPNFVKTASNRYQQYNNSLEKVMSLEKTGDLFAIRPSKSLVIGRLEKNPDKLDSIYQLGMKYAKSVMPELNSYLMK

SEQ ID NO: 17427 - protein, 938 aa, Streptococcus agalactiae
ATGACCTATGCTCGTTATTTCATACCTCAGTACATCTCAGCTGATACAGTTTTATATCTTGACTCTGACTTAGTTGTTACTACTAATTTAGATAACCTCTTTCAAATTTCACTAGACAATGCATATTTAGCTGCAGTTCCACTCTTTTTGGGCTTGGATATGGGTTTAATGCTGGAGTAATGGTAATTAACAACCAACGTTGGCGACAAGAAAATATGACTATTAAATTAATTGAAAAAAATCAAAAGGAAATTGAGAATGCCAACGAAGGGGATCAAACAATTCTTAATCGCATGTTTGAAAATCAGGTAATTTATTTAGATGATACCTACAATTTTCAAATTGGTTTTGATATGGGAGCTGCTATCGATGGGCATAAATTTATTTTTGACATCCCAATTACCCCACTCCCAAAAATTATTCACTACATTTCGGGAATCAAACCTTGGCAAACATTATCAAATATGAGACTCCGTGAGGTATGGTGGCACTATAATTTACTTGAATGGTCAAGTATCATATCTAGTAAAAAAGTATTTGGTTTAGACCACCCAATTAAAACACAAAATTATCGTCTCAATTTCCTTATTGTTACAACTTCTGATTGTATACCATCTATCTCAGAATTAGTCACTGCCCTTCCAGATTGTCTATTTCACATTGCAGCACCAACAGTTATGTCTGACATTCTTATAAGCCTATTAGCTTTTGAAAATATCCGCCTTCATAAAACTTACACTCCACCTATTATTGATAAATTATTAGCAGAAGCTGATATTTATCTTGATATTAATGTTTTTGGAAAAATGGAGGGCATTCTACAGAAAATGTCACAATCTGAAAAACCAATTCTTACTACAAGAGAATGCAATAGCCAGCTTGTTCCAGAAACAGTTTTTGCATCTATCGATGATTTAATTAATTATCTTCAGTCTATA

SEQ ID NO: 17428 - protein, 313 aa, Streptococcus agalactiae
  VARIANT 48: Xaa = Any Amino Acid
MTYARYFIPQYISADTVLYLDSDLVVTTNLDNLFQISLDNAYLAAVPXLFGLGYGFNAGVMVINNQRWRQENMTIKLIEKNQKEIENANEGDQTILNRMFENQVIYLDDTYNFQIGFDMGAAIDGHKFIFDIPITPLPKIIHYISGIKPWQTLSNMRLREVWWHYNLLEWSSIISSKKVFGLDHPIKTQNYRLNFLIVTTSDCIPSISELVTALPDCLFHIAAPTVMSDILISLLAFENIRLHKTYTPPIIDKLLAEADIYLDINVFGKMEGILQKMSQSEKPILTTRECNSQLVPETVFASIDDLINYLQSI

SEQ ID NO: 17429 - protein, 1203 aa, Streptococcus agalactiae
ATGGAAAAAGCAGTTGCACTTGCAGTTGATTCAAACTACTTGGATAAAGCCTTAGTAACAATAAAGTCTATTTGTGTTTATAATAGAAATATAACTTTTTATTTATTCAATCAAGATACCCCAGTTGAATGGGTACGTAATATAAACAGGAAACTAGAGCCTCTAGGATCAAAACTGATTAATGTTAAAATATATAACTATGATATTGCTCATCTAACGACTTTTCTAACTGTTAGTACATGGTTTAGATTATTTTTAGCAGATTATATACCTAGTTCACGTGTACTTTATTTAGATTCAGATATTATCGTTAACACTAATCTTGATTACTTATTTGAACTAGATTTTAAAGGTCATTACTTAGCAGCCGTCAAAGATCCCCATAAAAATGAAGAAGGAGGGTTTAATGCTGGCATGCTTTTAGCTAATCTAGAACTATGGCGGGAAGATGGCCTCACTAAAACATTACTAAAAACAGCTGAAGAACTCCACCGAGTTGTCAAAACAGGGGATCAAAGTATCTTGAACATTGTTTGCCATAATCGTTGGTTATCTCTGAACAAAACATGGAACTTTCAAACTTATGATGTCGTTAGCCGCTATAATCATCGATCTTATTTATATCTAAACATAGAAAATAGAACTCCTAATATTATACATTTTTTAACTAGTGACAAACCTTGGAATGAAAATAGCGTTGCAAGGTTTAGAGAACTATGGTGGTATTACTTCCAACTTGATTTTTGCCAATTAACCGGCAAGCAAAGAAAAGTGATTTCTTACGAAAAGTCCATGGAATTGCTTTCTGTTTCAGATATTCATCTTTTCACCCTTACATCTTCCGATAATTTGGAACACATTGAATCGCTAATTTGTAGATGTCCTACTGTTCAATTCCATATTGGTGCCTACACAACAGTGTCAAATAAACTTAGCAAACTAGAACAATATCCAAATGTCCTAGTTTACCCTGAATTAATTGAGGCAAGAATTGAAAAATTAATAACATTAGCCACTGCATACCTTGATATTAATCATGGTCCAGAAGTAGGTAATATTTTACAAAGAGTTCATTTGAAACAAAAGCCAATTTATTCTTTCAACAACACGTCTCATCAAGAGAATATAACCAAACATATCGTTAATCATAATTCTATTGATAATATGGTTGTTTTAATTAACGAATTAAACCTAAATCAATTA

SEQ ID NO: 17430 - protein, 401 aa, Streptococcus agalactiae
MEKAVALAVDSNYLDKALVTIKSICVYNRNITFYLFNQDTPVEWVRNINRKLEPLGSKLINVKIYNYDIAHLTTFLTVSTWFRLFLADYIPSSRVLYLDSDIIVNTNLDYLFELDFKGHYLAAVKDPHKNEEGGFNAGMLLANLELWREDGLTKTLLKTAEELHRVVKTGDQSILNIVCHNRWLSLNKTWNFQTYDVVSRYNHRSYLYLNIENRTPNIIHFLTSDKPWNENSVARFRELWWYYFQLDFCQLTGKQRKVISYEKSMELLSVSDIHLFTLTSSDNLEHIESLICRCPTVQFHIGAYTTVSNKLSKLEQYPNVLVYPELIEARIEKLITLATAYLDINHGPEVGNILQRVHLKQKPIYSFNNTSHQENITKHIVNHNSIDNMVVLINELNLNQL

SEQ ID NO: 17431 - protein, 537 aa, Streptococcus agalactiae
ATGTTAGATTCTTTTGATAAGGGTTGGTTTGTACTCCAAACCTACTCAGGTTATGAAAATAAAGTAAAGGAAAATCTCTTGCAACGTGCGCAAACTTATAATATGTTAGACAACATTTTGCGTGTGGAAATCCCTACTCAAACTGTAAATGTTGAGAAAAATGGGAAAACAAAAGAAATTGAAGAAAATCGCTTCCCAGGTTATGTACTTGTGGAAATGGTAATGACTGATGAAGCCTGGTTTGTTGTTCGTAATACTCCAAACGTTACTGGATTTGTTGGATCACACGGCAATCGCTCTAAACCAACACCGTTGTTAGAAGAAGAGATTCGTTCAATACTCATCTCAATGGGACAAACCGTTGATGTCTTTGATACTAATATCAAGGAAGGTGATGTTGTTCAAATCATTGATGGTGCTTTCATCGGACAAGAAGGACGTGTAGTTGAGATTGAGAATAACAAAGTTAAATTAATGATCAACATGTTCGGCTCAGAAACACAAGCAGAACTTGAGTTGTACCAAGTTGCAGAATTA

SEQ ID NO: 17432 - protein, 179 aa, Streptococcus agalactiae; identical to SEQ ID NO: 3722

SEQ ID NO: 17433 - protein, 1566 aa, Streptococcus agalactiae
ATGAATAATAACGAAAAAAAAGTAAAATACTTTTTAAGAAAAACAGCTTATGGTTTGGCTTCAATGTCAGCGGCGTTTATAGTATGTAGTGGTATTGTAAATACTCCTACAGTGTCTGCTGATAGTCCTGATACATTAAAAGTCGAAAAATTAGGCAAATTGAAAGATGTGAAATCAGTTCATGAACTCACACCCATATCAATACCGAACGAATTAAAAGGTGCTAAAGAGCAAGCACTTTCTTCAATAATTTCACATCCTAATATAACTAATTCGGAAGTAGACAAACTAGCTAGTGACTATAGTTTTAGAATTAATACATCTAATGATGTGAACGACGTTAAACGTCTATTAAATGAATTTTATAACGCAGTTGCAAGGAAACAGTTAGATACAAATTCTGCTGACTACCGTAGTAAAATTGATAATATCAGTACTACAGGTCTTGCGATAGCTCTTGAGGCTAAAGAAATTTATGAAGCAAATAAATCTATATTACCTCATCGTTACAAAGATTCTGTTGGAACTTATGTGAACAGTTTTGAGGAAAGACGAAGTCCAGGAAAATTTAATATTTGGAATGGTCAGGAAGGATTTAATGCAGCTCAAAAATTGTTAGAAGATGTTAAAAAATTATTACTTGAGCTACAAAATTTAACAAAAAATAACAAACCAAATATTCAAGTACCTAAACAAGCACCTACAGAAGCTGCAAAACCAGCTTTGTCACCAGAAGCCTTGACAAGATTGACTACATGGTATAATCAAGCTAAAGATCTGCTTAAAGATGATCAAGTAAAGGACAAATACGTAGATATACTTTCAGTTCAAAAAGCTGTTGACCAAGCTTATGATCATGTGGAAGAGGGAAAATTTATTACCACTGATCAAGCAAATCAATTAGCTAACAAGCTACGTGATGCTTTACAAAGTTTAGAATTAAAAGATAAAAAAGTAGCCAAACCAGTAGCTAAAGGTACATACGATGTTAAGTATGTAGACACAGAAGGAAAAGAAGTAGCTAAGTCGCGTCACTTCGAAGGAGAAGAAGGCGCAGCTTTTGTCACTTCAGCGAAAGAAGTAGCGGGTTACAAACTTGTTAGAACGGAAGGTGCTGTTTCAAATGTCTTCACAGCAGGAGCACAAGTACGTACATATGTTTACGAAAAAGTTAAACCAGAAGTTAAACCAGACGTTAAGCCAGAGGCCAAACCAGAGGCTAAGCCAGAAGTTAAACCAGACGTTAAGCCAGAGGCCAAACCAGAGGCTAAGCCAGAAGTTAAATCAGACGTTAAGCCAGAGGCTAAGCCAGAAGCCAAACCAGAGGCTAAACCAGAAGTTAAACCAGACGTTAAGCCAGAGGCTAAACCAGAAGCCAAGCCAGCAACCAAAAAATCGGTTAATACTAGCGGAAACTTGGTGGCTAAAAAAGCTATTGAAAACAAAAAGTATAGTAAAAAATTACCATCAACGGGTGAAGCCGCAAGTCCACTCTTAGCAATTGTATCACTAATTGTTATGTTAAGTGCAGGTCTTATTACGATAGTTTTAAAGCATAAAAAAAAT

SEQ ID NO: 17434 - protein, 522 aa, Streptococcus agalactiae
MNNNEKKVKYFLRKTAYGLASMSAAFIVCSGIVNTPTVSADSPDTLKVEKLGKLKDVKSVHELTPISIPNELKGAKEQALSSIISHPNITNSEVDKLASDYSFRINTSNDVNDVKRLLNEFYNAVARKQLDTNSADYRSKIDNISTTGLAIALEAKEIYEANKSILPHRYKDSVGTYVNSFEERRSPGKFNIWNGQEGFNAAQKLLEDVKKLLLELQNLTKNNKPNIQVPKQAPTEAAKPALSPEALTRLTTWYNQAKDLLKDDQVKDKYVDILSVQKAVDQAYDHVEEGKFITTDQANQLANKLRDALQSLELKDKKVAKPVAKGTYDVKYVDTEGKEVAKSRHFEGEEGAAFVTSAKEVAGYKLVRTEGAVSNVFTAGAQVRTYVYEKVKPEVKPDVKPEAKPEAKPEVKPDVKPEAKPEAKPEVKSDVKPEAKPEAKPEAKPEVKPDVKPEAKPEAKPATKKSVNTSGNLVAKKAIENKKYSKKLPSTGEAASPLLAIVSLIVMLSAGLITIVLKHKKN

SEQ ID NO: 17435 - protein, 171 aa, Streptococcus agalactiae
ATGTTTGTCAAAGGGATTTTTCAAGTATTGCGTGACACTACTTGGCCAAATCGAAAACAACGTTGGAAAGATTTTATTTCCATCTTGGAATACACTGTATTTTTCACAATCGTTATCTACATCTTTGACAAACTGTTAGCTGCAGGAGTCATGGACTTGATTAATCGATTT

SEQ ID NO: 17436 - protein, 57 aa, Streptococcus agalactiae; identical to SEQ ID NO: 3726

SEQ ID NO: 17437 - protein, 2319 aa, Streptococcus agalactiae
ATGAAATTATTTGATAAGTTTATAGACTTATTTCGTGTTGATGAAGACAACGACGAAATGACAAGAAAAAATGAACAAGAAACTAGAGAAGAAACTAGCAATTTGGATGGCGAAGAAGTCTATGATATTGATGATATTACCCGACCTAGTAAATCCCAGTATCAGCGAGGCATTCGTCACCAAAAGGAAAATGCTAAATCTCGACTTGAATGGCTACAAAAAGTTGATCGTTACCTCCCTTCTCCTAAGAATCCTATCCGTCGTTTTTGGCGGCGCTATCGTATTGGGAAGTTGCTTTTTATCGCCTTAATGGCTTTTATTCTTATATTTGGTAGCTATCTTTTTTATCTTTCTAAAACTGCTACAGTTAGTGATTTACAGAGTGCTCTAAAAACAACCACCACCATTTATGATAAGAATAAAGAATACGCTGGAAAACTTTCGGGACAAAAGGGAACTTATGTAGAGTTAAATGCTATTTCTGATCATCTCAAAAATGCTGTTATAGCAACTGAAGATAGAACTTTTTATGAAAATAATGGTGTAAACTTTAAGCGATTTTTTTTGGCAGTAGCTACACTTGGGAAATTTGGCGGAGGCTCAACTATTACCCAGCAATTAGCAAAAAATGCTTACTTGTCACAGGACCAAACGATTAAACGCAAGGCGCGTGAATTCTTTTTAGCGCTAGAATTGACTAAGAAATACAGCAAGGCTGAGATTCTGACCATGTATCTTAATAACTCTTATTTTGGTAATGGTGTTTGGGGTGTGGAAGATGCTAGTAGGAAATATTTTGGAACCAGTGCTGCTAATTTGACAGTAGATGAGGCTGCTACACTTGCTGGAATGCTTAAAGGACCAGAAGTTTATAATCCTTATTATTCTGTTGAAAATGCAACTAACCGAAGAGATACTGTTTTGGCAGCGATGGTTGATGCAGGTCAACTAACCAAGTCTCAAGCTAAAGAAGCTGCTTCAATTGGTATGAAAAATAGATTAGCAGATACCTATGCTGGTAAAATTAATGATTACAAGTACCCATCCTATTTTGATGCTGTTGTCAATGAAGCCATTGATACTTATGGTATTTCAGAAAAAGATATTGTCAATAATGGCTATAAGATTTACACTGCATTAGATCAAAATTATCAATCAGGAATGCAAAAAACATTTGATGATACTAGCCTCTTCCCTGTATCTGACTATGATGGTCAATCTGCCCAAGGTGCTAGCGTAGCTCTAGATCCAAAAACTGGTGGTGTAAGAGGTTTAGTTGGACGTGTTCAAAGTACTAAAGATGCACAGTTTAGAAGTTTTAACTACGCGACTCAATCAAAGAGAAGTCCAGCCTCAACCATAAAACCTTTAGTTGTTTATTCACCAGCTATTGCTTCAGGATGGTCAATAGATAAAGAACTTCCTAATAAAGTTCAAGATTTTCATGGTTATAAACCAAGTAACTATGGTGGAATTGAGACTGAAAGTATCCCGATGTATCAAGCACTAGCTAATTCTTATAATATTCCTGCTGTTTATACTTTAGATAAACTAGGAATCAATAAAGCTTTTACTTATGGCAGGAAGTTTGGTCTAAATATGTCATCAGCAAACAAAGAGCTAGGAGTGGCGCTAGGTGGAAGTGTAACTACTAATCCTTTAGAAATGGCACAAGCTTACTCAACTTTTGCAAATGATGGTATAATGCATCGCGCTCATTTGATTACTCGAATTGAGACAGCTAATGGAAAATTAGTAAAGCAATTTACAGATAAGCCTAAGCGAGTTATTAGTCGCTCAGTGGCTAGTAAAATGACTAGTATGATGTTAGGAACATTCTCAAACGGTACAGCTATTAATGCCAATGTTTATGGTTATACAATGGCAGGTAAAACTGGAACAACCGAAACAGATTTTAACCCCAATTTATCTGGAGACCAGTGGGTAGTCGGCTATACGCCTGATGTCGTTATTAGTCAATGGGTTGGCTTTAAGAACACAGATAAACACCATTATTTGACAGATTCTAGTGCAGGTACAGCTTCAAATATATTTAGCACGCAAGCTTCATATATACTACCGTATACTAAGGGGTCTAGTTTTACTCATATTGAGAATGCTTATTTCCAAAACGGTATTGGTTCAGTTTATAATGCACAAGATGCTAGTAATACAACGAACCAAGAATCACGCTCAATTATTAATGATTTAAAAGATTCGGCAAGTAAGGCTGCACAAGATATTTCTAGAGCTGTGGAAGATTCAAATTTCCAAGAGAAGGTAAAAGATGCTTGGAATAGTCTAAAGGACTACTTTAGA

SEQ ID NO: 17438 - protein, 773 aa, Streptococcus agalactiae
MKLFDKFIDLFRVDEDNDEMTRKNEQETREETSNLDGEEVYDIDDITRPSKSQYQRGIRHQKENAKSRLEWLQKVDRYLPSPKNPIRRFWRRYRIGKLLFIALMAFILIFGSYLFYLSKTATVSDLQSALKTTTTIYDKNKEYAGKLSGQKGTYVELNAISDHLKNAVIATEDRTFYENNGVNFKRFFLAVATLGKFGGGSTITQQLAKNAYLSQDQTIKRKAREFFLALELTKKYSKAEILTMYLNNSYFGNGVWGVEDASRKYFGTSAANLTVDEAATLAGMLKGPEVYNPYYSVENATNRRDTVLAAMVDAGQLTKSQAKEAASIGMKNRLADTYAGKINDYKYPSYFDAVVNEAIDTYGISEKDIVNNGYKIYTALDQNYQSGMQKTFDDTSLFPVSDYDGQSAQGASVALDPKTGGVRGLVGRVQSTKDAQFRSFNYATQSKRSPASTIKPLVVYSPAIASGWSIDKELPNKVQDFHGYKPSNYGGIETESIPMYQALANSYNIPAVYTLDKLGINKAFTYGRKFGLNMSSANKELGVALGGSVTTNPLEMAQAYSTFANDGIMHRAHLITRIETANGKLVKQFTDKPKRVISRSVASKMTSMMLGTFSNGTAINANVYGYTMAGKTGTTETDFNPNLSGDQWVVGYTPDVVISQWVGFKNTDKHHYLTDSSAGTASNIFSTQASYILPYTKGSSFTHIENAYFQNGIGSVYNAQDASNTTNQESRSIINDLKDSASKAAQDISRAVEDSNFQEKVKDAWNSLKDYFR

SEQ ID NO: 17439 - protein, 1026 aa, Streptococcus agalactiae
TTGCTAGTTTCTTCTCTAGTTTCTTGTTCATTTTTTCTTGTCATTTCGTCGTTGTCTTCATCAACACGAAATAAGTCTATAAACTTATCAAATAATTTCATAGACTTATTATATCAATTTTCAATAAAATGCTATAATAAAACCATGTCATTTTCATTAAAAATTAGAAATCCATACGGTGAACATACCGTTAAAGAACTCCTTGAAGATTATTTTTTGATTCCACGTAAGATTAGACATTTTTTGCGTGTTAAAAAACATGTACTTATAAACAATGAATTCATTAATTGGCAAACTGTCGTCCAAGAAAACGATACTATTACCTTAATCTTTGATGATGAGGATTACCCTACTAAAAAAATTCCTCTGGGCAGAGCAGAGCTTATTGATTGTCTTTATGAGGATGAACATCTTATTATCGTTAATAAACCTGAAGGTATGAAAACTCACGGTAACCAACCAAATGAAATAGCACTGTTAAATCATGTATCTGCCTATTCTGGACAAACATGCTATGTTGTTCATCGCCTAGATATGGAGACCAGTGGAGCTGTTTTATTTGCTAAAAATCCATTTATACTTCCCCTTATCAATCAACGCTTAGAACGAAAAGAAATTTGGCGTGAATATTGGGCTTTAGTTGAAGGAAAATTTTCACCTAAGCATCAAGTTTTGAGAGACAAAATTGGACGGAACCGTCATGACAGACGTAAACGAATCATTGATTCTAAAAACGGTCAACATGCTATGACAATCATTGACGTTTTGAAGTATATCCAAAATAGTAGTCTCATAAAATGCCGACTGGAAACCGGAAGAACCCATCAAATTCGCATTCACTTATCTCATCACGGACATCCTTTAATAGGAGATCCCCTCTACAACCCTTCTTCTAATAATGAAAGGTTAATGCTACACGCTCACCGATTGACTCTATCCCATCCATTAACTTGCGAAACTATTAGCGTAGAGGCCCCTTCATCTACTTTCGAGAAGGTTTTAAACAATTATAAAAAAGGAGTTGGA

SEQ ID NO: 17440 - protein, 342 aa, Streptococcus agalactiae
MLVSSLVSCSFFLVISSLSSSTRNKSINLSNNFIDLLYQFSIKCYNKTMSFSLKIRNPYGEHTVKELLEDYFLIPRKIRHFLRVKKHVLINNEFINWQTVVQENDTITLIFDDEDYPTKKIPLGRAELIDCLYEDEHLIIVNKPEGMKTHGNQPNEIALLNHVSAYSGQTCYVVHRLDMETSGAVLFAKNPFILPLINQRLERKEIWREYWALVEGKFSPKHQVLRDKIGRNRHDRRKRIIDSKNGQHAMTIIDVLKYIQNSSLIKCRLETGRTHQIRIHLSHHGHPLIGDPLYNPSSNNERLMLHAHRLTLSHPLTCETISVEAPSSTFEKVLNNYKKGVG

SEQ ID NO: 17441 - protein, 1638 aa, Streptococcus agalactiae
ATGTTTGATTTTTTTAAGAAAAAAGTTGTTAAAGTGTGCTTAGTTATTTTTGGTATAGTTTTAGTATCACTTCTGAGTCTAGGATTCTTTTATTTTTCAAAGGGACAAGTACTTAGTCGTTTTGTAGCAGCACGTTCTCGTACGTCAGGTCAAGCGTTTGATAATATTAAAGAATACATGGTTTGGTCAGATACGGGAGAATCTATCACAAATGATGAGGCCAATTACGCTAATTTTGAGCCTTTGTCTAAAAGTGAGGCGCGTAAATTAGGGCAGGAAATAAAAGAAGGAAACAAAAATGATTCAATGTATCTAAAGCGTGTAGGTAGTCGCTTAGGTATATTCCCTGATTATCGTATTGCTAATAAGCCTATGTCTTTGACCTTGAAAACCAATGTTCCTAAATTGGATGTTTTGTTGAATCAAAAAAAGGTCGCGACAAGCAATTCAGATCATTTTTCAGTAACGGTGGAACGTTTACCTAGAACCCATTATACTGCTAGCCTTGAAGGGACTAGTGACGGAAAAGAGATTAAACTCAAAAAAGATTATGATGGTAAAAACCAAACTATTGATTTATCGGTCGCTTTTAAATCTTTTACAGTAACAAGTAATCTTATGGATGGTAATCTTTATTTTGGTGATAATCGTATTGCTAAATTAAAAGATGGTAGCTATTCCGTAGAGAATTATCCAGTGACTGATGGTTCAAAAGCTTATATCAAAAAAGTTTTTAATGATGGTGAGATAACCTCTCATAAACAAAAATTAATCTCTATCGCTGATAATCAGACAATCAAATTAGATGTTGATGGTTTATTAAATGAAAAAGAAGCTGGACAGAAATTGATAACTGCTTTCAATCAATTGATACTTTATGTATCAACTGGGCAAGACCCTCAGACTTTAGGAACAGTTTTTGAAAAAGGTGCCGAAAATGATTTTTACAAAGGATTGAAAGAAAGTATTAAAGCAAAATTTGTAACTGATAATCGTAAAGCGAGCCATTTCACTATTCCTAATATTGTCCTTAATAAAATGACACAGGTTGGGAAAGAAAGTTATCAAGTTAATTTTGCTGCCGATTATGATTTTAATTATGATAAATCAACAGATCCTGATAAGAAAACATATGGCCACATTATTCAGAATTTAACTGGTAATTTTATTATGAAAAAATCGGGAAATAGTTACCTTATTTCTAATGATGGTAAAAAAGATATCACAGTAGCTAAGGAAACTAATAAAGTTAAGGCTGATCCCGTTTCTATTTTTCCAGAGAACCTTGTAGGAAGTTGGAAAGGTGAAGTTGAGGACGGTACAGTAACGATGACTTTTGATAAGGATGGTAAAGTTACTCAGAAAAAAGTTTACAAGGATAGTAAATCTAAGGAAAGTAACCATTCTGCTAAAGTTACGAAGTTGGAGGATAAGGGAAATGGGCTCTACCTTTATCAATATGAATCAGGTACTGATACTACAACTTTTGTAACAGGAGGTATCGGTGGTCTTAAAGTTAAATACGCCTATGGAATAAAAATTGAAGGGAATAAGATCATCCCAGTAATCTGGCAGACATCTAGTGATGGAGAATTTGATTACCATAAACCACTACTCAGTAAGCCATTAACTAAGCAA

SEQ ID NO: 17442 - protein, 546 aa, Streptococcus agalactiae; identical to SEQ ID NO: 12642

SEQ ID NO: 17443 - protein, 1209 aa, Streptococcus agalactiae
ATGTCACAATTTGATCGCATTCACTTAGTTGTCTTAGATTCAGTGGGTATTGGAGCGGCACCAGATGCCAATGATTTTGTCAATGCAGGAGTTCCTGATGGTGCTTCAGACACGCTTGGCCACATTTCAAAAACAGTTGGACTTGCGGTGCCAAATATGGCTAAAATTGGACTTGGTAATATTCCTCGTCCCCAAGCGCTTAAAACCGTTCCTGCAGAAGAAAATCCAAGTGGCTACGCGACGAAGTTACAAGAAGTATCACTTGGTAAAGATACAATGACAGGGCATTGGGAGATCATGGGCTTAAATATTACAGAGCCATTTGATACTTTCTGGAATGGTTTTCCAGAAGATATCATCACAAAGATTGAGGATTTTTCAGGACGTAAAGTTATTCGTGAAGCGAATAAACCTTATTCAGGGACAGCTGTTATTGATGACTTCGGACCACGCCAAATGGAAACTGGTGAGCTCATCATCTATACCTCAGCTGACCCAGTCCTACAAATTGCAGCTCATGAGGATATCATCCCTCTAGAAGAACTTTACCGTATTTGTGAATATGCTCGTAGTATCACAATGGAGCGTCCAGCTCTCCTTGGTCGTATTATCGCTCGTCCATATGTAGGTGACCCAGGCAACTTTACGCGTACAGCCAACCGTCACGACTATGCAGTATCACCATTTGAAGATACCGTATTAAATAAACTAGATCAAGCTGGCATCGATACTTATGCTGTTGGTAAAATCAATGATATTTTCAATGGTTCAGGCATTAATCATGATATGGGACATAACAAATCGAATAGTCATGGTATTGATACTTTGATAAAAACAATGGGGTTATCAGAGTTTGAAAAAGGCTTCTCCTTTACTAATTTGGTTGACTTTGATGCTCTCTATGGTCACCGTCGTGATCCTCATGGCTATCGTGATTGTCTTCATGAGTTTGATGAGCGCCTCCCAGAGATCATTTCAGCAATGCGTGACAAAGACTTACTTTTGATCACTGCCGATCATGGTAATGACCCAACTTATGCAGGTACAGACCATACAAGAGAATACATTCCTCTCTTAGCCTATAGCCCATCTTTCACAGGAAACGGCCTTATCCCAGTAGGGCATTTCGCAGATATTTCAGCAACAGTTGCGGATAACTTTGGTGTTGATACTGCGATGATTGGAGAGAGCTTCTTGCAGGACTTGGTA

SEQ ID NO: 17444 - protein, 403 aa, Streptococcus agalactiae
MSQFDRIHLVVLDSVGIGAAPDANDFVNAGVPDGASDTLGHISKTVGLAVPNMAKIGLGNIPRPQALKTVPAEENPSGYATKLQEVSLGKDTMTGHWEIMGLNITEPFDTFWNGFPEDIITKIEDFSGRKVIREANKPYSGTAVIDDFGPRQMETGELIIYTSADPVLQIAAHEDIIPLEELYRICEYARSITMERPALLGRIIARPYVGDPGNFTRTANRHDYAVSPFEDTVLNKLDQAGIDTYAVGKINDIFNGSGINHDMGHNKSNSHGIDTLIKTMGLSEFEKGFSFTNLVDFDALYGHRRDPHGYRDCLHEFDERLPEIISAMRDKDLLLITADHGNDPTYAGTDHTREYIPLLAYSPSFTGNGLIPVGHFADISATVADNFGVDTAMIGESFLQDLV

SEQ ID NO: 17445 - protein, 669 aa, Streptococcus agalactiae
GTGGAAGTAAAAGATATTTTAAAAACGGTAGACCATACTTTGCTAGCAACAACAGCAACATGGCCAGAAATCCAAACAATTTTAGATGATGCAATGGCTTATGAAACAGCTTCAGCATGTATTCCAGCCTCTTACGTCAAAAAAGCAGCAGAGTACGTTTCAGGTAAATTAGCTATTTGTACTGTTATTGGGTTCCCAAATGGCTATAGTACAACTGCAGCGAAGGTTTTTGAATGTCAAGATGCTATTAAAAATGGTGCTGATGAAATTGACATGGTCATTAATTTGACAGACGTTAAAAATGGGGATTTTGATACTGTTGAAGAAGAAATTCGTCAAATCAAAGCTGCATGTCAAGACCATATCTTAAAAGTTATCGTTGAGACATGTCAATTAACTAAAGAAGAACTTATCGAACTTTGTGGAGTTGTCACACGTTCAGGTGCAGACTTTATTAAAACCTCTACTGGTTTTTCGACAGCAGGTGCTACATTTGAAGATGTTGAAGTGATGGCAAAATATGTCGACGAAGGTGTTAAAATTAAGGCAGCAGGTGGAATCTCATCATTGGAAGATGCTGAAAAATTTATTGCTTTAGGAGCTTCACGCTTGGGTACTAGCCGTATCATCAAGATTGTTAAGAACCAAAAAGTTGAAGAAGGCACTTAT

SEQ ID NO: 17446 - protein, 223 aa, Streptococcus agalactiae
MEVKDILKTVDHTLLATTATWPEIQTILDDAMAYETASACIPASYVKKAAEYVSGKLAICTVIGFPNGYSTTAAKVFECQDAIKNGADEIDMVINLTDVKNGDFDTVEEEIRQIKAACQDHILKVIVETCQLTKEELIELCGVVTRSGADFIKTSTGFSTAGATFEDVEVMAKYVDEGVKIKAAGGISSLEDAEKFIALGASRLGTSRIIKIVKNQKVEEGTY

SEQ ID NO: 17447 - protein, 1198 aa, Streptococcus agalactiae
ATGCAATTTATTTATAGTATTATTGGTATTTTATTGGTATTAGGAATTGTGTATGCAATTTCTTTCAATCGTAAGAGTGTTTCTCTAAGTTTAATTGGAAAAGCTCTTATCGTTCAATTCATTATTGCGCTAATCTTAGTACGTATCCCACTAGGCCAACAAGTTGTTAGTGTTGTTTCAACTGGAGTTACTAAAGTAATCAACTGTGGTCAAGCTGGTTTAAATTTTGTGTTTGGTTCATTAGCAGATAGTGGAACAAAAACTGGTTTTATTTTCGCCATTCAAACGCTTGGTAATATTGTTTTCTTATCTGCCCTAGTTAGTCTACTTTATTATGTAGGAATCCTTGGATTTGTAGTAAAATGGATAGGTAAGGGTGTTGGTAAAATTATGAAATCCTCAGAGGTTGAGAGTTTTGTTGCCGTACTAATATGTTTCTTGGTCAAACAGACAGTCCAATTTTGGTTAGCAAATACCTAGGTCGTATGACTGATAGTGAGATAATGGTTGTGTTGGTATCAGGTATGGGAAGTATGTCAGTTTCTATTCTTGGTGGCTACATTGCATTAGGCATTCCAATGGAATATCTCTTGATTGCTTCAACAATGGTTCCTATTGGCAGTATTCTCATTGCTAAAATCTTATTTCCTCAAACAGAACCTGTTCAAAAAATTGATGACATTAAGATGGATAATAAAGGTAATAACGCCAATGTGATTGATGCAATCGCTGAGGGTGCAAGCACAGGTGCACAAATGGCTTTCTCATTGGTGCTAGTTTGATTGCCTTTGTTGGTTTAGTTTCTTTGATTAATATGATGTTAAGTGGATTGGGAATTCGCTTAGAACAAATCTTCTCATATGTTTTTGCTCCATTTGGTTTTCTTATGGGATTTGACCACAAAAACATTCTTCTAGAAGGAAACCTTCTTGGAAGTAAGTTGATTTTAAATGAGTTTGTTTCGTTCCAACAATTGGGTCACCTAATCAAATCTTTAGATTATCGTACAGCATTGGTAGCAACTATTTCACTCTGTGGTTTTGCTAATTTATCAAGTTTAGGTATTTGTGTTTCAGGTATTGCTGTTCTTTGTCCAGAGAAACGTGGCACCCTAGCTCGACTTGTTTTCCGTGCAATGATTGGTGGTATTGCTGTAAGTATGCTTAGCGCCTTTATCGTCGGTATTGTAACTCTATTC

SEQ ID NO: 17448 - protein, 400 aa, Streptococcus agalactiae
  VARIANT 143: Xaa = Any Amino Acid
MQFIYSIIGILLVLGIVYAISFNRKSVSLSLIGKALIVQFIIALILVRIPLGQQVVSVVSTGVTKVINCGQAGLNFVFGSLADSGTKTGFIFAIQTLGNIVFLSALVSLLYYVGILGFVVKWIGKGVGKIMKSSEVESFVAVXNMFLGQTDSPILVSKYLGRMTDSEIMVVLVSGMGSMSVSILGGYIALGIPMEYLLIASTMVPIGSILIAKILFPQTEPVQKIDDIKMDNKGNNANVIDAIAEGASTGAQMAFSIGASLIAFVGLVSLINMMLSGLGIRLEQIFSYVFAPFGFLMGFDHKNILLEGNLLGSKLILNEFVSFQQLGHLIKSLDYRTALVATISLCGFANLSSLGICVSGIAVLCPEKRGTLARLVFRAMIGGIAVSMLSAFIVGIVTLF

SEQ ID NO: 17449 - protein, 777 aa, Streptococcus agalactiae
ATGCAGAATTATTCAGGTGAAGTCGGATTGCAATATCACCTACAGATTCGTCCAGGTGATGTAGGTCGTTATGTTATCATGCCAGGTGATCCAAAACGTTGTGCAAAAATTGCAGAACATTTTGATAATGCAGTTCTTGTAGCAGACAGCCGTGAATATGTTACTTATACAGGTACATTAAATGGTGAAAAAGTCAGTGTTACTTCAACTGGTATTGGTGGTCCATCAGCGTCTATTGCGATGGAAGAATTGAAACTCTGTGGCGCTGATACCTTTATCCGTGTTGGAACATGTGGTGGTATTGACCTTGATGTTAAAGGCGGAGACATCGTTATTGCAACTGGAGCTATCCGTATGGAAGGTACAAGTAAAGAATATGCTCCGATTGAATTTCCTGCTGTAGCTGACTTGGAGGTAACGAATGCTCTAGTTAATGCAGCTAAAAAGCTTGGTTACACAAGTCACGCAGGAGTAGTTCAATGTAAAGATGCATTTTATGGACAACATGAGCCAGAACGTATGCCAGTTAGTTATGAATTATTAAATAAATGGGAAGCATGGAAACGTCTGGGAACAAAAGCGTCTGAAATGGAATCTGCAGCTCTTTTTGTAGCAGCAAGTCATCTAGGAGTTCGTTGTGGATCAGATTTCCTTGTTGTTGGTAATCAAGAACGCAACGCTTTGGGTATGGATAACCCAATGGCTCATGACACAGAAGCAGCTATTCAAGTTGCTGTTGAAGCACTCCGCACACTTATTGAAAATGATAAATCACAA

SEQ ID NO: 17450 - protein, 259 aa, Streptococcus agalactiae; identical to SEQ ID NO: 3746

SEQ ID NO: 17451 - protein, 735 aa, Streptococcus agalactiae
ATGCCTAAAAATGAACTAAATAATAAACTAAATAAACTAAAGCATGTGCAAGTCTACAATAAGATTTTTAACATGATTCAAGACGGTACTTATTCTCCTGGAATGCAATTGCCTTCTGAGCCCGAATTAGCAGGGCAACTTAATGTTAGTCGAGCTACTTTACGAAAGTCATTAGCACTATTACAAGAAGACCATTTGGTTAAAAATATCAGAGGAAAAGGTAATTTCATTAGAGAAAATTCTAGCAACTTGTCTGAAAACGGTTACGAAAATAGACAACACCCCATTAAAACTTGTCTAACTTCCAAAATTACAGAAGTGGAATTAGAATTTCGTGTAGAGGTTCCTGCAGAAGCTATCACAGCTTCACTTAAACAAGAAACCCCTGTAGTTGTTATTGCTGATCGTTGGTACCACACCGATGATGGACCATTAGCTTACACACTTTCTTTTATCCCTATCGAACTTATTTCAGATGCTGAGATTTCTTTACATGATACTAAACAGTTGTTAAACTTCATTGAAGAAGGTATCTATCACGAAGGCATATCAAGCCACTCACAAAGCCATTTGGGATATGCGACATCTGGCAATTTTTCAGCAACTAAATACACCCTATCCGATCATGGACAATTCATATTAATACAAGAAACAATTTTTAACCAAGAGAAAATACTAATGTGTAATAAGCATTACGTTCCCATTGAGCACTTTGAATTGTCCATTACCTCTCAT

SEQ ID NO: 17452 - protein, 245 aa, Streptococcus agalactiae
MPKNELNNKLNKLKHVQVYNKIFNMIQDGTYSPGMQLPSEPELAGQLNVSRATLRKSLALLQEDHLVKNIRGKGNFIRENSSNLSENGYENRQHPIKTCLTSKITEVELEFRVEVPAEAITASLKQETPVVVIADRWYHTDDGPLAYTLSFIPIELISDAEISLHDTKQLLNFIEEGIYHEGISSHSQSHLGYATSGNFSATKYTLSDHGQFILIQETIFNQEKILMCNKHYVPIEHFELSITSH

SEQ ID NO: 17453 - protein, 1619 aa, Streptococcus agalactiae
ATGGCAAAAGATATTAAATTTTCAGCAGATGCCCGCTCAGCAATGGTGCGTGGTGTTGATATTTTAGCTGATACAGTCAAAGTAACATTAGGTCCTAAAGGCCGTAATGTTGTTCTTGAAAAAGCATTTGGTTCTCCTTTAATTACAAATGATGGTGTGACAATTGCTAAAGAAATTGAGCTAGAAGATCACTTTGAAAATATGGGAGCTAAACTTGTGTCAGAAGTGGCTTCAAAAACTAATGATATTGCAGGGGATGGCACTACAACTGCTACTGTTTTGACCCAAGCTATTGTACGGGAAGGTCTTAAAAATGTAACTGCAGGGGCAAATCCGATTGGCATTCGTCGTGGTATTGAAACAGCTGTTTCAGCAGCAGTTGAAGAGCTAAAAGAGATTGCACAACCAGTTTCAGGCAAAGAAGCTATTGCTCAAGTTGCGGCTGTGTCTTCACGTTCTGAAAAAGTTGGGGAATACATTTCTGAAGCTATGGAGCGCGTGGGTAATGATGGTGTTATCACTATTGAAGAATCGCGAGGTATGGAAACAGAGCTTGAAGTTGTGGAAGGAATGCAGTTTGACCGTGGGTACTTGTCACAGTATATGGTAACTGATAACGAGAAAATGGTCTCTGAACTTGAGAATCCGTATATCCTTATTACAGATAAGAAAATTTCAAATATCCAAGAATTTTACCATTATTAGAAGAGGTTCTTAAAACAAATCGTCCGTTGCTAATCATCGCTGATGATGTTGATGGAGAAGCTCTCCCAACGCTTGTTCTTAACAAAATTCGTGGAACTTTCAATGTCGTAGCTGTTAAAGCGCCTGGATTTGGTGATCGTCGTAAAGCCATGCTGGAAGATATTGCTATCCTAACAGGAGGAACTGTCGTTACTGAAGACCTTGGTTTAGACTTAAAAGATGCTACTATGCAAGTTTTAGGACAGTCTGCTAAAGTAACAGTAGATAAAGATTCTACTGTTATTGTCGAAGGTGCCGGTGACTCATCAGCAATTGCTAATCGCGTAGCCATCATTAAGTCACAGATGGAGGCTACAACTTCTGATTTTGATCGTGAAAAATTACAAGAACGACTTGCTAAGTTAGCCGGTGGTGTAGCAGTAATTAAAGTTGGTGCGGCGACTGAAACAGAATTAAAAGAGATGAAACTTCGTATCGAAGATGCGTTAAATGCAACGCGTGCTGCAGTTGAAGAAGGTATTGTTTCAGGTGGAGGTACGGCTCTTGTGAACGTTATTGAAAAAGTAGCGGCACTGAAACTTAATGGTGATGAGGAGACTGGACGTAATATTGTTCTTCGTGCTCTCGAAGAGCCTGTTCGTCAAATTGCTTACAATGCTGGATATGAAGGTTCAGTTATTATTGAACGTTTAAAACAGTCTGAAATTGGTACAGGATTTAATGCGGCTAATGGAGAATGGGTAGATATGGTTACCACAGGTATCATTGATCCTGTCAAAGTAACACGTTCTGCACTTCAAAATGCGGCATCTGTAGCAAGTCTTATCTTGACTACAGAAGCAGTAGTAGCAAATAAACCTGAACCAGAAGCTCCTACAGCTCCTGCAATGGATCCATCTATGATGGGTGGCTTC

SEQ ID NO: 17454 - protein, 540 aa, Streptococcus agalactiae; identical to SEQ ID NO: 12656

SEQ ID NO: 17455 - protein, 281 aa, Streptococcus agalactiae
ATGTTAAACCATTAGGTGATCGTGTGATCATTTCGTTTGTTGAAACTGAAGAGAAATCTGTCGGTGGTTTTGTTCTTGCAGGAGCAAGCCATGATACGACAAAGACAGCCAAAGTTCTTGCTGTGGGTGACGGTATTCGTACCTTAACAGGGGAATTAGTTGCACCTAGCGTTGCAGAGGGTGATACTGTTTTAGTCGAAAATGGTGCTGGTTTGGAAGTTAAAGACGGTAACGAAAAAGTGACAGTTGTTCGCGAAAGTGACATTGTTGCTGTCGTTAAA

SEQ ID NO: 17456 - protein, 94 aa, Streptococcus agalactiae
MLKPLGDRVIISFVETEEKSVGGFVLAGASHDTTKTAKVLAVGDGIRTLTGELVAPSVAEGDTVLVENGAGLEVKDGNEKVTVVRESDIVAVVK

SEQ ID NO: 17457 - protein, 159 aa, Streptococcus agalactiae
GTGTTTGGTTCATTAGCCGATTGTGGAACAAAAACTGGTTTTATTTTCGCCCATTCAACGCTTGGTATTTTTGTTTTCTTTTCTGCCCTTAGTTGTCTACTTTTTTATGTAGGATTCCTTGGTTTTGTAGTAAAATGGATTGGTTNNNNNTTAATTAAT

SEQ ID NO: 17458 - protein, 53 aa, Streptococcus agalactiae
  VARIANT 49, 50: Xaa = Any Amino Acid
MFGSLADCGTKTGFIFAHSTLGIFVFFSALSCLLFYVGFLGFVVKWIGXXLIN

SEQ ID NO: 17459 - protein, 795 aa, Streptococcus agalactiae
ATGCAGAATTATTCAGGTGAAGTCGGATGCAAATATCACCTACAGATTCGTCCAGGTGATGTAGGTCGTTATGTTATCATGCCAGGTGATCCAAAACGTTGTGCAAAAATTGCAGAACATTTTGATAATGCAGTTCTTGTAGCAGACAGCCGTGAATATGTTACTTATACAGGTACATTAAATGGTGAAAAAGTCAGTGTTACTTCAACTGGTATTGGTGGTCCATCAGCGTCTATTGCGATGGAAGAATTGAAACTCTGTGGCGCTGATACCTTTATCCGTGTTGGAACATGTGGTGGTATTGACCTTGATGTTAAAGGCGGAGACATCGTTATTGCAACTGGAGCTATCCGTATGGAAGGTACAAGTAAAGAATATGCTCCGATTGAATTTCCTGCTGTAGCTGACTTGGAGGTAACGAATGCTCTAGTTAATGCAGCTAAAAAGCTTGGTTACACAAGTCACGCAGGAGTAGTTCAATGTAAAGATGCATTTTATGGACAACATGAGCCAGAACGTATGCCAGTTAGTTATGAATTATTAAATAAATGGGAAGCATGGAAACGTCTGGGAACAAAAGCGTCTGAAATGGAATCTGCAGCTCTTTTTGTAGCAGCAAGTCATCTAGGAGTTCGTTGTGGATCAGATTTCCTTGTTGTTGGTAATCAAGAACGCAACGCTTTGGGTATGGATAACCCAATGGCTCATGACACAGAAGCAGCTATTCAAGTTGCTGTTGAAGCACTCCGCACACTTATGAAAATGATAATCACAATAAGCGNNNNNTTAATTAAT

SEQ ID NO: 17460 - protein, 265 aa, Streptococcus agalactiae
  VARIANT 261, 262: Xaa = Any Amino Acid
MQNYSGEVGCKYHLQIRPGDVGRYVIMPGDPKRCAKIAEHFDNAVLVADSREYVTYTGTLNGEKVSVTSTGIGGPSASIAMEELKLCGADTFIRVGTCGGIDLDVKGGDIVIATGAIRMEGTSKEYAPIEFPAVADLEVTNALVNAAKKLGYTSHAGVVQCKDAFYGQHEPERMPVSYELLNKWEAWKRLGTKASEMESAALFVAASHLGVRCGSDFLVVGNQERNALGMDNPMAHDTEAAIQVAVEALRTLMKMIITISXXLIN

SEQ ID NO: 17461 - protein, 522 aa, Streptococcus agalactiae
ATGAATCAGGGGACAATCACATTAGACAACCAATCAATTACTAAAGACTCTGTAGAAAAACGATCTAAGGGTATTAGTCGAGTCTTTCAGGATCCTAGAATGGGAACTGCAACAAATTTGACGATTGAAGAAAATATGGCAATTGCACATAAAAGAGGCAATAAGCGTCACATTTTTAGACAGTCAGTGACTGACGATGACCGTCAACTATTTAAAAAGTCTCTATCACAATTAGGTCTAGGCTTAGAAAATCGAATGAAGACTGATGCTGCATTTTTATCTGGCGGTCAGCGTCAAGCCCTCACGTTAGCTATGGCAACTCTTGTTCGTCCCAAATTATTATTACTGGATGAACATACAGCGGCTCTAGATCCCAAAACTAGCGATATGGTTATGGAATTAACACAGAAAGTGATAGAAGAACAACGATTGACAGCCTTAATGATTACACACAATATGGAGCATGCCATTGCTTATGGTAATCGTCTGATATGCTCTACCACGGGAAAATTNNNNNTTAAT

SEQ ID NO: 17462 - protein, 174 aa, Streptococcus agalactiae
  VARIANT 171, 172, 173: Xaa = Any Amino Acid
MNQGTITLDNQSITKDSVEKRSKGISRVFQDPRMGTATNLTIEENMAIAHKRGNKRHIFRQSVTDDDRQLFKKSLSQLGLGLENRMKTDAAFLSGGQRQALTLAMATLVRPKLLLLDEHTAALDPKTSDMVMELTQKVIEEQRLTALMITHNMEHAIAYGNRLICSTTGKXXXN

SEQ ID NO: 17463 - protein, 732 aa, Streptococcus agalactiae
ATGGGGGCTGCAGTTTGCGCCTTATGTATCGTTAATGATATTAATCCAATTGTGGCAACCATAGCGGGCATGTTAGGTGGTATGTTGGCAGGACTAGTATCGGGTTTTCTTCATACTAAAATGAAAATACCAGCCCTCCTAACAGGTATTATTACGTTGACAGGACTTTACTCTATTAATTTACTTGTTTTAGGAAGATCAAACGTCTCTTTTGCTCTCAAAAATACTTTGGTTACAATGGTAACAAGATTAGGTTTAAATAAACTTTCAGCAGTTTTATTAATTGGAATTGTTTGTGTAGGTTTAGTTATCTTAATTTTGTATCTCTTTTTAAATACCCAACTAGGATTAGCTTTAAGAGCGACAGGTGATAATGAGGCTATGGGACAAGCCAATAGTATTAAAGTAGATCGGATGAAAATGCTAGGATATATGATTGGGAATGGCCTGATTGCTTTATCTGGTGCACTTTTAGCGCAAAATAATGGCTATGCAGATTTGAATATGGGAGTGGGTACAATCGTTATTGGATTGGCTTCAATTATCTTGGCAGAAGTAATGATAAAATACTTACCTCTTGGTAAAAGGTTATGGTCAATTGTATTAGGTTCTGTTTTATACCGTATGATTATTGTTTTCATATTAACAACCGATATTGATGCACAGATGATAAAGTTGGTTTCAGCAATTTTGTTGGCTCTCATTGAAATTCCCAGAATTACNNNNNTTAAT

SEQ ID NO: 17464 - protein, 244 aa, Streptococcus agalactiae
  VARIANT 242, 243: Xaa = Any Amino Acid
MGAAVCALCIVNDINPIVATIAGMLGGMLAGLVSGFLHTKMKIPALLTGIITLTGLYSINLLVLGRSNVSFALKNTLVTMVTRLGLNKLSAVLLIGIVCVGLVILILYLFLNTQLGLALRATGDNEAMGQANSIKVDRMKMLGYMIGNGLIALSGALLAQNNGYADLNMGVGTIVIGLASIILAEVMIKYLPLGKRLWSIVLGSVLYRMIIVFILTTDIDAQMIKLVSAILLALIEIPRITXXN

SEQ ID NO: 17465 - protein, 960 aa, Streptococcus agalactiae
ATGAAAAAAATAACAAAGATGGTAATTAGCAGCGTTTTAGCATCTGTTCTGATGACAGCTTGTTCACAATCTTCTCAAAATGGTCAATCTGATGTAAAACATATTGGTATTTTACAATATGTAGAACATCCCTCTCTAACTGCCACTAGGAAAGGATTTATAAAAGAATTAGCTAAAGAAGGCTATAAAGATGGCAAAAATATCAAAATTGAGTATAAGAATGCTCAAGGGGATCAGTCAAATATCCAATCAATTTCTGAAAAACTCATTAAAGATAATAAATTAGTATTGGGAATTGCGACTCCGGCGGCTCAATCGTTGACAACGGTGTCAACAGAAACACCTATTTTATTTACAGCAGTGACAGATCCGGTATCAGCCGAATTAGTAAAATCAATGAAAAAACCTGAAGGTTTAGCGACTGGTACAAGTGACATGTCTCCAATTAAAAAGCAAGTATCCCTTTTGAGAAAAGTAATGCCTAAGGTTAAACGTGTTGGTATTATGTATACCACTAGCGAGCGTAACTCAGAAGTTCAGGTAAAACAAGCAAAAAAAATCTTCCAAGAGGCGGGGATTAAAACAAGTGTTAAAGGTATTTCTTCCACTAATGATGTACAAGATACTGCTAAGAGTTTAATGTCTAAAACAGAGGTTCTTTTTGTACCAACAGATAATATTATAGCCAGCTCAGTAACGCTGTTAGGGAATCTATCGAAAGAATTAAAAGTGCCTGTTGTGGGAGGTTCAGCAGATATGGTACCAAGTGGTTTGCTCTTTTCTTATGGGGCTGATTATGAGGCTTTAGGTTGTCAAACGGCAAGACAAGCTGTTAAAATCCTCAAAGGTAAAGACGTCGCTAAAGTTCCTTCAGAATATCCTCAAAATCTAAAAGTAGTAGTTAATGAAGATATGGCAAAAGAGCTTGGAATTGATGTTTCAAGTATTAAAAATAATAAA

SEQ ID NO: 17466 - protein, 320 aa, Streptococcus agalactiae
MKKITKMVISSVLASVLMTACSQSSQNGQSDVKHIGILQYVEHPSLTATRKGFIKELAKEGYKDGKNIKIEYKNAQGDQSNIQSISEKLIKDNKLVLGIATPAAQSLTTVSTETPILFTAVTDPVSAELVKSMKKPEGLATGTSDMSPIKKQVSLLRKVMPKVKRVGIMYTTSERNSEVQVKQAKKIFQEAGIKTSVKGISSTNDVQDTAKSLMSKTEVLFVPTDNIIASSVTLLGNLSKELKVPVVGGSADMVPSGLLFSYGADYEALGCQTARQAVKILKGKDVAKVPSEYPQNLKVVVNEDMAKELGIDVSSIKNNK

SEQ ID NO: 17467 - protein, 795 aa, Streptococcus agalactiae; identical to SEQ ID NO: 8465

SEQ ID NO: 17468 - protein, 265 aa, Streptococcus agalactiae; identical to SEQ ID NO: 3760

SEQ ID NO: 17469 - protein, 858 aa, Streptococcus agalactiae
ATGCCGTATCCATACAAAGCCAATCATTCCATTGAATCAATCACCTTAAAAGTAAATGACCTCGAAAACCTCGTAAACTTCTATAGCGATATCATTGGGTTAACTGTTATTGACAAATCAAGCACTAGAGCCTTACTAGGGGTAAATCAAAAAATCCCTCTTATTATCCTTGAAAAAACTGAACTTGAAAAGCATAGTACCTATGGCCTTTATCACACTGCTATTTTAGTACCAGATGAATACCATCTCAGTCTAGCTCTAAATCATTTATTATCTCAGCATATCCCTCTAGAAGGTGGAGCTGACCATGGCTATAGCAATGCTATCTATCTAAGTGATCCTGAAGGTAATGGAATTGAAATTTATAATGATAAGGATATCTCTATGTGGGATATCAGAGAGAGTGGACAAATTATTGGTATTACTGAAAGACTAGATATTGACAATTTACTTGACAGCCTTGTCAACGTTCCTAATAACTATAAGCTTTCTGAAAAAACTCGTATTGGTCATATTCATTTGAGTGTTAAAGATGCTAAGATTAGCTCAAAACTCTATCAAAATGTTTTTGGCCTTGATGAGAAATTTGCAATCCCGACAGCTAGTTGGATTGCATCCGGTAACTACCATCATCATCTAGCCTTTAATAATTGGGCTGGTCCAAATCTTTCTAAAAACCAAGAAAATAGACCCGGAATTTCCTTATTGACAATTGCTTACAATGATGACAACCTTTTTAGAGATAGCTTAAAAAAAGCGCAACTTTACCAACTGACTTTCCTTGAAAAACAAGATCATTATTATATTATTGAAGATTTTGATGGCATCCGAATTAAAGTTGTTCTAAAACCAGAGAAT

SEQ ID NO: 17470 - protein, 286 aa, Streptococcus agalactiae
MPYPYKANHSIESITLKVNDLENLVNFYSDIIGLTVIDKSSTRALLGVNQKIPLIILEKTELEKHSTYGLYHTAILVPDEYHLSLALNHLLSQHIPLEGGADHGYSNAIYLSDPEGNGIEIYNDKDISMWDIRESGQIIGITERLDIDNLLDSLVNVPNNYKLSEKTRIGHIHLSVKDAKISSKLYQNVFGLDEKFAIPTASWIASGNYHHHLAFNNWAGPNLSKNQENRPGISLLTIAYNDDNLFRDSLKKAQLYQLTFLEKQDHYYIIEDFDGIRIKVVLKPEN

SEQ ID NO: 17471 - protein, 729 aa, Streptococcus agalactiae
ATGATAAAAATTTTGATCCCAACTGCAAAAGAAATGAAAGTGTGTCAAAACATTGCAAGGCCTAAACTGAGTGCACAAACGCAAATTATAATTGATTATTTTTCTACTTTAACTGTTTCAGACTTAGAGGATATCTACAGAATTAATACAAGTGCAGCTCGTTGTGAGGCTCAAAGATGGCAAGATTTTAAATGTAAACAACTTACTCTGAATCCTGCTATTAAGTTATTCAACGGTCTTATGTACCGCAATATCAAAAGGCACAACTTATCCACAAGTGAAGCACAATTTATGGAAAATTCTGTTTTTATTACTAGTGCTCTTTATGGCATCATTCCTGCTATGACACTAATATCCCCTCATCGTTTAGATTTTAACACTAAAATCAAAATCAACAATAACTCTCTTAAAGTTTTTTGGCGTGAAAATTACGATACTTTTATGCAGTCAGATGACATTATGGTTTCTTTGCTTTCTAATGAATTTAAAACCGTCTTTTCTCCTAAAGAGCGTCAAAAACTAATACATCTTAACTTTATTGAAGATCGAGATGGCCAATTAAAAACCCACTCTACCATATCAAAAAAAGCAAGAGGAAAGTGTTTAACTTCTATGATGGAAAATAATTGCCAAACTCTAGAACACTTAAAGCAATTACGCTTTGATGGCTTCTGTTATGATAATGAACTCTCAGACTCTAAGCAATTAACTTTTGTTAAAAAACAGACT

SEQ ID NO: 17472 - protein, 243 aa, Streptococcus agalactiae
MIKILIPTAKEMKVCQNIARPKLSAQTQIIIDYFSTLTVSDLEDIYRINTSAARCEAQRWQDFKCKQLTLNPAIKLFNGLMYRNIKRHNLSTSEAQFMENSVFITSALYGIIPAMTLISPHRLDFNTKIKINNNSLKVFWRENYDTFMQSDDIMVSLLSNEFKTVFSPKERQKLIHLNFIEDRDGQLKTHSTISKKARGKCLTSMMENNCQTLEHLKQLRFDGFCYDNELSDSKQLTFVKKQT

SEQ ID NO: 17473 - protein, 615 aa, Streptococcus agalactiae
ATGTCAGAAGAAGCAAGTTGGAATACTCCAAAGCCTGGGGAGTGGAAAAGCGAAGAATTAAGTCATGGCCATATCATTGATTATAAAGCTTTTAATTTTGTAGATGGTGAAGGTGTTAGAAATTCACTCTACGTAGCTGGATGTATGTTCCACTGTAAAGGGTGTTATAATACTGCTACATGGTCCTTTCGAGCCGGAATCCCTTATACAAAAGAGCTTGAAGATCAAATTATGAAAGATTTGGCACAACCTTACGTCCAAGGTTTAACGTTATTAGGTGGAGAGCCGTTCTTAAATACAGGTATTTTGCTGCCACTTCTTCAGCGTATCCGACGTGAATTGCCAGAAAAAGATATTTGGTCATGGACGGGGTATACTTGGGAAGAAATGATGCTGGAGACTCAAGATAAATTGGAGATGTTATCTTTGATTGATATTTTAGTGGATGGTAGGTTTGATCAAAGTAAGCGAAATTTAATGCTACAATTTAGAGGATCTTCAAATCAAAGAATCATTGATGTACAAAAATCTTTAAAAGAAGGTGAAGTCGTGATTTGGGAAGGATTAAACGATGGTGACAATAGTTATGAACAAGTCAAACGAGATTATTTACTT

SEQ ID NO: 17474 - protein, 205 aa, Streptococcus agalactiae
MSEEASWNTPKPGEWKSEELSHGHIIDYKAFNFVDGEGVRNSLYVAGCMFHCKGCYNTATWSFRAGIPYTKELEDQIMKDLAQPYVQGLTLLGGEPFLNTGILLPLLQRIRRELPEKDIWSWTGYTWEEMMLETQDKLEMLSLIDILVDGRFDQSKRNLMLQFRGSSNQRIIDVQKSLKEGEVVIWEGLNDGDNSYEQVKRDYLL

SEQ ID NO: 17475 - protein, 489 aa, Streptococcus agalactiae
ATGAAATTACGGCGCCCAGTGTTAGAAGATAAAGAAGAAATTTTAGCCATGTATAAAGAGTTTCAAAAAGAAAGTAGTTCAATGGATGGTGGTTTTTATGAACCAACTACGCATTTTGAAGACTGGCTAGATCATAACCTAAATATGGAGTTAGGGATAGGTGTTCCTGATAATTTTGTTCCATATATTCAGTTTGTGTCTTTTGACAATGACAATAATGCTATAGGTTTCTTAAATTTACGTTTAAGACTAAATGATACTCTTTTAGAAAAAGGTGGACATATTGGTTATTCCATACGACCTCGCCAGCGTGGTAAAGGTTATGCTAAAGAACAGTTGAAGCTAGGAATTGAGCAAGCACATCTAAAAAATATCAATGAAATACTTGTGACATGCCATGTAGACAATGATGCCAGCAAGTCAGTAATATTAGCTAACGGTGGTATTTTAGAAGATTGTCGTCATCAGACAGAGCGTTATTGGATAACC

SEQ ID NO: 17476 - protein, 163 aa, Streptococcus agalactiae
MKLRRPVLEDKEEILAMYKEFQKESSSMDGGFYEPTTHFEDWLDHNLNMELGIGVPDNFVPYIQFVSFDNDNNAIGFLNLRLRLNDTLLEKGGHIGYSIRPRQRGKGYAKEQLKLGIEQAHLKNINEILVTCHVDNDASKSVILANGGILEDCRHQTERYWIT

SEQ ID NO: 17477 - protein, 930 aa, Streptococcus agalactiae; identical to SEQ ID NO: 8475

SEQ ID NO: 17478 - protein, 310 aa, Streptococcus agalactiae; identical to SEQ ID NO: 8476

SEQ ID NO: 17479 - protein, 141 aa, Streptococcus agalactiae; identical to SEQ ID NO: 8477

SEQ ID NO: 17480 - protein, 47 aa, Streptococcus agalactiae; identical to SEQ ID NO: 8478

SEQ ID NO: 17481 - protein, 1775 aa, Streptococcus agalactiae
GTGTTTAATACCCAACGTGATTTACAGCAGGTATGTAGGGAAATCAATGGTCTGAAAATGTTACCTTCTCATGTAGCAAATGCACATCAAAAGGGTGATATCCATTACCATGATTTAGATTACAGCCCATACACTCCCATGACAAATTGCTGTTTAATCGATTTTAAGGGAATGCTTGCAAATGGTTTTAAGATTGGTAATGCAGAAGTTGAGAGTCCAAAATCTATTCAGACAGCGACTGCTCAGATTTCACAGATTATTGCGAACGTTGCTTCAAGTCAATATGGTGGCTGTACAGCAGATCGCATTGATGAGTTTTTAGCTCCTTATGCACAGTTAAATTATCAAAAACATTTAAAAGATGCAAAAGAATGGGTTATTGAAGATAAACAAGAGGACTATGCGCGCGCTAAAACACAAAAAGATATATATGATGCCATGCAATCTTTGGAGTATGAGATTAATACTTTATTTACTTCAAATGGGCAAACGCCATTTACTTCGCTTGGTTTTGGATTGGGAACTAATTGGTTTGAACGAGAAATTCAAAAAGCGATTTTGAAAATTCGGATTCAAGGTTTAGGAAGCGAGCATCGTACTGCTATTTTTCCAAAATTAATTTTTACGCTTAAAAAAGGTCTTAATTTAGAAGAAAATAGCCCCAATTATGATATTAAACAATTAGCATTAGAGTGTGCGACAAAACGGATGTATCCAGATGTCCTTTCTTATGATAAAATTATTGACTTAACGGGCTCTTTTAAAGCCCCTATGGGCTGTCGTTCCTTCCTACAAGGGTGGCGAGATGCAAATGGTCAGGATGTAACATCTGGTCGTATGAATCTTGGAGTTGTAACAGTTAATCTACCGCGTGTTGCCATGGAGTCTAACGGTGATATGGATAAATTCTGGGAGATATTTAATGAACGTATGAGTATTGCTAGAGATGCCTTGGTTTATCGTGTGGAACGTGTCAAAGAGGCTATCCCAGCAAATGCGCCCATTCTTTACCAGTATGGAGCATTTGGAGAACGTTTAGGAAAATATGAGAATGTTGATCGACTCTTTAATCACCGCCGTGCAACGGTGTCTCTTGGTTATATTGGTTTATATGAGGTGGCGAGTGTTTTTTATGGTGGTGACTGGGAAGATAATCATCAAGCTAAAGCATTTACTGTAGACATCGTTCGTAAGATGAAGCAGTTATGTGCAGATTGGTCTGATGAGTATGATTATCATTTTTCAGTTTATTCGACACCATCGGAGAGCTTGACTGACCGGTTTTGTCGTTTAGATACTGAAAAATTTGGTATAGTAACTGATATTACTGATAAGGAATACTACACTAATTCATTCCATTATGATGTGCGTAAGAATCCAACACCTTTTGAAAAACTAGATTTTGAGAAAATCTATCCTGAAACGGGTGCATCAGGAGGATTTATTCACTACTGTGAATACCCTGTTTTGCAACAGAATCCAAAAGCTTTAGAAGCAGTTGGGACTATGCTTATGATCGGGTAGGTTATCTAGGTACTAATACACCAATTGATAAGTGTTACCAATGTCAATTTGAAGGGGATTTTACACCGACAGATCGAGGCTTTACTTGTCCAAATTGTGGTAACAGCGACCCTAAGACAGTAGATGTTGTCAAACGTACATGTGGTTACTTAGGTAATCCACAGGCTCGTCCGATGGTTAATGGTCGTCATAAGGAAATCTCTGCTCGTGTAAAACATATGAACGGATCAAGTATTAAAAATCAAGGTAAT

SEQ ID NO: 17482 - protein, 593 aa, Streptococcus agalactiae
  VARIANT 9: Xaa = Any Amino Acid
MFNTQRDLXAGIVGKSIGLKMLPSHVANAHQKGDIHYHDLDYSPYTPMTNCCLIDFKGMLANGFKIGNAEVESPKSIQTATAQISQIIANVASSQYGGCTADRIDEFLAPYAQLNYQKHLKDAKEWVIEDKQEDYARAKTQKDIYDAMQSLEYEINTLFTSNGQTPFTSLGFGLGTNWFEREIQKAILKIRIQGLGSEHRTAIFPKLIFTLKKGLNLEENSPNYDIKQLALECATKRMYPDVLSYDKIIDLTGSFKAPMGCRSFLQGWRDANGQDVTSGRMNLGVVTVNLPRVAMESNGDMDKFWEIFNERMSIARDALVYRVERVKEAIPANAPILYQYGAFGERLGKYENVDRLFNHRRATVSLGYIGLYEVASVFYGGDWEDNHQAKAFTVDIVRKMKQLCADWSDEYDYHFSVYSTPSESLTDRFCRLDTEKFGIVTDITDKEYYTNSFHYDVRKNPTPFEKLDFEKIYPETGASGGFIHYCEYPVLQQNPKALEAVWDYAYDRVGYLGTNTPIDKCYQCQFEGDFTPTDRGFTCPNCGNSDPKTVDVVKRTCGYLGNPQARPMVNGRHKEISARVKHMNGSSIKNQGN

SEQ ID NO: 17483 - protein, 268 aa, Streptococcus agalactiae
ATGACAGAATCTGATATCAAAGTGATTAAACGTGACGGGCGTTTGGTCAGCTTTGATAAGTATAAAATCTACACGGCTCTATTAAAAGCTAGTAATAAAGTTATCAAAATGTCTCCTTTAGTTGAGGCTAAACTTGAGATGATTGCAGATCATGTCATCGCTGAGATCTACAATCGTTTTAAGATAACATCAGATATATGAAATACAAAATATCGTTGAACATAAATTATTGGAAGCTAATGAGTACGCTATTGCACAAGAANNNNNT

SEQ ID NO: 17484 - protein, 90 aa, Streptococcus agalactiae
  VARIANT 61, 89, 90: Xaa = Any Amino Acid
MTESDIKVIKRDGRLVSFDKYKIYTALLKASNKVIKMSPLVEAKLEMIADHVIAEIYNRFXDNIZIYEIQNIVEHKLLEANEYAIAQEXX

SEQ ID NO: 17485 - protein, 1086 aa, Streptococcus agalactiae
ATGTACCCAATACAGTGGGCATTACCTTTTATGCTCATTTCGCTATGGTTTTTAATTAAATTTTGTGTCGATAATATCGTTGATGAAGCATTTATATTTTATGGTATTTTAGCAGCATTCTCACTATTTATAGATCCCCAAACACTGATTTTTTGGCTTTGCTCTTTTGTTCTCTTAACAGCAACCAATATTAAGCAAAAGCAGTCACTACGAGGGTTCTATCAGTTTTTATGCGTTGTTTTTGGTATGATTTTAATTGCTTATACTGTTGGTTACTTTATGTTTAATCTACAGATTATCTCTTCTTATATTGACAAAGCTATTTTTTACCCCTTTACGTATTTCGCTAGGACAAACCACTCATTCCTTCTTAGTTTAGCAATTCAAATTGTTGTCCTTCTAGGGTCAGGTTGCCTCTTTGGACTATGGGATTTTATTCAAAATCGTAAAAAAGCATCTTATCAAATCGGCTTGAACTTTATTGCCTGTATTTTTATTATTTACGCTATAATGGCCATTTTTTCAAGAGATTTTAACCTTTACCACTTTTTACCTGCTTTACCATTTGGTCTTTTGCTAACGAGTAATAAAATTACTATTCTTTACCAAAAAGTGATTGACAGGCGTTCACATAGACGTCAGTATTTCTCTGGTAAATCTCTTATCGTAGACCTTTTTGTAAAGAAAACATATTATTTGCCCCTCTTACTAGTTTCCTTATTGATAGGGTTACTTGTTTATAATACTTATCAAAATGTTACTCTTAGTAAAGAAAGGCGTGACATTTCACATTATTTGACTACAAAAATTGATAGAGATGGTAAGATTTATGTTTGGGACAAAGTTGCTAGCATTTATAGCCAGACTCGGTTAAAATCTGCTTCGCAATTTGTTTTGCCACATATTAATACAGCGCAAAAAAATAATGAGAAAATTTTGAAGGACGAGCTGCTTCAGCATGGGGCTAAATACTTTATCTTAAATAAAAATGAGAAGTTACCAAATGAACTGAAATCTGATATTAAGAAGCACTACCAAGAAGTTCCTCTATCAAATATCACTCATTTTGTTCTATATCGTTTCAAA

SEQ ID NO: 17486 - protein, 362 aa, Streptococcus agalactiae
MYPIQWALPFMLISLWFLIKFCVDNIVDEAFIFYGILAAFSLFIDPQTLIFWLCSFVLLTATNIKQKQSLRGFYQFLCVVFGMILIAYTVGYFMFNLQIISSYIDKAIFYPFTYFARTNHSFLLSLAIQIVVLLGSGCLFGLWDFIQNRKKASYQIGLNFIACIFIIYAIMAIFSRDFNLYHFLPALPFGLLLTSNKITILYQKVIDRRSHRRQYFSGKSLIVDLFVKKTYYLPLLLVSLLIGLLVYNTYQNVTLSKERRDISHYLTTKIDRDGKIYVWDKVASIYSQTRLKSASQFVLPHINTAQKNNEKILKDELLQHGAKYFILNKNEKLPNELKSDIKKHYQEVPLSNITHFVLYRFK

SEQ ID NO: 17487 - protein, 120 aa, Streptococcus agalactiae
ATGTCAGATACTCAGCTAACATTAGAAGAACAAGAATTTCTCAAACAATATATGTCTAGAAGATACCACTACTTTAGGGATATTATTCGTTACGGTCAAGTGTTGGCTAAATTGACTAAA

SEQ ID NO: 17488 - protein, 40 aa, Streptococcus agalactiae
MSDTQLTLEEQEFLKQYMSRRYHYFRDIIRYGQVLAKLTK

SEQ ID NO: 17489 - protein, 314 aa, Streptococcus agalactiae
ATGGCACATAATCATAACCACGGTCATAACCATGAACATCAACATGAAGTAATCACTCTTGTAGATGAGAATGGGAACGAAACACTTTTTGAAATCCTACTAACTATTGATGGACGTGAAGAGTTTGGCAAAAACTATGTTCTCCTCGTTCCTGCAGGTGCAGAAGAAGACGAACAGGTGAAATTGAGATTCAAGCTTACTCATTTACAGAAAATGCTGATGGAACTGAAGGAGACCTTCAGCCTATACCAGAAGATTCAGATGCAGAATGGGACATGATTGAGGAAGTTTTCAACAGCTTTCTAGATGAAGAA

SEQ ID NO: 17490 - protein, 105 aa, Streptococcus agalactiae
  VARIANT 59: Xaa = Any Amino Acid
MAHNHNHGHNHEHQHEVITLVDENGNETLFEILLTIDGREEFGKNYVLLVPAGAEEDEXGEIEIQAYSFTENADGTEGDLQPIPEDSDAEWDMIEEVFNSFLDEE

SEQ ID NO: 17491 - protein, 407 aa, Streptococcus agalactiae
ATGGGACTTGACGTCGGCTCGAAAACTGTTGGCGTTGCAATTAGTGATCCACTCGGTTTCACTGCACAAGGTCTTGAAATCATTAAGATCGATGAAGAATCTGGAAATTTTGGTTTTGACCGCTTAGCAGAGTTAGTAAAAGAGTACAAAGTTGATAAATTTGTAGTTGGTCTACCTAAAATATGAATAATACAAGTGGTCCTCGTGTAGAGGCTAGTCAGGTATATGGCGATAAAATCACTGAATTATTCAATCTTCCAGTTGAATATCAAGATGAACGTCTAACGACTGTTCAAGCAGAGCGTATGCTAGTTGAGCAAGCTGATATTAGTCGTGGTAAGCGTAAGAAAGTTATCGATAAATTAGCAGCTCAACTAATCTTACAAAATTATTTAGACCGCATGTTT

SEQ ID NO: 17492 - protein, 136 aa, Streptococcus agalactiae
MGLDVGSKTVGVAISDPLGFTAQGLEIIKIDEESGNFGFDRLAELVKEYKVDKFVVGLPKNMNNTSGPRVEASQVYGDKITELFNLPVEYQDERLTTVQAERMLVEQADISRGKRKKVIDKLAAQLILQNYLDRMF

SEQ ID NO: 17493 - protein, 264 aa, Streptococcus agalactiae; identical to SEQ ID NO: 12691

SEQ ID NO: 17494 - protein, 88 aa, Streptococcus agalactiae; identical to SEQ ID NO: 3770

SEQ ID NO: 17495 - protein, 395 aa, Streptococcus agalactiae
ATGATTAAGATTTATACTATTCAAGTTGCACAAGTTGTAAAAAAGCAAAAACTTGGCTAAATGCTCATCAACTTCCATATAAAGAACAAAACCTAGGTAAAGAATCACTAACACGTGATGAAATTTTAGAAATATTAACAAAAACTGAAAGTGGTATTGAAAGTATCGTTTCTTCTAAAAATCGTTATGCTAAGGCGCTCAATTGTAATATTGAGGAGTTGAGTGTAAATGAAGTTATTGATCTTATTCAAGAAAATCCACGTATTTTAAAGAGTCCAATTCTAATTGATGACAAACGTCTTCAAGTAGGTTATAAGGAAGATGATATTCGTGCTTTTCTACCTCGCTCTATTCGTAACGTTGAAAATGCAGAAGCTCGTCTTCGTGCAGCACTT

SEQ ID NO: 17496 - protein, 132 aa, Streptococcus agalactiae; identical to SEQ ID NO: 8492

SEQ ID NO: 17497 - protein, 1132 aa, Streptococcus agalactiae
TTGGCTAAAAAAACGAAAAAAGCAGAAGAAATTACTAAGAAATTCGGTGATGAACGTCGAAAAGCCTTAGATGATGCTTTGAAAAATATTGAAAAAGATTTTGGTAAGGGCGCAGTGATGCGCTTAGGTGAGCGAGCTGAACAAAAGGTTCAAGTAATGAGTTCAGGTTCTCTTGCTTTAGATATCGCTTTAGGAGCAGGTGGATATCCTAAAGGACGTATCGTCGAAATTTATGGACCAGAGTCATCTGGTAAAACAACGGTTGCCCTTCATGCCGTAGCTCAAGCCCAAAAGGAAGGTGGGATTGCTGCCTTTATTGATGCTGAGCACGCTCTTGACCCAGCCTATGCTGCGGCTCTTGGAGTTAATATTGATGAGTTACTCTTGTCTCAACCTGACTCAGGTGAGCAAGGTCTTGAAATTGCAGGTAAATTGATTGATTCAGGCGCAGTTGATTTAGTTGTTGTCGATTCAGTTGCAGCCCTTGTTCCTCGTGCTGAGATTGATGGTGATATTGGTGACAGCCACGTTGGTTTGCAAGCTCGTATGATGAGTCAAGCAATGCGTAAATTGTCAGCATCCATTAACAAGACAAAGACAATCGCAATTTTTATCAACCAGCTAAGGGAAAAAGTAGGCGTTATGTTTGGTAACCCTGAAACAACACCTGGTGGTCGTGCTTTGAAATTTTATTCATCGGTTCGTCTAGATGTTCGTGGTAATACTCAAATCAAGGGGACTGGTGAGCATAAAGATCATAATGTTGGTAAAGAGACAAAAATCAAAGTTGTTAAAAATAAAGTTGCTCCACCATTCCGTGAAGCTTTTGTCGAAATTATGTATGGTGAAGGTATTTCTCGCACGGGTGAGTTAATTAAAATTGCTAGTGATTTGGATATTATCCAAAAGCAGGTGCATGGTACTCATATAATGGTGAGAAAATTGGACAAGGTTCTGAAAATGCCAAAAATATTTAGCAGATACCAGCATTTTTGATGAAATTGACCATAAAGTGCGCGTGCACTTTGGAATGACTGAAGATGATTCGCCAGTTCAGTCTGAGCTCGTTGAAGAAAAAAATGAAGCTGATGATCTTGTTTTAGATTTGGACAATGCTATTGAAATTGAGGAA

SEQ ID NO: 17498 - protein, 379 aa, Streptococcus agalactiae
  VARIANT 302: Xaa = Any Amino Acid
MAKKTKKAEEITKKFGDERRKALDDALKNIEKDFGKGAVMRLGERAEQKVQVMSSGSLALDIALGAGGYPKGRIVEIYGPESSGKTTVALHAVAQAQKEGGIAAFIDAEHALDPAYAAALGVNIDELLLSQPDSGEQGLEIAGKLIDSGAVDLVVVDSVAALVPRAEIDGDIGDSHVGLQARMMSQAMRKLSASINKTKTIAIFINQLREKVGVMFGNPETTPGGRALKFYSSVRLDVRGNTQIKGTGEHKDHNVGKETKIKVVKNKVAPPFREAFVEIMYGEGISRTGELIKIASDLDIIXKAGAWYSYNGEKIGQGSENAKKYLADNPAIFDEIDHKVRVHFGMTEDDSPVQSELVEEKNEADDLVLDLDNAIEIEE

SEQ ID NO: 17499 - protein, 1257 aa, Streptococcus agalactiae
GTGAGGGCTGAAATTATCGCTGTAGGAACAGAAATTTTAACAGGACAGATCGTTAATACAAACGCACAATTTTTGTCGGAGAAAATGGCAGAATTGGGAATTGATATTTATTTCCAGACAGCTGTAGGAGATAATGAGGAACGTTTATTATCGCTTTTAGATATAGCTAGTCAGCGCAGTCAAATGGTTATCCTATGTGGTGGACTTGGACCTACAGAGGATGATTTAACGAAACAAACTTTGGCTAAATTTTTAGGTAAATCATTAACAGTGGATTTATTAGCTAGTCAAAAATTGGATCGTTTTTTTGCAAGTCGTCCTCAGTTTGCTAGAACGCCAAATAATGAACGACAAGCTCAATTGGTTGAAGGCTCAATACCTCTACAAAACCTTACTGGTCTAGCTGTTGGTGGTATCGTTACATCTAAGGGAGTCCAATATATGGTTTTACCAGGTCCGCCTAGTGAATTAAAGCCAATGGTTATGGAGCAGGTGGTACCTATTTTGTCAAATAATGGCACAAAATTATATTCACGTGTATTGAGATTCTTTGGTATCGGTGAGAGTCAGTTAGTCACAATCTTAGAAGACATAATTAAGAATCAGACAGATCCAACTATAGCACCATATGCAAAGATTGGTGAGGTAACTTTAAGGTTATCAACGAAAGCTGAAAATCAGAATGAAGCCGACTTTAAATTAGATAGCTTAGAAAAAGAAATACTTGCTCTTAAGACATTAGATAACCGTAAATTAAAAGATTTATTATATGGCTATGGTGATAATAATAGTATGGCACGTACTGTTTTAGAATTATTGAAAGTACAAAATAAAACGATTACTGCCGCAGAGAGCTTAACAGCAGGGTTATTTCAATCTCAGTTAGCAGAATTTTCTGGTGCTTCGCAAGTTTTTAATGGTGGCTTTACGACCTATAGTATGGAAGCAAAATCACAACTTCTCGGCATCCCTAAGAAAAAATTGCAAGAATATGGAGTTGTCAGTCATTTTACAGCTGAGGCAATGGCTCAGCAAGCTCGCCAGCTTTTAAAAGCAGATTTTGGTATCGGTTTAACGGGAGTTGCTGGTCCTGATGAGTTGGAAGGATACCCTGCAGGTACAGTTTTTATTGGGATTGCAACCCCTGAAGGCGTTTCTTCTATTAAAGTATCGATTGGAGGGAAGAGCCGCTCAGATGTCCGTCATATCAGTACTTTACATGCTTTTGACCTGGTGCGTAGGGCTTTATTAAAGATA

SEQ ID NO: 17500 - protein, 419 aa, Streptococcus agalactiae
MRAEIIAVGTEILTGQIVNTNAQFLSEKMAELGIDIYFQTAVGDNEERLLSLLDIASQRSQMVILCGGLGPTEDDLTKQTLAKFLGKSLTVDLLASQKLDRFFASRPQFARTPNNERQAQLVEGSIPLQNLTGLAVGGIVTSKGVQYMVLPGPPSELKPMVMEQVVPILSNNGTKLYSRVLRFFGIGESQLVTILEDIIKNQTDPTIAPYAKIGEVTLRLSTKAENQNEADFKLDSLEKEILALKTLDNRKLKDLLYGYGDNNSMARTVLELLKVQNKTITAAESLTAGLFQSQLAEFSGASQVFNGGFTTYSMEAKSQLLGIPKKKLQEYGVVSHFTAEAMAQQARQLLKADFGIGLTGVAGPDELEGYPAGTVFIGIATPEGVSSIKVSIGGKSRSDVRHISTLHAFDLVRRALLKI

SEQ ID NO: 17501 - protein, 549 aa, Streptococcus agalactiae
ATGAAACGATGTTCTTGGGTGAATTTAGATAATCCATTATATGTAGCTTACCATGATAAAGAGTGGGGGAGAGCTGTTCATGACGATCATGTACTCTTTGAGTTACTATGTTTAGAAACTTATCAATCGGGTTTATCTTGGGAAACAGTATTAAATAAACGCCAGGAGTTCAGACAAGTTTTTCATCACTATAATATTGAAAAGGTAGCTGCAATGTCAGATGCGGATTTAGAGATAATCTTACAAAATCCTAGGGTTATTCGTCATCGTCTAAAACTTTTCTCAACACGACAAAATGCTAGGTCAATTATATTAATTCAGAAAGAATTCGGAAGTTTTGATCGCTCCATTTGGTCTTTTGTAGATAATAAAGTACAGGTTAACTCAGTTAACAACTACAACGATGTGCCTGCAAGTACTACCTTATCCGAACGCTTATCTAAGGATTTAAAAAAACGCGGTTTTAAATTTGTTGGTCCAACTTGCCTCTATTCTTTTATTCAGGCCGCGGGTATGGTTAATGACCATGAAAATATATGTGATTTCAAG

SEQ ID NO: 17502 - protein, 183 aa, Streptococcus agalactiae
MKRCSWVNLDNPLYVAYHDKEWGRAVHDDHVLFELLCLETYQSGLSWETVLNKRQEFRQVFHHYNIEKVAAMSDADLEIILQNPRVIRHRLKLFSTRQNARSIILIQKEFGSFDRSIWSFVDNKVQVNSVNNYNDVPASTTLSERLSKDLKKRGFKFVGPTCLYSFIQAAGMVNDHENICDFK

SEQ ID NO: 17503 - protein, 588 aa, Streptococcus agalactiae
ATGTACGATTATATTAAAGGAAAATTGAGTAAAATAACGGCTAAATTTATTGTTGTGGAAACAGCTGGATTGGGATACGTGATATATGTGGCAAATCCCTACTCTTTTTCAGGTTACGTTAATCAAGAAGTTACCATCTACTTACATCAAGTCATTCGCGATGATGCACATCTTTTATTTGGTTTTCATACGGAAAATGAAAAAGAAATTTTTCTTAATTTAATTTCAGTATCAGGAATTGGTCCAACGACCGCTTTAGCAATTATTGCAGTCGATGACAATGAAGGTCTCGTAAGTGCCATTGATAATAGTGATATTAAGTATTTGACTAAATTTCCAAAGATAGGAAAAAAAACAGCACAACAGATGATCCTTGATTTGTCAGGGAAGTTTGTAGAAGCTTCTGGTGAGAGTGCGACTAGTCGTAAGGTTAGCTCTGAGCAGAATAGCAATCTTGAAGAAGCTATGGAAGCTTTGTTAGCGTTGGGGTATAAGGCGACTGAATTGAAAAAAGTAAAAGCCTTTTTTGAAGGTACGAACGATACTGTGGAGCAATACATCAAATCTAGTTTGAAGATGTTGATGAAA

SEQ ID NO: 17504 - protein, 196 aa, Streptococcus agalactiae
MYDYIKGKLSKITAKFIVVETAGLGYVIYVANPYSFSGYVNQEVTIYLHQVIRDDAHLLFGFHTENEKEIFLNLISVSGIGPTTALAIIAVDDNEGLVSAIDNSDIKYLTKFPKIGKKTAQQMILDLSGKFVEASGESATSRKVSSEQNSNLEEAMEALLALGYKATELKKVKAFFEGTNDTVEQYIKSSLKMLMK

SEQ ID NO: 17505 - protein, 1230 aa, Streptococcus agalactiae
GTGAAAGAGTTTTTTGCTTTGCCAAAACAGCTACAGTTAAGAGAATTATTGCGTTTTATTTCCATTACGGTTGGTTCAGCTATTTTTCCTTTTATGGCAATGTATTATGTTCAATATTTTGGAAATCTAGTTACAGGAATTTTGATCATCATAACTCAACTATCAGGGTTTGTAGCGACCTTATATGGAGGCCATTTGTCAGATGCTATAGGGAGGAAAAAAGTTGTGATTGTAGGTTCACTGCTGGCAACCATTGGTTGGGCTATAACTATAGCTGCAAATGTTCCAAATCATATTACGCCACACTTGACCTTTGTAGGTATCCTTATCATTGAAATAGCTCACCAATTTTATTCCCCTGCCTATGAAGCTATGACCATTGATTTGACGAACGAACAGAATCGTCGCTTTGTTTACACTATAGGTTATTGGTTGGTTAACATCGCTGTAATGCTAGGTTCTGGGATTGCTGGGATTTTCTATGATCACCATTTTTTTGAATTATTAATAGTTCTTCTTATTATTTCAGCGATTTGTTGTTTGGTGGTCTACTTCAAGTTTGATGAGACAAAACCACAGGAGGGAACCTTCAAGCATGATAAGGGAGTTTTAGGAACTTTTAAAAATTATAGTCAGGTTTTAGTGGATAAAGCGTTTGTTGTTTATACTTTAGGAGCAATTGGTTCCAGTGTTGTCTGGCTCCAGGTTGATAATTATTTCTCGGTCAATCTTAAGCAAAATTTTGAAGTAGTGTCTGTGTTAGGACATACAATCACAGGTGCTAAAATGCTTAGTTTAGCAGTCTTTACGAACACTCTATTAATTGTCTTACTAATGACAACTATAAATAAATTCATAGAGAATTGGCCTTTGAAACGTCAACTAATATTAGGAAGCTTGATTTGTGGTTTTGGAATGCTTTTTAATATTTCTCTAAACACTTTTGGAGCTATTTTGATTGCCATGACGTTTTTCACCTTTGGCGAAATGATTTATGTTCCAGCTAGTCAGGTTCTAAGGGCGGAGATGATGGTGGAGGGAAAAATTGGATCATATTCTGGATTTTTAGCTATCGCACAACCTGTTGCAAGTGTATTAGCAGGTGCCATGGTTTCGCTCAGCTATTTTACAGGAAAAATAGGTGTTCAAATAACATTGACCATTTTTATGTTAGCAGGTCTGGTTTTAATCTTATACGCTACCAAAATGAAAAATATTGAGATAGGAAAA

SEQ ID NO: 17506 - protein, 410 aa, Streptococcus agalactiae
MKEFFALPKQLQLRELLRFISITVGSAIFPFMAMYYVQYFGNLVTGILIIITQLSGFVATLYGGHLSDAIGRKKVVIVGSLLATIGWAITIAANVPNHITPHLTFVGILIIEIAHQFYSPAYEAMTIDLTNEQNRRFVYTIGYWLVNIAVMLGSGIAGIFYDHHFFELLIVLLIISAICCLVVYFKFDETKPQEGTFKHDKGVLGTFKNYSQVLVDKAFVVYTLGAIGSSVVWLQVDNYFSVNLKQNFEVVSVLGHTITGAKMLSLAVFTNTLLIVLLMTTINKFIENWPLKRQLILGSLICGFGMLFNISLNTFGAILIAMTFFTFGEMIYVPASQVLRAEMMVEGKIGSYSGFLAIAQPVASVLAGAMVSLSYFTGKIGVQITLTIFMLAGLVLILYATKMKNIEIGK

SEQ ID NO: 17507 - protein, 1974 aa, Streptococcus agalactiae
ATGAACTTGTCTAAAATTATTGAATTACCGGATATATTAGCTAACCAGATTGCTGCTGGTGAGGTTGTTGAAAGGCCTAGTAGCGTCGTTAAAGAATTAGTTGAAAATGCCATAGATGCAGGAAGTAGCCAAATTACCATAGAGGTTGAAGAATCTGGTCTTAAAAAGATTCAAATAACGGATAACGGTGAAGGGATGACTAGTGAGGATGCCGTTCTCAGTTTACGACGTCACGCTACATCCAAAATCAAAAGCCAGAGTGACCTTTTTCGTATTCGGACCTTAGGTTTTCGTGGTGAAGCTCTACCATCAATCGCTTCGATTAGTTTAATGACAATAAAAACAGCTACAGAGCAAGGGAAACAAGGGACGTTACTTGTTGCTAAAGGGGGAAACATTGAAAAACAGGAAGTTGTTTCAAGTCCTCGTGGAACAAAAATTTTAGTTGAAAATTTATTCTTTAATACGCCTGCCAGATTGAAATACATGAAGAGTTTACAGTCTGAACTAGCTCATATTATTGATATTGTTAATAGACTCAGTCTAGCGCATCCGGAAGTTGCTTTTACACTGATAAATGATGGTAAAGAAATGACTAAAACTAGTGGGACTGGCGATTTGAGACAGGCGATTGCAGGTATTTATGGTTTAAATACTGCAAAAAAAATGATTGAGATTTCAAATGCAGATTTAGATTTTGAAATTTCGGGTTATGTAAGTTTGCCTGAATTGACACGAGCTAACCGAAACTATATTACCCTATTAATTAACGGTCGTTACATTAAAAATTTTCTTTTAAACCGCTCAATTCTAGATGGTTATGGTTCAAAGTTGATGGTTGGAAGATTTCAATTGCTGTCATTGATATTCAGATAGATCCTTATCTAGCAGATGTCAACGTTCATCCGACTAAGCAAGAGGTGAGATTTCTAAGGAACGAGATTAATGAGTTTAATAAGCTCAGCAATTTCTGAGAGTCTGAAACAATATGATTTGATTCCGGATGCTTTAGAGAATTTAGCGAAAACTAGTACCCGAAGTGTAGATAAGCCTATACAAACAAGCTTCTCACTAAAACAGTCTGGTTTGTATTACGATAGGACTAAAAATGACTTTTTTATAGATGCAGATACTGTATCTGAACCTATTGCTAACTTTACAAACCTTGACAAAAGTGACGGTTCAGTTGACAATGATGTAAAAAACTCTGTTAATCAAGGAGCAACGCAGTCTCCTAATATAAAGTATGCTAGTAGAGATCAAGCTGATAGTGAGAACTTCATTCATTCTCAGGACTACCTTAGTAGTAAACAGTCACTTAACAAACTTGTTGAAAAATTAGATTCGGAAGAAAGTTCGACTTTTCCAGAGCTCGAATTTTTTGGTCAAATGCATGGGACCTACTTATTTGCTCAAGGGAATGGTGGGTTGTATATTATTGATCAACATGCAGCTCAAGAGCGTGTAAAATACGAGTATTACCGTGAAAAGATAGGTGAGGTTGATAATAGTCTTCAACAATTGTTAGTACCATTTCTATTTGAATTTTCAAGTTCAGATTTTCTTCAATTACAAGAAAAAATGTCATTATTACAAGATGTTGGTATTTTCTTGGAACCGTATGGTAATAATACTTTCATTTTAAGGGAACATCCAATTTGGATGAAAGAAGAAGAGGTAGAGTCTGGCGTTTATGAAATGTGTGATATGTTGTTGCTCACTAATGAAGTATCAGTGAAAAAATATCGCGCAGAGTTGGCTATTATGATGTCTTGCAAGCGATCTATTAAAGCAAACCATACGCTAGACGATTACTCAGCACGTCATTTATTAGATCAGTTAGCGCAATGTAAAAATCCTTATAATTGCCCTCATGGAAGACCTGTTTTAGTTAATTTTACAAAAGCTGATATGGAGAAAATGTTTAAACGAATCCAAGAAAATCATACAAGCCTCAGGGATTTAGGAAAATAT

SEQ ID NO: 17508 - protein, 659 aa, Streptococcus agalactiae
MNLSKIIELPDILANQIAAGEVVERPSSVVKELVENAIDAGSSQITIEVEESGLKKIQITDNGEGMTSEDAVLSLRRHATSKIKSQSDLFRIRTLGFRGEALPSIASISLMTIKTATEQGKQGTLLVAKGGNIEKQEVVSSPRGTKILVENLFFNTPARLKYMKSLQSELAHIIDIVNRLSLAHPEVAFTLINDGKEMTKTSGTGDLRQAIAGIYGLNTAKKMIEISNADLDFEISGYVSLPELTRANRNYITLLINGRYIKNFLLNRSILDGYGSKLMVGRFPIAVIDIQIDPYLADVNVHPTKQEVRISKERELMSLISSAISESLKQYDLIPDALENLAKTSTRSVDKPIQTSFSLKQSGLYYDRTKNDFFIDADTVSEPIANFTNLDKSDGSVDNDVKNSVNQGATQSPNIKYASRDQADSENFIHSQDYLSSKQSLNKLVEKLDSEESSTFPELEFFGQMHGTYLFAQGNGGLYIIDQHAAQERVKYEYYREKIGEVDNSLQQLLVPFLFEFSSSDFLQLQEKMSLLQDVGIFLEPYGNNTFILREHPIWMKEEEVESGVYEMCDMLLLTNEVSVKKYRAELAIMMSCKRSIKANHTLDDYSARHLLDQLAQCKNPYNCPHGRPVLVNFTKADMEKMFKRIQENHTSLRDLGKY

SEQ ID NO: 17509 - protein, 99 aa, Streptococcus agalactiae; identical to SEQ ID NO: 6435

SEQ ID NO: 17510 - protein, 33 aa, Streptococcus agalactiae; identical to SEQ ID NO: 6436

SEQ ID NO: 17511 - DNA, 201 bp, Streptococcus agalactiae
atgacacaaggtacagtgaaatggtttaactcagaaaaaggttttggctttatttctagcgaaactggaacagacgtcttcgctcatttttcagagattaaagttgatggcttcaaaactcttgaagaaggacaaaaagtaacatttgatattcaagatggtcaacgtggaccacaagcaacaaatatcaatcttgttaaa

SEQ ID NO: 17512 - protein, 67 aa, Streptococcus agalactiae; identical to SEQ ID NO: 6434

SEQ ID NO: 17513 - DNA, 2574 bp, Streptococcus agalactiae
atggccaagccaacgatatcaccgggaatgcaacagtatctggatataaaagagaattatccagatgcttttttgctttttagaatgggtgatttttatgaattattttatgatgatgcggtaaaagcagcacaaatcctggaaattagcttgactagtcgaaataagaacgcagaaaagccaatcccaatggcaggagttccctatcactcagctcaacagtatattgacgttttagttgaattaggttacaaagtagccattgctgagcagatggaagatcctaaaaaagctgtgggagtggtcaagcgtgaggtagtgcaagttgttaccccaggaacggttgtggagtcaacgaagccggatagtgctaataatttcttagtagcgattgattcgcaagatcaacaaacatttggtctagcatatatggatgtctcaactggagagtttcaggcaacccttttaacagattttgagtccgtccgtagtgaaatactaaatttaaaagctcgtgagattgtagtaggatatcaattgacggacgaaaaaaatcacctactgacgaagcagatgaacttgcttttatcatacgaagacgaacgacttaatgatattcatttgattgatgagcagttaactgatttggaaatatctgctgcggaaaaacttttacaatatgtgcatagaacacaaaagcgtgaacttagtcatttacagaaagtagttcattatgaaataaaggactatttacaaatgtcatatgcaacgaaaaatagtctagatttactggagaatgctagaacaagcaagaagcacggaagtctttactggttgttagatgagactaaaacagcgatgggaactcgaatgctgagaacttggattgacaggcctttggtaagtatgaatcgaatcaaggaacgtcaagatattattcaagtgtttcttgattatttttttgagagaaacgatctcacagaaagtttaaagggtgtatatgatattgaacgcctagcaagtcgagtatctttcggaaaagccaaccctaaagatctattgcaactcggacagaccttatcacaaattcctcggattaaaatgattttacagtccttcaatcaacctgagcttgacatcattgtcaacaaaattgacactatgcctgaattagaaagtttaattaatacggcgatagccccagaagcacaggctactatcactgagggaaacattatcaagtctggatttgataagcaattggataattatcgaacagtgatgcgtgaaggtacaggttggattgctgatattgaagctaaggaaagagcagcaagtggtatcggtacccttaaaattgattataataaaaaagacggctattacttccatgtgaccaattccaatttatcactagtaccggagcattttttccgtaaagcgacattaaaaaattctgaacgctatggaacagcagaactagccaaaattgaaggtgaaatgctcgaagctcgcgagcaatcttcaaatttagaatatgatatttttatgcgtgttcgtgctcaagtagaatcttatattaaacgtcttcaagagttagcaaagactattgcaaccgttgatgttctacagagtttggcagtagttgcagaaaatcatcactatgttcgtcccaaatttaatgatgaacatcagattaagattaagaatgggcgtcatgcaaccgttgaaaaagtgatgggagtgcaagaatatattcccaatagtatctattttgatagtcagacagatatccagttgattacaggaccaaatatgagtggtaagtcgacctatatgcgccagttagctctgacagttattatggcacaaatgggaggttttgtatcggcagacgaagttgatttgcctgtatttgatgcaatatttactaggattggtgctgctgatgacttaatttctgggcaatcaacctttatggtagaaatgatggaagcgaatcaagctgtaaaacgagccagtgataaatctttgattctttttgatgaattaggtcgagggacagccacttatgatggtatggcattagctcaatcgattatagaatatattcatgaccgtgttagggcaaaaacaatgtttgcaactcattaccatgagttgacagatttatctgaacaattgacaaggcttgtcaatgtacacgtggctactttagagagagatggagaagttaccttcttacataaaattgaacctggacctgcggacaagtcttatgggatacacgtcgcaaaaatagctggtttaccaattgacttattggatagggcaactgatattttatcacagttggaagctgatgcagtacagttgatcgtatcagccccccaagaagctgttactgctgacttaaatgaggaactagatcctgggaagcaacaaggacaattatcgctttttgaagaacattcaaatgcaggtagggttattgaggagttagaagcgatagatataatgaatctaactccaatgcaagctatgaatgctatatttgatttaaagaaattatta

SEQ ID NO: 17514 - protein, 858 aa, Streptococcus agalactiae
MAKPTISPGMQQYLDIKENYPDAFLLFRMGDFYELFYDDAVKAAQILEISLTSRNKNAEKPIPMAGVPYHSAQQYIDVLVELGYKVAIAEQMEDPKKAVGVVKREVVQVVTPGTVVESTKPDSANNFLVAIDSQDQQTFGLAYMDVSTGEFQATLLTDFESVRSEILNLKAREIVVGYQLTDEKNHLLTKQMNLLLSYEDERLNDIHLIDEQLTDLEISAAEKLLQYVHRTQKRELSHLQKVVHYEIKDYLQMSYATKNSLDLLENARTSKKHGSLYWLLDETKTAMGTRMLRTWIDRPLVSMNRIKERQDIIQVFLDYFFERNDLTESLKGVYDIERLASRVSFGKANPKDLLQLGQTLSQIPRIKMILQSFNQPELDIIVNKIDTMPELESLINTAIAPEAQATITEGNIIKSGFDKQLDNYRTVMREGTGWIADIEAKERAASGIGTLKIDYNKKDGYYFHVTNSNLSLVPEHFFRKATLKNSERYGTAELAKIEGEMLEAREQSSNLEYDIFMRVRAQVESYIKRLQELAKTIATVDVLQSLAVVAENHHYVRPKFNDEHQIKIKNGRHATVEKVMGVQEYIPNSIYFDSQTDIQLITGPNMSGKSTYMRQLALTVIMAQMGGFVSADEVDLPVFDAIFTRIGAADDLISGQSTFMVEMMEANQAVKRASDKSLILFDELGRGTATYDGMALAQSIIEYIHDRVRAKTMFATHYHELTDLSEQLTRLVNVHVATLERDGEVTFLHKIEPGPADKSYGIHVAKIAGLPIDLLDRATDILSQLEADAVQLIVSAPQEAVTADLNEELDPGKQQGQLSLFEEHSNAGRVIEELEAIDIMNLTPMQAMNAIFDLKKLL

SEQ ID NO: 17515 - DNA, 435 bp, Streptococcus agalactiae
atgaataaaatagaacgccaaaaacgtattaaacgtttaatccaatcagggcagattggcacacaagaagaaattaaattacatttaaaaaatgaaggaatcgatgtcacgcaagcgactctatcaagagacttgcgtgagattggtcttttaaaattgcgtagcccagaaggtaagctatattatagtttatcaacagctacttcaaatcgatttagcccagccttacgctcctatattttgaaagtatcgcgagcaagttttatgttagttttaaatactaatttaggggaggctagcgttttagcaaactttattgatgagaaagggctgccagagattttaggaacaatggcaggagcagacaccttgttggtgatttgtcaaaatgaagatattgccaaagtttttgaaaaagaactatcagtaggttta

SEQ ID NO: 17516 - protein, 145 aa, Streptococcus agalactiae; identical to SEQ ID NO: 3792

SEQ ID NO: 17517 - DNA, 1689 bp, Streptococcus agalactiae
atggatacaaaacatctaattgcgagtgaaattcaaaaagttgttccatatatggaacaatcggccattctttctttattagaaaccccaaaaaattcgagcatgggagatttagctttcccagcattctctttggctaaaactctacgcaaagcacctcaaataattgctagtgacattgctgaacaaattaaaagcgaccaatttgaaaaggtggaagctgttggatcttacgttaactttttccttgataaagccgcaatctcaagtcaagttttaaaacaagtcttatctgatggttctgcctatgctactcaaaatattggtgaaggacgaaatgttgccattgatatgtctagtccaaatattgctaagccattctcaattggacaccttcgttcaacagttattggtgatagtttagctaatatttttgataaaattggctatcatcctgttaaaattaatcaccttggcgactggggtaaacaatttggaatgttaatcgttgcctataaaaaatggggcaatgaagaggctgtccgtgctcatcccattgatgaacttttaaaactttatgtccgtattaatgctgaagccgagatagaccctagcgttgatgaagaggcacgtgagtggtttcgtaaacttgaggctaacgatcctgaagcaactgaattatggcaatggttccgtgacgagtcattattagaattcaaccgtctttacgataaaatgaatgttacatttgatagctataacggcgaggcattctacaacgacaaaatggatgaagtgcttgaactgctagaatctaaaaacctcctagtcgaatctaaaggtgcacaagttgttaacctagaaaaatacggtattgaacatcctgccctcattaaaaaatccgatggagcaactctctacattacacgtgacttagctgctgcactttaccgtaaacgtacctacgattttgcaaaatcaatctacgttgtaggaaacgaacagtctgcacactttaaacaactaaaagctgttcttaaagaaatggactacgattggtccgatgatatgactcatgttccttttggccttgtaacaaaaggaggagcaaaattatcaactcgtaaaggaaatgtaattctccttgaacctactgttgcagaagctattaatcgtgcggcatctcagattgaagctaaaaaccctaacctagcagataaagataaagttgctcaagcagttggtgtaggtgctattaaattttacgatttgaaaactgatcgtacaaatggttatgactttgacttagaagcaatggtatcatttgaaggtgaaactgggccatatgtacaatatgcacatgctcgtattcaatcaatcttacgtaaagctaactttaacccatctaatagcgataattacagtctcaacgatgttgaaagctgggaaatcatcaaactcatccaagattttcctcgtattattgtgcgtgcagcagataattttgagccctctattattgcaaaattcgctatcaatttagctcagtgcttcaataaatattacgcccacacacgtattttagatgaagatgctgaaatcagtagtcgtctagcactttgctatgcaactgctacagtattaaaagaatctcttcgcctcctaggagttgatgctccgaatgaaatg

SEQ ID NO: 17518 - protein, 563 aa, Streptococcus agalactiae
MDTKHLIASEIQKVVPYMEQSAILSLLETPKNSSMGDLAFPAFSLAKTLRKAPQIIASDIAEQIKSDQFEKVEAVGSYVNFFLDKAAISSQVLKQVLSDGSAYATQNIGEGRNVAIDMSSPNIAKPFSIGHLRSTVIGDSLANIFDKIGYHPVKINHLGDWGKQFGMLIVAYKKWGNEEAVRAHPIDELLKLYVRINAEAEIDPSVDEEAREWFRKLEANDPEATELWQWFRDESLLEFNRLYDKMNVTFDSYNGEAFYNDKMDEVLELLESKNLLVESKGAQVVNLEKYGIEHPALIKKSDGATLYITRDLAAALYRKRTYDFAKSIYVVGNEQSAHFKQLKAVLKEMDYDWSDDMTHVPFGLVTKGGAKLSTRKGNVILLEPTVAEAINRAASQIEAKNPNLADKDKVAQAVGVGAIKFYDLKTDRTNGYDFDLEAMVSFEGETGPYVQYAHARIQSILRKANFNPSNSDNYSLNDVESWEIIKLIQDFPRIIVRAADNFEPSIIAKFAINLAQCFNKYYAHTRILDEDAEISSRLALCYATATVLKESLRLLGVDAPNEM

SEQ ID NO: 17519 - DNA, 306 bp, Streptococcus agalactiae
atgccatcagaaaaagaaatattagatgctcttagtaaagtttatagcgaagaagtaatacaagcagatgattattttcgtcaagctattttcgagctcgctagtcaacttgaaaaagaggggatgaactcactcctagctacaaaaattgactcacttatcaatcaatacgtcttaacacatcaatttgatgctcctaaaagcatatttgatcttagtcgcttggtaaaaacaaaagctagccattacaagggaactgctatctcagctattatgcttggtagtttcttaagtggaggaccaaaa

SEQ ID NO: 17520 - protein, 102 aa, Streptococcus agalactiae; identical to SEQ ID NO: 3796

SEQ ID NO: 17521 - protein, 870 aa, Streptococcus agalactiae
ATGTTGAAACTGGATTTAAAAACAAAGATAAAAGAAGCTATTTTAATTGCCTTTGGTGTGGCTCTCTATACTTTCGGCTTTGTCAAATTTAATATGGCTAATCATTTGGCTGAAGGAGGTATTTCCGGTGTCACTTTGATTATCCATGCACTTTTCGGAGTTAATCCAGCACTTTCATCACTTCTCCTTAATATCCCGTTATTTATATTAGGGGCTAGGATTTTAGGGAAAAAATCCTTATTATTAACTATATATGGTACAGTGTTAATGTCTTTTTTCATGTGGTTTTGGCAACAAATCCCTGTAACAGTCCCTTTGAAAAACGATATGATGTTAGTTGCAGTAGCTGCTGGAATTTTAGCAGGAACTGGTAGTGGTTTAGTATTTAGATATGGTGCAACTACAGGTGGTGCAGATATTATTGGTCGTATTGTAGAGGAAAAATCTGGAATAAAATTAGGGCAAACCTTATTGTTTATTGATGCTATAGTTCTAACGTCTTCACTTGTTTATATTAATTTACAACAGATGCTATATACGTTAGTAGCTAGCTTTGTATTTAGTCAAGTGTTAACAAATGTTGAAAATGGGGGCTACACTGTTCGTGGAATGATCATTATTACCAAAGAATCAGAATCTGCAGCAGCAACCATTTTGCATGAAATTAATAGGGGTGTAACTTTTTTACGGGGCCAAGGTGCCTACTCAGGTAGAGAGCATGATGTCTTGTACGTAGCTCTTAACCCAAGTGAAGTGCGTGATGTGAAAGAAATCATGGCTGATTTAGACCCAGATGCTTTTATTTCTGTTATAAATGTAGATGAAGTTATTAGCTCAGATTTTAAAATTCGACGAAGAAATTACGATAAA

SEQ ID NO: 17522 - protein, 290 aa, Streptococcus agalactiae
MLKLDLKTKIKEAILIAFGVALYTFGFVKFNMANHLAEGGISGVTLIIHALFGVNPALSSLLLNIPLFILGARILGKKSLLLTIYGTVLMSFFMWFWQQIPVTVPLKNDMMLVAVAAGILAGTGSGLVFRYGATTGGADIIGRIVEEKSGIKLGQTLLFIDAIVLTSSLVYINLQQMLYTLVASFVFSQVLTNVENGGYTVRGMIIITKESESAAATILHEINRGVTFLRGQGAYSGREHDVLYVALNPSEVRDVKEIMADLDPDAFISVINVDEVISSDFKIRRRNYDK

SEQ ID NO: 17523 - protein, 942 aa, Streptococcus agalactiae
ATGAAAACTAGACGAACCCCTTTAGAAAAAAAGGTAAAATATATTATCAGTGTATGGGCTAAAAAATTTGGTCTCTTACACACTTTAAAAAGTATCTCACGAGAAAAATATGCAGAGAAAATTTCGGCTTCATTACTGTATGGTATTCTATCCAGTGTTGCTGTTAATTTCTTTTTTCAACCTGGACATGTTTATTCAAGTGGAGCAACTGGTTTAGCTCAGGTTATTTCAGCTGTCAGTAAACACTGGTTTTCTTTTGAAATACCAGTTGCTTTAGCTTTTTATGCCATTAATATCCCTTTGCTGATATTATCTTGGCGTAAGATTGGACATAAATTTACTATTTTTACGTTTATCACAGTAACTGTAAGCTCTATCTTCATTCAACTAATGCCTCAAATCACCCTTACAACTGATCCCTTAATCAATGCTATCTTTGGTGGCTTAATTATGGGAGCTGGTGTTGGTTTTAGCTTTAAGTCTAGAATTTCTAGTGGGGGAACAGATATTATCAGTTTGACAATTAGAAAGAAAACAGGCAGAGATGTAGGTAGTATTTCTTTTATTATTAATGGTATTATTTTATTATTTGCAGGTCTTTTATTTGGTTGGAAGTACGCTTTGTACTCGATGGTGACAATTTTTGTATCAAGTAGAGTTACAGATGCCATTTTTACAAAGCAAAAAAAGATGCAAGCGATGATTGTTACCAGTAAGCCTGATTGCGTCATTAAACGTATCCATCGTGATTTACATCGTGGTGTAACCTGTATCAATGATGCTGAAGGTACTTATAATCATGAGAAAAAAGCAGTTTTAATAACTATATTAACACGTGAAGAATTTAGTGATTTTAAATATTTAATGCTAAAAGCAGATCCAAAAGCCTTTGTTTCCGTTGCAGAAAATGTTCATATTATTGGACGATTCGTTGATGATGAT

SEQ ID NO: 17524 - protein, 314 aa, Streptococcus agalactiae; identical to SEQ ID NO: 3800

SEQ ID NO: 17525 - protein, 1749 aa, Streptococcus agalactiae
ATGAAACGTAGTATGTATGCTGGGCGTGTTCGTAGTGAGCACATAGGAACATCGATTACTTTAAAAGGATGGGTTGGTCGTCGTCGTGACCTTGGAGGCCTTATTTTTATTGATCTTCGCGATCGCGAGGGAATCATGCAATTAGTTATTAATCCTGAAGAAGTAGCAGCCTCAGTTATGGCAACCGCAGAAAGTCTCCGTAGTGAATTTGTTATAGAGGTTAGCGGTGTAGTGACAGCACGAGAACAAGCTAATGATAATTTACCAACAGGAGAAGTTGAATTAAAAGTGCAAGAATTATCGGTTCTTAATACCTCGAAAACAACACCATTTGAAATTAAAGATGGTATTGAGGCAAATGATGATACACGCATGCGTTACCGTTACTTGGATCTTCGTCGTCCGGAAATGCTTGAAAATTTCAAATTACGTGCGAAAGTAACACACTCAATCCGTAATTACCTTGACAACTTAGAGTTTATTGATGTCGAAACTCCGATGCTAACAAAATCAACTCCAGAGGGGGCACGAGACTATTTGGTTCCATCACGTGTCAACCAAGGACATTTTTATGCCCTTCCACAAAGCCCTCAAATTACAAAACAGCTATTGATGAATGCAGGATTTGATCGTTATTATCAAATTGTCAAATGTTTTCGTGATGAGGATTTACGTGGAGATCGTCAACCTGAGTTTACACAAGTTGACTTAGAGACATCATTCCTTAGTGATCAAGAAATTCAAGACATTGTTGAGGGTATGATTGCTAAAGTAATGAAAGACACTAAAGGTTTAGAGGTTTCTTTACCATTCCCAAGGATGGCATATGATGATGCAATGAATAACTACGGGTCTGATAAGCCTGATACAAGGTTTGATATGCTTTTACAAGACTTGACAGAAATTGTAAAAGAAGTTGACTTCAAGGTGTTCTCAGAAGCTTCAGTAGTTAAAGCGATTGTTGTCAAAGACAAGGCGGACAAGTACTCTCGAAAAAATATTGATAAATTAACAGAAATTGCAAAACAATACGGTGCCAAAGGTTTAGCATGGCTAAAATATGTAGATAATACTATTTCAGGTCCGGTTGCTAAGTTCTTGACAGCTATTGAAGGTAGGTTGACAGAAGCTTTGCAGCTAGAGAATAATGACTTAATTCTATTTGTAGCAGATAGTCTTGAAGTAGCTAACGAGACTTTAGGAGCGCTTCGTACACGCATTGCAAAAGAACTTGAACTCATTGATTATTCTAAATTTAATTTCCTATGGGTTGTTGATTGGCCAATGTTTGAGTGGTCAGAAGAAGAGGGACGATATATGTCGGCTCATCATCCATTCACCTTGCCAACAGCGGAGACAGCGCATGAGTTGGAAGGGGATTTGGCTAAAGTACGTGCAGTTGCCTATGATATTGTTTTGAATGGATATGAGTTAGGCGGTGGTAGCCTACGTATTAACCAAAAAGATACACAAGAGCGTATGTTCAAGGCTTTAGGATTTAGCGCTGAATCAGCTCAGGAACAGTTTGGTTTCTTACTTGAAGCTATGGATTACGGCTTCCCACCACATGGTGGATTGGCAATAGGCCTTGACCGCTTTGTTATGTTGTTAGCAGGCAAGGACAATATTCGAGAAGTTATTGCATTCCCTAAAAACAATAAGGCTAGTGATCCAATGACTCAAGCTCCTAGTCTCGTTTCAGAACAACAATTAGAAGAATTATCACTTACTGTAGAAAGTTATGAAAAC

SEQ ID NO: 17526 - protein, 583 aa, Streptococcus agalactiae
MKRSMYAGRVRSEHIGTSITLKGWVGRRRDLGGLIFIDLRDREGIMQLVINPEEVAASVMATAESLRSEFVIEVSGVVTAREQANDNLPTGEVELKVQELSVLNTSKTTPFEIKDGIEANDDTRMRYRYLDLRRPEMLENFKLRAKVTHSIRNYLDNLEFIDVETPMLTKSTPEGARDYLVPSRVNQGHFYALPQSPQITKQLLMNAGFDRYYQIVKCFRDEDLRGDRQPEFTQVDLETSFLSDQEIQDIVEGMIAKVMKDTKGLEVSLPFPRMAYDDAMNNYGSDKPDTRFDMLLQDLTEIVKEVDFKVFSEASVVKAIVVKDKADKYSRKNIDKLTEIAKQYGAKGLAWLKYVDNTISGPVAKFLTAIEGRLTEALQLENNDLILFVADSLEVANETLGALRTRIAKELELIDYSKFNFLWVVDWPMFEWSEEEGRYMSAHHPFTLPTAETAHELEGDLAKVRAVAYDIVLNGYELGGGSLRINQKDTQERMFKALGFSAESAQEQFGFLLEAMDYGFPPHGGLAIGLDRFVMLLAGKDNIREVIAFPKNNKASDPMTQAPSLVSEQQLEELSLTVESYEN

SEQ ID NO: 17527 - protein, 1278 aa, Streptococcus agalactiae
ATGAAACTTCAAAAACCAAAAGGGACTCAGGATATCTTACCTGGAGAATCAGCAAAGTGGCAATACGTTGAAAATGTTATACGCAATCTCTTTAAACAATATCATTATGATGAAATTCGTACACCAATGTTTGAACATTACGAGGTTATTAGTCGCTCAGTTGGGGATACAACGGATATCGTTACAAAAGAGATGTATGATTTTCATGATAAAGGAGATCGTCACATTACGCTTCGTCCAGAAGGAACAGCACCTGTTGTACGTTCTTATGTTGAAAATAAACTATTTGCACCAGAAGTTCAAAAACCAACCAAAATGTATTATATTGGATCAATGTTCCGATATGAGCGCCCACAGGCTGGTCGTTTACGAGAATTTCATCAAGTAGGCGTTGAGTGCTTTGGATCAAATAATCCAACAACTGATGTTGAAACAATCGCAATGGGACATCATCTATTTGAAGATTTAGGTATCAAAAACGTTAAACTTCATCTTAATAGTTTAGGAAGTCCAGAAAGTCGTCAAGCCTATCGCCAAGCTCTTATTGATTACTTAACACCCATACGTGAACAATTGTCTAAGGATAGTCAACGTCGTTTGAATGAAAATCCATTGCGCGTACTAGACTCTAAGGAGCCAGAAGACAAACTAGCAGTTGAAAATGCTCCTTCTATTTTAGATTATTTAGATGAGTCAAGCCAAGCCCACTTTGATGCTGTGTGTCATATGCTTGATGCTCTAAATATTCCATACATCATTGATACTAATATGGTTCGTGGTCTTGATTATTATAACCATACTATTTTTGAGTTTATCACTGAGATTGAAGATAATGAATTAACGATCTGTGCTGGAGGCCGTTATGACGGCTTAGTATCCTATTTTGGTGGACCAGAAACACCAGCATTTGGTTTTGGATTAGGATTAGAACGCTTGCTCTTAATATTAGATAAGCAAGGGATTTCTTTACCAATAGAAAATACTATAGATCTGTATATAGCTGTATTAGGATCAGAGGCTAATCTAGCTGCCTTAGATTTGGCACAATCAATACGTCATCAAGGTTTTAAAGTAGAGCGTGATTATTTGGGTCGTAAAATCAAAGCACAATTTAAGTCTGCAGATACTTTTAATGCTAAAGTGATTATGACATTAGGTAGCAGTGAAGTAGATTCGAAAGAGGTCGGTTTAAAAAATAATCAAACACGTCAAGAAGTTAAAGTTAGTTTTGAAAACATTAAAACAGATTTTTCATCTGTGCTTAAACAATTAGGATTG

SEQ ID NO: 17528 - protein, 426 aa, Streptococcus agalactiae
MKLQKPKGTQDILPGESAKWQYVENVIRNLFKQYHYDEIRTPMFEHYEVISRSVGDTTDIVTKEMYDFHDKGDRHITLRPEGTAPVVRSYVENKLFAPEVQKPTKMYYIGSMFRYERPQAGRLREFHQVGVECFGSNNPTTDVETIAMGHHLFEDLGIKNVKLHLNSLGSPESRQAYRQALIDYLTPIREQLSKDSQRRLNENPLRVLDSKEPEDKLAVENAPSILDYLDESSQAHFDAVCHMLDALNIPYIIDTNMVRGLDYYNHTIFEFITEIEDNELTICAGGRYDGLVSYFGGPETPAFGFGLGLERLLLILDKQGISLPIENTIDLYIAVLGSEANLAALDLAQSIRHQGFKVERDYLGRKIKAQFKSADTFNAKVIMTLGSSEVDSKEVGLKNNQTRQEVKVSFENIKTDFSSVLKQLGL

SEQ ID NO: 17529 - protein, 180 aa, Streptococcus agalactiae; identical to SEQ ID NO: 8645

SEQ ID NO: 17530 - protein, 60 aa, Streptococcus agalactiae; identical to SEQ ID NO: 3806

SEQ ID NO: 17531 - DNA, 147 bp, Streptococcus agalactiae
atgcgcgtaaatattacacttgaacataaagaatctggtgaacgcttgtaccttacttcaaaaaacaaacgtaacactccagaccgtcttcaattgaaaaaatactcaccaaaacttcgtaaacacgttgttttcactgaggttaag

SEQ ID NO: 17532 - protein, 49 aa, Streptococcus agalactiae; identical to SEQ ID NO: 3808

SEQ ID NO: 17533 - DNA, 612 bp, Streptococcus agalactiae
atgattcaaaatgttgttacttcaataatcctgtattctgggacagccgtagacttacttattatcctaatgttattttttgccaaaagaaaaagcagaaaagacatcattaacatctatttaggacaatttctaggctctgttagtctaatattcctaagtttgctttttgcatttgtcttaaattatattcctagtaaagagattttaggtttactcggtttgattccaattttcctaggcctaaaagttttgcttttaggagattctgatggagaagctattgcaaaagatggtttgcgaaaagacaataaaaacctgatttttctagtcgctatgattacttttgcaagttgtggcgctgacaatattggtgtctttgtcccatattttaccaccttaaatttagcgaatttgatagtgactttacttacttttctagtcatgatttatctcttggttttttctgcacaaaaattagcacaagtcccttctgttggagaaactttggaaaaatatagcagatggtttattgccgttgtctatttaggattggggatgtatatcctgattgaaaacaacagctttgacatgctatgggctgtgttaggc

SEQ ID NO: 17534 - protein, 204 aa, Streptococcus agalactiae; identical to SEQ ID NO: 8642

SEQ ID NO: 17535 - DNA, 336 bp, Streptococcus agalactiae
atgaaaaaagatagtatctgtcaagtggatgttataaatcaacaaaatgttacaaccgcaacgaactaccttgaaaaggaaaaagtccaaaaatcacttcgcattttatcaaaatttaccgataataaacagataaatatcatcttttatctccttgccgtcgaagaactctgtgtctgcgatatagcctgtttattaaatctcagtatggcatctgcctcccaccatcttcgtaaactagccaatcaaaacatcttggacactagaagagaggggaaaattatatattattttataaaagatgaggaaatcagagatttttttaatcaactagga

SEQ ID NO: 17536 - protein, 112 aa, Streptococcus agalactiae; identical to SEQ ID NO: 8640

SEQ ID NO: 17537 - DNA, 1413 bp, Streptococcus agalactiae
atgaaattttttgaagaaaattattcacaagaaatacctactcgtatcaaaaatttaagaaaaaaatacaatattacacaaagcgaactaggcaatgcaggtcaagttagtcaagttgaaagtggtaagcgaccaattacgagttcgatgttagtttatttaaatgctctaaccgcttcgagctatacgtatatcgtttttggagagttagatgagtttattgagraatctgtttcattatttttcagttctattttatatagagatttagaggctgtagatgaaaaactatattctttcatgagtgatgatttaattymaatccaatcaagttgtctaagtattgccaagacatttgcaaatttcaatattcaaagaaaaagatttatgatttctactgaaactgaaatggatacttttcacaagaaagatgacattgacgtatgggttggtggaaaaagttataaccccgctagaagttttagaacccgtaccatcaatgaattgactgtcattgattttgaagaaatgtttgatattctttggttgatgttaggggataatttaattaaatcatttgaagttaatgtctgtggtatcctatttgaattaggcggaaatgacataccctcaacatttaggcaagaaaacattgatcctctcatcaataaatggtggtatgataatgtttcgacagaaattatccctaatctaataaaaaaactcaaagaaaatcccttgtttaatatcggatttatggtaaatgatatattagaaagaatgtataaagagaatattccaaaatcttaccttacatccgtcccattagttatttctcaaaaaggaagaacaacctattcgtttagtatgactggtggtcaacaaatagatggagtgaaattcacacagatatatgaggactatatgaaattactcagtcaaggtaaggatatcgcagagttatatcaaaaatattctaaagaagagttggcaaatctaggcattaatatttatcaatccaatgatatagaaaggactgaggaaagaacttttgatgaaattatcagttgggtttccaacccttatgcaacaagaccaattcaagaaaggcacactattcaattagagccaacaagattttcactagaggataagaaaagaattgaagaagctgcagctcaaggactaagcgaaatcgaccttattgatttagttgacctatatgatattaatttagacaatacaagcgtcaatcgccatattgtggggttattgactaataacacccaagtaacatactatttccaagaacaattaaataaggagttgctgtcaatggctcacgctttagataacgtacaacaggcctttattaaattattaagtgaagaggagatacgaaaatttgctctt

SEQ ID NO: 17538 - protein, 471 aa, Streptococcus agalactiae
  VARIANT 76, 107: Xaa = Any Amino Acid
MKFFEENYSQEIPTRIKNLRKKYNITQSELGNAGQVSQVESGKRPITSSMLVYLNALTASSYTYIVFGELDEFIEXSVSLFFSSILYRDLEAVDEKLYSFMSDDLIXIQSSCLSIAKTFANFNIQRKRFMISTETEMDTFHKKDDIDVWVGGKSYNPARSFRTRTINELTVIDFEEMFDILWLMLGDNLIKSFEVNVCGILFELGGNDIPSTFRQENIDPLINKWWYDNVSTEIIPNLIKKLKENPLFNIGFMVNDILERMYKENIPKSYLTSVPLVISQKGRTTYSFSMTGGQQIDGVKFTQIYEDYMKLLSQGKDIAELYQKYSKEELANLGINIYQSNDIERTEERTFDEIISWVSNPYATRPIQERHTIQLEPTRFSLEDKKRIEEAAAQGLSEIDLIDLVDLYDINLDNTSVNRHIVGLLTNNTQVTYYFQEQLNKELLSMAHALDNVQQAFIKLLSEEEIRKFAL

SEQ ID NO: 17539 - DNA, 447 bp, Streptococcus agalactiae
atgagtaataaagtacaagaacgtcgtgagcgtaaaatcaaagaagctattaaagctaaaaattgggatgaagtaactcgtttgcttcaacaagaacaaagtaacgcagaacgtcgtgaccgataccacaatagacgaatcaaagacgaaacaatagctagcaaaaatgccaaaaagtctgtacgttatgatgtcattgcaagttctgatttgaatcccgaagaagctttaatcctagaggagttaagacaagctattcgtgaagctaaagcatccctatcagaaattgacagtaagattgttgaaatgatagcggaacaaggttcaagctataaagaaacggctcgctatatcactgaacattataagaaaatgagtgatgtaactgttaaatcccattattgtaaagcgctaaaaaaattagctcctttattaaaagcttaccgc

SEQ ID NO: 17540 - protein, 149 aa, Streptococcus agalactiae; identical to SEQ ID NO: 8502

SEQ ID NO: 17541 - protein, 318 aa, Streptococcus agalactiae; identical to SEQ ID NO: 8503

SEQ ID NO: 17542 - protein, 106 aa, Streptococcus agalactiae; identical to SEQ ID NO: 8504

SEQ ID NO: 17543 - protein, 1098 aa, Streptococcus agalactiae
ATGACTTCACAATCTCGTGATGTGCTGAACCAATCTTACCTGCAATCTTACCTGCTCCAGAGCCTAAACATGGCTCTGGGGGCTTTAATGCAGGGAGAAACCAGCTACACCAATTCTTTTAATATTGTTATTCAAGCAGACGGCTTTATCTTTGTCCCTCGTCTACCATGTGCTTATATCCTTGATGATGACTTGTACAAGAAAATCTTTCTGATTGCCAATGCTTCACTTTATCCACAATATACGCTTCTAAAACAAAACGCTACCTATTTTGTCCCTCTAGAAACAGATGACTTACACACTCAGCGTGGATTATTTTTCCCTTGGAAAAAGGGAATTTCAGAACGTTTAGTCATTCCAGATTTGGATAAGTTTTCAGCTAGCTTGCCACAGGGGAAAATCCCTATCATGAAGTACTTTGAACTCAATTTAGATAAGGTTAATCACTGGGCTATTGCTGGAAATTCAGGTTCTGGGAAATCGTACGCTCTCACTTATTTCTTGAGTGTACTAAAGCATATGTCTGACTTGATTATCATTGACCCTAAATTTGATACCCCAAGTCGATGGGCAAGAGAAAATCACGTTGCTGTTATACACCCTGTTGAAAACCGTTCAAAATCAGATTTTGTCTCACAGGTCAATGAACAATTAAGTCAGTGTGCAACTCTCATTCAGAAACGACAAGCTATCTTGTATGATAATCCCAATCATCAATTTACCCATCTAACTATTGTTATTGATGAAGTCCTCGCTCTATCAGAGGGAGTCAATAAGAATATCAAAGAAGCCTTTTTCTCCCTACTCTCACAGATTTCCTTATTAGGACGTGCTACCAAAATCCATCTGTTTTTGGTAAGCCAGCGTTTTGACCACAATACTATTCCAATTTCAGTGAGGGAACAGCTAAACGTATTGTTGCAAATTGGAAATATCAATCAGAAAACTACTCAATTTTTATTTCCAGACCTAGACCCAGAGGGTATTGTTATTCCAATAGGACATGGGACAGGTATCATTCAAGTTATCGATAATGAACATCCCTACCAAGTTCTGCCCTTACTCTGTCCAACCTACTACACTAAACGAGGTATTCTA

SEQ ID NO: 17544 - protein, 366 aa, Streptococcus agalactiae
MTSQSRDVLNQSYLQSYLLQSLNMALGALMQGETSYTNSFNIVIQADGFIFVPRLPCAYILDDDLYKKIFLIANASLYPQYTLLKQNATYFVPLETDDLHTQRGLFFPWKKGISERLVIPDLDKFSASLPQGKIPIMKYFELNLDKVNHWAIAGNSGSGKSYALTYFLSVLKHMSDLIIIDPKFDTPSRWARENHVAVIHPVENRSKSDFVSQVNEQLSQCATLIQKRQAILYDNPNHQFTHLTIVIDEVLALSEGVNKNIKEAFFSLLSQISLLGRATKIHLFLVSQRFDHNTIPISVREQLNVLLQIGNINQKTTQFLFPDLDPEGIVIPIGHGTGIIQVIDNEHPYQVLPLLCPTYYTKRGIL

SEQ ID NO: 17545 - protein, 603 aa, Streptococcus agalactiae; identical to SEQ ID NO: 8507

SEQ ID NO: 17546 - protein, 201 aa, Streptococcus agalactiae; identical to SEQ ID NO: 8508

SEQ ID NO: 17547 - protein, 603 aa, Streptococcus agalactiae; identical to SEQ ID NO: 8509

SEQ ID NO: 17548 - protein, 201 aa, Streptococcus agalactiae; identical to SEQ ID NO: 8510

SEQ ID NO: 17549 - protein, 246 aa, Streptococcus agalactiae; identical to SEQ ID NO: 8511

SEQ ID NO: 17550 - protein, 82 aa, Streptococcus agalactiae; identical to SEQ ID NO: 8512

SEQ ID NO: 17551 - DNA, 1263 bp, Streptococcus agalactiae
atggaaactgaaacaattattcataatggcaaaaaagtcattaaaaaaatcaaaaaagataagtccatctcatacactttgaaggggacatttctgggaaaagatatcaaaactggtaagcaagtcactactaccattacagccaagacactaaaacagttagatagagcaatcattcaagcacgactagaatttgaaaaaaatggctcaacacgagaaaaagttatcgtcattgatacactggaagatttagctgaagaatggtttaaatcatataaaacctgggttaactcgcataatactctgaacagagtaagaggttatcttgataattatattatccctaaatttggagattacaaaccagataaaattgaatctgcggatatccagctttggttaaacgatttggcaaagaaatcaaaagagtccattgaatctggtataaagcgtgctgataaaggtagtgctaaagattttggtgctgttatccataagttgaaagatatttttgactatggaattacaaactatggactaatcactaatcctgttagcactgttaagataccacctaagccaaaatcaaataagcaacgcatcatggtattacatgatgatggtcttgtaatatggcttaattatcttgaaagtttagataacaatagagccaatcgtagatttaagttaatttgtaatactctattagcctccgctttgcgaataaatgaattacttgcattgacgattgatgacctagattttgaaaattcttctattaacgtcagtaaaacattgatgtggaaaaccgcaaataaaaaagatgggacaaaaggggaagttatctgtaaagctacaccaaaaactgatgcaggaaatcgctctgtccctgtccctccccccataatagaaaaactcagagatttccaccacgaaatgaacaagtatcttgaattgcacaacagacatagaacaaaactgattttccctacaatctatgggaactatatgtgtgacagaaacgagagaacaactcttaagaaaaggttagtaggtcttggattaccaaactatggtttccatttattccgacatactcatgcttcaatgctacttaatgctggaacaaattggaaagaactccaagtcagaatgggacataaatccatttcaactacaatggatacttacgctgaattagcaccacaacgaaagttagaagctgtggggatttatcttgaaaagattgctgagctaacgcaa

SEQ ID NO: 17552 - protein, 421 aa, Streptococcus agalactiae; identical to SEQ ID NO: 8514

SEQ ID NO: 17553 - DNA, 669 bp, Streptococcus agalactiae
atgacaaactataaaaacaactttaaaaaattcatgagcaataaattatacgtagggttagcttccattacgctacttggtattgggggagctataggagtaagtggagctgcattagcgcataaccatcactcagaacacatgtcttttgaacataagcatgaaggacacgataaacatcacgatcatagagaaaaatactcactaaaaacattaaagaatatctcgacaaaaatcgattataagactgccttagaaactgccaaaaaagaagctcgctcaggctttatttcacaaattgaattaaataccaaaggtgatacacctttttatgaaatcaaagttattgataataaaatagctaaaaaatataaaattgatgctaattctgggaagatcctttcaacaacatcagataatcaactcaattcaaaagatgcccaattaaaacaaccaagtaaagatattcagactgcattacaagctattcaagcaaaatataaaaatgcaaaaataaaagaaatttctcttgcgaataacaaatcaaataagctagtttataaagtaaaactacttgatggaaatactcctaagattgcccaatttgatagtgataaagcatcatttataaaggcaaataagcttaatacaactcataaaaatcacgac

SEQ ID NO: 17554 - protein, 223 aa, Streptococcus agalactiae; identical to SEQ ID NO: 3810

SEQ ID NO: 17555 - DNA, 669 bp, Streptococcus agalactiae
atgaaaatccttgttgttgaagatgagtttgacttgaaccgtagtattgtaaaacttttaaaaaagcaacactacagtgttgacagtgcttcaaatggtgaagaagccttacaatttgtttcagtggcagaatatgatgtgattatcttagatgtaatgatgccaaaaatggacggcttcacctttttaaaactgcttcgcaacaaaggaagtcaagtatctattcttatgttgactgctcgagatgccgttgaagatcgtatcgcaggtctagattttggtgcggatgattaccttgtaaaaccatttgaatttggagaactcatggcccgaattcgagctatgttacgacgtacaaatagacaagtatcttctgatgatattcaaattcaagatataacaatcaatttatctacaaagcaagtttggagaaacgacaatttgattgatttaacagctaaggaatacgaagtccttgagtatttggcacgtcacagagaccaagtcctctctcgtcatcaaattcgtgaacacgtttgggattatgattattatggagagtccaatattattgatgtccttatcaaaaaccttcgtcgaaaactagataacaatcgagatggatcactaataaaaactaaacgaggtttaggatatgttattccaaag

SEQ ID NO: 17556 - protein, 223 aa, Streptococcus agalactiae
MKILVVEDEFDLNRSIVKLLKKQHYSVDSASNGEEALQFVSVAEYDVIILDVMMPKMDGFTFLKLLRNKGSQVSILMLTARDAVEDRIAGLDFGADDYLVKPFEFGELMARIRAMLRRTNRQVSSDDIQIQDITINLSTKQVWRNDNLIDLTAKEYEVLEYLARHRDQVLSRHQIREHVWDYDYYGESNIIDVLIKNLRRKLDNNRDGSLIKTKRGLGYVIPK

SEQ ID NO: 17557 - DNA, 1362 bp, Streptococcus agalactiae
atgttattccaaagtaaaataaattaccctaaaaagtctagcatcatcactcaaattaccctctggtacagctcttttatttttatccttgttatcggtgtattaattggttcattttttatttcaaaaagcattgctgaaaacaaatctaaaaaaaatttagaagctaaagctgtgcaaatgagtcaagcgttagctaaaggtcatcggtatgaggcttttgaagatggaatattttattcagtctatgaccaaaatggaaaagttatctattctggttttccaaaaggatttaaaagggatttagaccatcaacataaacataaaaagaaattatctctattttccatggagaatcgtacctttcagtatgttgatattccaatttctgggaaaaatcagtggttacgtgctatccgtactgttgacagactggataagcaattaactgaattgttatttagtttgggtatcgttcttcctcttatgttgattataataactgttggtggctatttaattttaaagcgcgcttttagaccgattcaagaaattactgaaaccgctcaatttattacccaaaatgaagactatactaagcgaattatcactaaaaataacgaaaatgaattaactgagctagcagctgttatcaatactatgttggcttctattgaatcatcatttgttcgggaaaaacaatttaacaatgatgtttctcatgaactacggactcctgtaacagttatactttctgaaagtgaatacggaaaaaactacgcagaaaatttaagtgaagcaaaagaatcctttgaggttatacaccgtcagtcactatcaatgaaaaaattagttgagcaacttctagaattgactaaggcagaaaatccattatcaattcagttagaacctcttaatttctcaattatgatgaagcaactagtatccgattcgagtagattattagataatacccctatacaccttgactctcaaatcgaagatgacctttggattataggtcaacaaacactactcaaacggctttttgataatctattttcaaatgctattaaatttacaaacaatcatatttctattagtctaagacagtccgataatcaaattgtcttctctattaaagataatggtctaggtatctcagttgatgaccaaagtaaaatttggaaccgtttctatcaagtggactctgctcgaaccaaggatagtcagtctggaattggtttagggctatctttagtaaaacaaatcgctacaatacaccgtgctaaaatatgggttgattctaaacctgatgatggcagtcagtttacgctcacctttccaaaattgaagaaagac

SEQ ID NO: 17558 - protein, 454 aa, Streptococcus agalactiae
MLFQSKINYPKKSSIITQITLWYSSFIFILVIGVLIGSFFISKSIAENKSKKNLEAKAVQMSQALAKGHRYEAFEDGIFYSVYDQNGKVIYSGFPKGFKRDLDHQHKHKKKLSLFSMENRTFQYVDIPISGKNQWLRAIRTVDRLDKQLTELLFSLGIVLPLMLIIITVGGYLILKRAFRPIQEITETAQFITQNEDYTKRIITKNNENELTELAAVINTMLASIESSFVREKQFNNDVSHELRTPVTVILSESEYGKNYAENLSEAKESFEVIHRQSLSMKKLVEQLLELTKAENPLSIQLEPLNFSIMMKQLVSDSSRLLDNTPIHLDSQIEDDLWIIGQQTLLKRLFDNLFSNAIKFTNNHISISLRQSDNQIVFSIKDNGLGISVDDQSKIWNRFYQVDSARTKDSQSGIGLGLSLVKQIATIHRAKIWVDSKPDDGSQFTLTFPKLKKD

SEQ ID NO: 17559 - DNA, 1551 bp, Streptococcus agalactiae
atgccagaaaaaatgacaaacagtgaaaacaaaaggagtaaaggttttcgaatgccaggtgcctttacaatattattcattttaacaatcttttcggttttggctacatggtggatacctgctgggtcctattcaaaattacaatttgatacagcatcatccaaactagtagtaacagatccaaatggtaagacagttcatgttccagcaacgcaaacacagttggataagatgaatgtcaaaattaaaattaaagaatttacttctggtgctattagtaagccagtttcagttccaaatacttacaaacgtttgaagcaaaatccagcaggcattggctccgtgacgactagtatggtaaatggaaccattgaagctgttgatattatggtatttatcatggtacttggaggcatgataggagtagttagaaagagtggcgcttttgagtctggtcttctagctttaacaaagaaaaccaaaggtagagagtttttattgatatttttagtttccttattgatggttttaggcggtactctatgtggtattgaagaagaagcagttgctttttatcctattttagttccaatctttttagccatgggttatgattctatcatttgtgtaggtgctattttcttagcaagttctgttgggacatcattttcaacaattaatccgttttcttctgttattgcttcaaatgcagctggtattagtttcacagaaggcttatcatggcgtacagcagggtgtattgcaggtgctatttttgttgtggtgtatctacattggtatgctaaaaaaataaaagcgaatccagagttttcatattcctatgaagatagagtagaatttaatgctaaatggggcatgacaactaaccatacaccctcactctttactattagacaaaaaattattttaagtttatttgttatttcatttcctttgatggtttggggagtaatgtcacagggatggtggtttccaaccatggcttcttcctttttagctattacaattattattatgtttttaacagcaactggggcaaatggtattggagaaagggatgttgttgatgagtttgttaatggtgcatcaagccttgttggggtttcattaatcattggtttagcgcgtggtatcaatattattttgagccaaggttatatatcagatacgatgctttacacagcttcaaaattagcttcacatgttagtggccctgtctttatcattgttatgatgtttatctactttgtgttaggatttgttgttccatcctcgtcgggtttagcagtactttcaatgccaattctagcacctcttgcagatactgttgggattcctcgttcagtagtagtaatggcttatcaatttgggcagtatgcaatgttgtttttagcacctactggactagttatggcaaccttgcagatgttagatatgaagtactcccattggctaaaatttgtgtggccggttgttttattcctcctaatatttggtggcggtttgttagttctacaagttttaatactt

SEQ ID NO: 17560 - protein, 517 aa, Streptococcus agalactiae
MPEKMTNSENKRSKGFRMPGAFTILFILTIFSVLATWWIPAGSYSKLQFDTASSKLVVTDPNGKTVHVPATQTQLDKMNVKIKIKEFTSGAISKPVSVPNTYKRLKQNPAGIGSVTTSMVNGTIEAVDIMVFIMVLGGMIGVVRKSGAFESGLLALTKKTKGREFLLIFLVSLLMVLGGTLCGIEEEAVAFYPILVPIFLAMGYDSIICVGAIFLASSVGTSFSTINPFSSVIASNAAGISFTEGLSWRTAGCIAGAIFVVVYLHWYAKKIKANPEFSYSYEDRVEFNAKWGMTTNHTPSLFTIRQKIILSLFVISFPLMVWGVMSQGWWFPTMASSFLAITIIIMFLTATGANGIGERDVVDEFVNGASSLVGVSLIIGLARGINIILSQGYISDTMLYTASKLASHVSGPVFIIVMMFIYFVLGFVVPSSSGLAVLSMPILAPLADTVGIPRSVVVMAYQFGQYAMLFLAPTGLVMATLQMLDMKYSHWLKFVWPVVLFLLIFGGGLLVLQVLIL

SEQ ID NO: 17561 - protein, 924 aa, Streptococcus agalactiae
ATGGCAAAAATTGTTGTTGCACTAGGAGGAAATGCCTTAGGAAATTCTCCAGAAGAACAATTAAGATTAGTAAAACATACTGCAAAATCATTGGTGGCCTTGATAAAAAAGGGACACGAAATTGTTGTAAGTCATGGTAATGGACCACAAGTTGGTGCCATTAATTTAGGAATGAATTTTGCGGCTGAGAGTGGTCAAGGAACTAATTTTCCTTTTCCAGAATGTGGAGCAATGAGCCAAGGATACATAGGCTATCATCTCCAACAGAGCCTTTTAAATGAATTACGTCAAGAGGGAATAAATAAGGAAGTTGCTACAATTATTACCCAAATTGAGGTGGATGAATCAGACCAAGCATTTAGCGCACCTACCAAGCCTATAGGCACCTTTTATGATAAGGAGACATCAGAAAAGATTGCTATAGAGAAAGGGTATACTTTCGTAGAAGACGCTGGACGAGGGTATCGTCGTGTTGTTGCTTCACCTGAACCTAAAAAAATCATCGAAATTAATAGCATTAAAACACTTATTGAAAATGATACCCTAGTTATCGCAGGTGGAGGTGGAGGCATCCCTGTCATTAATAAGGGAGGTTATGAAGGTATTGCAGCTGTTATTGATAAAGACAAATCTAGTGCACTGTTAGCAGGAGAACTAGCTGCGGATCAATTGATTATTCTCACTGCAGTTGATTATGTTTATACTCAATTTGGTAAAGAAAATCAAAAAGCTTTAACAGAGGTTAATGAGAATCAAATGATTGATTACGTTAACCAAGGTGAGTTTGCAAAAGGAAGTATGTTACCTAAAGTAATAGCCTGTATGAGTTTCTTAGATCACAATCCGAAAGGAATAGCCTTAATCACCTCATTAAATGGTTTAGAAGATGCATTAGATGGGAAATTAGGAACACGTATAACTAAG

SEQ ID NO: 17562 - protein, 308 aa, Streptococcus agalactiae
MAKIVVALGGNALGNSPEEQLRLVKHTAKSLVALIKKGHEIVVSHGNGPQVGAINLGMNFAAESGQGTNFPFPECGAMSQGYIGYHLQQSLLNELRQEGINKEVATIITQIEVDESDQAFSAPTKPIGTFYDKETSEKIAIEKGYTFVEDAGRGYRRVVASPEPKKIIEINSIKTLIENDTLVIAGGGGGIPVINKGGYEGIAAVIDKDKSSALLAGELAADQLIILTAVDYVYTQFGKENQKALTEVNENQMIDYVNQGEFAKGSMLPKVIACMSFLDHNPKGIALITSLNGLEDALDGKLGTRITK

SEQ ID NO: 17563 - protein, 996 aa, Streptococcus agalactiae; identical to SEQ ID NO: 8525

SEQ ID NO: 17564 - protein, 332 aa, Streptococcus agalactiae; identical to SEQ ID NO: 3820

SEQ ID NO: 17565 - protein, 1293 aa, Streptococcus agalactiae
ATGCTAGATATATTATCAGAAAAACATCTAGAAAGAAGGCAGCGTATTATTATCTCTGCAATAGCTATCGCCTTAGCTGCTCAAATCAATATCTCAATACTTGCTGATGGGTTTATTATGACCTTATCTTTGTTCATTTTGCCTGTCTTTTTATATTTTAATGACGACATTAATCCAATTCTTCTCTGTCTAGGAATTACTTTTGCTTCTCCTATCTTCAGAGGAATCATATTAAGTATCGCTGGCGAGGCTGAGATTCATCAAATAATTGAATTCGTTTTAACTGATATGGCGTTTTATATTTGTTATGGCATCACCTTTTATACTATTTATTGGCATCGTTCCTACCGTAATAAAGGTACTTTTTTCTTTTCTATCATTATTTGTGATTATTTTGCCAACCTTGTAGAAATTAGTTTTCTCATAAAGTTTAACAATTATACTATAACTATATTCGCTACTTTATTTGCCATAGCACTTTTGCGAGCTTTTATTAGTTGCGCTGTGGCTTATACTTATAGTTATCTATCACTTCTCTTACAAAAAGACGATCACGAACGTCGATACTATTATTTTATGTGGTCAACTTCAGCCGTTAAAAGCGAGGTTTATTTTATGCAAAAAAATATCATTGAAATTGAAAACATCATGAAAAATGCTTATTTATTAGATAAAGAGTTATCCAAATATCACCTACCTAAAGAATACCAACACCTCTCTCTAGATATTTCGCGGGACGTTCACGAAGTTAAGAAAGATTACCAAAATATTATTAAAGGCTTAGGAACCTATTTTAGTGTAAAAAATGAATCAACTATGGCATTGAAAGATATCTTTCAAATTGTTTTATCTTATACTAGGAGTATTATTCAATTTCGGCATCAAGATATCATTATTCTCGAAAATAATAAATGTAATTTGATAATATCAAACTATTACTATTTACTAACCATTATTTCCAATATCGTTTTAAATGCAGTAGAAGCTATTGATAAACAAAAAAAGGGTACAATCAGTGTTCACACAGAAGAATTAGAAGATTTTATTAAAATTGAGATTAGTGATAACGGACCAGGAATACCTGATAAAATGAAACACATGATTTTCAAACCTGGATTTTCGACTAAATTTGATGCTAATGGTGATATCTATCGAGGAATCGGGCTATCCCACGTGCGTATTTTAATGGAAGAGCAATATCAAGGAACGATAACTGTTTGTCCTAATCAGCCAAATGGAACAACATTTACACTGTTATTCCGTAAAAATCGATTTAAGTTAGGAGATAATACG

SEQ ID NO: 17566 - protein, 431 aa, Streptococcus agalactiae; identical to SEQ ID NO: 8528

SEQ ID NO: 17567 - protein, 831 aa, Streptococcus agalactiae
GTGAAATTCTATATTATTGATGATGACCCCACTATCACTATGATTTTACAAGATATTATTGAAGAAGATTTCAATAATACAGTAGTCAGAGTGAATAATGTCTCCAGTAAAGCATACAACGAATTGCTGATTGCAGATGTTGATATCGTATTGATTGATTTATTAATGCCAATATTAGACGGTGTAACATTAGTCCAAAAAATCTATAAACAGCGTTCCGATTTAAAATTTATTATGATTTCCCAAGTCAAAGATAATGATTTACGACAAGAAGCATATAAAGCAGGAATCGAATTTTTTATTAATAAACCCATTAATATTATTGAAGTAAAAAGCGTCGTGAAACGTGTCACTGATACTATCGAAATGCAAAAAAAATTAAATACAATCCAAAATCTCCTAGAAAATACGCCATCATATCAAAAGCCTATAACGACTAGTAACCTCACTAAAATCCGTTCAATACTCAGTTATTTAGGTATTACTTCAGAGACAGCCTACACAGATATTCTTAACATCTGTGAACTTTTATTAAAACAAGAATTAAATTTTGCCCAATTTGATTTTCAAAAAGAACTTTCTATCGATGAACACCAACAAAAAATCATTTTACAACGTATTCGTCGTGCCGTTAAAAAAGCTATGATAAATATGGCTCATCTGTACATTGATGATTTTGAAAATGAATTAACACTGCAATATGCTAATGCATTGTTTGGATTTCAGAATATCCATAATGAGGCACAACTTATTCAAGGAAAAAGCATGTATGGTGGTAAAATTTCACTTAAACGTTTTTTCGATGAACTTATTTTACAGAGTAAAACGTTT

SEQ ID NO: 17568 - protein, 277 aa, Streptococcus agalactiae; identical to SEQ ID NO: 12772

SEQ ID NO: 17569 - protein, 720 aa, Streptococcus agalactiae; identical to SEQ ID NO: 8531

SEQ ID NO: 17570 - protein, 240 aa, Streptococcus agalactiae; identical to SEQ ID NO: 3824

SEQ ID NO: 17571 - DNA, 1512 bp, Streptococcus agalactiae
atgacaacactaatcactacctttcaagagcgttttggagattggactcaaagtcttattgaacacctccagctatcactactaacacttattttagcaactttaattgctattccactcggtatcatcattagtcattataaaaaaatcagtcatgttgtccttcagataactgggatatttcaaacaattccttctttagccttgcttggtttatttataccttttatgggaattggaactgtaccagctgtcgttgcactaattatttacgctctatttccaattttacaaaatactgtaacagcactgatgcaaattgatgctaatctcattgaggcagcaaccgcttttggaatgacacgttgggaaaggcttaaaaagtttgagttagctttaagtatgcctgttatcatctcaggcattagaactgcctctgttatgattattggtacagctacattagctagtcttatcggagctggtggccttggatcatttattttgttagggattgatcgcaacaatccttctctaattctcataggggcaatctcttctgctgtcttagctattatatttagtggtttaattggattactagaaaaggctagattacgaaccatagccgtttctggtatacttttactagcaggcttaggactatcctatgctccaaaatggatgcctggaacaaatactgcaacgataactgttgcagggaagttaggaactgaaccagatattttaattaatatgtacaaagaacttattgaggatcagacagatatcaaagttaagcttaaacctaatttcggaaaaacaactttcttatatcaagccctaaaatctggtgatattgatctttacccagagtttacaggtactattacatcaagtttacttaaaaatcctcctaaagtaagtaataaccctaaacaggtttacaacttagccaaaaacggtattttaaaacaagataagttgtcacttttgtcacctatggcttatcaaaacacctacgctgtagctgttaaaaaagattacgctgaagctaatcaactcaaaaatatcagcgacctaaaaaaattagataaactaaaagctggtttcactttagaatttaaggatagagaggatgggagtattggtttacagaaacattatggtttaaaccttgatatctcaaccttagaacctgctttacgataccaagctatcaatagtaaagatgtcaatattattgacgcttactctaccgatagtgaattaatccagtatcaacttcaaattctcaaagacgataagcatctatttccgccatatcaaggagcaccgctactaaggcaagatacgattaaaaaataccctcaagtaaaaaaagctctcaataaacttgctggtcatatcactgaaaaagaaatgcaagaaatgaactaccaagtagctgtaaagcataaatcagcagctacagtagctaaacaatatttaaaagcacatcatattataaag

SEQ ID NO: 17572 - protein, 504 aa, Streptococcus agalactiae
MTTLITTFQERFGDWTQSLIEHLQLSLLTLILATLIAIPLGIIISHYKKISHVVLQITGIFQTIPSLALLGLFIPFMGIGTVPAVVALIIYALFPILQNTVTALMQIDANLIEAATAFGMTRWERLKKFELALSMPVIISGIRTASVMIIGTATLASLIGAGGLGSFILLGIDRNNPSLILIGAISSAVLAIIFSGLIGLLEKARLRTIAVSGILLLAGLGLSYAPKWMPGTNTATITVAGKLGTEPDILINMYKELIEDQTDIKVKLKPNFGKTTFLYQALKSGDIDLYPEFTGTITSSLLKNPPKVSNNPKQVYNLAKNGILKQDKLSLLSPMAYQNTYAVAVKKDYAEANQLKNISDLKKLDKLKAGFTLEFKDREDGSIGLQKHYGLNLDISTLEPALRYQAINSKDVNIIDAYSTDSELIQYQLQILKDDKHLFPPYQGAPLLRQDTIKKYPQVKKALNKLAGHITEKEMQEMNYQVAVKHKSAATVAKQYLKAHHIIK

SEQ ID NO: 17573 - DNA, 1719 bp, Streptococcus agalactiae
gtggttgcatggttattactttatcgtttagcctactatattattccattctttgcaggtatctatttctttatccattatttaggtagtcaaataaatcaacgttatgaaaatgtcccgaaagagttagtatcaactgttctacaaaccatggtgagccatttgatgcgtattttaggtgcattcttaatattttcaacagcattttttgaaaatattacttatattatgtggttgcagaagctaggcttggacccattacaagaacaaatgttatggcagtttccaggtttattgctgggggtttgttttattctcttagctagaactattgatcaaaaagtgaaaaatgcttttccaattgctattatctggattactttgacattgttttatcttaatttaggtcatattagttggcgactatctttctggtttattttactattgttaggcttattagtcattaagccaactctctataaaaaacaatttatttatagctgggaagagcgtattaaggatggaatcattatcgttagtttaatgggagttctattttatattgcaggactactattccctatcagggctcatattacaggtggtagtattgaacgcctgcattatatcatagcatgggagccgatagcattggctacgttgattcttactctcgtttatttatgtttggttaagattttacaaggaaaatcttgtcagattggtgatgtgttcaatgtggatcgttataaaaaactacttcaagcttacggtggttcttcggatagcggtttagcctttttaaatgataaaaggctctactggtaccaaaaaaatggagaagattgcgttgcgttccaatttgtaattgtcaataataaatgtcttattatgggggaaccagccggtgatgacacttatattcgtgaagctattgaatcgtttattgatgatgctgataagctagactatgaccttgttttttacagtattggacagaagttgacactacttttacatgagtatggttttgactttatgaaagttggtgaggatgctttagttaatttagaaacgtttactcttaaagggaataagtacaaacctttcagaaatgccctaaatagagttgaaaaggatggtttctatttcgaagttgtacaatcgccacatagtcaagagctactaaatagtttggaagagatttctaatacttggttagaaggacgtcctgaaaaaggtttctcactaggatattttaataaagattatttccaacaagccccaatagctttggtaaaaaatgctgaacacgaagttgttgcttttgctaatattatgccaaactatgaaaagagtattatctctattgatttaatgcgtcacgataaacagaaaattccgaatggcgttatggatttcctctttttatcattattctcttattatcaagagaagggataccactattttgatttggggatggcacctttatcaggagttggtcgcgttgaaacaagttttgctaaagagagaatggcgtatcttgtctatcatttcggtagtcatttctactcatttaatggtttacacaagtataagaagaagtttacaccattgtggtcggaacgttatatttcttgttctcgttcgtcctggttaatttgtgctatttgtgccctattaatggaagatagtaaaattaagattgttaaa

SEQ ID NO: 17574 - protein, 573 aa, Streptococcus agalactiae
MVAWLLLYRLAYYIIPFFAGIYFFIHYLGSQINQRYENVPKELVSTVLQTMVSHLMRILGAFLIFSTAFFENITYIMWLQKLGLDPLQEQMLWQFPGLLLGVCFILLARTIDQKVKNAFPIAIIWITLTLFYLNLGHISWRLSFWFILLLLGLLVIKPTLYKKQFIYSWEERIKDGIIIVSLMGVLFYIAGLLFPIRAHITGGSIERLHYIIAWEPIALATLILTLVYLCLVKILQGKSCQIGDVFNVDRYKKLLQAYGGSSDSGLAFLNDKRLYWYQKNGEDCVAFQFVIVNNKCLIMGEPAGDDTYIREAIESFIDDADKLDYDLVFYSIGQKLTLLLHEYGFDFMKVGEDALVNLETFTLKGNKYKPFRNALNRVEKDGFYFEVVQSPHSQELLNSLEEISNTWLEGRPEKGFSLGYFNKDYFQQAPIALVKNAEHEVVAFANIMPNYEKSIISIDLMRHDKQKIPNGVMDFLFLSLFSYYQEKGYHYFDLGMAPLSGVGRVETSFAKERMAYLVYHFGSHFYSFNGLHKYKKKFTPLWSERYISCSRSSWLICAICALLMEDSKIKIVK

SEQ ID NO: 17575 - DNA, 522 bp, Streptococcus agalactiae
atgttattccaaagtaaaataaattaccctaaaaagtctagcatcatcactcaaattaccctctggtacagctcttttatttttatccttgttatcggtgtattaattggttcattttttatttcaaaaagcattgctgaaaacaaatctaaaaaaaatttagaagctaaagctgtgcaaatgagtcaagcgttagctaaaggtcatcggtatgaggcttttgaagatggaatattttattcagtctatgaccaaaatggaaaagttatctattctggttttccaaaaggatttaaaagggatttagaccatcaacataaacataaaaagaaattatctctattttccatggagaatcgtacctttcagtatgttgatattccaatttctgggaaaaatcagtggttacgtgctatccgtactgttgacagactggataagcaattaactgaattgttatttagtttgggtatcgttcttcctcttatgttgattataataactgttggtggctatttattt

SEQ ID NO: 17576 - protein, 174 aa, Streptococcus agalactiae
MLFQSKINYPKKSSIITQITLWYSSFIFILVIGVLIGSFFISKSIAENKSKKNLEAKAVQMSQALAKGHRYEAFEDGIFYSVYDQNGKVIYSGFPKGFKRDLDHQHKHKKKLSLFSMENRTFQYVDIPISGKNQWLRAIRTVDRLDKQLTELLFSLGIVLPLMLIIITVGGYLF

SEQ ID NO: 17577 - DNA, 216 bp, Streptococcus agalactiae
atgcttaatatgacagaaaatccaaacgttattttcgagcattgcttgccctcatttcataatatagatactaaagttggatacgacatttatgaaaaatatggtttgaaggaaatggaagtatcagatgaagttttgaagccttcactcagttgtttccagaagctgaaatcgtatgcatactataaagcagttatggtagcaactttaggtgat

SEQ ID NO: 17578 - protein, 72 aa, Streptococcus agalactiae
MLNMTENPNVIFEHCLPSFHNIDTKVGYDIYEKYGLKEMEVSDEVLKPSLSCFQKLKSYAYYKAVMVATLGD

SEQ ID NO: 17579 - DNA, 105 bp, Streptococcus agalactiae
atgaaaatcactgctgatattgcagaaggcgtcagagattcagacgtcctatatacagatgtttgggtttcaatgggagacccggatgaagttggaaagaaagaa

SEQ ID NO: 17580 - protein, 35 aa, Streptococcus agalactiae
MKITADIAEGVRDSDVLYTDVWVSMGDPDEVGKKE

SEQ ID NO: 17581 - protein, 525 aa, Streptococcus agalactiae
ATGAAAAATTTACGTAACCGTAGTTTTCTTACTTTATTGGATTTTAGTACAGCAGAAGTTGAATTTCTTTTAAAACTTTCAGAAGATTTAAAACGTGCTAAATACGCAGGAATTGAACAACAAAAACTTGTTGGTAAAAATATCGCTTTGATTTTTGAAAAAGATTCTACACGGACACGTTGCGCTTTTGAAGTTGCTGCTCACGATCAAGGAGCTCATGTTACTTATTTAGGTCCAACAGGCAGTCAGATGGGTAAAAAAGAGACCTCAAAAGACACTGCGCGTGTGCTAGGTGGTATGTATGATGGTATTGAGTATCGTGGATTTTCTCAAGAAACAGTTGAGACTTTAGCCGAATTTTCAGGAGTTCCTGTGTGGAATGGTTTAACCGATGCTGATCATCCAACGCAAGTACTAGCCGATTTTCTGACCGCTAAGGAATGCTTACATAAGCCCTATAAAGATATTCGCTTTACGTATGTGGGTGATGGACGTAACAATGTCGCTAATGCCTTNNNNNTTAAT

SEQ ID NO: 17582 - protein, 175 aa, Streptococcus agalactiae
  VARIANT 172, 173, 174: Xaa = Any Amino Acid
MKNLRNRSFLTLLDFSTAEVEFLLKLSEDLKRAKYAGIEQQKLVGKNIALIFEKDSTRTRCAFEVAAHDQGAHVTYLGPTGSQMGKKETSKDTARVLGGMYDGIEYRGFSQETVETLAEFSGVPVWNGLTDADHPTQVLADFLTAKECLHKPYKDIRFTYVGDGRNNVANAXXXN

SEQ ID NO: 17583 - protein, 156 aa, Streptococcus agalactiae
ATGCTAGATATATTATCAGAAAAACATCTAGAAAGAAGGCAGCGTATTATTATCTCTGCAATAGCTATCGCCTTAGCTGCTCAATCAATATCTCAATACTTGCTGATGGGGTTATATGACCCTAATCTTGGTCATTTTGCCTGGCTTTTTATATTT

SEQ ID NO: 17584 - protein, 52 aa, Streptococcus agalactiae
MLDILSEKHLERRQRIIISAIAIALAAQSISQYLLMGLYDPNLGHFAWLFIF

SEQ ID NO: 17585 - protein, 687 aa, Streptococcus agalactiae
ATGATTTCATTTGAAAATGTTAGTAAATCATATGGTGATCATACCATCATTGATAATATTAGTTGCCATATTCAAAGAGGAGAATTCTTTGTCCTTGTGGGGGCCAGTGGCAGTGGTAAAACTACCATCCTCAAGATGATTAATCGTCTCATCGAACCAAGCCAAGGCGCTATTACTTTAGATGGGGAAAACATTACATCACTTGATTTGCGACAATTACGCTTAGAAACTGGTTATGTCTTGCAACAAATTGCACTTTTCCCTAATTTAACAGTTGGAGAAAATATAGAACTTATCCCTGAAATGAAGGGCTGGTCAAAAGGTGACCAAAAAAAAGCCGCTAGCGACCTTCTTGATAAGGTGGGTTTACCTGCTAAGGACTACTTTAATCGCTATCCTCATGAGCTCTCTGGTGGGGAACAACAACGCATAGGTATCCTACGAGCAATCGTTGCTAAACCTAAGGTACTACTTATGGATGAGCCATTTTCTGCTTTAGACCCTATCTCAAGACGTCAATTACAAGATATCACCAAACAATTACAGTCTGAATTGGGTATTACATTAGTGTTTGTCACCCATGACATGAAGGAAGCTATGCGTCTTGCAGATAGAATTTGTGTATTAAGGAAGGTAGATAGTGCAATGGATAGACCAGAATATTTCAAATATCCCTCNNNNNTTAAT

SEQ ID NO: 17586 - protein, 229 aa, Streptococcus agalactiae
  VARIANT 227, 228: Xaa = Any Amino Acid
MISFENVSKSYGDHTIIDNISCHIQRGEFFVLVGASGSGKTTILKMINRLIEPSQGAITLDGENITSLDLRQLRLETGYVLQQIALFPNLTVGENIELIPEMKGWSKGDQKKAASDLLDKVGLPAKDYFNRYPHELSGGEQQRIGILRAIVAKPKVLLMDEPFSALDPISRRQLQDITKQLQSELGITLVFVTHDMKEAMRLADRICVLRKVDSAMDRPEYFKYPSXXN

SEQ ID NO: 17587 - protein, 630 aa, Streptococcus agalactiae
GTGATTAAAATTGTATTTTTTATATCTGTTTTAGTGCTTATTATTGTTGAAATGATTCATTTGAAACGAACTATTTCTGTTGAGCAACTAAAGAGTGTTTTTGGGCAATTATCTCCAATGAATCTTTTCTTAATTATCCTTGTGGGGGTTATCGCTGTCTTACCGACAACCGGATATGACTTTGTACTGAATGGACTTTTACGTACAGATAAAAGCAAAAGGTATATTTTACAGACTAGTTGGTGTATCAACACTTTTAATAACTTGTCAGGATTCGGTGGCTTAATCGATATTGGGTTGCGCATGGCTTTTTATGGTAAAAAAGGTCAAGAGAAGAGTGACCTAAGAGAAGTGACTCGTTTTTTACCCTATCTTATTTCTGGTCTGTCATTTATTAGTGTGATTGCCTTAATCATGAGCCATATTTTTCATGCCAAAGCTAGTGTTGATTACTATTATTTGGTATTAATTGGTGCTAGTATGTATTTTCCTGTTATTTATTGGATTTCTGGTCATAAAGGAAGCCATTATTTCGGAGATATGCCATCTAGTACTCGTATAAAATTAGGTATTGTTTCTTTTTTTGAATGGGGATGTGCAACCGCAGCGGTTATAATTATNNNNNTTAAT

SEQ ID NO: 17588 - protein, 210 aa, Streptococcus agalactiae
  VARIANT 207, 208, 209: Xaa = Any Amino Acid
MIKIVFFISVLVLIIVEMIHLKRTISVEQLKSVFGQLSPMNLFLIILVGVIAVLPTTGYDFVLNGLLRTDKSKRYILQTSWCINTFNNLSGFGGLIDIGLRMAFYGKKGQEKSDLREVTRFLPYLISGLSFISVIALIMSHIFHAKASVDYYYLVLIGASMYFPVIYWISGHKGSHYFGDMPSSTRIKLGIVSFFEWGCATAAVIIXXXN

SEQ ID NO: 17589 - protein, 741 aa, Streptococcus agalactiae
ATGACTGAGAACTGGTTACATACTAAAGATGGTTCAGATATTTATTATCGTGTCGTTGGTCAAGGTCAACCGATTGTTTTTTTACATGGCAATAGCTTAAGTAGTCGCTATTTTGATAAGCAAATAGCATATTTTTCTAAGTATTACCAAGTTATTGTTATGGATAGTAGAGGGCATGGCAAAAGTCATGCAAAGCTAAATACCATTAGTTTCAGGCAAATAGCAGTTGACTTAAAGGATATCTTAGTTCATTTAGAGATTGATAAAGTTATATTGGTAGGCCATAGCGATGGTGCTAATTTAGCTTTAGTTTTTCAAACGATGTTTCCAGATATGGTTAGAGGGCTTTTGCTTAATTCAGGGAACCTGACTATTCATGGTCAGCGATGGTGGGATATTCTTTTAGTAAGGATTGCCTATAAATTCCTTCACTATTTAGGGAAACTCTTTCCGTATATGAGGCAAAAAGCTCAAGTTATTTCGCTTATGTTGGAGGATTTGAAGATTAGTCCAGCTGATTTACAGCATGTGTCAACTCCTGTAATGGTTTTGGTTGGAAATAAGGACATAATTAAGTTAAATCATTCTAAGAAACTTGCTTCTTATTTTCCAAGGGGGGAGTTTTATTCTTTAGTTGGCTTTGGGCATCACATTATTAAGCAAGATTCCCATGTTTTTAATATTATTGCAAAAAAGTTTATCAACGATACGTTGAAAGGAGAAATTGTTGAAAAAGCTAAT

SEQ ID NO: 17590 - protein, 247 aa, Streptococcus agalactiae
MTENWLHTKDGSDIYYRVVGQGQPIVFLHGNSLSSRYFDKQIAYFSKYYQVIVMDSRGHGKSHAKLNTISFRQIAVDLKDILVHLEIDKVILVGHSDGANLALVFQTMFPDMVRGLLLNSGNLTIHGQRWWDILLVRIAYKFLHYLGKLFPYMRQKAQVISLMLEDLKISPADLQHVSTPVMVLVGNKDIIKLNHSKKLASYFPRGEFYSLVGFGHHIIKQDSHVFNIIAKKFINDTLKGEIVEKAN

SEQ ID NO: 17591 - DNA, 354 bp, Streptococcus agalactiae
atgtctactttaacaataattattgcaacattaactgctttggaacatttttatattatgtatttggagacgttagccacccagtcaaatatgactgggaagatttttagtatgtctaaagaagagttgtcatatttacccgttattaaactttttaagaatcaaggtgtatacaacggcttgattggtctattcctcctttatgggttatatatttcacagaatcaagaaattgtagctatttttttaatcaatgtgttgctagttgctgtttatggtgctttgacagttgataaaaaaatcttattaaaacagggtggtttacctatattagctcttttaacattcttattt

SEQ ID NO: 17592 - protein, 118 aa, Streptococcus agalactiae
MSTLTIIIATLTALEHFYIMYLETLATQSNMTGKIFSMSKEELSYLPVIKLFKNQGVYNGLIGLFLLYGLYISQNQEIVAIFLINVLLVAVYGALTVDKKILLKQGGLPILALLTFLF

SEQ ID NO: 17593 - DNA, 2316 bp, Streptococcus agalactiae
atgttagacgaattaaaagcaatcataaaaagcccaaaattatggattacgatggctggggttgcactgattccaacgctatataatgttatctttctaagctcaatgtgggatccttatgggaatactaaaaatttacctgtggcagtcgttaaccaagataaatcggctaaattaaatggaaaaactatttcaattggcaaagatatggaggacaatttgtctaaaaatgatagcttagatttccattttacaacagctaaaagagcagaaaaagaattagaaaagggtcactattatatggttattacctttcctaaagatctttctagaaaagcgacaactctcatgacagaaaaaccagaaaggttaaatattacttataaaactactaaggggcgtagttttgtagcttcaaaaatgagtgagacagcagctaataaactaaaagatgaggtagcagaatctattacagggacttatactgaatcagtttttaaaaatatgggttctatgaaaacaggtatcaataaagctgctgatgggagtcaagaattattaaatggttctaataagctacagaatgggagccaaaccttgacaagtaatttagatgttttagcaagctctagtcaaactttttctggaggagctaataaactaaatagtggaataaacctttatacagatggtgtgggaaccctatctaacgggttagaaacattatcagatggtgttactgcttacacaacaggtgtgcataagttgagtgaaggtagtcaaaaattagatgataagtctcaagcattggtggaaggatcagaaaagttgacggttggtttacaacaattgtcacaagcaactcaactaaaaccagagcaagaacgtactttgcagaacctttcagatggattaaagaatctaaatcagattattacaaatttacaatcgacagcaactactgatagcgatactaatagtaagttatttaattttttatcaactattgaatcaagtacaacggctttgatgaatacggctgctgctgataaacaaaagcaaatgactgcggtacaatcaacgtcagcttttaaaagtttaacccctgaacaacaatctcaaattacctcagcggttactggaacacctacttcagctgagacaattgcagcaaatatttcttcaaatatagaaaatatgaaaactgtgcttagtgaagcatctagttcagccccttctaataataactcacaaaattttcaaactttgtcaggaacagctaacaatttagtattaaaagctatctcagatttagataaaattcaaaaattgccaacggctactaagcagttatatcaaggtagtcaaaccttgacaaaaggaatcacggattatacgaatgctgtagggcaattacgcaaaggtgcagaaactttagatagtaaatccaatcaattgatttcaggaacacaaaaagcaagtcagggagctcaaactttagatagtaaatcggatcaattgagagatggagcggggcaattagctagtggttctgatagaattgcagatggttctaataagcttgctgggggaggacatcagttgacagatgggttgacagagttgtcaggtggtgtttctcaattatcaagttctttgggtaaagctggggaccagttgtccatggtttctgtaaacaaggataatgccaatgctgtatctagcccagtcactatcaagcatgaagattatgatagcgttgatacgaatggtgttggaatggcaccatacatgatttcagttgcgttgatggtggtagctttatcagccaatgttatttttgcgaaagctttatctggcaaagagccagctaatcgttttagttgggctaaaaataaattattaatcaatggattcattgcaactctagcagcaactatcttattttttgcagttcaattcataggtcttaaaccagattaccctggaaaaacctactttattatcctattgacagcatggactttgatggcattagtaactgctttagtgggatgggataataggtatggttccttcttgtcgttattaatattattattccagcttggttcaagcgcaggaacttacccaatagaattgagtcctaagttctttcaaacaattcaaccatttttaccgatgacttactctgtttcaggattaagggagaccatctcgttgacaggagacgttaaccatcaatggagaatgctagtaatctttttagtatcatcgatgatacttgctcttcttatttatcgtaaacaagaagat

SEQ ID NO: 17594 - protein, 772 aa, Streptococcus agalactiae
MLDELKAIIKSPKLWITMAGVALIPTLYNVIFLSSMWDPYGNTKNLPVAVVNQDKSAKLNGKTISIGKDMEDNLSKNDSLDFHFTTAKRAEKELEKGHYYMVITFPKDLSRKATTLMTEKPERLNITYKTTKGRSFVASKMSETAANKLKDEVAESITGTYTESVFKNMGSMKTGINKAADGSQELLNGSNKLQNGSQTLTSNLDVLASSSQTFSGGANKLNSGINLYTDGVGTLSNGLETLSDGVTAYTTGVHKLSEGSQKLDDKSQALVEGSEKLTVGLQQLSQATQLKPEQERTLQNLSDGLKNLNQIITNLQSTATTDSDTNSKLFNFLSTIESSTTALMNTAAADKQKQMTAVQSTSAFKSLTPEQQSQITSAVTGTPTSAETIAANISSNIENMKTVLSEASSSAPSNNNSQNFQTLSGTANNLVLKAISDLDKIQKLPTATKQLYQGSQTLTKGITDYTNAVGQLRKGAETLDSKSNQLISGTQKASQGAQTLDSKSDQLRDGAGQLASGSDRIADGSNKLAGGGHQLTDGLTELSGGVSQLSSSLGKAGDQLSMVSVNKDNANAVSSPVTIKHEDYDSVDTNGVGMAPYMISVALMVVALSANVIFAKALSGKEPANRFSWAKNKLLINGFIATLAATILFFAVQFIGLKPDYPGKTYFIILLTAWTLMALVTALVGWDNRYGSFLSLLILLFQLGSSAGTYPIELSPKFFQTIQPFLPMTYSVSGLRETISLTGDVNHQWRMLVIFLVSSMILALLIYRKQED

SEQ ID NO: 17595 - DNA, 555 bp, Streptococcus agalactiae
atggtaaacgatacgaggagagaaaaaacaaaaagagctattgaagcagctatgattacgttattaaaagatcagagcttcgatgaawtttcaacgattaatctaactaaaacagctggaatcagtcgttctagtttttatactcattataaagataaatatgaaatgattgatcaataccaacagtcactcttcaataaagtcgaatatatttttgatcgcaatcaatttaaaaaagaagatgccttgctcgaaatttttcaattcttagatagagaatcattatttgctgctctcttaacccaaaatggaacaaaagaaattcagacctacatccttaataaattacaattaatgctttctaaagaattacctgtggtcaatccagatgcaacaaagtctgatatcaaccgtttgtattatagtgtctatctcagtcatgctatttttggagtctatcaaatgtggataacacgaggaaaaaaagaaagccctcaacaaattacacaagtgctactcagtttattacctcaaacttwaaaccagccttccyta

SEQ ID NO: 17596 - protein, 185 aa, Streptococcus agalactiae
  VARIANT 30, 180: Xaa = Any Amino Acid
MVNDTRREKTKRAIEAAMITLLKDQSFDEXSTINLTKTAGISRSSFYTHYKDKYEMIDQYQQSLFNKVEYIFDRNQFKKEDALLEIFQFLDRESLFAALLTQNGTKEIQTYILNKLQLMLSKELPVVNPDATKSDINRLYYSVYLSHAIFGVYQMWITRGKKESPQQITQVLLSLLPQTXNQPSL

SEQ ID NO: 17597 - DNA, 294 bp, Streptococcus agalactiae
atgaatctaaatgatagattaaaaatagaagaaatggaagagaagtatgatagcttcaaacctagaatcaatgcattagtagaagctatagatgattttcaaaagcactatgaagattacgtgaaattaagagaattttatggtagcgaagactggtttagactatcagaacaaacagaaaataatctcaaatgcggtgtactgagtgaggatcagctctttgattttataggagaacataacgagcttgtaggccaatttttagatatgtcttctcaaatgtatcgtcattta

SEQ ID NO: 17598 - protein, 98 aa, Streptococcus agalactiae; identical to SEQ ID NO: 4022

SEQ ID NO: 17599 - DNA, 93 bp, Streptococcus agalactiae
atgagttcagtaggcaagaaaaagggcaccttgatgggtgtctttttttatgctaaaaaattacaatacattgatgagtacccacgtatctct

SEQ ID NO: 17600 - protein, 31 aa, Streptococcus agalactiae
MSSVGKKKGTLMGVFFYAKKLQYIDEYPRIS

SEQ ID NO: 17601 - protein, 621 aa, Streptococcus agalactiae
ATGTTAAATAGTTCTTTTCATTTTAATAATTTATCAGTTAAACCTAAAAAGGGGCCAATTACTATTTCTACACGAAACTTAGTATTTGATTCAATTGAAACGAATAAGATTATAGCGCCACGAGTTGAAGCAAAAGTAGAATATTTTGATTTTGCGACTACATGTTACAACTTGCCTGATCTTGAATTTTCCAATTGCTATCCTTTATCAATAGAGGAAGGAGCCACTCCACCGCACATTATTTCAGCATTTAATGCGATAAATGAAGATGCTAATATAATAAAGACCAATATTAAACACATACGTCATGATGGGATTAATGAGGAAAGAATCGAGAAGATACTAAAAAAATATCTAGGTGCTGATTTCGATATTTACAGGGGATTATTTTATAAAAGCGATATAATCACTGGTCCTCTCCTATCAGATAGAGGAAAATTTAGAGTAATTTCCTTATATATTGTTGAACCAAAAACTCATAAACAGCAAAGGCATTCAAAACACAAATTAATAATTTTATTTTTTGATCCATACCACTTATTTATTCCCTCCAAAGACTTTGGAACTAATATATATCAAGAGATACGTGGGTACTCATCAATGTATTGTAATTTTTTAGCA

SEQ ID NO: 17602 - protein, 207 aa, Streptococcus agalactiae
MLNSSFHFNNLSVKPKKGPITISTRNLVFDSIETNKIIAPRVEAKVEYFDFATTCYNLPDLEFSNCYPLSIEEGATPPHIISAFNAINEDANIIKTNIKHIRHDGINEERIEKILKKYLGADFDIYRGLFYKSDIITGPLLSDRGKFRVISLYIVEPKTHKQQRHSKHKLIILFFDPYHLFIPSKDFGTNIYQEIRGYSSMYCNFLA

SEQ ID NO: 17603 - protein, 272 aa, Streptococcus agalactiae
ATGGATACAGTAGTATTTTCTGAAAAAGACTTTTTAGTCAACTTCTTGTACAAATTATTAGATAATCCGACTCAAATAAAAGTTCAAAAAACTTTATATCTATTGTTTGCATTTTATGGTGCAACCTATGGAAATCTGGATAAAGATGAAGATAATGAATTTTCAGATCAAAATTATCCCAAACAATTATTTAAAGCTATTTGAAGCGTGGAGATATGGACCAGTTGAAACAGATGTCTATGCAAAAGAAAAAAGTGGTTCCTACTCCGATA

SEQ ID NO: 17604 - protein, 91 aa, Streptococcus agalactiae
MDTVVFSEKDFLVNFLYKLLDNPTQIKVQKTLYLLFAFYGATYGNLDKDEDNEFSDQNYPKQLFKAILKRGDMDQLKQMSMQKKKVVPTPI

SEQ ID NO: 17605 - protein, 108 aa, Streptococcus agalactiae
ATGAGTGATGAAGAGTTGCTTTATCAGCCGATGAGCGAAGCTTTGGTATCTGAGAAGTTCGCTAAAGAACTATCTAAAGAGATTGAAAAGCGTAACTTATTTCCGAAA

SEQ ID NO: 17606 - protein, 36 aa, Streptococcus agalactiae
MSDEELLYQPMSEALVSEKFAKELSKEIEKRNLFPK

SEQ ID NO: 17607 - protein, 360 aa, Streptococcus agalactiae
ATGGGCGCTAAAGAACAATTAAAAGAATTGAAGCCACTTTTTGCTTTAATGATCTTATTTGAGGAACAACGAGACAAGGACATCAAGCTGATGAATGCTTTTCGTAATCCTGAGTTACTAAATGGCATTGAAAAAGGTACTGCACAGCAACTCTTATGTTTGGCAAAAGAACGTGACAAGAGGCTAGCCATGATTACCTCCCTACAAGATGAGAATCAGATAGCTGTTATTAAGGCTAGATATGTGGATGACTTATCATGGGACGAGATACCAGATAAAGTAGGTTGTTCAAGGAATACCGTTTTTAAATTACATAGAGAAGCTTTAGAGGTGTTAGATGAGCAAGAAGAACGCTATTCG

SEQ ID NO: 17608 - protein, 120 aa, Streptococcus agalactiae
MGAKEQLKELKPLFALMILFEEQRDKDIKLMNAFRNPELLNGIEKGTAQQLLCLAKERDKRLAMITSLQDENQIAVIKARYVDDLSWDEIPDKVGCSRNTVFKLHREALEVLDEQEERYS

SEQ ID NO: 17609 - protein, 177 aa, Streptococcus agalactiae
ATGGTTTTAGAACTTCTATCTGACAAGTTGATATTTTATATTACCAACTTTAAAAAGCGCTTAGAAACGATTTTAGAAGCCAAAAGCGAAGTACTACAAAAAATATCTAGTTTACAAAACGAGAAACACAAAAAGACGCTCACACAGAACGTCTCCTTGGTTAAATTTAAGCTTAAC

SEQ ID NO: 17610 - protein, 59 aa, Streptococcus agalactiae
MVLELLSDKLIFYITNFKKRLETILEAKSEVLQKISSLQNEKHKKTLTQNVSLVKFKLN

SEQ ID NO: 17611 - protein, 486 aa, Streptococcus agalactiae
ATGAAAGAATTATCCATTGAGAGTATTATTAAACCGATGAAGAAATATGACAAGACAAAGATTACAGGAACAATGGATAACCAACCTATTCGCATAGACCTAGATAATCTGGTTATTCATTATAACCATCAAAACTTATTACTTGAAACGATACCAGGAACTTATGGTGGTAAACGCTACTTCTTCTTGTGTCCTAAATGTGAGAGACGTTGCCGGAAGTTATTTAAGGCTTCTCATGATTTTGCTTGTGGTTCTTGTCAGAAGGTTCATCAAGCCACACTCAACCGAAGCAAGACAGATTGTCAATACTATTGGCGATTAGCCTTTAAAGAGTGTTTGAAAGTAGATCCAAAAGCCAAACACAAACATGGTTATTATAGTCATGATGACTTTCCTAAGCGTCCAAAATACATGAGAATAGCTAAATACTTGTATCATTGGAAGAGATTCCATTACTATATGGATAAGGGAGACAGGCACTGGCTA

SEQ ID NO: 17612 - protein, 162 aa, Streptococcus agalactiae
MKELSIESIIKPMKKYDKTKITGTMDNQPIRIDLDNLVIHYNHQNLLLETIPGTYGGKRYFFLCPKCERRCRKLFKASHDFACGSCQKVHQATLNRSKTDCQYYWRLAFKECLKVDPKAKHKHGYYSHDDFPKRPKYMRIAKYLYHWKRFHYYMDKGDRHWL

SEQ ID NO: 17613 - protein, 603 aa, Streptococcus agalactiae
ATGAGAACATTTTCAGATACACCTAAAACATTTACATTTCACTATACTTTTAGAGACTTTGACACTGCACAAGTAGCTTGTCATGCTATTTTAGGCTACATGACTGGGACCTATGAGCAACCAGTGATTGACGCAACTTATCACAATGATGACCAAGGTGGTCATGCTAATCAGTTAGTCTTAAAATATGTTGAAGATAGAAAGTTAAGCAAGGTCTTCAAGCGTATCTGTGACAGTTTCAAGGACTATTACAACCAACCTGAGGATATGACGGATGAAGAACTTGATGACATGGCTCAAGAAAACGAATTAATCAAGGAAGTGAAAATGTGTAATGATAATCAGTTATTTACAAATGAATACATTGCTAAGCGTACTACACAACTAGAGGATATTGATAAAACTATATTAATTAGGGATATCATTGCTTATGAATTAGAGTTGTTAGATTACGCTGATAGACTATTGAGCGATAAGTCTATTCGAATGGATAGTGAAACCGCACAAGGGACTATTGAACTTATGGATGATAATGTAATAAATTTAGTAAAAGAACTGGATACCGAACGCGAGTACCAAGGGTTACATAATTATGTCATTAGC

SEQ ID NO: 17614 - protein, 201 aa, Streptococcus agalactiae
MRTFSDTPKTFTFHYTFRDFDTAQVACHAILGYMTGTYEQPVIDATYHNDDQGGHANQLVLKYVEDRKLSKVFKRICDSFKDYYNQPEDMTDEELDDMAQENELIKEVKMCNDNQLFTNEYIAKRTTQLEDIDKTILIRDIIAYELELLDYADRLLSDKSIRMDSETAQGTIELMDDNVINLVKELDTEREYQGLHNYVIS

SEQ ID NO: 17615 - protein, 819 aa, Streptococcus agalactiae
ATGATCAGTAAAACTGTCACCCAAACGCAAAGATTTTTACAAATGCCATTAGAGGCGCAAGCTTTATACTTTCATCTAATTCAGAACGCTGATGATGACGGAATTGTCGAGGCTTTTCCGATTGTAAGAATGATTGGAGCTAATGAAGATAATTTAAAACTGCTACAAGTTAAAAACTTTGTAAAACCTCTAAATGAAGAAATGGTATATTTCATTATTGATTTTTTCGAACAAAATCAGATTAAATCAAACCAATATAAAAAAAGTATTTATCAATCATTGCTGAGCGAGGAAGACAAGGTCAATAATTTACGTATTCTTGAAGAGTTCAAAAATGGTTCAAAAGTTGAACAAGTTTTGAACCCCAATATAAGTCAAGATAATCAAATTAAATCAAAGATAATTAAATCAAAGACAATCAAAGATAATCAAATCAAAAATAATATAAGTGAAGATAAGATAGCGTCAAATCAAAAGAATAATTTTGACACTGATAATCTCAAATCTATGACAAATATTCTAGGAGATAACTTCAAAACTAATTGTGACGATGAAACATTGATTACAAATTTCACCGAATACTACTTAGGACGTGTTCCAGATAACTATGAACTCAATACTTTAAAGAAAAGACTGAGAAACATTGATAGACAACTTTTCGAAGTTGCTTATCAGCAAGCGAGTATAAACGGAGCTGATACTCTTGGATATATAGTTACTACTCTAGATAATTGGGAACGACTAGGAATCACAACTTATAATAAATGGTCAGAACACGAAGGAAGAAGAAGTGAGGAATTAGAAGATGAATTACCCTTC

SEQ ID NO: 17616 - protein, 273 aa, Streptococcus agalactiae
MISKTVTQTQRFLQMPLEAQALYFHLIQNADDDGIVEAFPIVRMIGANEDNLKLLQVKNFVKPLNEEMVYFIIDFFEQNQIKSNQYKKSIYQSLLSEEDKVNNLRILEEFKNGSKVEQVLNPNISQDNQIKSKIIKSKTIKDNQIKNNISEDKIASNQKNNFDTDNLKSMTNILGDNFKTNCDDETLITNFTEYYLGRVPDNYELNTLKKRLRNIDRQLFEVAYQQASINGADTLGYIVTTLDNWERLGITTYNKWSEHEGRRSEELEDELPF

SEQ ID NO: 17617 - protein, 165 aa, Streptococcus agalactiae
ATGATAGACTTAGCTATTAAAAATTTCCTGAAGAAACACAATGAAGGTATTTCAAATATCAATAGTATTATATCAGCTTTAGAACCAATAAAAGGTCATAATTCAATCATTGAGAGTTTTATAATACTTAATCATAAATTTAAGAAGGAGGTAAAAGTTGGGAAA

SEQ ID NO: 17618 - protein, 55 aa, Streptococcus agalactiae
MIDLAIKNFLKKHNEGISNINSIISALEPIKGHNSIIESFIILNHKFKKEVKVGK

SEQ ID NO: 17619 - protein, 339 aa, Streptococcus agalactiae
ATGACACTACCAGAGAATTATAGACGTGTCCTTAATCTGATCAAGGTTGGAGCAGACAATCCTATCACAGGGGCAGAGATTAGCTTAATACTGAAACTTGAAGAACGTTCAATCCAAAGTATCATCAGTAGCTTAATCACTCGCTATAACGTCCCTATTGTCGCTATAAGACATGGGTTTAATCGTGGCTACTTCATCCCAGCTAATAAGGAAGAATTACTAGAGGGTGCCAAAGCCTTTTATAACCAAGTACAAAAAGAACAAGAACGCTTGTCTGTATTAATGAATGCGGATCTAGAGAGTTATAAGAAGTTACTGAAGGAGGCTGATATGAATGTT

SEQ ID NO: 17620 - protein, 113 aa, Streptococcus agalactiae
MTLPENYRRVLNLIKVGADNPITGAEISLILKLEERSIQSIISSLITRYNVPIVAIRHGFNRGYFIPANKEELLEGAKAFYNQVQKEQERLSVLMNADLESYKKLLKEADMNV

SEQ ID NO: 17621 - protein, 360 aa, Streptococcus agalactiae
ATGACAACGGAAGAATATTTTAAAAAATTGCTAGAAGATAGCGAAAAACATCCTACAAACTGGTTGAGTGATAGGGTTTTAGACAAAAATATCAAAATGCTAGATGAAGATATTGAAGCAGAGTGGGACGATTTTCCGTTATTCACGAAAAAAATATTTATCAATACTACGCAACGTGACTATAACAAAGCTGATGCCGTTGTTAAATTTTTGGAATCAATACCAATAGAGATGGAATATAAAAAAGGGCTAAATATAGTTATACAAGCATTAAACGAGTTAAAAGATAGTCTTAAAAATCAAGTGCTTGGTGTTATTGATAACCAAATCCTGTTTCCAAATGATAAGGAGGACACGAAA

SEQ ID NO: 17622 - protein, 120 aa, Streptococcus agalactiae
MTTEEYFKKLLEDSEKHPTNWLSDRVLDKNIKMLDEDIEAEWDDFPLFTKKIFINTTQRDYNKADAVVKFLESIPIEMEYKKGLNIVIQALNELKDSLKNQVLGVIDNQILFPNDKEDTK

SEQ ID NO: 17623 - protein, 192 aa, Streptococcus agalactiae
ATGATGCAAGAACTTAACCTCACACCAACACAGACACTTATTTTATTCATTGTTTTAGGTCTCTTAGGGCTTCTTCTTAGCCGTTCTAAGCCATTAATAGAGATTGACTTACCAGAAGATACCCAAGCACCTAAACTACCTCAGAACGCAAACTATGGGGCTTATATTCAATCACAGAACCATTATTACAAT

SEQ ID NO: 17624 - protein, 64 aa, Streptococcus agalactiae
MMQELNLTPTQTLILFIVLGLLGLLLSRSKPLIEIDLPEDTQAPKLPQNANYGAYIQSQNHYYN

SEQ ID NO: 17625 - protein, 330 aa, Streptococcus agalactiae
ATGAAATATAGAGTAGAAACAAATCCTTTTTCAAAAGATAGATACACTCCTGAACAGCTAGAAATGTTCAAAAATCGCCAACTCAGCAAAAATAAAGCAGAAGCCTATTTCACTCGACTATATAACCAACATATCGCTTGGGTAATTATTGCTAACGTTATGACAGAGTACGTCATTAAATTCAGAAAAAGTGCCACCAGCTTTGAAGAAGCATGGGACGCTTTAGACTATCAACGAACCACAGAGATTGTCTTTAGAGCCGTTAACGGTTTACCTTGTTCAGAGAAAGACACAGGGGAATTAGAAACTTATTTAAGTGAGGTATCGGCA

SEQ ID NO: 17626 - protein, 110 aa, Streptococcus agalactiae
MKYRVETNPFSKDRYTPEQLEMFKNRQLSKNKAEAYFTRLYNQHIAWVIIANVMTEYVIKFRKSATSFEEAWDALDYQRTTEIVFRAVNGLPCSEKDTGELETYLSEVSA

SEQ ID NO: 17627 - protein, 447 aa, Streptococcus agalactiae
GTGCTCAAAAATCAAGACAATATGATTAAGAAAAAAAGAAATCCGAGAGTGTTATTTAGAAACGTCGCTTATAAACTATCTGAAATTGAAGGGAAAACATTAACAGAAACCGCTTCTTTTCTTGGTTTTGGGAATTCAGAAGTTTGCAGAAGCGCCCTATACAAATGGAAGCGTAAAAAATGGCTAAAATTCGACCTCAAAAACGGTCATTATCGTAATGTTGAAGTATTACATGAAGTTACGCTTGAAAAAATGGCTAATAGGAATTAAAGAACAGGACTCATTTATAAAGCTAACATTTACTATGAACAAGTGGTCTCGACATCCGAAATTATAGAAGACATTAAAACCAAAACACAAGATAGAATTAAAGCCATCCACTTACAACAACAAGCGCTAGAGCGTATCCCTAGCGAGTTATTTGCAGAATTATACACTAACATGAAC

SEQ ID NO: 17628 - protein, 150 aa, Streptococcus agalactiae
  VARIANT 88: Xaa = Any Amino Acid
MLKNQDNMIKKKRNPRVLFRNVAYKLSEIEGKTLTETASFLGFGNSEVCRSALYKWKRKKWLKFDLKNGHYRNVEVLHEVTLEKMANXELKEQGLIYKANIYYEQVVSTSEIIEDIKTKTQDRIKAIHLQQQALERIPSELFAELYTNMN

SEQ ID NO: 17629 - protein, 171 aa, Streptococcus agalactiae; identical to SEQ ID NO: 12817

SEQ ID NO: 17630 - protein, 57 aa, Streptococcus agalactiae; identical to SEQ ID NO: 12818

SEQ ID NO: 17631 - protein, 635 aa, Streptococcus agalactiae
GTGAATATCATAAAACAAGTAAAAAGTTCTTTTGGAGAACTTGAAATTGATTTTTATCTGGACAGGAATAGAAATATTTTTGTGACGATTGAACAATTAGCGCAGGGATTTGGATATAAGAGCCGAAATGCTATTGAAAAGATGATAGAGCGCCAACCCTACCTCAAAGAAAAGCGATTTTCAGTTACTGACAAATTGTCAGCTACTGATGGCAAACAATACGAGACCCGACTATTCAATAAGCGAGGAATTTTTGAGATCGGTATGCTGTCCAAAACGGAGAAAGGTAAAATCTTTCGTCAATGGATTTATGACCATATCGAAGAACTAGAAAGAGAAAACGCTAACTTTAAACTGATACGAGAGCTTGAAAGTCTAATCATAAAGAATTAACACAAGCTATCAAGGATTGGGAACACTTTAATCAATGGAGCTACAAGGCTATTAGCGACCTTTTGCTAAAATCTGTCACAGGACAGACTGCTAAACAACTGAAACAGTCACGGGTAGGTTATGAAATTGCATTAGATTGCCTAAGTGCTGATGAGTTGACGCGATATAGAAAACTTGAACAAAAAGTAATTGTCCTATTGGAGCTCAATGCAGAATATAACGATATTAAAAAATTAGTCCTT

SEQ ID NO: 17632 - protein, 212 aa, Streptococcus agalactiae
MNIIKQVKSSFGELEIDFYLDRNRNIFVTIEQLAQGFGYKSRNAIEKMIERQPYLKEKRFSVTDKLSATDGKQYETRLFNKRGIFEIGMLSKTEKGKIFRQWIYDHIEELERENANFKLIRELEKSNHKELTQAIKDWEHFNQWSYKAISDLLLKSVTGQTAKQLKQSRVGYEIALDCLSADELTRYRKLEQKVIVLLELNAEYNDIKKLVL

SEQ ID NO: 17633 - protein, 758 aa, Streptococcus agalactiae
ATGACTGAGAACTGGTTACATACTAAAGATGGTTCAGATATTTATTATCGTGTCGTTGGTCAAGGTCAACCGATTGTTTTTTTACATGGCAATAGCTTAAGTAGTCGCTATTTTGATAAGCAAATAGCATATTTTTCTAAGTATTACCAAGTTATTGTTATGGATAGTAGAGGGCATGGCAAAAGTCATGCAAAGCTAAATACCATTAGTTTCAGGCAAATAGCAGTTGACTTAAAGGATATCTTAGTTCATTTAGAGATTGATAAAGTTATATTGGTAGGCCATAGCGATGGTGCTAATTTAGCTTTAGTTTTTCAAACGATGTTTCCAGATATGGTTAGAGGGCTTTTGCTTAATTCAGGGAACCTGACTATTCATGGTCAGCGATGGTGGGATATTCTTTTAGTAAGGATTGCCTATAAATTCCTTCACTATTTAGGGAAACTCTTTCCGTATATGAGGCAAAAAGCTCAAGTTATTTCGCTTATGTTGGAGGATTTGAAGATTAGTCCAGCTGATTTACAGCATGTGTCAACTCCTGTAATGGTTTTGGTTGGAAATAAGGACATAATTAAGTTAAATCATTCTAAGAAACTTGCTTCTTATTTTCCAAGGGGGGAGTTTTATTCTTTAGTTGGCTTTGGGCATCACATTATTAAGCAAGATTCCCATGTTTTTAATATTATTGAAAAAGTTTATCACGATACGTTGAAAGGAGAAATTGTTAAAAGCTAATAAAAGTAATCACTGACTTTCTG

SEQ ID NO: 17634 - protein, 255 aa, Streptococcus agalactiae
  VARIANT 235: Xaa = Any Amino Acid
MTENWLHTKDGSDIYYRVVGQGQPIVFLHGNSLSSRYFDKQIAYFSKYYQVIVMDSRGHGKSHAKLNTISFRQIAVDLKDILVHLEIDKVILVGHSDGANLALVFQTMFPDMVRGLLLNSGNLTIHGQRWWDILLVRIAYKFLHYLGKLFPYMRQKAQVISLMLEDLKISPADLQHVSTPVMVLVGNKDIIKLNHSKKLASYFPRGEFYSLVGFGHHIIKQDSHVFNIIGKKFIXDTLKGEIVEKLIEKSITDFL

SEQ ID NO: 17635 - protein, 99 aa, Streptococcus agalactiae
GTGTTGCTAGTTGCTGTTTATGGTGCTTTGACAGTTGATAAAAAAATCTTATTAAAACAGGGTGGTTTACCTATATTAGCTCTTTTAACATTCTTATTT

SEQ ID NO: 17636 - protein, 33 aa, Streptococcus agalactiae
MLLVAVYGALTVDKKILLKQGGLPILALLTFLF

SEQ ID NO: 17637 - protein, 95 aa, Streptococcus agalactiae
GTGACTGATACCCCCGCTAGTTTTGATTATTTAAAAAAAATTTGGAGTCCTACGGATATAAAATCTATACTGAGGGAGATAAGATAGATTTTGAT

SEQ ID NO: 17638 - protein, 32 aa, Streptococcus agalactiae
MTDTPASFDYFKKNLESYGYKIYTEGDKIDFD

SEQ ID NO: 17639 - protein, 99 aa, Streptococcus agalactiae
ATGAAAATAGCTCATGAATTACCAAATTTCCCGACGTTAGGAAATATCGGAACAGAAGCTCTCTACCTTATTGCCACCCTACCAGATAACCAAAAGCAG

SEQ ID NO: 17640 - protein, 33 aa, Streptococcus agalactiae; identical to SEQ ID NO: 3838

SEQ ID NO: 17641 - protein, 240 aa, Streptococcus agalactiae
TTGTGGTTAAGTATTTTGTTGATGTTAATAAAATTGTACGGTTTGATTTTGGAGTGCGTGAAATATCTTGAGATTACCTTAGCTTATGTAACACGAAAGGCTTATAATATAGGCTTTTCGATAGAAAAATATCTTGAGATTATCTTTTTGAAAGGAACAATAAATATGAATATTAACCTTCTTGAAGGAATTGAAATTGAATATAAGTCCGCTGACCTTGCTAAAACCTTATCGCTTTTA

SEQ ID NO: 17642 - protein, 80 aa, Streptococcus agalactiae; identical to SEQ ID NO: 3840

SEQ ID NO: 17643 - protein, 339 aa, Streptococcus agalactiae
ATGGATATTTTTAGTGAAGAATTTAAAAATGAACTTCGATTCATTGTGAAAGATACCGTTTCTGATATAGTCACAAAAGCCATAAAAAATGGATCTTTTAATTCTACCTTTACGATTGACGTTGCTAATGACGCTTTTTTATCTCAAAAGTTTTGCATGTCAAAAAGTTCTGTTGGAACTATTAGAAGAGAGATGAGAGATTTCCCTAGTTACACGAAGTTTCTTAGAAATGGCGGATCTCTTGTAACTGTCAAAGGTTTTGATGAATACCTGCAATATCGCGGTAGCTGGGAATGGAAGAAAGAAAAAGCTAAATTAAGAACGAAAAAAAGGACTCGT

SEQ ID NO: 17644 - protein, 113 aa, Streptococcus agalactiae; identical to SEQ ID NO: 3842

SEQ ID NO: 17645 - protein, 963 aa, Streptococcus agalactiae
ATGGAGAATTTAAGTACGAGGTTAGTTGATAAAAGTATTGAAGCTTTTATTATGGGACTTGAAATATACAATAAACCAACGATAAAGTACCGAATTGAGGGCTTTAGTTTCTTTATTTGTAATGCTTGGGAATTGATGCTTAAAGCTGAAATGTTAAATCGTAATCAATCTATCTATTTTAAGGATAATCCTGATAGAACACTAAGCTTAGAAGGTGTTATAAAAAAAATATACTCGGACGACAGCACTAGAATTCGACTTAATCTTGAGCGCATTATTGAACTAAGGAATATTAGTACTCACTACATAACAGAAGATTATGAATTAAAGTATGCTCCACTTTTCCAAGCTTGTGTACTTAACTATGTCAATGAACTTCAACGATTTCATTCAAGAGATGTTACAAAGGCCATTTCCCAAAATTTTTTAACTATCACTGCAACTTACGAACCATTATCTAACGAACAAATTAGATTAAAATATCCTGCGGAAATTGCTGAAAAATTCATCCAACAGGCAAATGCCATAGATGTCTTAGTGACAGAGTATAATTCTGATAAATTCGCTATTGGTATTAAACAAAATCTTTATATTACTAAGAAAAAATCTGAAGCCGATTTTATAGTATCAATTGCAAATCAATCACCTTCTCAAGTTGCTATTTTAAAAGATTTAAAAGATCCATCAGAAACGCACAAGTATTCATATGCAAATATTATATCTGTTGTAAATGATAGACTAAATAAAAAGAATATTAAACTTAATTATAAATCTGGTTTTAATCAATATGTCCTAACATTAGTGATTGATTTCTATTCAATAAAGTCTGATGAAAAATATTCTTATTGCCATAAAATAGGTAAATCTGAACACTACACTTATTCTCAAAAATTCGTTGATTTTATTATCTCTGAAATAGAAAAAGACCCTCAACATTTTGTTGAAAGTCTGAAAAAATCTAAA

SEQ ID NO: 17646 - protein, 321 aa, Streptococcus agalactiae; identical to SEQ ID NO: 3844

SEQ ID NO: 17647 - protein, 1170 aa, Streptococcus agalactiae
ATGATCATGAAAATAACTGAAGTAAAAAAGAAAGATGGTACGGTAATTTATCGTGCCAGTATTTATCTTGGTACTGATAAAGTAACAGGTAAAAAAGTAACTACTAAAATAACAGGACGAACTAAGAAAGAAGTTAGAGAAAAAGCTAAGCAAGAAGCTATCGAGTTTATAAAAAATGGTTCTACTCGCTTCAAAGCTACTTCCGTAACAAGTTATCAGGAACTTGCAACCTTATGGTGGGATAGTTACAAACATACCGTAAAATACAATACTCAGCTAGCTACTGAAAAGCTGTTAACCGTTCATGTCATACCAATTTTTGGAGCATATAAGCTTGATAAGTTAACGACACCACTTATACAGTCTATCATCAATAAACTAGCTGATAAAACTAATAAAGGGGAAAGAAAAGCTTACCTCCATTATGACAGAATACACGCGCTGAATAAACGTATACTACAGTATGGCGTTATCATGCAAGCTATACCATTCAACCCTGCGCGTGAGGTCATTCTCCCTCGCAACACTAAGAAAGCTAACACTAAAAGAGTAAAGCATTTCGAAAATGATGAACTAAGAACATTTTTCAACTACTTAAACAATCTAGATAAAAATAAATACAGATACTTCTATGAAGTCACACTTTATAAGTTTTTATTAGCTACAGGTTGTCGCATTAATGAAGCGTTAGCTCTAAACTGGTCAGATATCGACTTGGATAATGCCGTTGTTCATATCACAAAAACGCTAAATTACAAACAAGAAATTAATAGTCCAAAGTCAAAGTCAAGCTATCGTGATATTGACATAGATAGTCGAACAGTTACGATGCTTAAGCAGTATAGACGACGACAGATTCAAGAAGCATGGAAGTTAGGGCGTTCAGAAACAGTGGTATTTTCTGATTTTATCCATAAGTACCCAAACAATAGAACCTTACAAACTCGATTAAGAACACATTTTAAAAGAGCAAATGTATCGAATATAGGCTTTCATGGTTTTCGTCACACTCACGCTAGTTTATTGCTGAACACAGGTATCCCCTACAAAGAACTCCAATATAGATTAGGTCATTCTACTCTATCTATGACTATGGATATTTATAGCCATTTATCAAAAGAGAATGCAAAAAAAGCTGTCTCATTCTTTGAAACAGCAATTAACTCAATA

SEQ ID NO: 17648 - protein, 390 aa, Streptococcus agalactiae; identical to SEQ ID NO: 3846

SEQ ID NO: 17649 - protein, 609 aa, Streptococcus agalactiae; identical to SEQ ID NO: 8547

SEQ ID NO: 17650 - protein, 203 aa, Streptococcus agalactiae; identical to SEQ ID NO: 3848

SEQ ID NO: 17651 - protein, 285 aa, Streptococcus agalactiae; identical to SEQ ID NO: 8549

SEQ ID NO: 17652 - protein, 95 aa, Streptococcus agalactiae; identical to SEQ ID NO: 3850

SEQ ID NO: 17653 - protein, 1353 aa, Streptococcus agalactiae
TTGGTAGAAGTATCTGAGCTAAGAGTACAACCTCAAGACCTGTTGGCAGAACAGGCCGTTCTAGGATCTATCTTTATCTCACCAGAGAAACTGATTATGGTGAGAGAATTTATAAGTCCAGATGATTTTTATAAATATTCACACAAAGTTATCTTCAGAGCGATGATTACCTTAGCTGATAGAAATGATGCAATTGATGCTGCTACTGTTAGAAATATTTTAGATGACCAAGGTGATCTTCAAAACATTGGTGGGTTGGGCTATATTGTTGAATTAGTTAATAGTGTTCCAACAAGTGCTAATGCGGAGTTTTATGCCAAAATAGTTTCTGAGAAAGCCATGTTGCGAGATATCATTTCTAAGTTGACAGATACTGTCAACATGGCCTATGAAGGAAATGATTCTGATGAAATTATTGCCACCGCTGAGAAGGCTTTAGTTGATATTAACGAACACAGTAATCGTAGCGGGTTTAGAAAGATATCTGATGTTTTAAAAGTTAATTACGAAAACTTAGAATTACGTTCACAGCAAACCTCAGATGTCACAGGTTTACCAACTGGATTTAGAGATTTAGACAGGATTACTACAGGTTTACATCCAGATCAATTAATCATCTTAGCGGCTCGTCCTGCAGTAGGTAAAACAGCCTTTGTTTTAAATATTGCTCAAAATGTTGGAACTAAACAAAATAGACCTGTAGCTATTTTTTCACTTGAAATGGGGGCTGAGAGTTTAGTTGACCGTATGTTGGCAGCAGAGGGAATGGTTGATTCTCATAGTTTACGAACTGGTCAGTTGACGGATCAAGATTGGAATAATGTAACGATTGCTCAAGGAGCTTTGGCGGATGCGCCAATTTATATTGATGATACGCCCGGGATTAAAATTACAGAAATTAGAGCACGCTCTAGGAAGTTATCTCAAGAAGTTGATGATGGTTTAGGTTTAATCGTCATTGACTACCTCCAATTAATTTCAGGAACTAGACCAGAAAATCGTCAGCAAGAAGTTTCTGAAATTTCAAGGCAGTTGAAGATTTTAGCTAAAGAATTAAAGGTTCCTGTTATCGCATTAAGCCAGCTCTCTCGTGGGGTTGAGCAAAGGCAGGATAAACGACCGGTCTTATCTGATATTCGTGAATCTGGATCGATTGAACAAGATGCTGACATTGTTGCTTTCTTATATCGAGATGATTATTATCGTAGAGAGGGCGAAGAAGCAGAGGAAATTGTAGAAGATAATACTGTTGAGGTTATTTTAGAAAAGAACCGTGCTGGTGCGCGTGGGACAGTAAAATTAATGTTTCAAAAGGAATATAATAAATTTTCTAGTATAGCTCAATTTGAAGAA

SEQ ID NO: 17654 - protein, 451 aa, Streptococcus agalactiae; identical to SEQ ID NO: 8552

SEQ ID NO: 17655 - protein, 450 aa, Streptococcus agalactiae; identical to SEQ ID NO: 8553

SEQ ID NO: 17656 - protein, 150 aa, Streptococcus agalactiae; identical to SEQ ID NO: 8554

SEQ ID NO: 17657 - protein, 1980 aa, Streptococcus agalactiae
ATGAAAAGATTTCGTTTTGCAACCGTCCATTTAGTTTTAATAGGCCTGATTTTATTTGGACTATTAGCTATTTGTGTTAGGTTATTTCAATCCTATACGGCTCTATTATTGGCTATTTTTGTTGCTTTATCTTTTGTTGTTGCCTTATTATATTACCAAAAGATAACTTATGAACTATCTGAAGTTGAACAAATTGAATTACTTAATGATCAAACAGAAGTTTCTCTTAAGAGTCTTCTTGAACAAATGCCAGTTGGTGTTATACAATTTGATCTTGAAACAAATGATATTGAGTGGTTTAACCCTTATGCAGAATTGATTTTTACTGGGGATAATGGTCATTTTCAGTCTGCTACTGTTAAAGATATCATTACTAGTAGACGTAATGGAACGGCTGGGCAATCATTTGAATACGGTGATAACAAATATTCAGCTTATTTGGATACAGAGACGGGTGTTTTCTATTTCTTCGATAATTTCATGGGGAATAGAAGAAACTATGATAGTTCAATGCTACGTCCAGTTATTGGTATTATTTCCATTGATAACTACGATGATATTATGGATACTATGTTAGAGGCTGATATGTCAAAGATTAACGCCTTCGTGACTAGTTTTATTTCTGATTTTACACAGTCTAAAAATATTTTTTATCGTCGTGTCAATATGGATCGATACTATATTTTTACCGACTATAGCGTTTTAAATACATTGATAAAAGATAAATTTGATATTTTAAATGAGTTTCGAAAACGCGCTCAGGAAAACCATTTATCATTAACATTAAGTATGGGAATTTCTTATGGTGATGGTAACCATAATCAAATTGGGCAAATTGCTTTAGAAAATCTTAATACAGCACTCGTTCGCGGAGGAGATCAAATAGTAGTACGTGAAAATGATAGTAGTAAAAAAGCACTTTACTTTGGTGGTGGTGCTGTTTCAACTATTAAACGTTCACGAACACGTACCAGAGCTATGATGACTGCTATTTCTGACCGTTTGAAAGTAGTTGATAGTGTCTTTATTGTGGGACACAGGAAATTGGACATGGATGCACTAGGTGCATCTGTAGGGATGCAATTTTTTGCTAGTAATATTGTTAATGCCAGTTATGTAGTTTATGACCCAAATGACATGAATTCTGATGTTGAAAGAGCAATTGATTACTTGCAAGAAGACGGCGAAACACGTCTCGTAAGTGTTGAGAGAGCTTTTGAATTAATTACTCAAAATTCTTTATTAGTCATGGTAGACCATTCTAAAACAGCTTTAACCTTATCTAAGGAATTCTTTAACAAGTTTGCAGATGTTATTGTGGTAGATCATCATAGAAGAGATGAAGATTTTCCAAAAAATGCTGTTCTTTCATTTATAGAAAGTGGCGCAAGTAGTGCCAGCGAATTAGTTACAGAATTGATTCAATTTCAACAAGCTAAAGATAAATTAAGCCGCAGTCAAGCAAGTATTTTAATGGCTGGTATCATGCTTGATACAAGAAATTTTGCATCTAATGTAACGAGTAGAACTTTTGATGTGGCAAGCTATTTACGCGGTTTAGGTAGTAATAGTATGGCTATTCAAAAAATATCAGCTACAGATTTTGATGAATATCGTTTAATTAATGAATTGATTTTAAAAGGTGAGCGTATTTATGATAACATCATTGTTGCTACCGGAGAAGAACATAAAGTTTACTCGCATGTTATAGCTAGTAAAGCAGCTGACACCATGTTGACAATGGCAGGTATTGAGGCTACTTTTGTTATTACTAAAAACAGTTCAAATATTGGTATTTCAGCGCGCAGTAGAAATAATATCAATGTCCAGCGTATTATGGAAAAACTTGGTGGTGGCGGACATTTTAGTTTTGCTGCTTGTCAAATACAAGACAAGTCTGTAAAGCAAGTTAGACGTATGTTACTGGAAATAATTGACGAAGATTTAAGAGAAAATAGTACAGTCGAAAATAGAAGGGAT

SEQ ID NO: 17658 - protein, 660 aa, Streptococcus agalactiae
MKRFRFATVHLVLIGLILFGLLAICVRLFQSYTALLLAIFVALSFVVALLYYQKITYELSEVEQIELLNDQTEVSLKSLLEQMPVGVIQFDLETNDIEWFNPYAELIFTGDNGHFQSATVKDIITSRRNGTAGQSFEYGDNKYSAYLDTETGVFYFFDNFMGNRRNYDSSMLRPVIGIISIDNYDDIMDTMLEADMSKINAFVTSFISDFTQSKNIFYRRVNMDRYYIFTDYSVLNTLIKDKFDILNEFRKRAQENHLSLTLSMGISYGDGNHNQIGQIALENLNTALVRGGDQIVVRENDSSKKALYFGGGAVSTIKRSRTRTRAMMTAISDRLKVVDSVFIVGHRKLDMDALGASVGMQFFASNIVNASYVVYDPNDMNSDVERAIDYLQEDGETRLVSVERAFELITQNSLLVMVDHSKTALTLSKEFFNKFADVIVVDHHRRDEDFPKNAVLSFIESGASSASELVTELIQFQQAKDKLSRSQASILMAGIMLDTRNFASNVTSRTFDVASYLRGLGSNSMAIQKISATDFDEYRLINELILKGERIYDNIIVATGEEHKVYSHVIASKAADTMLTMAGIEATFVITKNSSNIGISARSRNNINVQRIMEKLGGGGHFSFAACQIQDKSVKQVRRMLLEIIDEDLRENSTVENRRD

SEQ ID NO: 17659 - protein, 1899 aa, Streptococcus agalactiae; identical to SEQ ID NO: 8557

SEQ ID NO: 17660 - protein, 633 aa, Streptococcus agalactiae; identical to SEQ ID NO: 8558

SEQ ID NO: 17661 - protein, 609 aa, Streptococcus agalactiae; identical to SEQ ID NO: 8559

SEQ ID NO: 17662 - protein, 203 aa, Streptococcus agalactiae; identical to SEQ ID NO: 8560

SEQ ID NO: 17663 - protein, 1119 aa, Streptococcus agalactiae
ATGACTGATAATTCAAACATTCGTGTCGTTGTAGGCATGAGTGGAGGTGTTGATTCATCAGTAACTGCCCTGCTTTTAAAAGAGCAAGGTTATGATGTTATTGGTGTTTTTATGAAAAATTGGGATGACACAGATGAATTTGGTGTTTGTACGGCTACTGAAGATTATAAAGATGTTGCTGCTGTTGCTGATCAGATCGGCATACCATACTACTCTGTCAACTTTGAAAAAGAGTATTGGGACAGGGTTTTCGAATATTTTTTAGCAGAATATCGAGCAGGTCGTACGCCAAATCCAGATGTTATGTGTAATAAGGAAATTAAATTTAAAGCATTTCTAGATTATGCGATGACATTAGGTGCTGACTATGTAGCAACAGGTCATTATGCACAAGTAACACGTGATGAGAACGGAATAGTTCATATGCTTAGAGGAGCAGATAATAATAAGGATCAAACTTATTTTCTAAGTCAATTATCTCAGGAGCAATTGCAAAAAACGTTATTTCCACTTGGTCATTTACAAAAACCAGAAGTTCGCCGTATAGCTGAAGAAGCAGGACTTGCGACCGCTAAGAAAAAAGACTCTACTGGTATTTGTTTTATTGGAGAAAAAAATTTCAAGGATTTCCTGGGTCAATATTTACCGGCTCAACCAGGTCGTATGATGACTGTTGATGGTCGTGACATGGGTGAACATGCTGGTTTAATGTATTATACTATTGGTCAAAGAGGGGGCCTTGGTATTGGTGGGCAACATGGTGGAGATAATAAACCTTGGTTTGTAGTTGGAAAGGATTTAAGTAAAAACATTCTTTATGTAGGTCAAGGTTTCTATCATGACTCATTGATGTCAACTAGCTTGACAGCTTCTGAAATCCACTTTACACGTGATATGCCTAATGAATTTAAGCTAGAATGTACAGCTAAGTTCAGATATCGTCAACCTGACAGTAAAGTTACAGTTTACGTAAAAGGTAATCAAGCAAGGGTTGTGTTTGATGATTTACAACGAGCAATCACACCAGGTCAAGCTGTTGTTTTTTATAATGAACAAGAATGTTTAGGCGGTGGGATGATTGATCAGGCTTATCGTGATGATAAAATCTGTCAATACATT

SEQ ID NO: 17664 - protein, 373 aa, Streptococcus agalactiae; identical to SEQ ID NO: 3870

SEQ ID NO: 17665 - protein, 666 aa, Streptococcus agalactiae; identical to SEQ ID NO: 8563

SEQ ID NO: 17666 - protein, 222 aa, Streptococcus agalactiae; identical to SEQ ID NO: 3872

SEQ ID NO: 17667 - protein, 801 aa, Streptococcus agalactiae
ATGATCCAAACGGAAATTGAAATGACTGGTAGAAGTCGTGAAGAAATTCGTTATATTATGTCCCGAAACCTTGAGGTTATGAAAGCTTCTGTTATTGATGGATTGACCCCTAGTAAATCAATCAGTGGTTTAACAGGCGGTGATGCTGTCAAGATGGATCAATATTTACAATCAGGAAAAACTATTTCAGATACCACAATCCTAGCTGCCGTTAGGAATGCTATGGCTGTTAATGAGTTAAATGCTAAGATGGGACTGGTCTGTGCAACACCAACTGCAGGTAGTGCAGGATGTTTACCAGCTGTGATTTCTACAGCCATTGAAAAGCTTAATTTAACAGAAGAAGAGCAACTTAATTTTCTATTTACAGCCGGCGCATTTGGTCTTGTCATTGGTAATAATGCCTCTATCTCAGGTGCAGAAGGAGGTTGCCAAGCTGAAGTTGGGTCAGCTAGTGCTATGGCTGCGGCTGCTTTAGTTATGGCTGCTGGAGGTACTCCTTTCCAAGCTAGCCAAGCTATAGCATTTGTTATTAAAAATATGCTTGGACTTATCTGTGACCCTGTTGCAGGTTTAGTTGAAGTCCCTTGTGTGAAGCGGAATGCTCTTGGATCAAGTTTTGCACTTGTTGCTGCTGATATGGCCTTGGCTGGTATTGAATCGCAAATTCCAGTAGATGAAGTTATTGATGCAATGTATCAAGTTGGATCAAGTTTACCGACTGCTTTTCGTGAAACTGCAGAAGGAGGACTTGCTGCCACGCCGACAGGAAGACGTTATAGCAAAGAAATTTTTGGGGAA

SEQ ID NO: 17668 - protein, 267 aa, Streptococcus agalactiae
MIQTEIEMTGRSREEIRYIMSRNLEVMKASVIDGLTPSKSISGLTGGDAVKMDQYLQSGKTISDTTILAAVRNAMAVNELNAKMGLVCATPTAGSAGCLPAVISTAIEKLNLTEEEQLNFLFTAGAFGLVIGNNASISGAEGGCQAEVGSASAMAAAALVMAAGGTPFQASQAIAFVIKNMLGLICDPVAGLVEVPCVKRNALGSSFALVAADMALAGIESQIPVDEVIDAMYQVGSSLPTAFRETAEGGLAATPTGRRYSKEIFGE

SEQ ID NO: 17669 - protein, 675 aa, Streptococcus agalactiae
TTGAATGTAAAAAAACAACATTTAGCTTATGGAGCTATCACTTTAGTAGCCCTTTTTTCATGTATTTTGGCTGTAACGGTCATCTTTAAAAGTTCACAAGTTACTACTGAATCTTTGTCAAAAGCAGATAAAGTTCGCGTAGCCAAAAAATCAAAAATGACTAAGGCGACATCTAAATCAAAAGTAGAAGATGTAAAACAGGCTCCAAAACCTTCTCAGGCATCTAATGAAGCCCCAAAATCAAGTTCTCAATCTACAGAAGCTAATTCTCAGCAACAAGTTACTGCGAGTGAAGAGGCGGCTGTAGAACAAGCAGTTGTAACAGAAAATACCCCTGCTACCAGTCAGGCACAACAAACTTATGCTGTTACTGAGACAACTTACAAACCTGCTCAACACCAGACAAGTGGCCAAGTATTGAGCAATGGAAATACTGCAGGGGCGGTCGGATCTGCTGCTGCAGCACAAATGGCTGCTGCAACAGGAGTCCCTCAGTCTACTTGGGAACATATTATTGCCCGTGAATCAAATGGTAATCCTAATGTTGCTAATGCCTCAGGAGCTTCAGGACTTTTCCAAACGATGCCAGGTTGGGGTTCAACAGCTACAGTTCAGGATCAAGTTAATTCAGCTATTAAAGCTTATCGTGCTCAAGGTTTATCAGCTTGGGGTTAC

SEQ ID NO: 17670 - protein, 225 aa, Streptococcus agalactiae
MNVKKQHLAYGAITLVALFSCILAVTVIFKSSQVTTESLSKADKVRVAKKSKMTKATSKSKVEDVKQAPKPSQASNEAPKSSSQSTEANSQQQVTASEEAAVEQAVVTENTPATSQAQQTYAVTETTYKPAQHQTSGQVLSNGNTAGAVGSAAAAQMAAATGVPQSTWEHIIARESNGNPNVANASGASGLFQTMPGWGSTATVQDQVNSAIKAYRAQGLSAWGY

SEQ ID NO: 17671 - protein, 363 aa, Streptococcus agalactiae
GTGTCTCTCAATAGTATCAGTAACGCTGATGTCATCAGTATAGGTGATGTTTTAAAATTGGATAATTCTACAGCTAGTCAAGCAGAAGCAAAATCTCAACCAACAATTGAAAATTCAATGAATTCTTCATCAAATTTGAGTTCAAGTGATTCAGCTGCAAAAGAAGAAATAGCTCGTCGTGAATCAAATGGTAGTTATACTGCACAGAATGGACAATATTATGGAAGATATCAACTGTCTCAATCTTACCTAAATGGCGACTTATCTCCTGAAAATCAAGAAAAAGTAGCGGACAATTATGTGGCTTCTCGTTACGGATCTTGGTCGGCAGCGCTATCATTTTGGAATAGTAACGGTTGGTAT

SEQ ID NO: 17672 - protein, 121 aa, Streptococcus agalactiae
MSLNSISNADVISIGDVLKLDNSTASQAEAKSQPTIENSMNSSSNLSSSDSAAKEEIARRESNGSYTAQNGQYYGRYQLSQSYLNGDLSPENQEKVADNYVASRYGSWSAALSFWNSNGWY

SEQ ID NO: 17673 - protein, 168 aa, Streptococcus agalactiae
ATGTCAATAACCTCGGTTAAAAAATCAAAACCATTTAAATTAGGAGTGGCAGGTCTTTTAGTGGGTGCTTCATTAGCTTTACCACTTTCAGTAAGCGCAGCATCTTATACCGTGAAATCAGGTGATACCTTATCAGCTATTGCTAAAAATCATAAAACTACGGTACAA

SEQ ID NO: 17674 - protein, 56 aa, Streptococcus agalactiae
MSITSVKKSKPFKLGVAGLLVGASLALPLSVSAASYTVKSGDTLSAIAKNHKTTVQ

SEQ ID NO: 17675 - protein, 792 aa, Streptococcus agalactiae
ATGGATAAATTGATTTTGGGACGTTACATACCAGGTAATTCTCTCATTCATAAATTAGATCCTCGAAGTAAGTTACTAGCCATGTTGCTTTTTATCATTATTGTTTTTTGGGCAAATAATGTAGTGACAAATGTGATCGTATTCATTTTTACGTTGGTTATTGTGGGTTTATCTCAGATAAAATTTTCCTATTTTTTCAATGGTATTAAACCGATGGTTGGTATTATTTTATTTACAACCCTGTTCCAGATGCTGTTTGCACAAGGCGGGCAGGTTATCTTCTCGTTTTGGATTTTTAGCATCACTAGCCTTGGGTTACAACAAGCAGCACTTATTTTTATGAGATTTGTTTTAATTATCTTCTTTTCGACATTACTTACCTTAACTACTACTCCGTTAAGTTTAGCAGATGCTGTTGAATCTTTGTTAAAACCATTGGAAGTACTGAGAGTACCAGCACACGAGATTGGTTTGATGTTATCCCTTAGCTTACGTTTCGTTCCTACTTTAATGGATGATACAACACGTATCATGAATGCTCAAAGAGCTCGTGGAGTTGATTTTGGAGAGGGAAACCTAATTCATAAGGTTAAGTCCATTATCCCTATTTTGATTCCATTATTTGCTTCTAGTTTTAAAAGAGCAGATGCGTTGGCAATTGCTATGGAAGCAAGAGGTTATCAAGGTGGAGCCAATCGTAGTAAGTACCGTTTATTGAAGTGGACTGTTCGGGATACTTTTAGTATATTACTGATGTTATTATTGGGTTTGAGTTTGTTTCTATTAAAAAAT

SEQ ID NO: 17676 - protein, 264 aa, Streptococcus agalactiae; identical to SEQ ID NO: 3880

SEQ ID NO: 17677 - protein, 840 aa, Streptococcus agalactiae
ATGGGAATTGAATTTAAAAATGTAAGTTATACCTATCAAGCCGGCACTCCTTTTGAAGGGCGTGCCCTTTTTGACGTCAATCTGAAAATTGAAGATGTTTCCTATACCGCGTTCATTGGGCACACAGGTTCTGGAAAATCAACTATTATGCAACTTTTGAATGGTTTACATATTCCTACAAAAGGTGAGGTAATTGTCGATGATTTTTCTATTAAAGCAGGGGACAAGAACAAAGAAATCAAATTTATAAGGCAAAAAGTTGGTTTAGTTTTTCAATTTCCAGAAAGTCAGCTTTTTGAAGAGACAGTTTTAAAGGATGTTGCTTTTGGACCACAAAATTTTGGTATTTCTCAGATTGAAGCTGAAAGGCTGGCTGAAGAAAAATTAAGGTTAGTTGGTATCAGTGAGGATTTATTCGATAAAAATCCATTTGAACTTTCTGGAGGGCAGATGAGGCGGGTTGCTATAGCTGGTATTTTAGCGATGGAACCCAAAGTACTAGTACTGGATGAGCCAACAGCTGGACTTGATCCTAAGGGAAGAAAAGAATTAATGACTCTTTTTAAAAATCTTCATAAAAAAGGAATGACTATCGTCTTAGTGACTCACTTAATGGACGATGTAGCGGATTATGCTGACTATGTGTATGTTTTAGAAGCAGGGAAAGTAACCTTATCAGGACAACCAAAACAGATTTTTCAAGAAGTAGAACTTTTAGAAAGTAAACAATTAGGAGTTCCCAAAATCACCAAGTTTGCTCAAAGACTATCTCATAAGGGATTAAATTTACCTAGTTTACCAATTACTATTAACGAATTTGTGGAGGCTATTAAGCATGGA

SEQ ID NO: 17678 - protein, 280 aa, Streptococcus agalactiae
MGIEFKNVSYTYQAGTPFEGRALFDVNLKIEDVSYTAFIGHTGSGKSTIMQLLNGLHIPTKGEVIVDDFSIKAGDKNKEIKFIRQKVGLVFQFPESQLFEETVLKDVAFGPQNFGISQIEAERLAEEKLRLVGISEDLFDKNPFELSGGQMRRVAIAGILAMEPKVLVLDEPTAGLDPKGRKELMTLFKNLHKKGMTIVLVTHLMDDVADYADYVYVLEAGKVTLSGQPKQIFQEVELLESKQLGVPKITKFAQRLSHKGLNLPSLPITINEFVEAIKHG

SEQ ID NO: 17679 - protein, 837 aa, Streptococcus agalactiae
ATGACAAATATTATTACTGTTAATAATCTCTTTTTTAAATATGATAGTAATCAAACACATTATCAATTGGAGAATGTATCGTTTCATGTGAAACAAGGAGAATGGCTATCTATTATCGGTCATAATGGTTCTGGGAAATCCACTACTGTTCGTTTAATAGATGGGCTTTTAGAGGCGGAGTCAGGCCAGATTATCATTGATGGACAAGAGTTAACCGAAGATAATGTCTGGGAGTTACGTCACAAGATTGGCATGGTATTTCAAAATCCTGATAACCAATTTGTAGGGGCAACTGTTGAAGATGACGTCGCCTTTGGTTTGGAAAATAAAGGTATTCCTTTGAAAGACATGAAAGAAAGAGTGGACCAAGCACTTGATTTGGTAGGCATGTCTGAATTTAAAATGAGGGAGCCTGCACGTTTATCTGGGGGACAAAAGCAGCGTGTAGCCATTGCAGGAGCTGTAGCTATGCGTCCACAAGTTATCATCTTGGATGAGGCGACTAGTATGCTTGATCCTGAGGGACGATTGGAACTGATAAGAACGATACGAGCTATTCGTCAAAAATATAATCTTACTGTTATTTCAATTACACACGACTTAGATGAAGTTGCATTGAGTGATCGTGTCATCGTTATGAAAAATGGTAAAGTTGAGTCGACATCCACTCCAAAAGCGTTATTTGGTCGTGGAAATCGTTTGATTAGTTTAGGTTTAGATGTTCCCTTTACAAGTAGGTTAATGGCAGAACTGGCTGCTAATGGTCTTGATATAGGGACAGAGTATCTTACAGAGAAGGAATTAGAAGAACAATTATGGGAATTGAATTTAAAAATG

SEQ ID NO: 17680 - protein, 279 aa, Streptococcus agalactiae; identical to SEQ ID NO: 3884

SEQ ID NO: 17681 - protein, 540 aa, Streptococcus agalactiae
ATGGTGAAGAAAGAAAATATTCCGAATCTATTAACTGTAGTCAGAATTTTAATGATTCCGTTATTTATAGTATTAACTTCAGTAACAACAAGTACAACTTGGCATATTGTTGCAGCTATTGTATTTGCTATTGCAAGCTTGACCGATTACCTAGACGGTTATCTAGCACGTAAATGGCAAGTAGTAACAAATTTTGGGAAATTTGCAGATCCATTAGCTGATAAAATGCTAGTTATGAGTGCTTTTATCATGTTAGTTGGACTAGACTTAGCACCGGCTTGGGTTTCAGCTATTATCATTTGTAGAGAGCTAGCAGTTACAGGTTTGCGTTTACTTTTAGTTGAAACAGGTGGAACAGTACTTGCTGCAGCTATGCCAGGGAAAATAAAGACGGCTACTCAAATGTTTGCAGTTATTTTTTTGTTAGTACATTGGATGACACTTGGTAACATCATGTTATACATTGCTTTATTCTTTACCTTGTATTCAGGCTACGACTATTTTAAAGGTGCAGGCTTCTTATTTAAGGATACTTTTAAA

SEQ ID NO: 17682 - protein, 180 aa, Streptococcus agalactiae
MVKKENIPNLLTVVRILMIPLFIVLTSVTTSTTWHIVAAIVFAIASLTDYLDGYLARKWQVVTNFGKFADPLADKMLVMSAFIMLVGLDLAPAWVSAIIICRELAVTGLRLLLVETGGTVLAAAMPGKIKTATQMFAVIFLLVHWMTLGNIMLYIALFFTLYSGYDYFKGAGFLFKDTFK

SEQ ID NO: 17683 - protein, 1265 aa, Streptococcus agalactiae
ATGACAGTTAATAAAATAACTTATCAGAACCTTCAGGAGGAAGTATATAAGTTAACATTAGAGAGCGGGCTAAATGTATATCTTATTCCAAAACCATCATTTAAGGAAACTGTTGGAGTATTGACAGCAAATTTTGGATCACTCCATACAAGATATACGAGGAATGGTGTGTAGAACATTATCCGGCAGGAATTGCTCACTTCTTAGAACATAAATTATTTGAACTGGATAAAGGACAAGACGCTGCAACTCAATTTACTAAATATGGCGCCGAGAGTAATGCCTTTACAACTTTTGATAAAACTAGTTTTTATTTTTCAACTATAAGTCACATTACAAACTGCTTAGATATACTACTTGACTTTGTATTGACAACAAACTTTACAGAAGAGTCAATTACTAAAGAAAAAGACATTATCAAACAAGAAATTGAAATGTATCAAGATGACCCAGAATATAGGCTTTATCAAGGAGTGTTATCGAACCTTTACCCCAACTCTCCATTAGCATTTGATATCGCTGGAGATTACCAATCAATCTCTCAAATAACCTTAACCGATTTACAAGAAAATCACAAAGACTTTTATCAGTTGTCTAATATGAATTTAGTTCTGTTGACAATTAGTCCCAAAAATTATACTACTCAAAAAAATCTCATTTAACAAATTACTCACAGAATATTGACCGAGATTCTATTAGTCTTGAACCTGTTATAAAAAACAACTCTTGCCATATGACAGTGACAAAACCTAAATTAGCTATTGGTTATCGAAAATCAAGTCATATGAGACATGGTTCTTACCTAAAAGAGAAAATCGGATTACAGCTATTTTTTGCAATGCTTTTAGGATGGACTTCTACAATTAATCAAGACTGGTACGAATCTGGTCAAATTGATGACTCTTTTGATATAGAAATTGAAGTTCATCCAGATTTTGAGTGCGTTATTATTTCTTTAGATACGACAGAGCCAATTGCTTTTTCAACTCAGTTGAGGTTATTGCTAAAAATGCTTTGCAATCATCTGATCTTACCGAAAGCACTTACAAAACGTTAAGAGAGAGCTCTATGGCGATTTTTAAGGAGCTTAGATTCTATTGAAAATCTCGCAATGCAATTCGTCACCTATTTATATGATGGAAAAACGATGTATTTAGATTTGCCATCTATCGTAAGAATTAGACTTGGAAGATGTCATTACGATTGGTAAGGATTTCTTAGATAATGCTGACACATCTGACTTCGTTATTTTTCCAAAATCTTCG

SEQ ID NO: 17684 - protein, 427 aa, Streptococcus agalactiae
  VARIANT 57, 397: Xaa = Any Amino Acid
MTVNKITYQNLQEEVYKLTLESGLNVYLIPKPSFKETVGVLTANFGSLHTRYTRNGXVEHYPAGIAHFLEHKLFELDKGQDAATQFTKYGAESNAFTTFDKTSFYFSTISHITNCLDILLDFVLTTNFTEESITKEKDIIKQEIEMYQDDPEYRLYQGVLSNLYPNSPLAFDIAGDYQSISQITLTDLQENHKDFYQLSNMNLVLVGQFSPQEIITYLQKNSHLTNYSQNIDRDSISLEPVIKNNSCHMTVTKPKLAIGYRKSSHMRHGSYLKEKIGLQLFFAMLLGWTSTINQDWYESGQIDDSFDIEIEVHPDFECVIISLDTTEPIAFSTQLRLLLKNALQSSDLTESHLQNVKRELYGDFLRSLDSIENLAMQFVTYLYDGKTMYLDLPSIVXELDLEDVITIGKDFLDNADTSDFVIFPKSS

SEQ ID NO: 17685 - protein, 1237 aa, Streptococcus agalactiae
ATGAAAATAGTTGAAGGCGTTTCTCTACATTTAATAAAAACCACAATTTAAGACTAATCATCTACTTTTCGATTTCAGTGATTTTAATAATAAAACAGTAGCACGTAGATCGCTCGTTGCTCAAATGTTAGTTACTGCAAATGCTAAGTACCCTAAGGTACAAGAATTTCGAGAAAAGTTAGCTTCCTTATATGGTGCTAGTTTATCAACTAAGATTTCTACTAAGGGTCTTGTTCACATTGTTGATATTGATATTGTATTTGTTAAAAATACCTTTACTTTAGAACAAGAAAATATCGTTGAACAAATTATTACATTCTTGGAGGATATGCTGTTTTCTCCTTTAATTTCTTTAGAACAGTATCAAACATCTATTTTTGATACTGAGAAGAAAAACCTTATTCAATATTTAGAGGCCGATATTGAAGATAATTTTTATAGCAGTGACTTAGCACTAAAATCTTTATTCTACAATAATAAGACACTTCGTTTACCTAAGTATGGTACAGCATCTTTAGTGGAATCAGAAAATTCATTTACAGCTTATCAAGAATTTCAGAAGATGCTTAAGGAAGATCAATTAGATATTTTTGTCGTAGGAGATTTTGATGACTATCGAATGATTCAGGCATTTAATCGTATGACATTTGAGCCACGTCACAAAGTATTAGCTTTTGATTATACGCAGACTTATGAAAATATCACGAGAAGTCAAGTAGAAGATAAGGACGTTAATCAATCTATTATGCAATTGGCTTATCATCTTCCAATAACTTATAAAGATGAAGATTATTTTGCTTTAATAGTATTTAACGGTTTATTTGGTGCTTTTGCCCATTCCTTGTTGTTTACAGAAATTCGAGAAAAGCAAGGTTTAGCCTATACTATAGGTAGTCAATTTGACAGCTTTACAGGTCTCTTTACGATATATGCAGGTATTGATAAAGAGAATCGTGAGCGTTTTTTGAAGCTTATTAATAAGCAATTCAATAATATTAAGATGGGCAGGTTCTCTTCTACATTATTGAAACAAACAAAAGATATATTGAAAATGAACTATGTTTTAGCTTCTGATAATCCTAAGGTCATAGTTGACCACATTTATCATGAACATTATTTAGATCAGTTTCATACTTCAGCACTATTCATTGACAAAGTGGACGATGTAACAAAATCAGATATTGTCAGCGTAGCAACAAAATTAAAATTACAAGCTTTTTATTTTTTGGAAGGAAAC

SEQ ID NO: 17686 - protein, 414 aa, Streptococcus agalactiae
  VARIANT 15: Xaa = Any Amino Acid
MKIVEGVSLHLIKNXQFKTNHLTFRFSGDFNNKTVARRSLVAQMLVTANAKYPKVQEFREKLASLYGASLSTKISTKGLVHIVDIDIVFVKNTFTLEQENIVEQIITFLEDMLFSPLISLEQYQTSIFDTEKKNLIQYLEADIEDNFYSSDLALKSLFYNNKTLRLPKYGTASLVESENSFTAYQEFQKMLKEDQLDIFVVGDFDDYRMIQAFNRMTFEPRHKVLAFDYTQTYENITRSQVEDKDVNQSIMQLAYHLPITYKDEDYFALIVFNGLFGAFAHSLLFTEIREKQGLAYTIGSQFDSFTGLFTIYAGIDKENRERFLKLINKQFNNIKMGRFSSTLLKQTKDILKMNYVLASDNPKVIVDHIYHEHYLDQFHTSALFIDKVDDVTKSDIVSVATKLKLQAFYFLEGN

SEQ ID NO: 17687 - protein, 585 aa, Streptococcus agalactiae
ATGTTTTCGAGCGATTTTGGATTTGAGATAATTAATGTTGACGATCTATCCTTACAAGAGGAGAAATTTTTACCTTCAGAATTGCTGGCTTATGCACGTGATGAAAACGAGTCTTCTTTCGTACGTGATATTGAGGGGCATTTGACACTTGTTTACCAGCTTTTGGATACGCAAGGTCACGTTGATGATGTTCGTCATGTGCCGAGAGTGATACCAGTGACTCTATTTTTGAAAGAAGATGGCTTGTTTGTATTAGCTAATCATAAAAATATTATCCTTGTAAAAAAAGCACTTAATCGCGTTGAAAAGGTAGATTCGCCGAAACACCTCTTATTATCATTAGTGACTGCTTTCTCAAAGCAATATTTTGATGTTTTAGATACTATTTCTGAAGAAAGAGATAAACTAATCAATGATTTGCGTAAAAGACCAAACAAATCGAACTTGGCAAGGCTGGCAAATTTACAAAGTGGAACAGTACACTTAATGATGGGAACTAAGCAAAATTTTGAAATGCTGACCGATTTACAAAACATTGAGCAAGATAAAGAGAATACTAGAAATGAAAAGANNNNNTTAATTAAT

SEQ ID NO: 17688 - protein, 195 aa, Streptococcus agalactiae
  VARIANT 191, 192: Xaa = Any Amino Acid
MFSSDFGFEIINVDDLSLQEEKFLPSELLAYARDENESSFVRDIEGHLTLVYQLLDTQGHVDDVRHVPRVIPVTLFLKEDGLFVLANHKNIILVKKALNRVEKVDSPKHLLLSLVTAFSKQYFDVLDTISEERDKLINDLRKRPNKSNLARLANLQSGTVHLMMGTKQNFEMLTDLQNIEQDKENTRNEKXXLIN

SEQ ID NO: 17689 - protein, 957 aa, Streptococcus agalactiae
ATGTTAAAGGTAAGATATGGTGTTGTGTCAACGGCAAAGGTGGCGCCTCGTTTTATTGAAGGAGTCCGCTTAGCAGGAAATGGTGAAGTTGTGGCTGTATCGAGTCGAACTCTTGAGTCTGCGCAAGCTTTTGCCAACAAATATCATCTCCCAAAGGCTTACGATAAGTTAGAGGATATGTTAGCAGATGAGTCGATTGATGTGATTTATGTGGCAACAATTAATCAAGACCATTATAAAGTTGCTAAAGCAGCTCTGTTAGCGGGAAAACATGTGTTGGTAGAAAAGCCTTTCACATTGACTTACGACCAAGCAAATGAATTATTCACTTTGGCAGAAAGTTGTAATCTGTTTTTGATGGAAGCACAAAAATCGGTATTTATTCCGATGACACAAGTGATTAAAAAATTACTTGCCTCTGGTGAAATAGGAGAAGTGATCTCCATCTCATCTACAACAGCCTACCCAAACATTGACCATGTAACATGGTTTAGAGAACTTGAGTTAGGTGGAGGAACAGTGCATTTTATGGCGCCCTATGCCCTGTCTTATTTACAATACCTATTTGATGCGACTATAACTCATGCTAGTGGGACTGCGACTTTTCCAAAAGGTCAAAGCGATAGTCAATCCAAACTACTCTTGCAATTATCAAATGGGGTCCTCGTAGATATCTTCTTGACAACACGTTTAAATTTACCGCATGAAATGATTATTTATGGAACTGAAGGTCGTCTAATCATTCCACATTTTTGGAAAACCACTCATGCAAAATTGGTGAGAAATGATACTAGTGCGCGAACGATTCAAGTTGACATGGTTAGTGATTTTGAGAAAGAAGCTTATCATGTTAGTCAAATGATTTTAGAAGGGCAAAGGGTAAGTCATATCATGACGCCTCAGTTGACGCTGTCAGGTGTTAAGATTATAGAAGGCTTATACCGTTCATGGGGGAAA

SEQ ID NO: 17690 - protein, 319 aa, Streptococcus agalactiae
MLKVRYGVVSTAKVAPRFIEGVRLAGNGEVVAVSSRTLESAQAFANKYHLPKAYDKLEDMLADESIDVIYVATINQDHYKVAKAALLAGKHVLVEKPFTLTYDQANELFTLAESCNLFLMEAQKSVFIPMTQVIKKLLASGEIGEVISISSTTAYPNIDHVTWFRELELGGGTVHFMAPYALSYLQYLFDATITHASGTATFPKGQSDSQSKLLLQLSNGVLVDIFLTTRLNLPHEMIIYGTEGRLIIPHFWKTTHAKLVRNDTSARTIQVDMVSDFEKEAYHVSQMILEGQRVSHIMTPQLTLSGVKIIEGLYRSWGK

SEQ ID NO: 17691 - protein, 1419 aa, Streptococcus agalactiae
ATGATGATGACTAAGGAAACGTTGGCACATTATCAAAAGAAAATAGAACAAGAATCTGAAAAAAAGCAGTCTTTAGATGAGCACTCATGGCATGTGGCCTGTTTTAGTCGACAGGAAGCATCTATAATTGGTCAAGGAGATGTGCTTTTTTTAATTGGTCTATACCACGATCTAGGCAAAGCTGATCGAGCCTTTCAAGATAAATTATTAAATAATCCAAATCGACATGTTGATCATTCTTATGCAGGGGCAAAATACTTATGCTCTATTATTGGGCCTCATCTAAAAAGTCGAGGGGTTGATAAAGGTGAGAGAATGACATTCAATGAAATGGTGGGTTATGTCATCTCGGCTCATCATGGGATGTATGATTTTTGCTACTGTTCTGACGATGCTGAATATTATAGCTTTAATAAATTTAAAAACCGTATCAACAGAGACTTAGATGATTATCACTATCACGAAGATATTAAAGGGTATGCTATAAAATTAGAAGAAAAATTGTGTGATTACGGCTACAAAGATTTAAGGGAGCTTATTGATAAAGCTTTTGATAATTACCAACAAGCTATGTCTTCCTTAAACTGGCAAGATAATAGTGAGTGGGATTATTATCAGTCTTGTATGGTGAGACTTTACTTGTCGCTCTTAAAAAACGCTGATATTTTGGACACAGTAAATGCCTATGGTCTTAAAATAAGTCCTATGGATAAAACAGAGCGATCCTCTCTAAAACATTCTTATTTAGCAGCCATTGAACAAAAATATGCTAGCTTTGGACGACCAAACAATCAGTTGAATACTATTCGGACAGAAATTGCTGAGCGTGTTAAAGAAAGAGGTAAACGGGATTCCAAAGGGATCTATCGCTTAGATTTACCGACAGGAGCTGGCAAGACTAATCTTAGTATGCGCTATGCGTTTCACCAATTAGTTCATCAAGACAAATCAAGATTTTTTTACATAACGCCCTTTCTTTCGGTTCTTGAGCAAAATGCTTCCGAAATTAGAAAAGTTACGGGTGACCTTGGCGTTCTAGAACACCATTCCAATATGGTTAAACAGGCTAATGAAGATGATGACAAGGACAGTTTATTGTCAGCTTATCTTATTGATAGCTGGGATAGTCAAGTAGTCTTGACTTCTATGGTTCAATTTTTCCAAACGCTTTTTAAAACAAAATCGGCTAATTTGAGACGTTTTTCAAGTTTGATTAATAGTGTTGTGATTCTAGATGAAGTTCAGTCACTGCCTATTGAAGTCACCACTTTGTTTAATTTAACGATGAATTTTTTTAATAAAGTTATGGATACAACCATCGTTCTTTGTACAGCAACACAACCTGCTTATGATTCTTCAGAGATTGACCATCGTATCTGTTATGGAGGGAATTTGGGAGAATTAGCTGAAATAGTGGAT

SEQ ID NO: 17692 - protein, 473 aa, Streptococcus agalactiae
MMMTKETLAHYQKKIEQESEKKQSLDEHSWHVACFSRQEASIIGQGDVLFLIGLYHDLGKADRAFQDKLLNNPNRHVDHSYAGAKYLCSIIGPHLKSRGVDKGERMTFNEMVGYVISAHHGMYDFCYCSDDAEYYSFNKFKNRINRDLDDYHYHEDIKGYAIKLEEKLCDYGYKDLRELIDKAFDNYQQAMSSLNWQDNSEWDYYQSCMVRLYLSLLKNADILDTVNAYGLKISPMDKTERSSLKHSYLAAIEQKYASFGRPNNQLNTIRTEIAERVKERGKRDSKGIYRLDLPTGAGKTNLSMRYAFHQLVHQDKSRFFYITPFLSVLEQNASEIRKVTGDLGVLEHHSNMVKQANEDDDKDSLLSAYLIDSWDSQVVLTSMVQFFQTLFKTKSANLRRFSSLINSVVILDEVQSLPIEVTTLFNLTMNFFNKVMDTTIVLCTATQPAYDSSEIDHRICYGGNLGELAEIVD

SEQ ID NO: 17693 - protein, 777 aa, Streptococcus agalactiae
ATGCTAAATTCTGATTTTAGTATTAGTAAGTCACTTGCTAACTACATTCACCATCGTAGGTTAGAAGTTGGCGTGTCGTCAACTGATTTGGCAGAAATATCCAATATGTCTAAATCAGATTGGGAATCATTTGAAAAAAATGGTGGGGCAATTCCTTTGAAATCTAAGGATATCATACTTGACTTATTATTTTTGGAGAGATTCCCTAAAGAGAAAGAATGTGATTTTATAGATAAATTATTTGAGGAAGCAAAGGAAAATAAACTTTGGCCTGAAAAGATTTACCAGACTATGGGACTTACTCCTGCTCTTTCATTTATTGCTGGTTGTGAAATACTTTCTGATGATATTAATAATGATTTGGAGGAATTATCTAAACTACCTAAAGAAAGTCATCTGGGACAATTAGATACTTCCCTACTTTTATCACTATTGCCTCAACAATTTATCACAAAATATGATTATGAGTTTGTTTATAAATTAAGCAAAGTTTTGGCTCAATATACATCAAGAAATAAAGTTGGTTCATCTTATACAGCGCATAGTGTAATAGAGGAAATTTATCTCTATTTAATTGCAAAAGAATCCATTCTTTATTTTGAATCTCTGGACGAAAACTCCCATCTACAACTTAAGGAATTATTAGATTATAACGATGAGTGGCCTTTTGATATTTTTGATGATATGGATAGCTATACCTTTTTATATACAGACATCTATATTGAAGAAGATTCACCTTATCATTTTAAAAACTGGTTTGTACCTCAATTTTATTTA

SEQ ID NO: 17694 - protein, 259 aa, Streptococcus agalactiae
MLNSDFSISKSLANYIHHRRLEVGVSSTDLAEISNMSKSDWESFEKNGGAIPLKSKDIILDLLFLERFPKEKECDFIDKLFEEAKENKLWPEKIYQTMGLTPALSFIAGCEILSDDINNDLEELSKLPKESHLGQLDTSLLLSLLPQQFITKYDYEFVYKLSKVLAQYTSRNKVGSSYTAHSVIEEIYLYLIAKESILYFESLDENSHLQLKELLDYNDEWPFDIFDDMDSYTFLYTDIYIEEDSPYHFKNWFVPQFYL

SEQ ID NO: 17695 - protein, 438 aa, Streptococcus agalactiae
GTGCGTAATAGCCGAGCAGAGGTCAATGTTGCTCCATCTAAACCAATCACTATCTTGGTTAAGACAAGTGACAGCGAACTCGAAAGCTTCTTCAAAGACAATAGTAACTACATCAAACGTTTCACAAACCCAGAAACTGAAATCAGCTCAGCTATTGCCACACCAGAACTTGCCATGTCATCAGTCATCACAGGAGCTGAAATCTTCCTCCCACTTGCTGACCTCCTCAACGTAGAAGAAGAGTTAGCACGACTTGAAAAAGAACTAGCCAAATGGCAGAAAGAACTGGACATGGTAGGCAAAAAACTCGGCAACGAACGCTTCCTCGCCAACGCCAAACCAGAAGTTGTCCAAAAAGAAAAAGACAAACAAGCCGACTACCAAGCTAAATACGACGCAACCCAAGAACGGATTGTAGAGATGCAAAAACTTGTTAAA

SEQ ID NO: 17696 - protein, 147 aa, Streptococcus agalactiae
  VARIANT 47: Xaa = Any Amino Acid
MRNSRAEVNVAPSKPITILVKTSDSELESFFKDNSNYIKRFTNPETXEISSAIATPELAMSSVITGAEIFLPLADLLNVEEELARLEKELAKWQKELDMVGKKLGNERFLANAKPEVVQKEKDKQADYQAKYDATQERIVEMQKLVK

SEQ ID NO: 17697 - protein, 605 aa, Streptococcus agalactiae
ATGAAATTACCGAATGAATTTATTGAAAAATATCAGACTATACTTAAAGATGAAGCAGAAGCTTTTTTTGACAGTTTTGAACAAAAACCCATATCGGCATATCGCACCAATCCTCTCAAAGAAAAGCAACTTGATTTTCCAAATGCCATCCCAAGTACCCCTTGGGGGCATTATGGGAAAATATCAGGAAAATCAATAGAACACACAACTGGCCTTGTTTATTCTCAAGAACCTGCTGCTCAGATAGTGGCTCAGATTGCTGAACCACAAGAAGGAATGAAAGTGCTAGATTTAGCAGCTGCACCTGGTGGAAAAACAACACACCTTCTATCATATTAAACAATACTGGTCTATTAGTTAGTAATGAAATTTCAAATAAACGTAGTAAAATTTTAGTCGAAAATGTCGAACGTTTTGGTGCTAGAAATGTTATCGTGACTAATGAAAGCTCCCAACGACTAGCCAAATGTTTTAATTCTTTTTTTGATCTTATTGTTTTTGACGGTCCGTGTTCTGGTGAGGGAATGTTCCGCAAAGATCCTCAAGCAATACAATATTGGCACAAAGATTACCCCACGGAAAGTGCACAGTTACANNNNNTTAAT

SEQ ID NO: 17698 - protein, 202 aa, Streptococcus agalactiae
  VARIANT 199, 200, 201: Xaa = Any Amino Acid
MKLPNEFIEKYQTILKDEAEAFFDSFEQKPISAYRTNPLKEKQLDFPNAIPSTPWGHYGKISGKSIEHTTGLVYSQEPAAQIVAQIAEPQEGMKVLDLAAAPGGKTTHLLSYLNNTGLLVSNEISNKRSKILVENVERFGARNVIVTNESSQRLAKCFNSFFDLIVFDGPCSGEGMFRKDPQAIQYWHKDYPTESAQLXXXN

SEQ ID NO: 17699 - protein, 858 aa, Streptococcus agalactiae
GTGACTGTTAAGGTTGTCGATCCACGTACAGATGCCGATAAGAATGATCCAGCAGGTAAAGATCAGCAAGTCAATGTAGGTGAGACACCGAAGGCAGAAGATTCTATTGGTAACTTACCAGATCTTCCGAAAGGTACAACAGTAGCCTTGAAAACTCCAGTTGATACGGCAACACCGGGAGACAAACCAGCAAAAGTTGTTGTGACTTACCCAGATGGTTCAAAAGATACTGTAGATGTGACTGTTAAGGTTGTCGATCCACGTACAGATGCCGATAAGAATGATCCAGCAGGTAAAGATCAGCAAGTCAATGTAGGTGAGACACCGAAGGCAGAAGATTCTATTGGTAACTTACCAGATCTTCCGAAAGGTACAACAGTAGCCTTTGAAACTCCAGTTGATACGGCAACACCGGGAGACAAACCAGCAAAAGTTGTTGTGACTTACCCAGATGGTTCAAAAGATACTGTAGATGTGACTGTTAAGGTTGTCGATCCACGTACAGATGCCGATAAGAATGATCCAGCAGGTAAAGATCAGCAAGTCAATGTAGGTGAGACACCGAAGGCAGAAGATTCTATTGGTAACTTACCAGATCTTCCGAAAGGTACAACAGTAGCCTTTGAAACTCCAGTTGATACGGCAACACCGGGAGACAAACCAGCAAAAGTTGTTGTGACTTACCCAGATGGTTCAAAAGATACTGTAGATGTGACTGTTAAGGTTGTCGATCCACGTACAGATGCCGATAAGAATGATCCAGCAGGTAAAGATCAGCAAGTCAATGTAGGTGAGACACCGAAGGCAGAAGATTCTATTGGTAACTTACCAGATCTCCGAAAGTACAACAGTNNNNNT

SEQ ID NO: 17700 - protein, 286 aa, Streptococcus agalactiae
  VARIANT 285, 286: Xaa = Any Amino Acid
MTVKVVDPRTDADKNDPAGKDQQVNVGETPKAEDSIGNLPDLPKGTTVALKTPVDTATPGDKPAKVVVTYPDGSKDTVDVTVKVVDPRTDADKNDPAGKDQQVNVGETPKAEDSIGNLPDLPKGTTVAFETPVDTATPGDKPAKVVVTYPDGSKDTVDVTVKVVDPRTDADKNDPAGKDQQVNVGETPKAEDSIGNLPDLPKGTTVAFETPVDTATPGDKPAKVVVTYPDGSKDTVDVTVKVVDPRTDADKNDPAGKDQQVNVGETPKAEDSIGNLPDLRKYNSXX

SEQ ID NO: 17701 - protein, 741 aa, Streptococcus agalactiae
GTGACTTACCCAGATGGTTCAAAAGATACTGTAGATGTGACTGTTAAGGTTGTCGATCCACGTACAGATGCCGATAAGAATGATCCAGCAGGTAAAGATCAGCAAGTCAATGTAGGTGAGACACCGAAGGCAGAAGATTCTATTGGTAACTTACCAGATCTTCCGAAAGGTACAACAGTAGCCTTTGAAACTCCAGTTGATACGGCAACACCGGGAGACAAACCAGCAAAAGTTGTTGTGACTTACCCAGATGGTTCAAAAGATACTGTAGATGTGACTGTTAAGGTTGTCGATCCACGTACAGATGCCGATAAGAATGATCCAGCAGGTAAAGATCAGCAAGTCAATGTAGGTGAGACACCGAAGGCAGAAGATTCTATTGGTAACTTACCAGATCTTCCGAAAGGTACAACAGTAGCCTTTGAAACTCCAGTTGATACGGCAACACCGGGAGACAAACCAGCAAAAGTTGTTGTGACTTACCCAGATGGTTCAAAAGATACTGTAGATGTGACTGTTAAGGTTGTCGATCCACGTACAGATGCCGATAAGAATGATCCAGCAGGTAAAGATCAGCAAGTCAATGTAGGTGAGACACCGAAGGCAGAAGATTCTATTGGTAACTTACCAGATCTTCCGAAAGGTACAACAGTAGCCTTTGAAACTCCAGTTGATACGGCAACACCGGGAGACAAACCAGCAAAAGTTGTTGTGACTTACCCAGATGGTTCAAAGATACTG

SEQ ID NO: 17702 - protein, 247 aa, Streptococcus agalactiae
MTYPDGSKDTVDVTVKVVDPRTDADKNDPAGKDQQVNVGETPKAEDSIGNLPDLPKGTTVAFETPVDTATPGDKPAKVVVTYPDGSKDTVDVTVKVVDPRTDADKNDPAGKDQQVNVGETPKAEDSIGNLPDLPKGTTVAFETPVDTATPGDKPAKVVVTYPDGSKDTVDVTVKVVDPRTDADKNDPAGKDQQVNVGETPKAEDSIGNLPDLPKGTTVAFETPVDTATPGDKPAKVVVTYPDGSKIL

SEQ ID NO: 17703 - protein, 108 aa, Streptococcus agalactiae
GTGCTTTTGCCGTTACGCACCACCCCGTCAGTAGCTGAACAGGAGGGACAGCTGATAGAAACAGAAGCCACTGGAGCACCTCAAAAACACCATCATACACTAAATCAG

SEQ ID NO: 17704 - protein, 36 aa, Streptococcus agalactiae
MLLPLRTTPSVAEQEGQLIETEATGAPQKHHHTLNQ

SEQ ID NO: 17705 - protein, 4150 aa, Streptococcus agalactiae
ATGAAAAGAATTTCTTTAAAAACAACCGGTGTACTGATTGCGTTTTTAGCTGTAAATGCGGTAGCGATCTGTAGTGGTAGATGCAGACACAGTAGTCCCTCATACTAGTGCGAATACTAGTCAGCTTTTAGAAAAAAACACAACTATCAAGCCTTCCGAAGTTAAACAGTCACGTACTGAAAGTAATGCAGTAACCCCTCCAACAATAGCCTCGAGTAACTCACAAAAGCTTGAGAATAAATCATCTGTAGATTCAAATATACTAAAGAGTGAACAACCTGCACATAAAGTTGCTGGTGTTAAACAAGTCGTTCAAGAACAAACGAAAAATCAAAAAGATGAAACCTCTTTACAGGCTAAAAAGCAAGTACAATCAAGTGAAAAGTTATTAAATACTTCATCACAACCTTCAAGTGAGGAAAACAAAAACACTAATAAGCCTAATAAGGCTAATGAAGTGGATATGAAAAATGTCGTGAATAATGCTTCGACGAAGCCAACTCCCCCATCTGATTCTAAAGTGTATAAGCGCGTTATTGTAACATTTGATCAAGTAAATAAGGAAAAAGTAGATGAAGCCCTTAAAGCAATTCCGGGCACTCGTATTAAGTTAACTTATAGTAGCCTTTTTAATGGCTATTCATTAGCAGTAGATGAAAAAGAAATTGAAAAAATTGGTAAGATTAAAGAGATAAAACATATTGAAGCAGTTCAAGTATTAAAACCTCAAATGTTTACTGCTAACCAATGGACACATGTCTTAGCTGCACGTTTAAAAGCTAAACAAAATAGTAAAGTTGACGGTAGAGGGCTACTTATTGCGACTATTGATAGTGGTGTAGATATCCATCATCCTGCCATGCGATTGGATGAGAATGATCCAGATGTGATGGCAAAGCGTCGTATTAAAGATATTAAGGCTCCTTATACAAATAAAGTTCCTTTTGCATACAATTATCAACGAGGCGATAATTTAGAATTGAAAGACGACGTTCAGCGCCCTCATGGTATGCATTTAGCAGGTATCTTAGCGGGAAATGCAAAGGATGGTTTTAAAGGAGTTGCCCCTAATGCACAGTTATTAGTGTACAAAATTTCAACAAATAGAGAAGATCCATCTGCAGAGTGGACCGGCTCTGATGCAGTCTTCCATGCAATGGAAGATGCCGCTAAAAGAGGGGCAGACGTTATTAGTTTAAGCTTTGGATATTTGGGAACAGGACGTCCAGGTGAACTTTGGTATGAGACAATTAAGAAGGTGACTGACAAGGGTGTTATCGTAGTAGCAGCAATGGGAAACTATGGTAATTCGGCTTCATCTACTACCTACGATAATGTCGTTGACAACTCTTTGGGAACAAAAGATACTGCTGCTATGGTGTCTGTTGCAGCTGTTGATAAGGTTATTGGAGTTGGTTCAGTTCAAAATAGTGCTCTTCTTTTAGATGTTTTGAAAGTTGGAAATCTTAAATTAGGATATGCAGAACTGGGACATAAAAGTCAAACAATATTAAAAATGCTCAAAAATAAAACATTTGATCTAGTCTATGTTGGTAAAGGCCAGTTGAAAAAAGATATCTCAGAAGAGGACCTTAAAGTTATACTGGAAAAGTTATCGTCGTTGAGCGTGGAGGAGAGGGCGTTAAAGATAAGCTAAAACGTTTTATCGGAATTGCTAAAGGGGTTATTATGATAAATGAACCTGCTTATTATAGTTCTGGGAATTTTGATACTCACCCCATGTTTGATTATCACTATGATATACCAGAAGGTAAATGGGCTATTAGTCTATCAAAAAAAGATGGTGATCAGTTGATTGACTACATCAAGAAAAACAAAACTGCTAAATTAGAATTTTTACCTAAAGAAACCTTTGTTCGCCGTCCAAATCCTACAATTTCAGGCTTTTCTAGTTGGGGAGTGACACCAGATTTGCATTTGAAGCCAGATGTAGTTGCTCCAGGAGAAGATATTTATTCTACTTTTAACGACGGTACCTATGGGTACATGTCTGGAACTTCAATGGCTACCCCTCAAGTAGCTGCCATTAGTGCATTAGTAAAAAGTAAAGTAGCTGAAATAATGGCATTAAAACTTCCAATGTTAGCTGGTTTGACAAACGTTGATTTGACAAAGATTGTCTTGATGAATACAAGTCAACCTTTGAAAGATACTCTAAATAAAGCTTTAGAAATTTCACCACGACGTCAAGGTGCAGGTATGGTTAACTTAGAAAAAGCTTTAGCTAACGATGTTCTTGTTTTTGGTGATAAAACAGGATCATTCTCTATAAAAGAGATTAAGAACCATAAAAGATTTACCTTGAAATTGGTCAATACAGGACAAAAACGTCGTAACTTTAGTATTGAACCAGGAGCGATTTTAACAACTAAAATTGTTGATAAAGTGACTAATCAGGGGTATGAAAATGTCGTTTTAAAGGCAGTTCACGCTAAAGTAATAGAGGGAGCAACTTTACAAATGGGTAAAGTTATCTCACTAGCACCGCAATCAGCCATAGAGCTTGATATAGATCTTGAGATAAAAAAACCTATACAAGATTTTGCTGAAGGGTATTTGTATTTCAAAACTTTAGATAAAGATGGACAAGATATCTCAGCTCCTTACATGGGCTTCTCAGGAACATGGGATTTAGAACCAATTTTTGACGCACCTATGTGGGATAGTCGTTCTAAAAATAAATTAACGACCTTGATGCAAGCAACTTTGGTTGGACACGGAACTAACAAATTTTATGAAATCGGACAAGAAATAGGTAGTAAAAAGGTCAATCCATCCCTATTTACTATGTCTAATGTGCGTGTAGCTCCCGATAAAGTTGTGCGTGTAGCACCTCGATTTTCTTTATTACGCTCAGCATCAGATTTTGACCTCTCTATTGTATCAGAAGCAAAAGACGATTCACCAATACTTCGTCGTATAACAGTGAAACATTTCGTGGAGAAATATTACAAATCAAGAAATGAGGAAGAAGACTCATATTATGATGCTTTGAGAACGACAGAATCATCGCTAGTTTGGGATGGAAAGTTTTATGATCCTAAGACTGGTGATTTTAAAGCTGCAAAGCCAGGCTTATATTACTTTAAGTACGTGCACGTTCAATCCTACAGATCCTTATCAAGTCCAATACCTTCCAATTTTAATAGATAATGAAAGACCAACTTTTTCTCTTAAAAAAGTTAATAACGGCTTTGATATTTTAACCCATGATAATCATCGTGTTAAAGAAGTAATTGTTCGTAATAAAGAGACACAAAAGCCTATCACAGTTAAAAAAATTGCCGAAAATCACTATCATATTGATGAGTTAACGTTAAGAGAATCTGATCTGGATATAAAAGTTGCAGACTATGCTGGGAATTCAAACAAGGAAATTGCTTTATCAGAATCAGAAGAAGTATCAGAGAAATCTTACTCTAGTGAGGAAGATAATACATTACAACCACAGTCACTGTCTCATCGCAATATGAAAGCTCAAGCAACCAGTTCAGATGATGACGATATCTGGGATGATAACGATGATGACCTTAACGAAGAAAAAGATTTTGATTTTGAAGAAAATATTTCTGATATCGAGGATGGTTTATTATTAACTCGAGAAACGGTATATTCAATTCGAACTGTAAATAAAATTCGAAATGTTGAAAATGAAAGCTTGGAGCATAGTGTTTCTCTCTTATTAAAAGATGGCTATCGTGCAGAAATAAGAGTTGTTAACCTTCATGAGAACGCTAAAGATCCAAAACATTCCGACCCATATCGTACAGTATCCAACCCTATTTATATGTATGGTGATGACTCTGACACATTTAAAACCACATGGGTCAAATTTATGTCTGGGAATAACATCATGAATTTGAAGGTTTATAATAAGAATGATAAATTGGTATTTAGTCGTGGCTATCATATTACCGTTGATGTACAACCTCCAAAATTAGAACTGGACAAGACTAACATAGAAGAAGCTGCTGACAAAGATAACTTTATCACTGGTCAAATCTATGCTCAAAATGGAGAAATTGAAATCAAAGGGCACGTTTCTGATAATGTAAAAGGTTGGGGTCTTTCTATTAATGGTGATAGCGTCGATGTTAAATATTCAAGTGGTGAATTTATCAGTAATAGA

SEQ ID NO: 17706 - protein, 1385 aa, Streptococcus agalactiae
  VARIANT 23, 533: Xaa = Any Amino Acid
MKRISLKTTGVLIAFLAVNAVAXSVVVDADTVVPHTSANTSQLLEKNTTIKPSEVKQSRTESNAVTPPTIASSNSQKLENKSSVDSNILKSEQPAHKVAGVKQVVQEQTKNQKDETSLQAKKQVQSSEKLLNTSSQPSSEENKNTNKPNKANEVDMKNVVNNASTKPTPPSDSKVYKRVIVTFDQVNKEKVDEALKAIPGTRIKLTYSSLFNGYSLAVDEKEIEKIGKIKEIKHIEAVQVLKPQMFTANQWTHVLAARLKAKQNSKVDGRGLLIATIDSGVDIHHPAMRLDENDPDVMAKRRIKDIKAPYTNKVPFAYNYQRGDNLELKDDVQRPHGMHLAGILAGNAKDGFKGVAPNAQLLVYKISTNREDPSAEWTGSDAVFHAMEDAAKRGADVISLSFGYLGTGRPGELWYETIKKVTDKGVIVVAAMGNYGNSASSTTYDNVVDNSLGTKDTAAMVSVAAVDKVIGVGSVQNSALLLDVLKVGNLKLGYAELGHKSQTILKMLKNKTFDLVYVGKGQLKKDISEEDLXSYTGKVIVVERGGEGVKDKLKRFIGIAKGVIMINEPAYYSSGNFDTHPMFDYHYDIPEGKWAISLSKKDGDQLIDYIKKNKTAKLEFLPKETFVRRPNPTISGFSSWGVTPDLHLKPDVVAPGEDIYSTFNDGTYGYMSGTSMATPQVAAISALVKSKVAEIMALKLPMLAGLTNVDLTKIVLMNTSQPLKDTLNKALEISPRRQGAGMVNLEKALANDVLVFGDKTGSFSIKEIKNHKRFTLKLVNTGQKRRNFSIEPGAILTTKIVDKVTNQGYENVVLKAVHAKVIEGATLQMGKVISLAPQSAIELDIDLEIKKPIQDFAEGYLYFKTLDKDGQDISAPYMGFSGTWDLEPIFDAPMWDSRSKNKLTTLMQATLVGHGTNKFYEIGQEIGSKKVNPSLFTMSNVRVAPDKVVRVAPRFSLLRSASDFDLSIVSEAKDDSPILRRITVKHFVEKYYKSRNEEEDSYYDALRTTESSLVWDGKFYDPKTGDFKAAKPGLYYFKLRARSNPTDPYQVQYLPILIDNERPTFSLKKVNNGFDILTHDNHRVKEVIVRNKETQKPITVKKIAENHYHIDELTLRESDLDIKVADYAGNSNKEIALSESEEVSEKSYSSEEDNTLQPQSLSHRNMKAQATSSDDDDIWDDNDDDLNEEKDFDFEENISDIEDGLLLTRETVYSIRTVNKIRNVENESLEHSVSLLLKDGYRAEIRVVNLHENAKDPKHSDPYRTVSNPIYMYGDDSDTFKTTWVKFMSGNNIMNLKVYNKNDKLVFSRGYHITVDVQPPKLELDKTNIEEAADKDNFITGQIYAQNGEIEIKGHVSDNVKGWGLSINGDSVDVKYSSGEFISNR

SEQ ID NO: 17707 - protein, 1057 aa, Streptococcus agalactiae
GTGGATACACCGAAGTTAACTATTAATGAAGCAGATTTATTATCCGGAAAAGTCAAAGTGGTTATAGCTAAAGCAGAAGATAATCACCTTAAAAATTTAATGATAACTGTTAATGGCAAGCCCTACACAGAAGGACAAAGTATTGACTCTTACCAATTAAAAGGTTTCGAAGGGCGTTACGTCATCAAAGTATCAGCAGTTGATAAATCAGGTAAAGTCACTGAAAAAATTATAACAATCGGCAACTTCCCTGAATTATCAGCAAGTTTACGCAAAACCTCTTTCCAAATGCAAGATCTTACCTCTATCGATAATTTATTATCCCTAGCCCACAATCAGACTGCGGAATTGATTAAGCCAGTCCAACTCATGGACAAAAAAGTGAGCTTTACGGCAAAAATATCTGACCCCCTTGGTCGTTCTGTGGTTAGAGAGTTTGAAGCATTATTATCAACTTCAAACCTTAAAGTAGATTCAAAACTAAAACCACATTTGAAAAAACAAACTCTCCTTTTAACAGATCCAAAAGGAATTACGGACCTTTTCGACTTGGATAAGGATAGCTCTATTTTATTGACAGAAATAGTCGATAATAAAGTGGGAAATCATACTATAAAGGGTTTGATATTTAAAAATGGTGCATATAACCATTTCGAAACAAGTATACAAATTGTAAAAACAATGGAAGAAATCAACTCTGACAGACGTTTAAAAATGATCATAAAAGCTCTGACGACACAAAACTAAAAAAAGAAACAGAGTCGTTAAAAGGGCATAAGGTTGATCCAGCAGTTCATGGTGAATTAAAGAAATATCTAAACATCAAATGGATAAACCACAAGTGATAGCTGTAGGCATGAAAGGGAGTACAAAGACACCCCCATTTGTTCATAGTCAAATGGAAGCGAAGAAAACAACTAAGATTCCAATGTCTAGAGCGGCAAAACATGAATTGCCAAGGACAAGTGATGACAATAATAATTTACTGGCTAAAGGAATTGCACTCATAGTAATTGTACTTGGTTTACTAGGCCTTAAAAAAGCTTCAAAGAAATAT

SEQ ID NO: 17708 - protein, 353 aa, Streptococcus agalactiae
MDTPKLTINEADLLSGKVKVVIAKAEDNHLKNLMITVNGKPYTEGQSIDSYQLKGFEGRYVIKVSAVDKSGKVTEKIITIGNFPELSASLRKTSFQMQDLTSIDNLLSLAHNQTAELIKPVQLMDKKVSFTAKISDPLGRSVVREFEALLSTSNLKVDSKLKPHLKKQTLLLTDPKGITDLFDLDKDSSILLTEIVDNKVGNHTIKGLIFKNGAYNHFETSIQIVKTMEEINSDRRLKNDHKSSDDTKLKKETESLKGHKVDPAVHGEFKEISKHQMDKPQVIAVGMKGSTKTPPFVHSQMEAKKTTKIPMSRAAKHELPRTSDDNNNLLAKGIALIVIVLGLLGLKKASKKY

SEQ ID NO: 17709 - protein, 522 aa, Streptococcus agalactiae
ATGTCACGCAGTCAAAAAGTTATTTTAACTAATATGTGTCTTATTGAAGATAATAAAGGACGTATTGTGATGCAAATCCGTGATCCTAAACGTTATTCTTGGTCAGGAGCTGCTCTACCAGGCGGCCATATTGAAGAAGGAGAAAGCTTGTATGATGCTCTCGTTCGAGAAGTTCGCGAGGAGACAGGTTTAACAATAAGTAATCCCAAATTAGTTGGTATGAAGCATTGGTACACAGATGAAGGCATCCGTTATTTGGTATTCCTTTATAAAACATATGATTTTTCAGGTGAATTACAATCGTCAGATGAAGGTGATGTTATATGGATTGAACGTTCACAACTTGATAAGATTGAACTAGCATATGATATGCTTAACCTTTTGAGAGTATTTGACGAAGATGACATCTCAGAGATGTTTTATAGTAAGCGACTTGAAGATGGTTTTATAAGAAAAATTTTATTAAACAAAAAAGAACTAGGAATTGTACTGACCCCCAAAAGTTGGACAATTTATTTTAAG

SEQ ID NO: 17710 - protein, 174 aa, Streptococcus agalactiae
MSRSQKVILTNMCLIEDNKGRIVMQIRDPKRYSWSGAALPGGHIEEGESLYDALVREVREETGLTISNPKLVGMKHWYTDEGIRYLVFLYKTYDFSGELQSSDEGDVIWIERSQLDKIELAYDMLNLLRVFDEDDISEMFYSKRLEDGFIRKILLNKKELGIVLTPKSWTIYFK

SEQ ID NO: 17711 - DNA, 600 bp, Streptococcus agalactiae
atgaaaagtatgggcttgactgctcgtattcgtcgtaagcgcaagtatgcctcttacaaaggtgaggttggtaagaaggctgataacctgattcaacgccagtttgaggggtcgaagccctatgagaagtgctataccgatgtgacggagtttgctttacctgaagggaaactttatctatcgcctgttcttgatggctataacagtgagataattgattttaccctgtctcggtctcctgacttgaaacaggttcaaaccatgcttgagagggcttttcctgcggcttcatacagcgaaaccattctccacagcgaccaaggctggcagtaccagcacaagtcctaccatcaatttctggaggacaaaggcattcgtccttctatgtcacggaaggggaacagtcctgacaacggtatgatggaatctttctttgggattctaaagtctgagatgttctatggcttggagaagtcttacaaatcacttgatgaccttgagcaagctatcacagattacattttttactacaacaacaagcgaatcaaagcaaaactaaaaggacttagtcctgtgcaatacagaactaaatccttcact

SEQ ID NO: 17712 - protein, 200 aa, Streptococcus agalactiae
MKSMGLTARIRRKRKYASYKGEVGKKADNLIQRQFEGSKPYEKCYTDVTEFALPEGKLYLSPVLDGYNSEIIDFTLSRSPDLKQVQTMLERAFPAASYSETILHSDQGWQYQHKSYHQFLEDKGIRPSMSRKGNSPDNGMMESFFGILKSEMFYGLEKSYKSLDDLEQAITDYIFYYNNKRIKAKLKGLSPVQYRTKSFT

SEQ ID NO: 17713 - DNA, 351 bp, Streptococcus agalactiae
ttgaaaggtaaaatccgtgataatattaaggctcagcaacaagaaatggaagagttagctactttagttgatgattttttgcttcaaacacgtgcggttagtaaacaatacccactagcaccatatgaaattattgtcagtgaagattctgaacaccttggtaagtcaataggagaattaaatgtatggcatcaaactggtgcgactattgtggctattgaacacgaagggaaatttattgtttctccagggcctttctcagttatagagcaaggagatcatatcttttttgttggtgatgaagatgtttatgcacgtatgaaaacctattttaacttaaggatggggctt

SEQ ID NO: 17714 - protein, 117 aa, Streptococcus agalactiae
MKGKIRDNIKAQQQEMEELATLVDDFLLQTRAVSKQYPLAPYEIIVSEDSEHLGKSIGELNVWHQTGATIVAIEHEGKFIVSPGPFSVIEQGDHIFFVGDEDVYARMKTYFNLRMGL

SEQ ID NO: 17715 - DNA, 609 bp, Streptococcus agalactiae
atggattttgtctttgatatagatggaactctttgttttgatggtatgagtctatctaaagaaatacaaggaatactagagagagcccagattgattatggtcatagagtcacttttgctacggcgcgatcttatagagacactataggtatccttggcgacaagctatctttatcaaaaattattggtttaaatggtgcgactttacatgaaaatggtcacttagtggatagttactatttacaaagtgacttttttagtactattatttcatattgtcatcgctatcagattccatattttgttgatgaggtctttaattacgctacttatcaggcttctaaaattccctttattgcttatgttgatcctcaaaaaaggggagagcttctaraagtttctaaaattgagaaaccgataaaaatggtgttgtattttggtgatcagctgagaagggcagaccaaatgttagcgaaattaaatcgttttggacttagtagtcactttttccacgaatttgaaaaatgtttgtacataaatcccattgcagttgacaagggaaaagccactaagaaattatttggggaatcgttttatagcttttggcaa

SEQ ID NO: 17716 - protein, 203 aa, Streptococcus agalactiae
  VARIANT 132: Xaa = Any Amino Acid
MDFVFDIDGTLCFDGMSLSKEIQGILERAQIDYGHRVTFATARSYRDTIGILGDKLSLSKIIGLNGATLHENGHLVDSYYLQSDFFSTIISYCHRYQIPYFVDEVFNYATYQASKIPFIAYVDPQKRGELLXVSKIEKPIKMVLYFGDQLRRADQMLAKLNRFGLSSHFFHEFEKCLYINPIAVDKGKATKKLFGESFYSFWQ

SEQ ID NO: 17717 - DNA, 198 bp, Streptococcus agalactiae
ttggggaatcgttttatagcttttggcaatgataaaaatgatatttctatgtttgatgctgcgcattatagtgttcaagtaggggattttgatgaactgactccttacgcctatttacgtgtattcagagaatctgtacatgaaggaattaccatgctttttgaaaataccagggggattacgtatggatttattccc

SEQ ID NO: 17718 - protein, 66 aa, Streptococcus agalactiae
MGNRFIAFGNDKNDISMFDAAHYSVQVGDFDELTPYAYLRVFRESVHEGITMLFENTRGITYGFIP

SEQ ID NO: 17719 - DNA, 330 bp, Streptococcus agalactiae
atgagaataaaatctgtgttgaaacaggtgtttttgacggaagaagaaaataaaaaattaaatgattgtatgaggaaggaaaatattcgtaatttttctgagtttgctagacaaaaattaatacgaacagatttgaacatccaaaaagtctcttttgaagatttagttcctttaacagaagagttggaacaagtcggaaagaatatcaattctatagcccgtcttgcaactgtagttgggagaataagctatgaaaacaaaatggatatgtctattttgatgcaaaaaatagttgatgtgatggagggaaaagatgtttattttcaaaag

SEQ ID NO: 17720 - protein, 110 aa, Streptococcus agalactiae
MRIKSVLKQVFLTEEENKKLNDCMRKENIRNFSEFARQKLIRTDLNIQKVSFEDLVPLTEELEQVGKNINSIARLATVVGRISYENKMDMSILMQKIVDVMEGKDVYFQK

SEQ ID NO: 17721 - protein, 357 aa, Streptococcus agalactiae
ATGAGTAGATATAGGACTGTTCTAAAGAAATGTTACATCACTGAGGAGCAAAATGAAATAGTGAATAACTTGATTGAAATGACAAATCATCTAAGTTTTTCCTCTTATGCCAGGAAAATGTTATTTAAGAGCTCGCCTATTTATCTTCAATTTGATTTTGAATCTTATCATGACTTTATATTTCAAGTTAGAAGAATTATCAATAACTTACGTCAGTTAGAAAGAATAGCAGAACAAAGTGAGGATTTGGATAATGTAAGGATATTTCACTACTGCGTTGAGCTGATGATAGAATATGAAAAGAAGACAAGTAAACAAGTGAAAGAACTTGTAAAACGACTAAATAAGAAAACGAGG

SEQ ID NO: 17722 - protein, 119 aa, Streptococcus agalactiae
MSRYRTVLKKCYITEEQNEIVNNLIEMTNHLSFSSYARKMLFKSSPIYLQFDFESYHDFIFQVRRIINNLRQLERIAEQSEDLDNVRIFHYCVELMIEYEKKTSKQVKELVKRLNKKTR

SEQ ID NO: 17723 - protein, 837 aa, Streptococcus agalactiae
ATGAATGGTGTTCAGTGGATCAAGATAACAACAGATATATTTGATGATGAAAAAATTCAGCTAATAGAATCAATGCCAGAAGGAGATACTCTTATTGTAATATGGTTTAAAATTCTGGTGCTTGCAGGAAAGCAAAATAATAGTGGCATATTAAGTCTAGGGAACAAGGTTTATTACACAGAAGAGATGCTTTCAACAGTGTTTAGACGAAAGGCTACATCTGTAAAATTAGCTCTCAGCATGTTTGAAGAATTTGGCATGATAGAAATCATAGATGGCGCTATTACCATTCCAAAATGGGAGAAACATCAGAATATAGATGGACTAGAAAAGATTAGAAAACAAACTAGGGAACGTGTTGCTCGTCATAGACAAAAACAAAAAGCACTAATTACAGGCGAGCCACAACTCGTTTTAGACTGTAACGTTACAGTAACGGATGAAAATGATAATGTAACGCAAGAGATTAAGAACAAGAGTAAGAATAAGAAAGAGATTGAGAATATACTGGATAATAGTTCTAGAAAGCCTGAAACTTATATTCCACCCAAATATTATTCTTTGTTAGAATCCATTTCTTATAAGTACAATGATAGATTTTTGTATCCTAACAATTACACTTTAACACATGATCAGAAGATGAAGATAGGCGAGTATTTGGCTAGTGGGTATGTAACTAGTGATGAAGTCATTAGCATGATTGAACGGATTCCTGAGGATGCGACGTCTCCTTTGGCGTATTTATTTAAGTCTATGGAGAATTTAAAGCAGGAACGTATGCTGGAGTGCAAAGCTATTGCCCATGAAAATGCCCGAAAGAAGTATATGATAAATGAG

SEQ ID NO: 17724 - protein, 279 aa, Streptococcus agalactiae
MNGVQWIKITTDIFDDEKIQLIESMPEGDTLIVIWFKILVLAGKQNNSGILSLGNKVYYTEEMLSTVFRRKATSVKLALSMFEEFGMIEIIDGAITIPKWEKHQNIDGLEKIRKQTRERVARHRQKQKALITGEPQLVLDCNVTVTDENDNVTQEIKNKSKNKKEIENILDNSSRKPETYIPPKYYSLLESISYKYNDRFLYPNNYTLTHDQKMKIGEYLASGYVTSDEVISMIERIPEDATSPLAYLFKSMENLKQERMLECKAIAHENARKKYMINE

SEQ ID NO: 17725 - protein, 279 aa, Streptococcus agalactiae
ATGTCGGAAACTACTTTAGTTGTCCAGCTTCCTAAAGAATTAGAGAAGCAATTACGTGCTCACTATGATGAGATGATTTCAAATGCTGTAGCAAGAGTATTTGAAGATAAAGAACTTTATAAACCCATGGTTCGTATGTCAGGTTTGTCTAGGTGGTTAGATGTATCTACGACAACAATCCAAAAATGGACGAAAGAAGGAATGCCAACCATGGTGATTGATGGAGTGACTTTATACGATAAAAGAGCAGTAACACGATGGTTGAAGCAATATGAAAGA

SEQ ID NO: 17726 - protein, 93 aa, Streptococcus agalactiae
MSETTLVVQLPKELEKQLRAHYDEMISNAVARVFEDKELYKPMVRMSGLSRWLDVSTTTIQKWTKEGMPTMVIDGVTLYDKRAVTRWLKQYER

SEQ ID NO: 17727 - protein, 516 aa, Streptococcus agalactiae
ATGACGAATCATATTACTAAACTGATAGAAAATAGCGGAAAAAAATTGACAGAAATTAGCGAAGCTACAGATATAGCCTATCCTACACTTTCTGGATACAATCAAGGAATCCGCAAACCTAAAAAAGATAATGCTGAAAAATTGGCAAAATACTTTAATGTTTCCGTCGCTTACATTATGGGACTTGATAGCAACCCACATGCTCCATCAAATCTTAAAATTGTTACAGATAGTTTCAAAACATCTAAAATTGGTTCTGTGACACCTTTTAAAAGCGATATGGAGAAGTTAAAGAAAAGTATCGAATTTGGCGAAAGGGCATTAACACTACCACTTGATGATAGTTTTTCAGATGAATTTCGTCATATATTCTCAGAATACCTAGCTGAGAAAAACAAACGTTTTATGTCTGAGTTTATAGACTATATGAATCACCAAAATAAAGATTCTAAGGTTTGGCAGAGCTGGATTAAAACAGACGAATACGCTATCCGCCAAGAAGATAGAAAAAATAGA

SEQ ID NO: 17728 - protein, 172 aa, Streptococcus agalactiae
MTNHITKLIENSGKKLTEISEATDIAYPTLSGYNQGIRKPKKDNAEKLAKYFNVSVAYIMGLDSNPHAPSNLKIVTDSFKTSKIGSVTPFKSDMEKLKKSIEFGERALTLPLDDSFSDEFRHIFSEYLAEKNKRFMSEFIDYMNHQNKDSKVWQSWIKTDEYAIRQEDRKNR

SEQ ID NO: 17729 - protein, 779 aa, Streptococcus agalactiae
ATGTCTATACACAAATACAAAACAAAAAAAGGAATCCTATACTATGTTAGCTTTTACATTGGCTTAGATGCTTATGGAAAGAAAAAAAGGCACTTAAAGAGAGGGTTCAAAACAAAAAAAGAGGCAAATTGTACGAAGCTCGTTTAGAAGCTGGTGTCGTTTCCCCCACAGTAAATACCGACAAACCTAACCCCAAAGTCACTTATAAAGAACTTTATCAAGAATGGTTTAAGGCCTATGTTGGTACCGTTGAAGAAACAACTTCTTCCCAAACTAAGAATATCTATCGAATACATATTCTACCAATATTTGGCGATAAATTTATTGACCAAATCAGTCCTTTAGACTGTCAAAACTTTATTACACAAAAATCTCAGACTTTCAAAAATATCAAACAGATAAAATCCTATACCTCAAAAATTTTTGATTTTGCAATCAACATGAACTACATTGATCGAAATCCAATGAAGAATGTTATCATGCCTAAAATCAAAAAAACTAAATCAGATAATTTTTGGTCTCTGGAGGAATTACATCATTTCCTTGATATAGTGAAAGAAACTGAGCCATTTAAACATTTTGCTTTATTTAGACTGCTTGCATTTAGTGGACTACGAAAAGGGGAGTTATACGCTTTAAATGGGCTGATATTAACTTTGACAGCAATCTATTGAACATAGATAAAAGTCTAGGAAGAATTGACGGTAAAGCGATTGAAAGAGCACAAAGAATGAATCTTCAGTTGTACAATCTATCTTGATGATGAGACNNNNNTTAAT

SEQ ID NO: 17730 - protein, 261 aa, Streptococcus agalactiae
  VARIANT 213, 240, 250, 259, 260: Xaa = Any Amino Acid
MSIHKYKTKKGILYYVSFYIGLDAYGKKKRHLKRGFKTKKEAKLYEARLEAGVVSPTVNTDKPNPKVTYKELYQEWFKAYVGTVEETTSSQTKNIYRIHILPIFGDKFIDQISPLDCQNFITQKSQTFKNIKQIKSYTSKIFDFAINMNYIDRNPMKNVIMPKIKKTKSDNFWSLEELHHFLDIVKETEPFKHFALFRLLAFSGLRKGELYAXKWADINFDSNLLNIDKSLGRIDGKAIXKSTKNESSVXTIYLDDETXXN

SEQ ID NO: 17731 - DNA, 102 bp, Streptococcus agalactiae
ttggggaaattaaactttgaacaaagtatgtctttaatggcacagacagatatctttgtttacccatcaatgtatccagagggattaccaacctctatttta

SEQ ID NO: 17732 - protein, 34 aa, Streptococcus agalactiae
MGKLNFEQSMSLMAQTDIFVYPSMYPEGLPTSIL

SEQ ID NO: 17733 - DNA, 261 bp, Streptococcus agalactiae
  misc_feature 248, 249, 250, 251, 252: n = A,T,C or G
atgttctcaacaattgctcgtaaaaaaggtcttcgtttatcatatgtcagagcaattcagatcggtatgattggtttacttgcttttggtgcagttctttacgttggtaagcctggtgaccttagtataataagcgtaaatctttatactattttatttatcgttactaatattattgcgagatccgcttcacaagcacctgctagtgtagtattgactatgggagcagatacttctgtctatgaaannnnnttaattaat

SEQ ID NO: 17734 - protein, 87 aa, Streptococcus agalactiae
  VARIANT 83, 84: Xaa = Any Amino Acid
MFSTIARKKGLRLSYVRAIQIGMIGLLAFGAVLYVGKPGDLSIISVNLYTILFIVTNIIARSASQAPASVVLTMGADTSVYEXXLIN

SEQ ID NO: 17735 - DNA, 462 bp, Streptococcus agalactiae
atggattctaagacagctatcgaaactgctaaacacatacaggtcattaagaggacactctatgataacaagagagacttcttcgaactctttcctgttatcctaacggataatggtggggaattcgctagagtggatgatattgagatagatgtttgtggacagtctcaactcttcttttgtgaccctaatcggtctgaccagaaagcaagaatcgagaagaatcataccctcgtgagagacatactgcctaaggggacttccttcgacaacttgactcaagaggacattaatctggcactatctcatatcaacagcgttaagagacaggctctaaatggtaaaacggcttatgagctattctcttttacttacggaaaagacatcgcaagtatactcggtattgaggaaattactgcggaagacgtctgccaatctcccaaactattaaaagacaaaatc

SEQ ID NO: 17736 - protein, 154 aa, Streptococcus agalactiae; identical to SEQ ID NO: 2904

SEQ ID NO: 17737 - DNA, 90 bp, Streptococcus agalactiae
  misc_feature 77, 78, 79, 80, 81: n = A,T,C or G
ttggcagctcttgtagttgttggtgaccgtaatggttgtgttggttttggtacaggtaaagctcaagaagtaccagnnnnnttaattaat

SEQ ID NO: 17738 - protein, 30 aa, Streptococcus agalactiae
  VARIANT 26, 27: Xaa = Any Amino Acid
MAALVVVGDRNGCVGFGTGKAQEVPXXLIN

SEQ ID NO: 17739 - DNA, 321 bp, Streptococcus agalactiae
  misc_feature 312, 313, 314, 315, 316: n = A,T,C or G
gtggacggctgtgagttatcaaatccaaaaacagacatagacaaagcccgtgaacatatcggaatggtacttcaacacttcaatctttttccacatatgtcagttctcgaaaacatcacttttgctcttatagaacttggtaaagaatctaaagaagcagctgaaaagcatgggatggaattccttgaaaaagttggtttagccgataaagctaatgccaacccagatagtttatctggaggacaaaaacaacgtgtagctatcgcaagaagcttagcgatgaatccagatatcttactttttgacgatccnnnnnttaat

SEQ ID NO: 17740 - protein, 107 aa, Streptococcus agalactiae
  VARIANT 105, 106: Xaa = Any Amino Acid
MDGCELSNPKTDIDKAREHIGMVLQHFNLFPHMSVLENITFALIELGKESKEAAEKHGMEFLEKVGLADKANANPDSLSGGQKQRVAIARSLAMNPDILLFDDPXXN

SEQ ID NO: 17741 - protein, 96 aa, Streptococcus agalactiae
GTGCAACTAAAGGATGCTCAACAAACTGATTTAACAAGTATTCGAGCAAGTTTTACAACTCTATATGGGGTAGATAAAACTGNNNNNTTAATTAAT

SEQ ID NO: 17742 - protein, 32 aa, Streptococcus agalactiae
  VARIANT 28, 29: Xaa = Any Amino Acid
MQLKDAQQTDLTSIRASFTTLYGVDKTXXLIN

SEQ ID NO: 17743 - protein, 216 aa, Streptococcus agalactiae
ATGGCAGAAAGTGCTAATACAGTTCGATCGAATTCTTTTGTTTTAGAAGAATTCACTGAATTTCAAAGAGAAAAGTTAAACAATGGGGAGTCAGTTAAGTTTAATTTTTCTAAAGATGTTAAGAAAGGAAATCAAATCACCCAAGGTGGCTCAAATCTCCCAAATGATGGGAGTGTCTATCTCCAGCCTAATAAGTCCTTATNNNNNTTAATTAAT

SEQ ID NO: 17744 - protein, 72 aa, Streptococcus agalactiae
  VARIANT 68, 69: Xaa = Any Amino Acid
MAESANTVRSNSFVLEEFTEFQREKLNNGESVKFNFSKDVKKGNQITQGGSNLPNDGSVYLQPNKSLXXLIN

SEQ ID NO: 17745 - protein, 1169 aa, Streptococcus agalactiae
ATGAGTATTTAGAAGTAAAAAACTTAAGTCACGGTTTTGGTGATCGTGCTATTTTTGAGAATGTTTCTTTTCGCCTTTTAAAAGGTGAACATATAGGACTTATTGGTGCTAATGGTGAAGGAAAATCAACATTCATGTCAATTGTTACAGGTCATCTTCAACCTGATGAAGGAAAAATTGAATGGTCAAAATATGTAACTGCTGGTTACCTTGATCAACATACTGTGTTAGAAGAAGGTCAAACAGTTCGTGATGTTTTGCGAACAGCATTTGATGAACTTTTTAAAACAGAGGCACGTATCAATGATATATATATATCCATGGCAGATGATGGCGCAGATGTAGATAGCCTTATGGAAGAAGTTGGAGAACTACAAGATCGTTTAGAATCACGTGATTTTTATACGCTTGATGCTAAAATTGATGAAGTCGCACGGGCATTAGGAGTTATGGATTTTGGTATGGATTCTGATGTTACTGAATTATCTGGTGGTCAAAGGACAAAGGTCCTTTTAGCAAAACTGTTATTAGAAAAGCCAGATATCCTCCTGCTTGATGAGCCTACAAACTACCTTGATGCTGAACACATTGATTGGTTAAAACGCTATTTACAAAATTATGAAAATGCTTTTGTTTTAATCTCACACGATATTCCATTTTTGAACGATGTTATCAATATTGTCTATCATGTTGAAAATCAAGATTTAGTAAGATATTCCGGTGATTATACTAATTTTGAATCAGTCTATGCAATGAAAAAGGCTCAATTAGAAGCAGCCTATGAACGTCAACAAAAGGAAATAGCTGATTTACAAGATTTTGTAATCGTAATAAAGCACGCGTTGCAACACGTAATATGGCAATGTCTCGTCAAAAGAAACTAGACAAAATGGATATTATTGAGTTACAAGCAGAGAAACCAAAGCCAAGTTTTGAATTTAAAGAATCTCGCACACCAGGACGTTTTATTTTCCAAGCTAAAGATCTTCAAATTGGATATGATCGTGCTTTAACAAAACCTCTAAACCTAACATTTGAACGTAATCAAAAAATAGCTATTGTTGGAGCAATGGGATAGGAAAAACAACATTACTTAAGAGTTTACTAGGTATTATCCCCCCTATTTCTGGTAGTTGAACGAGGTGATTTTATTGATTTANNNNNTTAAT

SEQ ID NO: 17746 - protein, 391 aa, Streptococcus agalactiae
  VARIANT 275, 388, 389, 390: Xaa = Any Amino Acid
MSILEVKNLSHGFGDRAIFENVSFRLLKGEHIGLIGANGEGKSTFMSIVTGHLQPDEGKIEWSKYVTAGYLDQHTVLEEGQTVRDVLRTAFDELFKTEARINDIYISMADDGADVDSLMEEVGELQDRLESRDFYTLDAKIDEVARALGVMDFGMDSDVTELSGGQRTKVLLAKLLLEKPDILLLDEPTNYLDAEHIDWLKRYLQNYENAFVLISHDIPFLNDVINIVYHVENQDLVRYSGDYTNFESVYAMKKAQLEAAYERQQKEIADLQDFXNRNKARVATRNMAMSRQKKLDKMDIIELQAEKPKPSFEFKESRTPGRFIFQAKDLQIGYDRALTKPLNLTFERNQKIAIVGANGIGKTTLLKSLLGIIPPISGMLNEVILLIXXXN

SEQ ID NO: 17747 - protein, 90 aa, Streptococcus agalactiae
TTGATAAAGGTATTAGATAGCCAACCAGCCATAAGTGGTCATGTTTCACCTTCGCCATCGCCAATAACAGTAGCAGCAATNNNNNTTAAT

SEQ ID NO: 17748 - protein, 30 aa, Streptococcus agalactiae
  VARIANT 27, 28, 29: Xaa = Any Amino Acid
MIKVLDSQPAISGHVSPSPSPITVAAXXXN

SEQ ID NO: 17749 - protein, 153 aa, Streptococcus agalactiae
ATGGCTGGTTGGCTATCTAATACCTTTATCAATCCAGTAAATGATGGTGCTGTTCTACCAATCTTCTATTTAAATGGTGGTAAAATCCATAACCCAACTATCTTTGAACGTAACACATATGAAGAATTATCTCAGTTTTTTGAAGGANNNNNT

SEQ ID NO: 17750 - protein, 51 aa, Streptococcus agalactiae
  VARIANT 50, 51: Xaa = Any Amino Acid
MAGWLSNTFINPVNDGAVLPIFYLNGGKIHNPTIFERNTYEELSQFFEGXX

SEQ ID NO: 17751 - DNA, 636 bp, Streptococcus agalactiae
  misc_feature 631, 632, 633, 634, 635: n = A,T,C or G
gtgacttacccagatggttcaaaagatactgtagatgtgactgttaaggttgtcgatccacgtacagatgccgataagaatgatccagcaggtaaagatcagcaagtcaatgtaggtgagacaccgaaggcagaagattctattggtaacttaccagatcttccgaaaggtacaacagtagcctttgaaactccagttgatacggcaacaccgggagacaaaccagcaaaagttgttgtgacttacccagatggttcaaaagatactgtagatgtgactgttaaggttgtcgatccacgtacagatgccgataagaatgatccagcaggtaaagatcagcaagtcaatgtaggtgagacaccgaaggcagaagattctattggtaacttaccagatcttccgaaaggtacaacagtagcctttgaaactccagttgatacggcaacaccgggagacaaaccagcaaaagttgttgtgacttacccagatggttcaaaagatactgtagatgtgactgttaaggttgtcgatccacgtacagatgccgataagaatgatccagcaggtaaagatcagcaagtcaatgtaggtgagacaccgaagacagaagattctattggtaacttacccnnnnnt

SEQ ID NO: 17752 - protein, 212 aa, Streptococcus agalactiae
  VARIANT 211, 212: Xaa = Any Amino Acid
MTYPDGSKDTVDVTVKVVDPRTDADKNDPAGKDQQVNVGETPKAEDSIGNLPDLPKGTTVAFETPVDTATPGDKPAKVVVTYPDGSKDTVDVTVKVVDPRTDADKNDPAGKDQQVNVGETPKAEDSIGNLPDLPKGTTVAFETPVDTATPGDKPAKVVVTYPDGSKDTVDVTVKVVDPRTDADKNDPAGKDQQVNVGETPKTEDSIGNLPXX

SEQ ID NO: 17753 - DNA, 648 bp, Streptococcus agalactiae
atggcattgtgcaaatccctacatggggtgagagtgcctactggcttctcctcaaacattaagcgactagtgtcgatgaaggatctgtcgcttttaagctacaattcccatgactgtcatgtaatgctcacagtattcctcgccattgcaattagagcagtcgaaccagttcacataaagctggtcatcacaaagctgtgttatttcttcaattccatatctcagaaagtaattgatcctgaagagttaggtcctctccgggctttcgctatacagacagtgtgtgagcttgagatgtgtttccctccatcatttttcgatatgatgcaacacctcatagttcatatcgtgcctcagataattgcacttgggtccctgtacctgcatcagatgtggcctttcgaaagatacatgtccattttaaaagactacgtacggaaccgcgcccacccagagggatccatgatagagggatacacaactgaggaggtcgttgagtgttgcattgattacctaaaagatgggaaagcaattggtttaccggtacctcaacatgaaggtagattatcacggaaaggaacaaaagggaagaaaagaatccacgacaatgactacaaaaaagtgaaagatgctcatttcactgtgctg

SEQ ID NO: 17754 - protein, 216 aa, Streptococcus agalactiae
MALCKSLHGVRVPTGFSSNIKRLVSMKDLSLLSYNSHDCHVMLTVFLAIAIRAVEPVHIKLVITKLCYFFNSISQKVIDPEELGPLRAFAIQTVCELEMCFPPSFFDMMQHLIVHIVPQIIALGSLYLHQMWPFERYMSILKDYVRNRAHPEGSMIEGYTTEEVVECCIDYLKDGKAIGLPVPQHEGRLSRKGTKGKKRIHDNDYKKVKDAHFTVL

SEQ ID NO: 17755 - DNA, 105 bp, Streptococcus agalactiae
  misc_feature 96, 97, 98, 99, 100: n = A,T,C or G
ttgaaacgtgctcatcaatcaatgaataacgttgctatgctagaacctattacaaaatgttctgctgaggttcatgaccctaatagtttgtcagannnnnttaat

SEQ ID NO: 17756 - protein, 35 aa, Streptococcus agalactiae
  VARIANT 32, 33, 34: Xaa = Any Amino Acid
MKRAHQSMNNVAMLEPITKCSAEVHDPNSLSXXXN

SEQ ID NO: 17757 - DNA, 159 bp, Streptococcus agalactiae
  misc_feature 150, 151, 152, 153, 154: n = A,T,C or G
atgcgatgtccagttagcaaagtcgttaaaaacgaagctggagctaaatggttacgcgaccatgaaaaaatttatcatattgttaaagaggtaacgtctgtacttgacattccattaacagtaataatgcgtacaggatggtctgactcnnnnnttaat

SEQ ID NO: 17758 - protein, 53 aa, Streptococcus agalactiae
  VARIANT 51, 52: Xaa = Any Amino Acid
MRCPVSKVVKNEAGAKWLRDHEKIYHIVKEVTSVLDIPLTVIMRTGWSDSXXN

SEQ ID NO: 17759 - DNA, 1149 bp, Streptococcus agalactiae
atggctttatccattcttccttatttgctaacaacagcagccaaaaaacaaggggttgatgataaaatcgttattttaacagcaacatcaggtgacactggtaaggcagcgatggcaggttttgcagatgttccaggaactgagattattgtattttatcctaaacatggtgttagttatattcaagaattgcagatgataacacaagccgggcaaaatacccatgttgttgcgattgaaggaaattttgatgatgcacagacttcggttaaagaaatgttcaataattcccttcttcgatcaaaattatcacagcagcatatgcagttatcatcagccaattcaatgaacatcggtcgccttgttcctcaaattgtttactatatatatgcatatgctcaattagttaagtcaaaggaaatctcaattggtcaactaattaattttagtgtacctacaggaaattttggtaatattttagcagcatattatgctagtcaaattggattacctgttaccaaactcatttgtgcctcaaatgataataacgttctaacagatttttttaagacacaaacctacgataaaaatcgagaatttaaagtgacatcaagtccctctatggatattttggtctcctctaatctagaacgattaatctttcaccttttaggcgatgatgcagaaacgactaaaaaattaatggaagatttagtgactactggggagtatgccttagaggctaggcaagcaaatattttagagagctttgtagcgggatttgcgacagaacaatttgttgaattagacatcaaacgtttatttgaccagtatcagtatatagaggatccgcatacagctgtagcatcagctgtttatcaagcttatcagacagaaactaaagatcaaactccaacagtaattgtgtcaacagcaagtccttataagttcccgtgtgttgttacaaaggctattacaaataaagaagagatacaggatttcgctgctatttcaatcttaaacgatttgtcaggtgtttctttacctaaggcggttacagatctacaaaaggccgaagtaatccatagaatggtagtacctacctcaaatatgcgagaaacggttgaagagtgtctaggtttgaaacaa

SEQ ID NO: 17760 - protein, 383 aa, Streptococcus agalactiae
MALSILPYLLTTAAKKQGVDDKIVILTATSGDTGKAAMAGFADVPGTEIIVFYPKHGVSYIQELQMITQAGQNTHVVAIEGNFDDAQTSVKEMFNNSLLRSKLSQQHMQLSSANSMNIGRLVPQIVYYIYAYAQLVKSKEISIGQLINFSVPTGNFGNILAAYYASQIGLPVTKLICASNDNNVLTDFFKTQTYDKNREFKVTSSPSMDILVSSNLERLIFHLLGDDAETTKKLMEDLVTTGEYALEARQANILESFVAGFATEQFVELDIKRLFDQYQYIEDPHTAVASAVYQAYQTETKDQTPTVIVSTASPYKFPCVVTKAITNKEEIQDFAAISILNDLSGVSLPKAVTDLQKAEVIHRMVVPTSNMRETVEECLGLKQ

SEQ ID NO: 17761 - protein, 225 aa, Streptococcus agalactiae
GTGAGTAAAAAAGATAAGAAAATTGAAATTCAAATTTTAGACGCTCAAGTAACAGTTAATGGAACTAAGGTTGATGGATACCAACTCGTTATTGGAAAAAAAATTGTAGGTCAAATTGCAGAGCTAGATTCTAAATTGCTGTGATTAAAGGTGAGCAAGTGAGTGATTCTATAAAAATTAGATCAAGCTATGGGAAATATTATTGAAGAATATAATCTTAATCGC

SEQ ID NO: 17762 - protein, 76 aa, Streptococcus agalactiae
  VARIANT 56, 61: Xaa = Any Amino Acid
MSKKDKKIEIQILDAQVTVNGTKVDGYQLVIGKKIVGQIAELDSKFAVIKGEQVSXFYKNXDQAMGNIIEEYNLNR

SEQ ID NO: 17763 - protein, 105 aa, Streptococcus agalactiae
TTGGGGTATAGCCAAGCGGTAAGGCAAGGGACTTTGACTCCCTCATGCGTTGGTTCGAATCCAGCTACAACAGTCAAAGGTATCAAACTTTNNNNNTTAATTAAT

SEQ ID NO: 17764 - protein, 35 aa, Streptococcus agalactiae
  VARIANT 31, 32: Xaa = Any Amino Acid
MGYSQAVRQGTLTPSCVGSNPATTVKGIKLXXLIN

SEQ ID NO: 17765 - protein, 168 aa, Streptococcus agalactiae
ATGATATCACGTAAAGTTGCGCTTGTGACGGGGGCATCTGCTGGTTTTGGTGCAGCTGTTGTTACTAAATTAGTTTCAGATGGTTATAGCGTTATTGGTTGTGCTCGTCGAATGGATAAATTAAAATGCCTTGGAGAAAAGTTTTCAGAGGGTTACTTTTATCCACTT

SEQ ID NO: 17766 - protein, 56 aa, Streptococcus agalactiae
MISRKVALVTGASAGFGAAVVTKLVSDGYSVIGCARRMDKLKCLGEKFSEGYFYPL

SEQ ID NO: 17767 - protein, 423 aa, Streptococcus agalactiae
ATGGATATTACAAGTAGAGAATCGGTTGACAAAGCTTTAGAAAGTCTGCCTAAAAATTTGCAATCAATTGATTTGTTGGTTAATAATGCAGGTTTAGCACTTGGATTGGATAAATCATATGAAGCTGATTTTGAAGATTGGATGACTATGATTAATACTAACGTTGTAGGATTAATTTACTTGACACGATGCATTTTACCGAAAATGGTAGAAGTTAATAGAGGGTTAATTATCAATTTGGGATCAACTGCAGGAACAATTCCTTATCCAGGAGCTAATGTCTATGGCGCATCAAAAGCTTTTGTAAAACAATTTGCTCTCAACTTGCGTGCCGATTTAGCTGGAACTAAAATCAGAGTTACTAACCTAGAACCCGGTTTATGTGAAGGGACAGAATTTCAACTTACGTTCAAAAGGAGATCA

SEQ ID NO: 17768 - protein, 142 aa, Streptococcus agalactiae
MDITSRESVDKALESLPKNLQSIDLLVNNAGLALGLDKSYEADFEDWMTMINTNVVGLIYLTRCILPKMVEVNRGLIINLGSTAGTIPYPGANVYGASKAFVKQFALNLRADLAGTKIRVTNLEPGLCEGTEFSTVRFKRRS

SEQ ID NO: 17769 - protein, 330 aa, Streptococcus agalactiae
GTGGATGATATTGAGATAGATGTTTGTGGACAGTCTCAACTCTTCTTTTGTGACCCTAATCGGTCTGACCAGAAAGCAAGAATCGAGAAGAATCATACCCTCGTGAGAGACATACTGCCTAAGGGGACTTCCTTCGACAACTTGACTCAAGAGGACATTAATCTGGCACTATCTCATATCAACAGCGTTAAGAGACAGGCTCTAAATGGTAAAACGGCTTATGAGCTATTCTCTTTTACTTACGGAAAAGACATCGCAAGTATACTCGGTATTGAGGAAATTACTGCGGAAGACGTCTGCCAATCTCCCAAACTATTAAAAGACAAAATC

SEQ ID NO: 17770 - protein, 110 aa, Streptococcus agalactiae
MDDIEIDVCGQSQLFFCDPNRSDQKARIEKNHTLVRDILPKGTSFDNLTQEDINLALSHINSVKRQALNGKTAYELFSFTYGKDIASILGIEEITAEDVCQSPKLLKDKI

SEQ ID NO: 17771 - DNA, 678 bp, Streptococcus agalactiae
atgacaaaacacaaacacctaactctctcagaccgtaatgacatccaatctggtttggatagaggagaaacctttaaagccatcgggcttaatctactgaaacaccctactactatcgcaaaagaagtcaaacgaaataagcaactaagagaatcaaccaaagactgcctagactgtccgctactaagaaaagctccctatgtttgtaatgggtgtccaaagaggaggatcaactgtggttacaagaagaccttctatcttgctaagcaagctcaaagaaactatgaaaaacttttagttgaatctagagaaggaatccctttgaacaaagagaccttctggaaaatagatagagtgctttctaatggggtcaagaagggccaacgtatctatcatatcctcaaaaccaacgatctakaagtgagttcttcaaccgtttatcgacacatcaagaaaggctacctatccatcacaccaatcgacctacccagagctgtgaagttcaaaaaaaggcgaaagagcacactccctcctattccaaaagcgattaaagaagggcgacggtacgaggattttatagaacrcatgaaccaatcagagctgaactcctggsttgaaatggacacggttattggacggattggtggaaaggtcttctcaccttcatgtcgccttctg

SEQ ID NO: 17772 - protein, 226 aa, Streptococcus agalactiae
  VARIANT 140, 195, 205: Xaa = Any Amino Acid
MTKHKHLTLSDRNDIQSGLDRGETFKAIGLNLLKHPTTIAKEVKRNKQLRESTKDCLDCPLLRKAPYVCNGCPKRRINCGYKKTFYLAKQAQRNYEKLLVESREGIPLNKETFWKIDRVLSNGVKKGQRIYHILKTNDLXVSSSTVYRHIKKGYLSITPIDLPRAVKFKKRRKSTLPPIPKAIKEGRRYEDFIEXMNQSELNSWXEMDTVIGRIGGKVFSPSCRLL

SEQ ID NO: 17773 - DNA, 186 bp, Streptococcus agalactiae
atgaaaaaagaaagtatatctattaaagatatcttgtggtttattattccgtcgttatttggagtattattattaatgactccatttaaatataatggtatgacaacagtagctrtctctgtaatctctaagacaattaatcaatggattaacgctgtttttcctaatacattatattattttaaa

SEQ ID NO: 17774 - protein, 62 aa, Streptococcus agalactiae
  VARIANT 39: Xaa = Any Amino Acid
MKKESISIKDILWFIIPSLFGVLLLMTPFKYNGMTTVAXSVISKTINQWINAVFPNTLYYFK

SEQ ID NO: 17775 - DNA, 123 bp, Streptococcus agalactiae
atgactagtgcaacaggaaatgacttatatgctatcagtgatgaaagctatctctaccttgcgattaaaacaaaacctgaaaaactaaaagaaaaacggttattaccaataaatattacacca

SEQ ID NO: 17776 - protein, 41 aa, Streptococcus agalactiae
MTSATGNDLYAISDESYLYLAIKTKPEKLKEKRLLPINITP

SEQ ID NO: 17777 - DNA, 804 bp, Streptococcus agalactiae
  misc_feature 799, 800, 801, 802, 803: n = A,T,C or G
gtgacttacccagatggttcaaaagatactgtagatgtgactgttaaggttgtcgatccacgtacagatgccgataagaatgatccagcaggtaaagatcagcaagtcaatgtaggtgagacaccgaaggcagaagattctattggtaacttaccagatcttccgaaaggtacaacagtagcctttgaaactccagttgatacggcaacaccgggagacaaaccagcaaaagttgttgtgacttacccagatggttcaaaagatactgtagatgtgactgttaaggttgtcgatccacgtacagatgccgataagaatgatccagcaggtaaagatcagcaagtcaatgtaggtgagacaccgaaggcagaagattctattggtaacttaccagatcttccgaaaggtacaacagtagcctttgaaactccagttgatacggcaacaccgggagacaaaccagcaaaagttgttgtgacttacccagatggttcaaaagatactgtagatgtgactgttaaggttgtcgatccacgtacagatgccgataagaatgatccagcaggtaaagatcagcaagtcaatgtaggtgagacaccgaaggcagaagattctattggtaacttaccagatcttccgaaaggtacaacagtagcctttgaaactccagttgatacggcaacaccgggagacaaaccagcaaaagttgttgtgacttacccagatggttcaaaagatactgtagatgtgactgttaaggttgtcgatccacgtacagatgccgataagaatgatccannnnnt

SEQ ID NO: 17778 - protein, 268 aa, Streptococcus agalactiae
  VARIANT 267, 268: Xaa = Any Amino Acid
MTYPDGSKDTVDVTVKVVDPRTDADKNDPAGKDQQVNVGETPKAEDSIGNLPDLPKGTTVAFETPVDTATPGDKPAKVVVTYPDGSKDTVDVTVKVVDPRTDADKNDPAGKDQQVNVGETPKAEDSIGNLPDLPKGTTVAFETPVDTATPGDKPAKVVVTYPDGSKDTVDVTVKVVDPRTDADKNDPAGKDQQVNVGETPKAEDSIGNLPDLPKGTTVAFETPVDTATPGDKPAKVVVTYPDGSKDTVDVTVKVVDPRTDADKNDPXX

SEQ ID NO: 17779 - DNA, 138 bp, Streptococcus agalactiae
  misc_feature 129, 130, 131, 132, 133: n = A,T,C or G
atgcgtggaagtaaggaattgccaaaaacaagtcaaccacctgtaggtgtttttgcagaaatttatgaaaaattaatgaatgaaggtgcggaacatatcattgcaattcatttaacgcatacacttccnnnnnttaat

SEQ ID NO: 17780 - protein, 46 aa, Streptococcus agalactiae
  VARIANT 44, 45: Xaa = Any Amino Acid
MRGSKELPKTSQPPVGVFAEIYEKLMNEGAEHIIAIHLTHTLPXXN

SEQ ID NO: 17781 - protein, 201 aa, Streptococcus agalactiae
ATGACACAAGGTACAGTGAAATGGTTTAACTCAGAAAAAGGTTTTGGCTTTATTTCTAGCGAAACTGGAACAGACGTCTTCGCTCATTTTTCAGAGATTAAAGTTGATGGCTTCAAAACTCTTGAAGAAGGACAAAAAGTAACATTTGATATTCAAGATGGTCAAAACGTGGACCACAAGCAACAAATATCNNNNNTTAAT

SEQ ID NO: 17782 - protein, 67 aa, Streptococcus agalactiae
  VARIANT 65, 66: Xaa = Any Amino Acid
MTQGTVKWFNSEKGFGFISSETGTDVFAHFSEIKVDGFKTLEEGQKVTFDIQDGQNVDHKQQISXXN

SEQ ID NO: 17783 - protein, 138 aa, Streptococcus agalactiae
GTGTCATTTGTTTATTACCTTTCTAAAAATGTTACTGTAAAAAATAAAAAAGGTAAAAATGTTAAACAAAAATACAACCTTTCCCAAAAAACTTTTAATTTTAAACCGCCCTTTCCCCCCCCCCTTAANNNNNTTAAT

SEQ ID NO: 17784 - protein, 46 aa, Streptococcus agalactiae
  VARIANT 43, 44, 45: Xaa = Any Amino Acid
MSFVYYLSKNVTVKNKKGKNVKQKYNLSQKTFNFKPPFPPPLXXXN

SEQ ID NO: 17785 - protein, 522 aa, Streptococcus agalactiae
GTGGTGCAATGTCTTGTCAGCTTTGAGTCGATATTTCCACCTTCATTTTTCAATATAATGACGCATCTGCTTTGTCACCTTGTCAAAGAGATCGGTATTCTCGGGCCTGTGTACCTAAACAACATGTTTCCTTTCGAGAGGTACATGGGCGTTCTGAAGAAGTATGTTCATAACCGTGCTTGTCCAGAGGCAAGCATCGCCAAGGGGTATGGAACAGAGAAGGTCATTGAATTCTGCGTAGAATTTATCGAAGACCTTCGCCCAATCGGTGTATCTGAATCACGCCATGAAGGGATACTATGGGGAAAGGGGACTTTCGGAAGGAAAGCAATAATGACGGTAGATAACAATTTATTCCGTAAAGCCCATTTCACGGTTCTGCAACAATCTTCATTGGTGGCTCCTTACATCGAGGAGCACTTGGCTCTTGTTCACGCCAGAAACATCAGTAAGTCCGATGCATGGATTACACGGCATCAAATTGATCTTTCCCCGCATGGTGCGACAACATCTCACNNNNNT

SEQ ID NO: 17786 - protein, 174 aa, Streptococcus agalactiae
  VARIANT 173, 174: Xaa = Any Amino Acid
MVQCLVSFESIFPPSFFNIMTHLLCHLVKEIGILGPVYLNNMFPFERYMGVLKKYVHNRACPEASIAKGYGTEKVIEFCVEFIEDLRPIGVSESRHEGILWGKGTFGRKAIMTVDNNLFRKAHFTVLQQSSLVAPYIEEHLALVHARNISKSDAWITRHQIDLSPHGATTSHXX

SEQ ID NO: 17787 - protein, 741 aa, Streptococcus agalactiae
TTGTGTTTTACAGCCTGTTTTTTTGCTGCAGCTTATTATCTCGCTATTAGACCAAATGGTATATTAGATAGTGTTGGAAAAATCTTAACGCCTGTTTTTGCCTTTTTAATTCTCTCTTTGGTTGTTGTTGGAGCTATTGCTTATGGAAACTTGGAGAGTGCTAAGGCGAGTGCTGACTATGCAGGAAAAGCGTTTGGAAGTGGTGTCTTAGCAGGCTATAATACACTTGATGCACTTGCAGCAGTTGCTTTTTGTCTAGTAGCAACAGAAACGCTTAAAAAGTTTGGTTTTAAAACTAAAAAAGAATATTTATCAACCATTTGGATTGTTGGAATTGTTACTAGTTTAGCATTTAGTATTTTATATATTGGCTTAGGTTTTTTAGGGAATAAGTTTCCTGTCCCAGCTGATATTTTAGCTGACCCAAATGTTAATAAAGGAGCTTATGTATTATCACAAGCATCTTATAAATTATTTGGAAATTTTGGTCGTTATTTCTTGAGTATTATGGTAACATTGACATGCTTTACAACAACAGTTGGGCTTATTGTGTCAGTATCTGAATTTTTTGATAAGAACTTTCGTTTTGGGAATTATAAATTATTTGCTACTGTTTTTACTTTGATTGGCTTTTTAATTGCTAATCTTGGTTTAAATGCTGTAATTACTTTTTCAGTTCCTGTGCTAACTTTATTGTATCCGAATGGTATTGGTATTGGCCTAATTATTTTGATANNNNNT

SEQ ID NO: 17788 - protein, 247 aa, Streptococcus agalactiae
  VARIANT 246, 247: Xaa = Any Amino Acid
MCFTACFFAAAYYLAIRPNGILDSVGKILTPVFAFLILSLVVVGAIAYGNLESAKASADYAGKAFGSGVLAGYNTLDALAAVAFCLVATETLKKFGFKTKKEYLSTIWIVGIVTSLAFSILYIGLGFLGNKFPVPADILADPNVNKGAYVLSQASYKLFGNFGRYFLSIMVTLTCFTTTVGLIVSVSEFFDKNFRFGNYKLFATVFTLIGFLIANLGLNAVITFSVPVLTLLYPNGIGIGLIILIXX

SEQ ID NO: 17789 - protein, 459 aa, Streptococcus agalactiae
GTGACGGAGTTTGCTTTACCTGAAGGGAAACTTTATCTATCGCCTGTTCTTGATGGCTATAACAGTGAGATAATTGATTTTACCCTGTCTCGGTCTCCTGCCTTGAAACAGGTTCAAACCATGCTTGAGAGGGCTTTTCCTGCGGCTTCATACAGCGAAACCATTCTCCACAGCGACCAAGGCTGGCAGTACCAGCACAAGTCCTACCATCAATTTCTGGAGGACAAAGGCATTCGTCCTTCTATGTCACGGAAGGGGAACAGTCCTGACAACGGTATGATGGAATCTTTCTTTGGGATTCTAAAGTCTGAGATGTTCTATGGCTTGGAGAAGTCTTACAAATCACTTGATGACCTTGAGCAAGCTATCACAGATTACATTTTTTACTACAACAACAAGCGAATCAAAGCAAAACTAAAAGGACTTAGTCCTGTGCAATACAGAACTAAATCCTTCACT

SEQ ID NO: 17790 - protein, 153 aa, Streptococcus agalactiae
MTEFALPEGKLYLSPVLDGYNSEIIDFTLSRSPALKQVQTMLERAFPAASYSETILHSDQGWQYQHKSYHQFLEDKGIRPSMSRKGNSPDNGMMESFFGILKSEMFYGLEKSYKSLDDLEQAITDYIFYYNNKRIKAKLKGLSPVQYRTKSFT

SEQ ID NO: 17791 - DNA, 96 bp, Streptococcus agalactiae
atggctaagaaacctgctgaagaagaaattattgaagttgttgaaccaacacaagagcaattacttgctgaaatccgcgacttactcgctaacaaa

SEQ ID NO: 17792 - protein, 32 aa, Streptococcus agalactiae
MAKKPAEEEIIEVVEPTQEQLLAEIRDLLANK

SEQ ID NO: 17793 - DNA, 207 bp, Streptococcus agalactiae
  misc_feature 202, 203, 204, 205, 206: n = A,T,C or G
atgttgagaatccaacttataaagaagtttgtagtaaaactactggacatacagaagctgttgaaattatttttaattcctgaaaaaatctcttatgcagatttagttgagttatattgggcacaaacagatccaacagacgcttttggtcagtttgaagatcgtggggggataattatcccgtcctggtcaatcctttttnnnnnt

SEQ ID NO: 17794 - protein, 69 aa, Streptococcus agalactiae
  VARIANT 68, 69: Xaa = Any Amino Acid
MLRIQLIKKFVVKLLDIQKLLKLFLIPEKISYADLVELYWAQTDPTDAFGQFEDRGGIIIPSWSILFXX

SEQ ID NO: 17795 - DNA, 435 bp, Streptococcus agalactiae
gtgacttacccagatggttcaaaagatactgtagatgtgactgttaaggttgtcgatccacgtacagatgccgataagaatgatccagcaggtaaagatcagcaagtcaatgtaggtgagacaccgaaggcagaagattctattggtaacttaccagatcttccgaaaggtacaacagtagcctttgaaactccagttgatacggcaacaccgggagacaaaccagcaaaagttgttgtgacttacccagatggttcaaaagatactgtagatgtgactgttaaggttgtcgatccacgtacagatgccgataagaatgatccagcaggtaaagatcagcaagtcaatgtaggtgagacaccgaaggcagaagattctattggtaacttaccagatcttccgaaaggtacaacagtagcctttgaaactcccagt

SEQ ID NO: 17796 - protein, 145 aa, Streptococcus agalactiae
MTYPDGSKDTVDVTVKVVDPRTDADKNDPAGKDQQVNVGETPKAEDSIGNLPDLPKGTTVAFETPVDTATPGDKPAKVVVTYPDGSKDTVDVTVKVVDPRTDADKNDPAGKDQQVNVGETPKAEDSIGNLPDLPKGTTVAFETPS

SEQ ID NO: 17797 - DNA, 693 bp, Streptococcus agalactiae
  misc_feature 680, 681, 682, 683, 684: n = A,T,C or G
atggccgagatcatgacgctgatcgccgaccgcacccgcctgccggtgatcatcgacgccgataccggcttcggcaacgcactgaacgcccagcgcaccatgcggctttatgaacgtgcaggcgcggcagccttgcaggtcgaggaccagacctatcccaagcgctgcggccacctgaaggacaaggcgctgatcccggctgccgagatggcaggcaagatcgcggccatggccgacgctcgccgttcggaccggacgctgatcatcgcccgcaccgatgcgatcgcggtcgaaggcttcgacgcggcgctggagcgggccgagacctatctggccgccggggcggatgtgttgttcgtcgaggcgccgcagaccgagacagagctttcaggcatagcggaccgttttgcggcgcgtgtgccgctgctcgccaacatggtcgagggaggtgcgacgccgatccgctcggccgaggcgttgcaggcgctgggcttccgcctcgtgatctttcccggtggcatcgtgcgggcgctcgcccatacggcgcgcgactattacaccagcctgcgcgcgcatggcaccacggcgccgttccgggaccggatgtatgattttgccggcctgaacgaggtgatggaaccaccgagatgctggagcgcggcaaacgctatgaccccggnnnnnttaattaat

SEQ ID NO: 17798 - protein, 231 aa, Streptococcus agalactiae
  VARIANT 227, 228: Xaa = Any Amino Acid
MAEIMTLIADRTRLPVIIDADTGFGNALNAQRTMRLYERAGAAALQVEDQTYPKRCGHLKDKALIPAAEMAGKIAAMADARRSDRTLIIARTDAIAVEGFDAALERAETYLAAGADVLFVEAPQTETELSGIADRFAARVPLLANMVEGGATPIRSAEALQALGFRLVIFPGGIVRALAHTARDYYTSLRAHGTTAPFRDRMYDFAGLNEVMEPPRCWSAANAMTPXXLIN

SEQ ID NO: 17799 - DNA, 654 bp, Streptococcus agalactiae
gtgacttacccagatggtcaaaaagatactgtagatgtgactgttaaggttgtcgatccacgtacagatgccgataagaatgatccagcaggtaaagatcagcaagtcaatgtaggtgagacaccgaaggcagaagattctattggtaacttaccagatcttccgaaaggtacaacagtagcctttgaaactccagttgatacggcaacaccgggagacaaaccagcaaaagttgttgtgacttacccagatggttcaaaagatactgtagatgtgactgttaaggttgtcgatccacgtacagatgccgataagaatgatccagcaggtaaagatcagcaagtcaatgtaggtgagacaccgaaggcagaagattctattggtaacttaccagatcttccgaaaggtacaacagtagcctttgaaactccagttgatacggcaacaccgggagacaaaccagcaaaagttgttgtgacttacccagatggttcaaaagatactgtagatgtgactgtwaaggttgtcgatccacgtacagatgccgataagaatgatccagcaggtaaagatcagcaagtcaatgtaggtgagacaccgaaggcagaagattctattggtaacttaccagatcttccgaaaaggtacaaccag

SEQ ID NO: 17800 - protein, 218 aa, Streptococcus agalactiae
MTYPDGQKDTVDVTVKVVDPRTDADKNDPAGKDQQVNVGETPKAEDSIGNLPDLPKGTTVAFETPVDTATPGDKPAKVVVTYPDGSKDTVDVTVKVVDPRTDADKNDPAGKDQQVNVGETPKAEDSIGNLPDLPKGTTVAFETPVDTATPGDKPAKVVVTYPDGSKDTVDVTVKVVDPRTDADKNDPAGKDQQVNVGETPKAEDSIGNLPDLPKRYNQ

SEQ ID NO: 17801 - protein, 357 aa, Streptococcus agalactiae
TTGAATAATAAAGGGATTATTATTTCTAAAAAATTAGCTCAATTTTATCATGTTAATACCGGTGATTTTATCCATTTATCTCATTCACAAACACTTCCTTCTAGAAAATTAAAAATAACAGGAGTTGTCAATGCGAATGTTGGTCACTATATTTTTATGACAAAACAATACTATCGAACTATTTTTAAGAAAGAAGCTAAAGATAACGCTTTTTTGGTTAAGTTAACCAAACATAAAATCGCAAATAACTTAGCAGAAAAACTTTTAGAAATTAATGGAGTTGAGTCTCTTACGCAAAATGCTCTTCAGCTGGCTAGTGTAGAAGCCCGTTGTGCGTTCTTTAGATGGCTCNNNNNT

SEQ ID NO: 17802 - protein, 119 aa, Streptococcus agalactiae
  VARIANT 118, 119: Xaa = Any Amino Acid
MNNKGIIISKKLAQFYHVNTGDFIHLSHSQTLPSRKLKITGVVNANVGHYIFMTKQYYRTIFKKEAKDNAFLVKLTKHKIANNLAEKLLEINGVESLTQNALQLASVEARCAFFRWLXX

SEQ ID NO: 17803 - protein, 150 aa, Streptococcus agalactiae
GTGGAGTCTTTGGTATCTGGGGCGCATCCTCAGGCAGCTCAAGTCACTTACTTTGGGCTTCATAGCCTTCAACATCGCGGTCAAGAAGGTGGCGGTATTGTTTCGAATGATAATGGGAAGCTCTATGGTTATCGAAATGTTGGGCTCCTT

SEQ ID NO: 17804 - protein, 50 aa, Streptococcus agalactiae
MESLVSGAHPQAAQVTYFGLHSLQHRGQEGGGIVSNDNGKLYGYRNVGLL

SEQ ID NO: 17805 - protein, 291 aa, Streptococcus agalactiae
GTGGTAACACAAGCGGTGACACCGCGTATGGAGTTGAATAGCACAACTACAATTCCTGAAAACCAATACTTTACAAGGACAGGTTACAACCTTATTGGTTGGCATCATGATAAGGATTTAGCTGATACAGGACGTGTGGAATTTACAGCAGGTCAATCAATAGGTATTGATAACAACCCTGATGCAACAAATACCTTATATGCTGTTTGGCAACCTAAAGAATACACCGTCAGAGTAAGTAAAACTGTCGTTGGACTAGATGAAGATAAGACGAAAGAACCTTTCTTGTTT

SEQ ID NO: 17806 - protein, 97 aa, Streptococcus agalactiae
MVTQAVTPRMELNSTTTIPENQYFTRTGYNLIGWHHDKDLADTGRVEFTAGQSIGIDNNPDATNTLYAVWQPKEYTVRVSKTVVGLDEDKTKEPFLF

SEQ ID NO: 17807 - protein, 621 aa, Streptococcus agalactiae
ATGGCTATATTAGGTGATATTTCAGATTCTTGTTGTAAGGATTTATTATTTACCAAAGATCAAAGTAATCGTTTAGCGGAGAAGATAGCTACAACTTTTGAAGATTCAGTTGATTATCCATTTGCGAAGCACCCACAATATGCTTCTTATCGTGTATCAGGTAAATGGTATGCTCTTCTTTTTCCATTGAAGATGGGGAAGCTAGAAAATGTTCCAGCTCAACTGTCAGAAGAAGAGGTTGAAGTTTTGAATATTAAAGTCAATCCTCAAGATATGGAAATACTCTTACAAAAAGAAGGTATTTATCCTTCTTATCATATGTCTAAAAAGACTTGGGTATCTATCGTTTTAGACAATACTTTGTCTGATATAGAAATTTTTAAATTGGTATCAGATAGTCGTAAGCTTGTTTCTCCCAATAAAAAATCAAATTCTGAGCCAGAGTTTTGGATTATTCCTGCTAATCCTAAATTTTACGATATTGATAAGGAGTTTGCAGAGCATCAATTGATTGATTGGACTCAAAAAGGAAAGATTGCGGTGGGAGATTATGTGTTTATTTATATTACAGCACCTATTCGTGCTTTGCGCTATGTCTGTCAAGTGATAGAACGTGACCTT

SEQ ID NO: 17808 - protein, 207 aa, Streptococcus agalactiae
MAILGDISDSCCKDLLFTKDQSNRLAEKIATTFEDSVDYPFAKHPQYASYRVSGKWYALLFPLKMGKLENVPAQLSEEEVEVLNIKVNPQDMEILLQKEGIYPSYHMSKKTWVSIVLDNTLSDIEIFKLVSDSRKLVSPNKKSNSEPEFWIIPANPKFYDIDKEFAEHQLIDWTQKGKIAVGDYVFIYITAPIRALRYVCQVIERDL

SEQ ID NO: 17809 - protein, 192 aa, Streptococcus agalactiae
ATGATTAGCCAAAAAATGGTAACCATTAACATTCCTCACATTACAACTGATATGGAAGTAAAAAATTCTCTAAAGATGGCCTTTAAAGAAAAAGTAGACGTCCCAGCAAAATATGTTAGTGCTGCAAAAGCTAAAGGTCCATTTTTAGCAGGTGTTAACGAAACGATCCATATGAAGCGTTGTGAGNNNNNT

SEQ ID NO: 17810 - protein, 64 aa, Streptococcus agalactiae
  VARIANT 63, 64: Xaa = Any Amino Acid
MISQKMVTINIPHITTDMEVKNSLKMAFKEKVDVPAKYVSAAKAKGPFLAGVNETIHMKRCEXX

SEQ ID NO: 17811 - protein, 720 aa, Streptococcus agalactiae
ATGTCAGTCGTGGTTCGTCCTAGTGACGTGGATACCTTCATCGCAGCCTGCAACAAGAAAAATATCGATGCCGTTGTGGTTGCTACTATTACTGCAAAACCAAACCTTGTCATGACTTGGGATGGTGAAACAATTGTTGACTTGGAACGCCGTTTCCTTGATACCAACGGTGTCCGTGTCGTTGTTGATGCTAAAGTCGTTGACAAAGACTTGACAGTTCCAGAGGTACGCACAACATCAGCAGAGACACTTGAAGCGGATACGCTTAAGGTCTTGTCTGACCTCAACCACGCTAGTCAAAAAGGTCTCCAAACTATCTTTGACTCATCTGTTGGTCGCTCAACCGTTAACCACCCAATCGGTGGCCGTTACCAAATCACACCAACAGAAAGCTCTGTTCAAAAATTGCCAGTTCAACACGGTGTCACAACAACTGCATCTGTTATGGCTCAAGGTTACAATCCTTATATTGCAGAATGGTCACCTTACCACGGTGCTGCCTATGCTGTCATTGAAGCGACAGCTCGCTTGGTAGCAACGGGTGCTGACTGGTCTCGTGCACGTTTCTCTTACCAAGAGTATTTCGAGCGTATGGATAAACAGGCAGAGCGTTTTGATCAGCCAGTATCAGCTCTTCTTGGTTCTATTGAGGCTCAGATTCAACTTGGATTGCCATCAATCGGCGGTAAGGACTCTATGTCTGGTACTTTCGAAGAAAAT

SEQ ID NO: 17812 - protein, 240 aa, Streptococcus agalactiae
MSVVVRPSDVDTFIAACNKKNIDAVVVATITAKPNLVMTWDGETIVDLERRFLDTNGVRVVVDAKVVDKDLTVPEVRTTSAETLEADTLKVLSDLNHASQKGLQTIFDSSVGRSTVNHPIGGRYQITPTESSVQKLPVQHGVTTTASVMAQGYNPYIAEWSPYHGAAYAVIEATARLVATGADWSRARFSYQEYFERMDKQAERFDQPVSALLGSIEAQIQLGLPSIGGKDSMSGTFEEN

SEQ ID NO: 17813 - protein, 111 aa, Streptococcus agalactiae
ATGGAGAATCGTACCTTCCAGTATGTGATATTTCCAATTTCTGGAAAAAATCAGTGGTTACGTGCTATCCGTACTGTTGACAGACTGGATAAGCAATTAACTGAATTGTAT

SEQ ID NO: 17814 - protein, 37 aa, Streptococcus agalactiae
MENRTFQYVIFPISGKNQWLRAIRTVDRLDKQLTELY

SEQ ID NO: 17815 - protein, 153 aa, Streptococcus agalactiae
TTGAGGAGTAATACAGTATCCAGTGATACTATTCACATGGTTAATTATTGGCTCGTGCCAGGTTTGACGACTATTATTTCAATGACTAGTACATTAGGTGCCTTTGGAGTTATGGTGTCCGACAAAGAAAAAAAATTAANNNNNTTAATTAAT

SEQ ID NO: 17816 - protein, 51 aa, Streptococcus agalactiae
  VARIANT 47, 48: Xaa = Any Amino Acid
MRSNTVSSDTIHMVNYWLVPGLTTIISMTSTLGAFGVMVSDKEKKLXXLIN

SEQ ID NO: 17817 - protein, 165 aa, Streptococcus agalactiae
GTGGGTATTGCTGATATCCCAGTTATTGACAATAAAGCTGAGATTATTGATGCAGCTCACCACAGAGTTGAAGATATCAATAAAGCCTTCCGTCGAGGTTTGATGACTGAAGAAGATCGTTATGTTGCTGTTACAACAACATGGCGTGAAGCTAAAGAAGCACTT

SEQ ID NO: 17818 - protein, 55 aa, Streptococcus agalactiae
MGIADIPVIDNKAEIIDAAHHRVEDINKAFRRGLMTEEDRYVAVTTTWREAKEAL

SEQ ID NO: 17819 - protein, 525 aa, Streptococcus agalactiae
ATGGGGAAGCTGTGGCGAAACTGGAAAACGAACCTGAATAAGAAATATGTCCAGAAGGGACTCACGCCATTTAAGGACTACGGAAGGATAACACAGGCACAGTGGGATGAGTTCGTTGCCCTTAAGACATCGGTGGAAGAAAAGGAGAAGAGCCAGAAGATGGCTGAGCTAGCAAGAAGGAATGAATATCCACATCATTTGGGATCGACCGGTTACCGGCAAGCGGTGAAGAAATGGGCAAAACAAGATGAAGAGATGGAGAAGGCTGGAAAGCCGGTTCCTATGAAAAATCACAACCCACGAAGCAGGAGCTGGGTGCGTGCAAGAACACCGGCCTTCACCCCTGAGGGGGATGTAGCATTCAAGGATCAGAAGCTCCAGGAGGTAGCTGTCAAGATGAAGAACATCGTCACGCAGCAACAGGCCGGGACGTTCGTGCCAGATAGAGACCAGGACGAGCTGACCTATGCCTTGGGCAAACCGGAGCACTCTGGCCGTGTACAGGGAGTTTCCTCAAAGACTAGC

SEQ ID NO: 17820 - protein, 175 aa, Streptococcus agalactiae
MGKLWRNWKTNLNKKYVQKGLTPFKDYGRITQAQWDEFVALKTSVEEKEKSQKMAELARRNEYPHHLGSTGYRQAVKKWAKQDEEMEKAGKPVPMKNHNPRSRSWVRARTPAFTPEGDVAFKDQKLQEVAVKMKNIVTQQQAGTFVPDRDQDELTYALGKPEHSGRVQGVSSKTS

SEQ ID NO: 17821 - protein, 792 aa, Streptococcus agalactiae
ATGACCTGCTGGGCAAGCCTTCTATCAGTCTCGAAGGCAATGGGAAGAGGTTACCCACCAGAGTTTGAACAGGCAGACGCTCTTGAAGAAGTTCCTGCTGTGGTATCAGATACTGTTATCAAGGCTAAGGAAACAATTGAAAAACCAGTGGTTTACATTCCAGTCTTCCCTGGTACCAACTCAGAATATGATTCAGCTAAGGCCTTTGAACAGGTTGGAGCTAGTGTCAACTTGGTACCATTTGTAACCTTGAATGAGGCTGCTATTGCTGACTCAGTTGACACAATGGTCGCTAATATTGCTAAGGCAAATATCATCTTCTTTGCTGGAGGATTCTCAGCAGCGGATGAACCAGATGGGTCTGCTAAGTTTATCGTCAATATCTTGCTTAACAAGAAGGTTCGCGCAGCTATTGACAGCTTCATCGAAAAAGGTGGCCTTATCATCGGTATCTGTAATGGTTTCCAAGCCCTTGTTAAATCAGGTCTTCTTCCATACGGAAACTTCGAGGAAGCTGGTGAGACAAGTCCAACCCTCTTCTATAACGATGCCAACCAGCACGTTGCCAAGATGGTGGAGACTCGTATCGCAAATACCAACTCACCTTGGTTGGTAGGAGTTGAGGTCGGCGATATTCATGCCATCCCAGTTTCACACGGTGAAGGTAAATTTGTTGTCAGCGCTTCTGAATTTGCAGAGCTAAGAGACAATGGTCAAATCTGGAGCCAATATGTGGACTTTGACGGACAACCATCTATGGATTCTAAATACAATCCAAATGGNNNNNTTAAT

SEQ ID NO: 17822 - protein, 264 aa, Streptococcus agalactiae
  VARIANT 262, 263: Xaa = Any Amino Acid
MTCWASLLSVSKAMGRGYPPEFEQADALEEVPAVVSDTVIKAKETIEKPVVYIPVFPGTNSEYDSAKAFEQVGASVNLVPFVTLNEAAIADSVDTMVANIAKANIIFFAGGFSAADEPDGSAKFIVNILLNKKVRAAIDSFIEKGGLIIGICNGFQALVKSGLLPYGNFEEAGETSPTLFYNDANQHVAKMVETRIANTNSPWLVGVEVGDIHAIPVSHGEGKFVVSASEFAELRDNGQIWSQYVDFDGQPSMDSKYNPNGXXN

SEQ ID NO: 17823 - protein, 448 aa, Streptococcus agalactiae
ATGAATAGGTTGAAAGAATTACGCAAAGAAAAAAAGCTAACCCAAGAAGAATTAGCTGGGAGATTGGTGTATCAAAAATCACTATTCTCCGTTGGGAAAACGGCGAAAGACAAATAAAGCCTGACAAAGCAAAAGAATTAGCAAAATATTTTAATGTATCAGTTGGATATTTACTAGGTTATGCTCCTAATAAAAAGATGATTTTCAGCTAAATTTAGATGGTACAACCCTCCATCTAACCAAAGAACAGTTTTTGGCTTTAGAAAACACCTCGAAAAGCATAAAAAAAATAAAAAATACCATCAATGAATCTGTTAAACAAGAAGAATATATAAAAAATGCTTCAAAATATTATGATTTTCGAAAAGTCAGCAGAAGACTTACGGACAGACTTTTTGAAATACATACTGACCTTATTGAGCTATTGATGATGTTAGACCACNNNNNT

SEQ ID NO: 17824 - protein, 150 aa, Streptococcus agalactiae
  VARIANT 149, 150: Xaa = Any Amino Acid
MNRLKELRKEKKLTQEELAGEIGVSKITILRWENGERQIKPDKAKELAKYFNVSVGYLLGYAPNKKIDFQLNLDGTTLHLTKEQFLALENTSKSIKKIKNTINESVKQEEYIKNASKYYDFRKVSRRLTDRLFEIHTDLIELLMMLDHXX

SEQ ID NO: 17825 - protein, 616 aa, Streptococcus agalactiae
TTGAGAACAGAAACATGGAACGGATATACTATCCGATTTGTAGAGCACCAAGGTGAATGGTGGGCGGTGCTAGCTGATATTGCTAAAGCACTAGATCTGAATCCAAAATTTATTAAACAACGTTTGGGAGATGAGGGTTTCAAACAACCACGTCGCAGACAGTTTAGGGCGTCAACAAGAAATGTTAATCGTTAGTGAGTTTGGCATTTATGAAACTATCTTCTCAAGCCGTAAGAAGGAAGCCAAAACCTTTAAATTATGGGTATTTGAAACCATTAAACAGTTAAGACAAAGCACAGGCCTAGAGGGCTTCCAAGTATTTAGAATGTTTGATAAAGAACATCAGAAGCAGGCAATGAATAGGCTTGTCGATGGCTTACAAAATGCAACTAAGAAAGACCTTATCAAAGCAAACACTATCGCAAACAAAGCCGTTTCGGACCTATATGGTTATCCTAAGATGATTAGTAAAAACGAGATGACAGAAAACATGTTGCGAGACCGTAAGCCTATCCTTGATGAAACGGTTGAACTAATCAAGGTTAAAGAAAAATACGGCTTAAATTTTAGTGTATCTGAAGCTATCTATAACCAAAACACAATAAAAAAAGCGCAG

SEQ ID NO: 17826 - protein, 206 aa, Streptococcus agalactiae
MRTETWNGYTIRFVEHQGEWWAVLADIAKALDLNPKFIKQRLGDEVVSNNHVADSLGRQQEMLIVSEFGIYETIFSSRKKEAKTFKLWVFETIKQLRQSTGLEGFQVFRMFDKEHQKQAMNRLVDGLQNATKKDLIKANTIANKAVSDLYGYPKMISKNEMTENMLRDRKPILDETVELIKVKEKYGLNFSVSEAIYNQNTIKKAQ

SEQ ID NO: 17827 - protein, 195 aa, Streptococcus agalactiae
ATGAAAGCAACAACTTACAAAGAGTTGAAGAAATGGATTGATGAAGGTGTTGATTTAGCTGAGCTAGCACAGGGTTACGCTGACAAAGTACCAAATGCAGATCGCGAACAGTTTGAAGCAATCACACAGGAAATTTTTCACGTATTGGAAGGCGTATCGCTCATGCTTGATGACAAAGTGCGTATNNNNNTTAAT

SEQ ID NO: 17828 - protein, 65 aa, Streptococcus agalactiae
  VARIANT 62, 63, 64: Xaa = Any Amino Acid
MKATTYKELKKWIDEGVDLAELAQGYADKVPNADREQFEAITQEIFHVLEGVSLMLDDKVRXXXN

SEQ ID NO: 17829 - protein, 159 aa, Streptococcus agalactiae
ATGACTGATTTTCTTGCACTTGTAAAAAATCCACAGATCTTCTATGAATTTACCCATGTTATTTTTGGTGCCATTACGATGGGTGGTACAGTGGGTGCTGGTATGTCAGCCTTCCACCTCTTAAAATCAGAACAGCTGAAAGATANNNNNTTAATTAAT

SEQ ID NO: 17830 - protein, 53 aa, Streptococcus agalactiae
  VARIANT 49, 50: Xaa = Any Amino Acid
MTDFLALVKNPQIFYEFTHVIFGAITMGGTVGAGMSAFHLLKSEQLKDXXLIN

SEQ ID NO: 17831 - protein, 180 aa, Streptococcus agalactiae
TTGTATGCCACTACACTGCAGACTCATTTGGGTGATGCAACATATGAAGAACTTTTAAAAGTTGGTCAGCAAGCAACAATTGAAGGTGAAACAATACATGAAATGCCATTCAAAATTAGTGCAGAGGATGTCGCTGCAGCCCTGTTAGCAGTTGACCGCTATGTTTCAAANNNNNTTAAT

SEQ ID NO: 17832 - protein, 60 aa, Streptococcus agalactiae
  VARIANT 57, 58, 59: Xaa = Any Amino Acid
MYATTLQTHLGDATYEELLKVGQQATIEGETIHEMPFKISAEDVAAALLAVDRYVSXXXN

SEQ ID NO: 17833 - protein, 90 aa, Streptococcus agalactiae
ATGTTTGATGCAGGGGTACATGTGAACATGTTAAATAAAGCTTCAGTTGAACATGATGATGGCATTGTTGATCATTNNNNNTTAATTAAT

SEQ ID NO: 17834 - protein, 30 aa, Streptococcus agalactiae
  VARIANT 26, 27: Xaa = Any Amino Acid
MFDAGVHVNMLNKASVEHDDGIVDHXXLIN

SEQ ID NO: 17835 - protein, 159 aa, Streptococcus agalactiae
TTGAGCTTAAAAAATCGTTTTGTTCTATCACCTATGGTAACTAATTCTTCTACATCACAAGGTTTTGTAACTGATGACGACCTAGCATATGCTGTTCGTCGAGCTACATCCGCTCCATTACAAATTACTGGAGCAGCATATATCACAGAATATNNNNNT

SEQ ID NO: 17836 - protein, 53 aa, Streptococcus agalactiae
  VARIANT 52, 53: Xaa = Any Amino Acid
MSLKNRFVLSPMVTNSSTSQGFVTDDDLAYAVRRATSAPLQITGAAYITEYXX

SEQ ID NO: 17837 - protein, 783 aa, Streptococcus agalactiae
ATGGGTTCAAAAGATACTGTAGATGTGACTGTTAAGGTTGTCGATCCACGTACAGATGCCGATAAGAATGATCCAGCAGGTAAAGATCAGCAAGTCAATGTAGGTGAGACACCGAAGGCAGAAGATTCTATTGGTAACTTACCAGATCTTCCGAAAGGTACAACAGTAGCCTTTGAAACTCCAGTTGATACGGCAACACCGGGAGACAAACCAGCAAAAGTTGTTGTGACTTACCCAGATGGTTCAAAAGATACTGTAGATGTGACTGTTAAGGTTGTCGATCCACGTACAGATGCCGATAAGAATGATCCAGCAGGTAAAGATCAGCAAGTCAATGTAGGTGAGACACCGAAGGCAGAAGATTCTATTGGTAACTTACCAGATCTTCCGAAAGGTACAACAGTAGCCTTTGAAACTCCAGTTGATACGGCAACACCGGGAGACAAACCAGCAAAAGTTGTTGTGACTTACCCAGATGGTTCAAAAGATACTGTAGATGTGACTGTTAAGGTTGTCGATCCACGTACAGATGCCGATAAGAATGATCCAGCAGGTAAAGATCAGCAAGTCAATGTAGGTGAGACACCGAAGGCAGAAGATTCTATTGGTAACTTACCAGATCTTCCGAAAGGTACAACAGTAGCCTTTGAAACTCCAGTTGATACGGCAACACCGGGAGACAAACCAGCAAAAGTTGTTGTGACTTACCCAGATGGTTCAAAAGATACTGTAGATGTGACTGTTAAGGTTGTCGATCCACGTACAGATGCCGATAAGNNNNNT

SEQ ID NO: 17838 - protein, 261 aa, Streptococcus agalactiae
  VARIANT 260, 261: Xaa = Any Amino Acid
MGSKDTVDVTVKVVDPRTDADKNDPAGKDQQVNVGETPKAEDSIGNLPDLPKGTTVAFETPVDTATPGDKPAKVVVTYPDGSKDTVDVTVKVVDPRTDADKNDPAGKDQQVNVGETPKAEDSIGNLPDLPKGTTVAFETPVDTATPGDKPAKVVVTYPDGSKDTVDVTVKVVDPRTDADKNDPAGKDQQVNVGETPKAEDSIGNLPDLPKGTTVAFETPVDTATPGDKPAKVVVTYPDGSKDTVDVTVKVVDPRTDADKXX

SEQ ID NO: 17839 - protein, 141 aa, Streptococcus agalactiae
ATGAATTTAGGAGAGATCCAAAGATTATCAAAACTGGCTAATTGTTTATATGACCAAGGACATGATATTCATATCCTTGGAGACAATTATTATCCATTTTTATTTAATAATGATGCTTATCGCTATCNNNNNTTAATTAAT

SEQ ID NO: 17840 - protein, 47 aa, Streptococcus agalactiae
  VARIANT 43, 44: Xaa = Any Amino Acid
MNLGEIQRLSKLANCLYDQGHDIHILGDNYYPFLFNNDAYRYXXLIN

SEQ ID NO: 17841 - protein, 156 aa, Streptococcus agalactiae
ATGCCAAGCCTTGCTTCTGGTCAGTTTGGATTTTCATCTAATGGTGCTGGTGAAGAACTGGCCTATGCTGTTAATGAAAGTATAGAAAAGGGCTATTATTTAGTCCTATCTTATTCGATCTTCGGTGGTATCTCTTTTGCTATTATTGAAAAAAGG

SEQ ID NO: 17842 - protein, 52 aa, Streptococcus agalactiae
MPSLASGQFGFSSNGAGEELAYAVNESIEKGYYLVLSYSIFGGISFAIIEKR

SEQ ID NO: 17843 - protein, 135 aa, Streptococcus agalactiae
TTGGTAGAAGGTATTTATGATAGAGCTATTCCCCCTACTAAGAGAGAGTTAGAATTAGTTGAAGAATATTCTTATAGATCTGCAAGGGCGCTAGAAGGAGCTTACCAATTAGATTTGCCCANNNNNTTAATTAAT

SEQ ID NO: 17844 - protein, 45 aa, Streptococcus agalactiae
  VARIANT 41, 42: Xaa = Any Amino Acid
MVEGIYDRAIPPTKRELELVEEYSYRSARALEGAYQLDLPXXLIN

SEQ ID NO: 17845 - protein, 90 aa, Streptococcus agalactiae
ATGACATTGCCAGTTATGGATGGTAAAGTACATCGCTTAACAAGTGTTATTAAAGTATCGCATATCCATAAAAAGGNNNNNTTAATTAAT

SEQ ID NO: 17846 - protein, 30 aa, Streptococcus agalactiae
  VARIANT 26, 27: Xaa = Any Amino Acid
MTLPVMDGKVHRLTSVIKVSHIHKKXXLIN

SEQ ID NO: 17847 - protein, 141 aa, Streptococcus agalactiae
ATGAGAGAGTATGCTCGTATGCATGAAGTTCATGAGCAAATAGGTCATGTGGCAATCACAAGTATTGGGGAGGATATTCCAATTTATGCTGGAACATCTGACGCTGTGCTTCAGAAAGGTAGTGGGCATGAGGAGNNNNNT

SEQ ID NO: 17848 - protein, 47 aa, Streptococcus agalactiae
  VARIANT 46, 47: Xaa = Any Amino Acid
MREYARMHEVHEQIGHVAITSIGEDIPIYAGTSDAVLQKGSGHEEXX

SEQ ID NO: 17849 - protein, 90 aa, Streptococcus agalactiae
GTGGCGAAAGCGGCTCTCTGGTCTGTAACTGACGCTGATGCTCGAAAGCGTGGGGAGCAAACAGGATTAGATACCCNNNNNTTAATTAAT

SEQ ID NO: 17850 - protein, 30 aa, Streptococcus agalactiae
  VARIANT 26, 27: Xaa = Any Amino Acid
MAKAALWSVTDADARKRGEQTGLDTXXLIN

SEQ ID NO: 17851 - protein, 314 aa, Streptococcus agalactiae
ATGATTTATCGCATTAGTGAGTTTGCAGATAAATGTGGAGTTAATAAAGAAACGATCAGATATTACGAGCGAAAAAATTTATTACAAGAACCTCACCGAACGGAAGCTGGTTATCGGATATATTCATATGATGACGTTAAGCGTGTTGGGTTTATTAAACGAATACAGGAACTTGGTTTCTCTTTAAGCGAGATTTATAAATTACTTGGTGTTGTAGATAAAGATGAAGTTCGTTGTCAAGATATGTTCGAATTTGTTTCTAAAAAACAAAAGGAAGTGCAAAAACAAATAGAGATTTAAACGAATTAACTATG

SEQ ID NO: 17852 - protein, 106 aa, Streptococcus agalactiae
  VARIANT 103, 104, 106: Xaa = Any Amino Acid
MIYRISEFADKCGVNKETIRYYERKNLLQEPHRTEAGYRIYSYDDVKRVGFIKRIQELGFSLSEIYKLLGVVDKDEVRCQDMFEFVSKKQKEVQKQIEDLNEXXLX

SEQ ID NO: 17853 - protein, 198 aa, Streptococcus agalactiae
TTGGCAGACTTTTGCTACCATCAAAAGTCAAGAATGATGCATCTGGCCAATGCAAGTCAGAAGACCAAGATGAATGTTCTAAACTGGGGAAAAATGAATCCAATGACCTTTAAAAGTTTATTTGACCAACAACAACGGTGTTCTGTCTATATGTCTGATATCGAAAAAATTGTCTTTGCACCCATGCAGGACTTGATG

SEQ ID NO: 17854 - protein, 66 aa, Streptococcus agalactiae
MADFCYHQKSRMMHLANASQKTKMNVLNWGKMNPMTFKSLFDQQQRCSVYMSDIEKIVFAPMQDLM

SEQ ID NO: 17855 - protein, 594 aa, Streptococcus agalactiae
ATGACAAAACACAAACACCTAACTCTCTCAGACCGTAATGACATCCAATCTGGTTTGGATAGAGGAGAAACCTTTAAAGCCATCGGGCTTAATCTACTGAAACACCCTACTACTATCGCAAAAGAAGTCAAACGAAATAAGCAACTAAGAGAATCAACCAAAGACTGCCTAGACTGTCCGCTACTAAGAAAAGCTCCCTATGTTTGTAATGGGTGTCCAAAGAGGAGGATCAACTGTGGTTACAAGAAGACCTTCTATCTTGCTAAGCAAGCTCAAAGAAACTATGAAAAACTTTTAGTTGAATCTAGAGAAGGAATCCCTTTGAACAAAGAGACCTTCTGGAAAATAGATAGAGTGCTTTCTAATGGGGTCAAGAAGGGCCAACGTATCTATCATATCCTCAAAACCAACGATCTAGAAGTGAGTTCTTCAACCGTTTATCGACACATCAAGAAAGGCTACCTATCCATCACACCAATCGACCTACCCAGAGCTGTGAAGTTCAAAAAAAGGCGAAAGAGCACCTACCCTCCTATTCCAAAAGCGATTAAAGAAGGGCGACGGTACGAGGATTTTATAGNNNNNTTAATTAAT

SEQ ID NO: 17856 - protein, 198 aa, Streptococcus agalactiae
  VARIANT 194, 195: Xaa = Any Amino Acid
MTKHKHLTLSDRNDIQSGLDRGETFKAIGLNLLKHPTTIAKEVKRNKQLRESTKDCLDCPLLRKAPYVCNGCPKRRINCGYKKTFYLAKQAQRNYEKLLVESREGIPLNKETFWKIDRVLSNGVKKGQRIYHILKTNDLEVSSSTVYRHIKKGYLSITPIDLPRAVKFKKRRKSTYPPIPKAIKEGRRYEDFIXXLIN

SEQ ID NO: 17857 - protein, 633 aa, Streptococcus agalactiae
TTGAATATTCCAGAATTGGCAAAGAAATGTAAACAGGAAGAATGTATTTCCGTCTTTCGGAGCTTTAAAAATTATCGCAGTGGTGAATTGGTTCACCGTGATGAAAAACCAGACATGGGAAACACCCTTTATATTGGCTCATTAAAAAGCGAAGTCTATTTCTGTATATATGAGAAAGATTATGAGCAATACGTGAAAAATGATATTGCCTTAGAAGACGCAGAAATAAAGAATCGCTTTGAAATTCGTTTGAAAAACGACAGAGCCACTCAAGCCATGAAAGATTTGTTGGAACATCAAAATGCAGAAAAAACAGCGTTTGAGATTATCAATCGTTATATTCGCTTTGCCGATAAGGACGAAACCAAGCGACGGAGTGATTGGCAAACCAATGAACGCTGGGAATGGTTTATCGGCAAAAATCGTGGAGCATTACGCCTAACCATACAGCCAGAACCTTATTCTTTTGAACGAACATTGAACTGGTTACATCATCAAGTCGCCCCTACATTAAAAGTCGCAAGCATTTTAGATATTCTCAACGGTACAACCATTATTTCCACCATGATTCATGAAGCCAAACTGACAGAAAAACAAGAGAAATTAATGAACAACAACANNNNNTTAATTAAT

SEQ ID NO: 17858 - protein, 211 aa, Streptococcus agalactiae
  VARIANT 207, 208: Xaa = Any Amino Acid
MNIPELAKKCKQEECISVFRSFKNYRSGELVHRDEKPDMGNTLYIGSLKSEVYFCIYEKDYEQYVKNDIALEDAEIKNRFEIRLKNDRATQAMKDLLEHQNAEKTAFEIINRYIRFADKDETKRRSDWQTNERWEWFIGKNRGALRLTIQPEPYSFERTLNWLHHQVAPTLKVASILDILNGTTIISTMIHEAKLTEKQEKLMNNNXXLIN

SEQ ID NO: 17859 - protein, 1187 aa, Streptococcus agalactiae
TTGGGCTTACTGAAATCTCAATTTCAGATATCCTCCTATTTTTCAGTCGCTCCCTTGTCGGACTTGGTATCTTATATGAATAAACGTATTTTTGTTGAGAAAAAGGCTGACTTTGACATTAAATCGGCTAGTCTTGTGAAAGAGTTGACGCATAATCTACAACTGACTTCTTTGAAGGATTTGCGTATTGTGCAGGTCTATGATGTCTTCAATTTGGCTGAGGATTTGCTGGCGCGTGCTGAGAAGCATATTTTCTCTGAGCAGGTGACAGACTGTCTTTTGACGGAAACTGAAATCACTGCGGAGCTTGATAAGGTTGCCTTCTTTGCCATTGAGGCGCTTCCTGGTCAATTTGACCAACGTGCTGCTAGTTCGCAAGAAGCTTTGCTATTGCTTGGAGTGACAGTCAGGTTAAGGTCAATACAGCCCAGCTTTACTTGGTCAATAAGGATATTGCAGAAGCAGAGCTTGAAGCCGTTAAGAACTATCTTTTGAATCCTGTTGATTCACGTTTCAAGGACATTACCTTGCCGCTTGAAGAGCAGGCTTTCTCTGTGTCTGATAAGACAATCCCTAGTCTTGATTTCTTTGAAACTTATAAGGCTGACGATTTTGCGGCCTATAAGGCAGAGCAGGGCTTGGCTATGGAGGTCGATGATCTTCTCTTCATCCAAGATTATTTCAAATCAATCGGGCGTGTGCCAACTGAAACTGAGTTGAAAGTTTTGGATACTTACTGGTCAGACCACTGCCGTCACACAACCTTTGAAACTGAGTTGAAAAACATCGACTTTTCAGCTTCTAAATTCCAAAAACAATTGCAGGCGACTTATGACAAATATATCGCCATGCGTGATGAACTTGGTCGTTCTGAAAAGCCGCAGACACTTATGGATATGGCGACTATCTTTGGTCGTTATGAACGTGCCAATGGACGACTGGATGATATGGAAGTCTCAGATGAAATCAATGCCTGCTCAGTTGAAATTGAAGTAGATGTTGATGGTGTAAAAGAGCCTTGGCTCCTCATGTTTAAGAATGAGACTCACAATCACCCAACAGAAATTGAGCCATTTGGTGGCGCAGCAACTTGTATCGGTGGTGCCATTCGTGACCCGTTGTCAGGACGTTCATACAGTTATCAGGCTATGCGTATTTCAGGCGCAGGCGATATTACGACTNNNNNT

SEQ ID NO: 17860 - protein, 396 aa, Streptococcus agalactiae
  VARIANT 395, 396: Xaa = Any Amino Acid
MGLLKSQFQISSYFSVAPLSDLVSYMNKRIFVEKKADFDIKSASLVKELTHNLQLTSLKDLRIVQVYDVFNLAEDLLARAEKHIFSEQVTDCLLTETEITAELDKVAFFAIEALPGQFDQRAASSQEALLLLGSDSQVKVNTAQLYLVNKDIAEAELEAVKNYLLNPVDSRFKDITLPLEEQAFSVSDKTIPSLDFFETYKADDFAAYKAEQGLAMEVDDLLFIQDYFKSIGRVPTETELKVLDTYWSDHCRHTTFETELKNIDFSASKFQKQLQATYDKYIAMRDELGRSEKPQTLMDMATIFGRYERANGRLDDMEVSDEINACSVEIEVDVDGVKEPWLLMFKNETHNHPTEIEPFGGAATCIGGAIRDPLSGRSYSYQAMRISGAGDITTXX

SEQ ID NO: 17861 - protein, 567 aa, Streptococcus agalactiae
GTGACTTACCCAGATGGTTCAAAAGATACTGTAGATGTGACTGTTAAGGTTGTCGATCCACGTACAGATGCCGATAAGAATGATCCAGCAGGTAAAGATCAGCAAGTCAATGTAGGTGAGACACCGAAGGCAGAAGATTCTATTGGTAACTTACCAGATCTTCCGAAAGGTACAACAGTAGCCTTTGAAACTCCAGTTGATACGGCAACACCGGGAGACAAACCAGCAAAAGTTGTTGTGACTTACCCAGATGGTTCAAAAGATACTGTAGATGTGACTGTTAAGGTTGTCGATCCACGTACAGATGCCGATAAGAATGATCCAGCAGGTAAAGATCAGCAAGTCAATGTAGGTGAGACACCGAAGGCAGAAGATTCTATTGGTAACTTACCAGATCTTCCGAAAGGTACAACAGTAGCCTTTGAAACTCCAGTTGATACGGCAACACCGGGAGACAAACCAGCAAAAGTTGTTGTGACTTACCCAGATGGTTCAAAAGATACTGTAGATGTGACTGTTAAGGTTGTCGATCCACGTACAGATGCCGATAAGAATGATCCAGCAGGG

SEQ ID NO: 17862 - protein, 189 aa, Streptococcus agalactiae
MTYPDGSKDTVDVTVKVVDPRTDADKNDPAGKDQQVNVGETPKAEDSIGNLPDLPKGTTVAFETPVDTATPGDKPAKVVVTYPDGSKDTVDVTVKVVDPRTDADKNDPAGKDQQVNVGETPKAEDSIGNLPDLPKGTTVAFETPVDTATPGDKPAKVVVTYPDGSKDTVDVTVKVVDPRTDADKNDPAG

SEQ ID NO: 17863 - protein, 651 aa, Streptococcus agalactiae
GTGACTTACCCAGATGGTTCAAAAGATACTGTAGATGTGACTGTTAAGGTTGTCGATCCACGTACAGATGCCGATAAGAATGATCCAGCAGGTAAAGATCAGCAAGTCAATGTAGGTGAGACACCGAAGGCAGAAGATTCTATTGGTAACTTACCAGATCTTCCGAAAGGTACAACAGTAGCCTTTGAAACTCCAGTTGATACGGCAACACCGGGAGACAAACCAGCAAAAGTTGTTGTGACTTACCCAGATGGTTCAAAAGATACTGTAGATGTGACTGTTAAGGTTGTCGATCCACGTACAGATGCCGATAAGAATGATCCAGCAGGTAAAGATCAGCAAGTCAATGTAGGTGAGACACCGAAGGCAGAAGATTCTATTGGTAACTTACCAGATCTTCCGAAAGGTACAACAGTAGCCTTTGAAACTCCAGTTGATACGGCAACACCGGGAGACAAACCAGCAAAAGTTGTTGTGACTTACCCAGATGGTTCAAAAGATACTGTAGATGTGACTGTTAAGGTTGTCGATCCACGTACAGATGCCGATAAGAATGATCCAGCAGGTAAAGATCAGCAAGTCAATGTAGGTGAGACACCGAAGGCAGAAAGATCTATTGGTAACTTTACAGATCTTCCGAAAGGTACACAG

SEQ ID NO: 17864 - protein, 217 aa, Streptococcus agalactiae
MTYPDGSKDTVDVTVKVVDPRTDADKNDPAGKDQQVNVGETPKAEDSIGNLPDLPKGTTVAFETPVDTATPGDKPAKVVVTYPDGSKDTVDVTVKVVDPRTDADKNDPAGKDQQVNVGETPKAEDSIGNLPDLPKGTTVAFETPVDTATPGDKPAKVVVTYPDGSKDTVDVTVKVVDPRTDADKNDPAGKDQQVNVGETPKAERSIGNFTDLPKGTQ

SEQ ID NO: 17865 - protein, 507 aa, Streptococcus agalactiae
GTGACTTACCCAGATGGTTCAAAAGATACTGTAGATGTGACTGTTAAGGTTGTCGATCCACGTACAGATGCCGATAAGAATGATCCAGCAGGTAAAGATCAGCAAGTCAATGTAGGTGAGACACCGAAGGCAGAAGATTCTATTGGTAACTTACCAGATCTTCCGAAAGGTACAACAGTAGCCTTTGAAACTCCAGTTGATACGGCAACACCGGGAGACAAACCAGCAAAAGTTGTTGTGACTTACCCAGATGGTTCAAAAGATACTGTAGATGTGACTGTTAAGGTTGTCGATCCACGTACAGATGCCGATAAGAATGATCCAGCAGGTAAAGATCAGCAAGTCAATGTAGGTGAGACACCGAAGGCAGAAGATTCTATTGGTAACTTACCAGATCTTCCGAAAGGTACAACAGTAGCCTTTGAAACTCCAGTTGATACGGCAACACCGGGAGACAAACCAGCAAAAGTTGTTGTGACTTACCCAGATGGTTNNNNNTTAATTAAT

SEQ ID NO: 17866 - protein, 169 aa, Streptococcus agalactiae
  VARIANT 165, 166: Xaa = Any Amino Acid
MTYPDGSKDTVDVTVKVVDPRTDADKNDPAGKDQQVNVGETPKAEDSIGNLPDLPKGTTVAFETPVDTATPGDKPAKVVVTYPDGSKDTVDVTVKVVDPRTDADKNDPAGKDQQVNVGETPKAEDSIGNLPDLPKGTTVAFETPVDTATPGDKPAKVVVTYPDGXXLIN

SEQ ID NO: 17867 - protein, 957 aa, Streptococcus agalactiae
GTGACTGTTAAGGTTGTCGATCCACGTACAGATGCCGATAAGAATGATCCAGCAGGTAAAGATCAGCAAGTCAATGTAGGTGAGACACCGAAGGCAGAAGATTCTATTGGTAACTTACCAGATCTTCCGAAAGGACAACAGTAGCCTTTGAAACTCCAGTTGATACGGCAACACCGGGAGACAAACCAGCAAAAGTTGTTGTGACTTACCCAGATGGTTCAAAAGATACTGTAGATGTGACTGTTAAGGTTGTCGATCCACGTACAGATGCCGATAAGAATGATCCAGCAGGTAAAGATCAGCAAGTCAATGTAGGTGAGACACCGAAGGCAGAAGATTCTATTGGTAACTTACCAGATCTTCCGAAAGGTACAACAGTAGCCTTTGAAACTCCAGTTGATACGGCAACACCGGGAGACAAACCAGCAAAAGTTGTTGTGACTTACCCAGATGGTTCAAAAGATACTGTAGATGTGACTGTTAAGGTTGTCGATCCACGTACAGATGCCGATAAGAATGATCCAGCAGGTAAAGATCAGCAAGTCAATGTAGGTGAGACACCGAAGGCAGAAGATTCTATTGGTAACTTACCAGATCTTCCGAAAGGTACAACAGTAGCCTTTGAAACTCCAGTTGATACGGCAACACCGGGAGACAAACCAGCAAAAGTTGTTGTGACTTACCCAGATGGTTCAAAAGATACTGTAGATGTGACTGTTAAGGTTGTCGATCCACGTACAGATGCCGATAAGAATGATCCAGCAGGTAAAGATCAGCAAGTCAATGTAGGTGAGACACCGAAGGCAGAAGATTCTATTGGTAACTTACCAGATCTTCCGAAGGTACACAGTAGCCTTTGAAACTCCAGTTGATACGGCAACACCGGGAGACAACCAGCAAAAGTTTGACTTACAGATGGCAAAATACTGTAGAGTGACTGGTANNNNNTTAATTAAT

SEQ ID NO: 17868 - protein, 322 aa, Streptococcus agalactiae
  VARIANT 311, 318, 319: Xaa = Any Amino Acid
MTVKVVDPRTDADKNDPAGKDQQVNVGETPKAEDSIGNLPDLPKGTTVAFETPVDTATPGDKPAKVVVTYPDGSKDTVDVTVKVVDPRTDADKNDPAGKDQQVNVGETPKAEDSIGNLPDLPKGTTVAFETPVDTATPGDKPAKVVVTYPDGSKDTVDVTVKVVDPRTDADKNDPAGKDQQVNVGETPKAEDSIGNLPDLPKGTTVAFETPVDTATPGDKPAKVVVTYPDGSKDTVDVTVKVVDPRTDADKNDPAGKDQQVNVGETPKAEDSIGNLPDLPKGTTVAFETPVDTATPGDNQQKVCDLPDGQXYCRVTGXXLIN

SEQ ID NO: 17869 - protein, 672 aa, Streptococcus agalactiae
GTGACTTACTCAGATGGTTCAAAAGATACTGTAGATGTGACTGTTAAGGTTGTCGATCCACGTACAGATGCCGATAAGAATGATCCAGCAGGTAAAGATCAGCAAGTCAATGTAGGTGAGACACCGAAGGCAGAAGATTCTATTGGTAACTTACCAGATCTTCCGAAAGGTACAACAGTAGCCTTTGAAACTCCAGTTGATACGGCAACACCGGGAGACAAACCAGCAAAAGTTGTTGTGACTTACCCAGATGGTTCAAAAGATACTGTAGATGTGACTGTTAAGGTTGTCGATCCACGTACAGATGCCGATAAGAATGATCCAGCAGGTAAAGATCAGCAAGTCAATGTAGGTGAGACACCGAAGGCAGAAGATTCTATTGGTAACTTACCAGATCTTCCGAAAGGTACAACAGTAGCCTTTGAAACTCCAGTTGATACGGCAACACCGGGAGACAAACCAGCAAAAGTTGTTGTGACTTACCCAGATGGTTCAAAAGATACTGTAGATGTGACTGTTAAGGTTGTCGATCCACGTACAGATGCCGATAAGAATGATCCAGCAGGTAAAGATCAGCAAGTCAATGTAGGTGAGACACCGAAGGCAGAAGATTCTATTGGTAACTTACCAGATCTTCCGAAAGGTACAACAGTAGCCTTTGAAACTCCTAGT

SEQ ID NO: 17870 - protein, 224 aa, Streptococcus agalactiae
MTYSDGSKDTVDVTVKVVDPRTDADKNDPAGKDQQVNVGETPKAEDSIGNLPDLPKGTTVAFETPVDTATPGDKPAKVVVTYPDGSKDTVDVTVKVVDPRTDADKNDPAGKDQQVNVGETPKAEDSIGNLPDLPKGTTVAFETPVDTATPGDKPAKVVVTYPDGSKDTVDVTVKVVDPRTDADKNDPAGKDQQVNVGETPKAEDSIGNLPDLPKGTTVAFETPS

SEQ ID NO: 17871 - protein, 135 aa, Streptococcus agalactiae
GTGCACGGAAAAGAGATTAAACTCAAAAAAGATTATGATGGTAAAAACCAAACTATTGATTTATCAGTCGCTTTTAAGTCTTTTACAGTAACAAGTAATCTTATGGATGGGAATCTTTATTNNNNNTTAATTAAT

SEQ ID NO: 17872 - protein, 45 aa, Streptococcus agalactiae
  VARIANT 41, 42: Xaa = Any Amino Acid
MHGKEIKLKKDYDGKNQTIDLSVAFKSFTVTSNLMDGNLYXXLIN

SEQ ID NO: 17873 - protein, 621 aa, Streptococcus agalactiae
TTGACAACAAATACAACTAAACTTAATCAATTAAAACAAGTGTTAGCAGAAGCAAGTCAACAAGTAGCACAAGCAAATCAAGATTACAAGCAAGCTAAAGATAATCTAACACAAAAAACTGCTTATCTTACAAATCTACGCAATGCACAAGCTAATTTGCTTAAAGTACAGTCTGATGTAGCACAAGCTAAAGATAACTTAGCAAATAAGATTGCTAAGTTACAAAGAGAAGTAGCTTATTTACAAGAGTTAAAAACTAAAGCAGTAGATGCGCAATCACAATATCAAAAAGTTTTATCAGCTTATAAGTCAGTTTTAGAAGCTAAAGAAAAACTGAAATTAGCAGAAGAAAAAGCTCAAATTGAGAAAGTAAGACAAGAAGCAGTAGCAGTAGTTGATGAAACAGGTAAAATTACTAGTTATATTACTTCTAAACCAAAACTGCAAGAAGCTGTTAAAGCACAACAAATAGTTGTTGCTAACGATAAGAAAGACGTTGTAACTAAGACAGTTGATGTTGAACAAGTATCAGTTGTAAAATCTAGTGTCTTGCCATCAACTGGTGATGCTAAGACAGGTTTAATTGCAGTTTTAGGTATGCTGTTATCTTTAAGTGGGTTT

SEQ ID NO: 17874 - protein, 207 aa, Streptococcus agalactiae
MTTNTTKLNQLKQVLAEASQQVAQANQDYKQAKDNLTQKTAYLTNLRNAQANLLKVQSDVAQAKDNLANKIAKLQREVAYLQELKTKAVDAQSQYQKVLSAYKSVLEAKEKLKLAEEKAQIEKVRQEAVAVVDETGKITSYITSKPKLQEAVKAQQIVVANDKKDVVTKTVDVEQVSVVKSSVLPSTGDAKTGLIAVLGMLLSLSGF

SEQ ID NO: 17875 - protein, 426 aa, Streptococcus agalactiae
ATGGTTAATACACGTTTTCCACCAGCAGCTTATGGCACATATTCAGATTTTGAAAAAGCTAAAGCCTACATCGAAGAGCAGGGTGCACCAATCGTGGTCAAGGCTGATGGCTTGGCGTTAGGCAAGGGCGTGGTCGTGGCTGAAACCGTTGAGCAGGCGGTAGAGGCGGCGCAAGAGATGCTTTTGGACAACAAGTTTGGCGACTCAGGAGCGCGTGTGGTTATCGAGGAATTTTTGGATGGTGAAGAGTTCTCCCTCTTTGCCTTCGCTAATGGCGACAAGTTTTACATCATGCCGACAGCTCAGGATCACAAGTGTGCCTATGACGGTGATATGGGACCAAACACTGGCGGTATGGGTGCCTATGCGCCAGTTCCCCACCTGCCTCAGAGCGTAGTGGATACGGCGGTTGAAACNNNNNTTAAT

SEQ ID NO: 17876 - protein, 142 aa, Streptococcus agalactiae
  VARIANT 140, 141: Xaa = Any Amino Acid
MVNTRFPPAAYGTYSDFEKAKAYIEEQGAPIVVKADGLALGKGVVVAETVEQAVEAAQEMLLDNKFGDSGARVVIEEFLDGEEFSLFAFANGDKFYIMPTAQDHKCAYDGDMGPNTGGMGAYAPVPHLPQSVVDTAVETXXN

SEQ ID NO: 17877 - protein, 216 aa, Streptococcus agalactiae
ATGATAAAAACAAAGTTTAGTGATCCACTGGAACAATTAGCCAAAAAAAGGAAAAGGAAAACATTATTCAAGACAGTAGTATTGGCATTAATAACTGTACTATTAGTAGTTGGAATAGCTTTTAAAGGATTTACATATTTAACTTCAAAAAATGGTCAAAAAACATATCATAACTTTGAACTACTTTCTGAAATAGCATATCCAAATATTTCCCTA

SEQ ID NO: 17878 - protein, 72 aa, Streptococcus agalactiae
MIKTKFSDPLEQLAKKRKRKTLFKTVVLALITVLLVVGIAFKGFTYLTSKNGQKTYHNFELLSEIAYPNISL

SEQ ID NO: 17879 - protein, 111 aa, Streptococcus agalactiae
TTGGTAACAATTCAGAACCGAAGCTTGTTATTTACTGAGGACGGTCAGCCAACTGCGCGTGCTGAGAAAATTCTTAATAATACACCAATGGGAAGATTTGGAGAAGCCAAG

SEQ ID NO: 17880 - protein, 37 aa, Streptococcus agalactiae
MVTIQNRSLLFTEDGQPTARAEKILNNTPMGRFGEAK

SEQ ID NO: 17881 - protein, 465 aa, Streptococcus agalactiae
GTGCTTGATAAATCTATTACGCATCAAGTAAAGGGTTCAGAAAATGGAGAATTACCTGTAAAAAAGTTGGATAAAACAGATTACTTGGGAACTCTGGATATTCCGAACTTAAAACTGCATTTACCGGTAGCTGCTAATTATAGTTTTGAACAACTGTCTAAGACGCCTACAAGGTATTATGGTTCTTATTTAACTAATAACATGGTGATTTGTGCGCATAATTTTCCTTATCATTTTGATGCTTTAAAAAATGTAGATATGGGAACGGATGTTTATTTTACAACTACAACAGGGCAAATCTATCACTACAAAATCAGTAATAGAGAAATTATTGAACCAACAGCGATTGAAAAAGTTTATAAAACTGCCACATCAGACAATGATTGGGACTTAAGCTTGTTTACTTGTACAAAGGCAGGAGTAGCTAGAGTATTAGTGCGCTGTCAATTAATTGATGTTAAAAAT

SEQ ID NO: 17882 - protein, 155 aa, Streptococcus agalactiae
MLDKSITHQVKGSENGELPVKKLDKTDYLGTLDIPNLKLHLPVAANYSFEQLSKTPTRYYGSYLTNNMVICAHNFPYHFDALKNVDMGTDVYFTTTTGQIYHYKISNREIIEPTAIEKVYKTATSDNDWDLSLFTCTKAGVARVLVRCQLIDVKN

SEQ ID NO: 17883 - protein, 609 aa, Streptococcus agalactiae
GTGTGGAATGGTTTAACCGATGCTGATCATCCAACGCAAGTACTAGCCGATTTTCTGACCGCTAAGGAATGCTTACATAAGCCCTATAAAGATATTCGCTTTACGTATGTGGGTGATGGACGTAACAATGTCGCTAATGCCTTGATGATCGGTGCTTCTATTGTAGGCATGACTTATCATTTGGTTTGTCCTAAAGAATTAGAGCCAGATCCTGAACTACTCTCTAAATGTCAAGAAATTGCGAAAACTACTGGTGCTTCTATTGAAATCACTGCTGATATTGCAGAAGGCGTCAGAGATTCAGACGTCCTATATACAGATGTTTGGGTTTCAATGGGAGAACCGGATGAAGTTTGGAAAGAAAGAATAGCTCTTTTAGAACCCTATCGTATTACCCAAGAAATGCTTAATATGACAGAAAATCCAAACGTTATTTTCGAGCATTGCTTGCCCTCATTTCATAATATAGATACTAAAGTTGGATACGACATTTATGAAAAATATGGTTTGAAGGAAATGGAAGTATCAGATGAAGTTTTTGAAGGCCCTCACTCAGTTGTTTTCCAAGAAGCTGAAAATCGTATGCATACTATTAAAGCAGTCNNNNNT

SEQ ID NO: 17884 - protein, 203 aa, Streptococcus agalactiae
  VARIANT 202, 203: Xaa = Any Amino Acid
MWNGLTDADHPTQVLADFLTAKECLHKPYKDIRFTYVGDGRNNVANALMIGASIVGMTYHLVCPKELEPDPELLSKCQEIAKTTGASIEITADIAEGVRDSDVLYTDVWVSMGEPDEVWKERIALLEPYRITQEMLNMTENPNVIFEHCLPSFHNIDTKVGYDIYEKYGLKEMEVSDEVFEGPHSVVFQEAENRMHTIKAVXX

SEQ ID NO: 17885 - protein, 306 aa, Streptococcus agalactiae
ATGGCAAAACCGAATGTTGTTAATAAAGAGAAGTTACTACAAGCAGCAAAAGAAATTATTGCAGAGCATGGGATGGAGAAGTTGACATTAAAAGCAGTTGCAGAGAGTGCTCAAGTTACACAAGGTACCGTATATTATCATTTTAAAACGAAGGATCAATTATTACTTGAAGTAACCGAAGCGTTTTGTAAAGCGTCGTGGGAACAAATAGGAAAGGATGTACAGTTAGAAAAGGCTTTACAGTCTGCCGAAAGTAGATGTGTGAAAGATTCAATGTATCATCATTTGTTTTTTCAAATTAGTAGC

SEQ ID NO: 17886 - protein, 102 aa, Streptococcus agalactiae
MAKPNVVNKEKLLQAAKEIIAEHGMEKLTLKAVAESAQVTQGTVYYHFKTKDQLLLEVTEAFCKASWEQIGKDVQLEKALQSAESRCVKDSMYHHLFFQISS

SEQ ID NO: 17887 - protein, 201 aa, Streptococcus agalactiae
GTGTATCAAAATGTAAATGGTGTTAAGGTTGCTACTCTTGGATTTACAGATGCATTTGTAGCAGGAGCTATTGCAACGAAAGAACAACCAGGTTCGTTAAGTATGAACCCACATGTATTACTTAAGCAAATTAGTAAGGCAAAGGATCCTAAAAAAGGTAATGCTGATCTTGTCGTAGTAAATACGCACTGGGGGNNNNNT

SEQ ID NO: 17888 - protein, 67 aa, Streptococcus agalactiae
  VARIANT 66, 67: Xaa = Any Amino Acid
MYQNVNGVKVATLGFTDAFVAGAIATKEQPGSLSMNPHVLLKQISKAKDPKKGNADLVVVNTHWGXX

SEQ ID NO: 17889 - protein, 357 aa, Streptococcus agalactiae
ATGCTAGTGGAACGAACATTACCTGGTGATGCGATTCCCCCCAATGCATTACGTGCAAATAAAAAAGAAGTGGTAGGTAAGTGGACAAATGATGGGCAGCCCATTACAGAAAATAGCTATCTCTTTAAAAACAAAGTAGTAAAGAAAGAAGAGTTACCGGACTCTGCCATTTTAAATTTGAAAGATGGCGAAGTTGCATTCCCGTTACTCGTTGATTCGGAAACAAGTTCAGGGAATAGTATTATTCCGAACACGTATGTCGACTTATATTTCAAACAGGTTGTAAAAGAAGGAGACAATGAAAAGGTAGTATTCGGTGGTCTTTTCCAGACGTGTACGTGTTACGGCCGCAAAGGA

SEQ ID NO: 17890 - protein, 119 aa, Streptococcus agalactiae
MLVERTLPGDAIPPNALRANKKEVVGKWTNDGQPITENSYLFKNKVVKKEELPDSAILNLKDGEVAFPLLVDSETSSGNSIIPNTYVDLYFKQVVKEGDNEKVVFGGLFQTCTCYGRKG

SEQ ID NO: 17891 - protein, 129 aa, Streptococcus agalactiae
GTGTGTGATATTATTGGCGCAGATAGTCTGACCTATCTCTCACTAGATGGGTTGATTGAATCAATTGTCTCTAGTTTTACTTTTATATTAGGATTTTTCTTTTCAAAAGCCTTGATGACTTTTTTCTCA

SEQ ID NO: 17892 - protein, 43 aa, Streptococcus agalactiae
MCDIIGADSLTYLSLDGLIESIVSSFTFILGFFFSKALMTFFS

SEQ ID NO: 17893 - protein, 270 aa, Streptococcus agalactiae
ATGAGTATCAAAAAAAGTGTGATTGGTTTTTGCCTCGGAGCTGCAGCATTATCAATGTTTGCTTGTGTAGACAGTAGTCAATCTGTTATGGCTGCCGAGAAGGATAAAGTCGAAATTACGTGGTGGGCTTTTCCAACCTTTACTCAAGAAAAGGCTAAGGATGGAGTAGGTACTTATGAGAAAAAAGTCATCAAGGCTTTTGAAAAGAAAAATCCTAATATAAAAGTAAAACTAGAGACAATTGATTCAATCAACCCATCTAGTGAGAGA

SEQ ID NO: 17894 - protein, 90 aa, Streptococcus agalactiae
MSIKKSVIGFCLGAAALSMFACVDSSQSVMAAEKDKVEITWWAFPTFTQEKAKDGVGTYEKKVIKAFEKKNPNIKVKLETIDSINPSSER

SEQ ID NO: 17895 - protein, 348 aa, Streptococcus agalactiae
TTGAGTGTAGCTGAGTTTATTCAAAAGATAAAAAGGAAATATCCTAAACAGTTGTTAATGGCTGATATAAGTACTTTTGAAGAAGGCAAAAATGCTTTTGAAGCAGGAGTTGATTTTGTGGGTACAACTCTATCGGGATACACAGATTACAGCCGCCAAGAAGAAGGACCGGATATAGAACTCCTTAATAAGCTTTGTCAAGCCGGTATAGATGTGATTGCGGAAGGTAAAATTCATACTCCTAAGCAGGCTAATGAAATTAATCATATAGGTGTTGCAGGAATTGTAGTTGGGGGTGCTATCACTAGACCAAAAGAAATAGCGGAGCGTTTCATCTCAGGACTTAGT

SEQ ID NO: 17896 - protein, 116 aa, Streptococcus agalactiae
MSVAEFIQKIKRKYPKQLLMADISTFEEGKNAFEAGVDFVGTTLSGYTDYSRQEEGPDIELLNKLCQAGIDVIAEGKIHTPKQANEINHIGVAGIVVGGAITRPKEIAERFISGLS

SEQ ID NO: 17897 - protein, 615 aa, Streptococcus agalactiae
ATGTCAAGTATGATTATTTGGAGATTCGTTTCCTTATTTTCGTGGGCAAAAAATGCAACGAAGCGAAAAGCAGAAGTAGCTCAATATACTTTAATGCTTACTATCTCAGTTATACAAGCATATGGTGTTTCAGGAAATCAATTTATAAAAAGCTCTTTATTAGGTTCTTATAGTGATATTGTTTTTAAAGCATTGACAATGGTCTTGTTAATAAGTGGCTCATTTGTGTTAATGTGGCTTGCTAATCTCAATGCTTCTAAAGGGCTAGGAGGAAGTATTGTTATCATATTAGTGAGCATGCTCCAAGCAACGACTACTGGAATAATAACTTATTTTGAACAGTCACATTTTAGTATTATGGATCTGCTGGGAACTATTATAGCTATAAGTATAATACTTAGTGTTTTATTATTAATCTCAACGGTGGTTTATAGGGCAGAATATCGTATACCTATTAGGCGTATTGATATCGTTAGTAAATTTGCCCAAGATACCTATATTCCTATTCGCATAAATCCAGCAGGGTCCTACCCTTTCATGTATGGGATGACATTAATGATGCTTCCACCCCGTTATAATCCAGCATTGGTACTTGCTTTTTCAACGAGCGATTAT

SEQ ID NO: 17898 - protein, 205 aa, Streptococcus agalactiae
MSSMIIWRFVSLFSWAKNATKRKAEVAQYTLMLTISVIQAYGVSGNQFIKSSLLGSYSDIVFKALTMVLLISGSFVLMWLANLNASKGLGGSIVIILVSMLQATTTGIITYFEQSHFSIMDLLGTIIAISIILSVLLLISTVVYRAEYRIPIRRIDIVSKFAQDTYIPIRINPAGSYPFMYGMTLMMLPPRYNPALVLAFSTSDY

SEQ ID NO: 17899 - protein, 675 aa, Streptococcus agalactiae
ATGAAAACTGTGCTTAGTGAAGCATCTAGTTCAGCCCCTTCTAATAATAACTCACAAAATTTTCAAACTTTGTCAGGAACAGCTAACAATTTAGTATTAAAAGCTATCTCAGATTTAGATAAAATTCAAAAATTGCCAACGGCTACTAAGCAGTTATATCAAGGTAGTCAAACCTTGACAAAAGGAATCACGGATTATACGAATGCTGTAGGGCAATTACGCAAAGGTGCAGAAACTTTAGATAGTAAATCCAATCAATTGATTTCAGGAACACAAAAAGCAAGTCAGGGAGCTCAAACTTTAGATAGTAAATCGGATCAATTGAGAGATGGAGCGGGGCAATTAGCTAGTGGTTCTGATAGAATTGCAGATGGTTCTAATAAGCTTGCTGGGGGAGGACATCAGTTGACAGATGGGTTGACAGAGTTGTCAGGTGGTGTTTCTCAATTATCAAGTTCTTTGGGTAAAGCTGGGGACCAGTTGTCCATGGTTTCTGTAAACAAGGATAATGCCAATGCTGTATCTAGCCCAGTCACTATCAAGCATGAAGATTATGATAGCGTTGATACGAATGGTGTTGGAATGGCACCATACATGATTTCAGTTGCGTTGATGGTGGTAGCTTTATCAGCCAATGTTATTTTTTGCGAAAGCTTTATCTGGCAAAGAGCCAGC

SEQ ID NO: 17900 - protein, 225 aa, Streptococcus agalactiae
MKTVLSEASSSAPSNNNSQNFQTLSGTANNLVLKAISDLDKIQKLPTATKQLYQGSQTLTKGITDYTNAVGQLRKGAETLDSKSNQLISGTQKASQGAQTLDSKSDQLRDGAGQLASGSDRIADGSNKLAGGGHQLTDGLTELSGGVSQLSSSLGKAGDQLSMVSVNKDNANAVSSPVTIKHEDYDSVDTNGVGMAPYMISVALMVVALSANVIFCESFIWQRAS

SEQ ID NO: 17901 - protein, 831 aa, Streptococcus agalactiae
GTGACTGTTAAGGTTGTCGATCCACGTACAGATGCCGATAAGAATGATCCAGCAGGTAAAGATCAGCAAGTCAATGTAGGTGAGACACCGAAGGCAGAAGATTCTATTGGTAACTTACCAGATCTTCCGAAAGGTACAACAGTAGCCTTTGAAACTCCAGTTGATACGGCAACACCGGGAGACAAACCAGCAAAAGTTGTTGTGACTTACCCAGATGGTTCAAAAGATACTGTAGATGTGACTGTTAAGGTTGTCGATCCACGTACAGATGCCGATAAGAATGATCCAGCAGGTAAAGATCAGCAAGTCAATGTAGGTGAGACACCGAAGGCAGAAGATTCTATTGGTAACTTACCAGATCTTCCGAAAGGTACAACAGTAGCCTTTGAAACTCCAGTTGATACGGCAACACCGGGAGACAAACCAGCAAAAGTTGTTGTGACTTACCCAGATGGTTCAAAAGATACTGTAGATGTGACTGTTAAGGTTGTCGATCCACGTACAGATGCCGATAAGAATGATCCAGCAGGTAAAGATCAGCAAGTCAATGTAGGTGAGACACCGAAGGCAGAAGATTCTATTGGTAACTTACCAGATCTTCCGAAAGGTACAACAGTAGCCTTTGAAACTCCAGTTGATACGGCAACACCGGGAGACAAACCAGCAAAAGTTGTTGTGACTTACCCAGATGGTTCAAAAGATACTGTAGATGTGACTGTTAAGGTTGTCGATCCACGTACAGATGCCGATAAGAATGATCCAGCAGGTAAAGATCAGCAAGTCAATGTAGGTGAGACACCGAAGGCAGAAGATTCTANNNNNTTAATTAAT

SEQ ID NO: 17902 - protein, 277 aa, Streptococcus agalactiae
  VARIANT 273, 274: Xaa = Any Amino Acid
MTVKVVDPRTDADKNDPAGKDQQVNVGETPKAEDSIGNLPDLPKGTTVAFETPVDTATPGDKPAKVVVTYPDGSKDTVDVTVKVVDPRTDADKNDPAGKDQQVNVGETPKAEDSIGNLPDLPKGTTVAFETPVDTATPGDKPAKVVVTYPDGSKDTVDVTVKVVDPRTDADKNDPAGKDQQVNVGETPKAEDSIGNLPDLPKGTTVAFETPVDTATPGDKPAKVVVTYPDGSKDTVDVTVKVVDPRTDADKNDPAGKDQQVNVGETPKAEDSXXLIN

SEQ ID NO: 17903 - protein, 237 aa, Streptococcus agalactiae; identical to SEQ ID NO: 12047

SEQ ID NO: 17904 - protein, 79 aa, Streptococcus agalactiae; identical to SEQ ID NO: 3120

SEQ ID NO: 17905 - protein, 501 aa, Streptococcus agalactiae
ATGCATGTGCGTGATTTTTCGATATCTGAGACTTCAGGAGTTAAGACAGATTATCAAGGAAAATTTAAGGGATTGCATCAAAAAGATACAGTTAATCAGCATGGTGATAAAACGACCTTTGATTATGTGCAAGACTTAGGAGTTAACTATATCCAACTTCAACCAATTTTCGATCATCATCAGACGTTTGATGATGATGGTCACTATGCTTATAATTGGGGATATGATCCTGAAAACTACAACGTTCCAGAAGCAAGCTTCTCTAGTAATCCACATGAACCTGCAACGCGTATTTTAGAATTAAAATCTGCTATCCAAGCGTATCATGATGCAGGCATTGGTGTTATTATGGATGTTGTCTATAATCATACTTTTTCATCAACTGATTCTGCATTTCAACTAACGGTTCCAGATTATTATTATCGAATGAATCACAATGGAACATTTCAAAATGGTTCAGGCTGTGGTAATGAAACAGCTAGGAAAAAGAANNNNNTTAAT

SEQ ID NO: 17906 - protein, 167 aa, Streptococcus agalactiae
  VARIANT 164, 165, 166: Xaa = Any Amino Acid
MHVRDFSISETSGVKTDYQGKFKGLHQKDTVNQHGDKTTFDYVQDLGVNYIQLQPIFDHHQTFDDDGHYAYNWGYDPENYNVPEASFSSNPHEPATRILELKSAIQAYHDAGIGVIMDVVYNHTFSSTDSAFQLTVPDYYYRMNHNGTFQNGSGCGNETARKKXXXN

SEQ ID NO: 17907 - protein, 474 aa, Streptococcus agalactiae
ATGACTAAGCTAAGGCGATTTCGGTTTCCGTTAAGATTTTATTTCACATTAATGTTTGTGTTAACGATGCTTTTCTCAGTCCTAGCTTCTCTTTTACTAGTTGCAGCAATAGTTTTTACTTTTTTTCAAGGAGTCTTAACTACTCATGTATTACAAGTTAGCGCTCTCGCTGTTGTTTTTTTAAGCCTTGTGATAGCTAGTATTAGTATGTGGTACGGTTCTTATCATTTAACAAAACCAATTTTAGATATTAGCCATATTGTGTCCAATGTTGCAGGCGGTGACTTTGAAGGGCATATTTATCGAAACAGTAATCGTCGTAAATCCTATGAGTATTATAATGAATTGGATGAGCTATCTGAAAGTATTAATCAGATGATTGTTTCTTTATCTCATATGGATCATATGCGAAAAGACTTTATCACTAATGTTTCTCATGAGCTAAAGACTCCGATTGCTGCAGTAGCTAATATG

SEQ ID NO: 17908 - protein, 158 aa, Streptococcus agalactiae
MTKLRRFRFPLRFYFTLMFVLTMLFSVLASLLLVAAIVFTFFQGVLTTHVLQVSALAVVFLSLVIASISMWYGSYHLTKPILDISHIVSNVAGGDFEGHIYRNSNRRKSYEYYNELDELSESINQMIVSLSHMDHMRKDFITNVSHELKTPIAAVANM

SEQ ID NO: 17909 - protein, 132 aa, Streptococcus agalactiae
ATGAAATTGCCACAAGAGGAGCGGGCAGCAGCTATCGTTAATGTTTACGCACAAAATCAGCCAATCGCAAATCTAACAGATCACTATGCCTTGATTATTAACTTGGTAGATGTCAATGCTGGAGGANNNNNT

SEQ ID NO: 17910 - protein, 44 aa, Streptococcus agalactiae
  VARIANT 43, 44: Xaa = Any Amino Acid
MKLPQEERAAAIVNVYAQNQPIANLTDHYALIINLVDVNAGGXX

SEQ ID NO: 17911 - DNA, 207 bp, Streptococcus agalactiae
  misc_feature 198, 199, 200, 201, 202: n = A,T,C or G
atgcatggagaatctcgttcttatcagagatcccctttagctattgccacaccacatcaattgttaaaattttatcatgcttttgatttgctaattgttgatgaagttgatgcttttccatatgtcgacaacccgatactatgccatggtgtaaaacaggccttaaagaaaaacggaacaagtatttttctggctgcnnnnnttaat

SEQ ID NO: 17912 - protein, 69 aa, Streptococcus agalactiae
  VARIANT 67, 68: Xaa = Any Amino Acid
MHGESRSYQRSPLAIATPHQLLKFYHAFDLLIVDEVDAFPYVDNPILCHGVKQALKKNGTSIFLAAXXN

SEQ ID NO: 17913 - DNA, 960 bp, Streptococcus agalactiae
  misc_feature 955, 956, 957, 958, 959: n = A,T,C or G
atggagtcaaatggtaaagaagcagacccccaagctccagtaaaagtagaggttaactatgataagccattagaagcttcagatgaaacccttaaagttgttcactttaaagatgatggtcaaacagaagtattaaaatctaaagatactgcagaaactaagaacactagcagtgatgttgcttttaaaacagattcattctccatttatgcaattgttcaagaggataatacagaagttcctaggttaacttaccattttcaaaataatgacggaactgattatgatttcctgacagcttcaggtatgcaagttcatcatcaaattataaaagatggagaatctctaggagaagttgggattccgacgattaaagcaggagagcattttaatggttggtatacctatgatcctactactggaaagtatggtgaccctgttaaatttggtgagccaataactgtaactgagacaaaagaaatttgtgttcgtccatttatgagtaaagtggcgacagtaactttatatgatgattctgctggtaaaagtattttggagcgttatcaagtaccattggatagttcaggaaacggaaccgcggatttaagttcatttaaagtttcaccacccacttcaacattgttatttgtaggttggtctaaaactcaaaatggagctccactttctgaatcagaaattcaagcattacctgtatcttcagacataagtctttatcctgtctttaaagaatcgtacggtgttgaattcaacacaggcgacttatcaacaggagttacctatattgcacctcgtcgtgtgttaacaggccaacctgcttcgacaattaagcctaatgatccaacgaggccaggttatacttttgcagggtggtacacagctgctagtggtggggcagcctttgatttaatcaagtctgaccaaggaacgacgctannnnnt

SEQ ID NO: 17914 - protein, 320 aa, Streptococcus agalactiae
  VARIANT 319, 320: Xaa = Any Amino Acid
MESNGKEADPQAPVKVEVNYDKPLEASDETLKVVHFKDDGQTEVLKSKDTAETKNTSSDVAFKTDSFSIYAIVQEDNTEVPRLTYHFQNNDGTDYDFLTASGMQVHHQIIKDGESLGEVGIPTIKAGEHFNGWYTYDPTTGKYGDPVKFGEPITVTETKEICVRPFMSKVATVTLYDDSAGKSILERYQVPLDSSGNGTADLSSFKVSPPTSTLLFVGWSKTQNGAPLSESEIQALPVSSDISLYPVFKESYGVEFNTGDLSTGVTYIAPRRVLTGQPASTIKPNDPTRPGYTFAGWYTAASGGAAFDLIKSDQGTTLXX

SEQ ID NO: 17915 - DNA, 948 bp, Streptococcus agalactiae
  misc_feature 935, 936, 937, 938, 939: n = A,T,C or G
atggttaagaccccaataaaaaaagcaaagaatggaacctattattttcgtgcaaatctaggttatgattctaaaggaaaaaaaattcaaaaatatcgtagtggattcactactaaaaaagaagcaagagaagaatattcaaaactactactgatgaaaccagaagaattaagtgagaataaggataaaatgacgtttaatcattatatctttgaaatttttcttccatggtataagacacaggtaaagctcagaacatatgaaaatcgcttaccaactattaagaaacatttctcttattttgataaaatggctgtttccgatattgagcctattgatgtgcaaaattggcaactaaaattatcaaagaaatgtaagtcttcttatgtgagagctgttcaaggactattttcagttgctatggatcgagcaattgtccttgggataaccaccacaaatccatctaagattattggcaatgtgaaaaagcaaaagtctaaaattgaattttggacaaaagaagaatttgaaaaagtaatctctctaatttataaagaagattactatcaacactttttatttatctctctgtggtttttatttatgactggaatgcgaattggtgaagctactgccattcaatgggaagatattgattttgactctggagtactaaccatcaacaaaacactttattacaagaatcaatcggattatagatttgttgaaccaaaaacaaaggcgagtgttcgtcatattgtattagatgaatgtactctaaattatctatccgaatggaagaaagcacaacaaaatctaattcagacagactttgtaatgagctataacggtattcctacccaaaaacatacgctagcacatgctattgaacgctatgctaagctggctagtattcatcgaatcagaattcatgnnnnnttaattaat

SEQ ID NO: 17916 - protein, 316 aa, Streptococcus agalactiae
  VARIANT 312, 313: Xaa = Any Amino Acid
MVKTPIKKAKNGTYYFRANLGYDSKGKKIQKYRSGFTTKKEAREEYSKLLLMKPEELSENKDKMTFNHYIFEIFLPWYKTQVKLRTYENRLPTIKKHFSYFDKMAVSDIEPIDVQNWQLKLSKKCKSSYVRAVQGLFSVAMDRAIVLGITTTNPSKIIGNVKKQKSKIEFWTKEEFEKVISLIYKEDYYQHFLFISLWFLFMTGMRIGEATAIQWEDIDFDSGVLTINKTLYYKNQSDYRFVEPKTKASVRHIVLDECTLNYLSEWKKAQQNLIQTDFVMSYNGIPTQKHTLAHAIERYAKLASIHRIRIHXXLIN

SEQ ID NO: 17917 - DNA, 771 bp, Streptococcus agalactiae
  misc_feature 762, 763, 764, 765, 766: n = A,T,C or G
gtgacttacccagatggttcaaaagatactgtagatgtgactgttaaggttgtcgatccacgtacagatgccgataagaatgatccagcaggtaaagatcagcaagtcaatgtaggtgagacaccgaaggcagaagattctattggtaacttaccagatcttccgaaaggtacaacagtagcctttgaaactccagttgatacggcaacaccgggagacaaaccagcaaaagttgttgtgacttacccagatggttcaaaagatactgtagatgtgactgttaaggttgtcgatccacgtacagatgccgataagaatgatccagcaggtaaagatcagcaagtcaatgtaggtgagacaccgaaggcagaagattctattggtaacttaccagatcttccgaaaggtacaacagtagcctttgaaactccagttgatacggcaacaccgggagacaaaccagcaaaagttgttgtgacttacccagatggttcaaaagatactgtagatgtgactgttaaggttgtcgatccacgtacagatgccgataagaatgatccagcaggtaaagatcagcaagtcaatgtaggtgagacaccgaaggcagaagattctattggtaacttaccagatcttccgaaaggtacaacagtagcctttgaaactccagttgatacggcaacaccgggagacaaaccagcaaaagttgttgtgacttacccagatggttcaaaagatactgtagatgtgactgttaaggtnnnnnttaat

SEQ ID NO: 17918 - protein, 257 aa, Streptococcus agalactiae
  VARIANT 255, 256: Xaa = Any Amino Acid
MTYPDGSKDTVDVTVKVVDPRTDADKNDPAGKDQQVNVGETPKAEDSIGNLPDLPKGTTVAFETPVDTATPGDKPAKVVVTYPDGSKDTVDVTVKVVDPRTDADKNDPAGKDQQVNVGETPKAEDSIGNLPDLPKGTTVAFETPVDTATPGDKPAKVVVTYPDGSKDTVDVTVKVVDPRTDADKNDPAGKDQQVNVGETPKAEDSIGNLPDLPKGTTVAFETPVDTATPGDKPAKVVVTYPDGSKDTVDVTVKVXXN

SEQ ID NO: 17919 - DNA, 789 bp, Streptococcus agalactiae
atgaaaaataaaggactgatagctacgctaattctattgaccatattagtggttggggaattattttataacaaatcagaaaaacatcttaatttatcagaaaagcaagttgttaaaattggtattttacagtatgtaacccatgatgctttggatgctattgaaaagggagttgaagatggtctagctcaagaaggatataaagggaaaaaagttaaattaaccgttttaaacgccgaagctgatcaaagtaaaattcaagcgatgagtaaacaattagttaatcatcacaatgatattttgattggaattgcgacaccatcagcacaaggtttagcagcttcgactaaggatactcctataatcatgggagctgtttctgatcctttaggggccaagttagtaacgaatatgaagaaaccaacaactaatgttacaggattatcaaacgttgttccgaccaagcaaactgtgcaattaatcaaggatataactcccaatgttaaacgtataggaattctttacgctagtagcgaagataattctgtgtcacaagtaactgagtttacaaaatatgctcaaaaagcagggctagaagttcttaaatattctgtaccatctacaaatgaaattaaaacaagtatgtcagtcatgaccaaaaaagtagacgctgtctttgttccacaagataatactattgcgagtgcttttagaacagttatcgtagcagcaaaccaagctaatatacctgtgtattccagtgttgataccatggttgaacaaggagta

SEQ ID NO: 17920 - protein, 263 aa, Streptococcus agalactiae
MKNKGLIATLILLTILVVGELFYNKSEKHLNLSEKQVVKIGILQYVTHDALDAIEKGVEDGLAQEGYKGKKVKLTVLNAEADQSKIQAMSKQLVNHHNDILIGIATPSAQGLAASTKDTPIIMGAVSDPLGAKLVTNMKKPTTNVTGLSNVVPTKQTVQLIKDITPNVKRIGILYASSEDNSVSQVTEFTKYAQKAGLEVLKYSVPSTNEIKTSMSVMTKKVDAVFVPQDNTIASAFRTVIVAANQANIPVYSSVDTMVEQGV

SEQ ID NO: 17921 - protein, 279 aa, Streptococcus agalactiae
TTGCCAGAGATATTTTCGGACGAAAAGCAATCGGATAGTCAAGTTGGAATTTATGGGCGCTTGAATAATGAGCGTGTGATAAAATGGATTGATGCTGACTTAATTGAACTTCATCCCAATTTGAATAAATACAAAGTATTTTTACCTGCTTCTAATGGAAGCGGGGCGATAGGCGAAGTGCTATCGACCCCACTCGTGGGGTACCCCACTCGTGGGGTCACACACAAACCTTTATTTCTTTTGGTGCATTTGAGACTAAAAAGGAAGCTGAGAACTGCT

SEQ ID NO: 17922 - protein, 93 aa, Streptococcus agalactiae
MPEIFSDEKQSDSQVGIYGRLNNERVIKWIDADLIELHPNLNKYKVFLPASNGSGAIGEVLSTPLVGYPTRGVTHKPLFLLVHLRLKRKLRTA

SEQ ID NO: 17923 - protein, 231 aa, Streptococcus agalactiae
TTGAAGTTTATAAAGACAGATCTAGCTCGTGCAATGCTAGGGACACTCAAAGTAACACAACATAATCAATCAAAAGAGGTTTGGATCAATGTTCCTTGGTTCGATTTTAATGATTATTCTATTATTGATTGGTCTAAATCTGTTAAAGAAATAGAGGAAGAGCTTTATGATTACTTTAATGTACCAGACTATATTATCGCTGAGTTGAAAGCTAATGTTAGAAGGATGGAC

SEQ ID NO: 17924 - protein, 77 aa, Streptococcus agalactiae
MKFIKTDLARAMLGTLKVTQHNQSKEVWINVPWFDFNDYSIIDWSKSVKEIEEELYDYFNVPDYIIAELKANVRRMD

SEQ ID NO: 17925 - protein, 90 aa, Streptococcus agalactiae
ATGTCTGAGTTAGACGTACAACTCTATCGAAAACATGGCCTCAGTCAGGAAGAAATTGCTTTTATTGAAAATAAAGTGAAGGAGATTAGG

SEQ ID NO: 17926 - protein, 30 aa, Streptococcus agalactiae; identical to SEQ ID NO: 13156

SEQ ID NO: 17927 - protein, 162 aa, Streptococcus agalactiae
ATGACAGAATTTAAATTCAATAAATTAACGCCATTAAATGATATTGATATTGATTCGTCGTATATAGAAGCAATGAAATATGCGCTAGAAGACGAAGATATCAAAAATATAGCTATATCAGGAAATTATGGTTCGGGTAAAAGTAGTTTTATAGAAACTTTA

SEQ ID NO: 17928 - protein, 54 aa, Streptococcus agalactiae
MTEFKFNKLTPLNDIDIDSSYIEAMKYALEDEDIKNIAISGNYGSGKSSFIETL

SEQ ID NO: 17929 - protein, 864 aa, Streptococcus agalactiae
ATGCCTCCTCATGATGTTAAAGTCTATGCAGGTTGGCAAAAGGTAACATATCGTGTCAATATTGATCCAAACGGAGGCCGATTATCAAAAACAGATGATACCTATTTAGATTTGCATTATGGTGATCGTATTCCGGATTATACAGATATTACAAGGGATTATATCCAAGATCCTTCAGGTACATATTATTATAAGTATGATTCACGAGATAAAGATCCCGACTCAACTAAAGATGCCTATTATACGACAGATACTAGTCTCTCAAATGTTGATACAACAACTAAGTACAAGTACGTAAAAGACGCTTACAAATTAGTCGGTTGGTATTATGTTAATCCAGATGGTAGTATTAGACCTTATAACTTTTCAGGTGCTGTAACTCAAGATATCAATTTAAGAGCTATTTGGCGAAAGGCTGGAGATTATCATATTATATACAGCAATGATGCTGTTGGTACAGATGGAAAGCCAGCATTGGATGCTTCTGGTCAGCAATTACAAACAAGTAATGAGCCTACTGACCCTGATTCCTATGACGATGGCTCCCATTCAGCCTTACTGAGACGTCCGACAATGCCAGATGGCTATCGTTTCCGTGGCTGGTGGTACAATGGTAAAATTTATAACCCATATGATTCCATTGATATTGACGCCCATTTAGCAGATGCTAATAAAAATATCACCATAAAACCTGTCATTATTCCAGTAGGAGATATCAAATTAGAAGATACCTCCATCAAATACAATGGTAACGGTGGTACTAGAGTAGAAAATGGTAATGTGGTAACACAAGTGGAGACACCGCGTATGGAGTTGAATAGCACAACTACAATTCCTGAAAACCAATACTNNNNNTTAATTAAT

SEQ ID NO: 17930 - protein, 288 aa, Streptococcus agalactiae
  VARIANT 284, 285: Xaa = Any Amino Acid
MPPHDVKVYAGWQKVTYRVNIDPNGGRLSKTDDTYLDLHYGDRIPDYTDITRDYIQDPSGTYYYKYDSRDKDPDSTKDAYYTTDTSLSNVDTTTKYKYVKDAYKLVGWYYVNPDGSIRPYNFSGAVTQDINLRAIWRKAGDYHIIYSNDAVGTDGKPALDASGQQLQTSNEPTDPDSYDDGSHSALLRRPTMPDGYRFRGWWYNGKIYNPYDSIDIDAHLADANKNITIKPVIIPVGDIKLEDTSIKYNGNGGTRVENGNVVTQVETPRMELNSTTTIPENQYXXLIN

SEQ ID NO: 17931 - DNA, 321 bp, Streptococcus agalactiae
atgggccaagaacctatcatcgaatatcaaaatatcaataaagtgtatggggaaaatgttgcggttgaagatattaaccttaaaatttaccctggtgatttcgtttgtttcatcggtacgagtggatcaggtaaaacaacattaatgcgtatggttaaccatatgttaaaaccaacaaatggtactctattatttaagggaaaagatatctctactattaaccccattgaattaagacgcagaattggatatgttatccaaaacattggtttaatgcctcatatgaccatttacgaaaatatagttcttgtacccaaatat

SEQ ID NO: 17932 - protein, 107 aa, Streptococcus agalactiae
MGQEPIIEYQNINKVYGENVAVEDINLKIYPGDFVCFIGTSGSGKTTLMRMVNHMLKPTNGTLLFKGKDISTINPIELRRRIGYVIQNIGLMPHMTIYENIVLVPKY

SEQ ID NO: 17933 - DNA, 630 bp, Streptococcus agalactiae
  misc_feature 621, 622, 623, 624, 625: n = A,T,C or G
atgagccatattcaacgggaaacgtcttgctcgaggccgcgattaaattccaacatggatgctgatttatatgggtataaatgggctcgcgataatgtcgggcaatcaggtgcgacaatctatcgattgtatgggaagcccgatgcgccagagttgtttctgaaacatggcaaaggtagcgttgccaatgatgttacagatgagatggtcagactaaactggctgacggaatttatgcctcttccgaccatcaagcattttatccgtactcctgatgatgcatggttactcaccactgcgatccccgggaaaacagcattccaggtattagaagaatatcctgattcaggtgaaaatattgttgatgcgctggcagtgttcctgcgccggttgcattcgattcctgtttgtaattgtccttttaacagcgatcgcgtatttcgtctcgctcaggcgcaatcacgaatgaataacggtttggttgatgcgagtgattttgatgacgagcgtaatggctggcctgttgaacaagtctggaaagaaatgcataagcttttgccattctcaccggattcagccgtcactcatggtgatttctcacttgataaccttatttttgannnnnttaat

SEQ ID NO: 17934 - protein, 210 aa, Streptococcus agalactiae
  VARIANT 207, 208, 209: Xaa = Any Amino Acid
MSHIQRETSCSRPRLNSNMDADLYGYKWARDNVGQSGATIYRLYGKPDAPELFLKHGKGSVANDVTDEMVRLNWLTEFMPLPTIKHFIRTPDDAWLLTTAIPGKTAFQVLEEYPDSGENIVDALAVFLRRLHSIPVCNCPFNSDRVFRLAQAQSRMNNGLVDASDFDDERNGWPVEQVWKEMHKLLPFSPDSAVTHGDFSLDNLIFXXXN

SEQ ID NO: 17935 - DNA, 912 bp, Streptococcus agalactiae
  misc_feature 907, 908, 909, 910, 911: n = A,T,C or G
atgataggaattactgaagttaatccaatgccacctcattatgtttgcccaaattgtcagcattctgaatttatcacagatggttcttgtggttcaggttacgatttaccaaataaaaattgtcctaaatgtggtactttgtacaagaaagatggacaggatattccgtttgaaactttcttaggatttgatggagataaggttcctgatattgatctaaatttctctggagatgatcaaccttctgctcacttagatgttcgtgatatctttggagaagaatatgcttttcgtgcaggaacggtaggtaccgtagctgaaaaaactgcctttggttttgtcaaaggttacgaacgagattacaataaattttataacgatgcagaggtcgaacggttagcgactggtgctgcgggagtcaaacgttctacaggtcaacaccccggtggtatcgttgttattcctaactatatggatgtttatgattttactccggttcaatatccagcagatgatatgacagctgcttggcagacaactcacttcaatttccatgatattgatgagaatgtcttgaagttagatattctaggacatgatgatcctactatgattcgtaaacttcaggatttatcaggaattgatccatcaaatatccttccagatgatccagacgttatgaagttattttctggtacggaagttttaggagtgacagaagagcaaattggaactcctacagggatgcttggtattcctgagtttggtacgaactttgttcgtggtatggtgaaacgaaccatccaccacatttgcagaattgtgcactgtcagactatccatggtacgatggttggtaggtatgctcagacttatcaagaagtatgctactatcaaccgtatggtnnnnnt

SEQ ID NO: 17936 - protein, 304 aa, Streptococcus agalactiae
  VARIANT 303, 304: Xaa = Any Amino Acid
MIGITEVNPMPPHYVCPNCQHSEFITDGSCGSGYDLPNKNCPKCGTLYKKDGQDIPFETFLGFDGDKVPDIDLNFSGDDQPSAHLDVRDIFGEEYAFRAGTVGTVAEKTAFGFVKGYERDYNKFYNDAEVERLATGAAGVKRSTGQHPGGIVVIPNYMDVYDFTPVQYPADDMTAAWQTTHFNFHDIDENVLKLDILGHDDPTMIRKLQDLSGIDPSNILPDDPDVMKLFSGTEVLGVTEEQIGTPTGMLGIPEFGTNFVRGMVKRTIHHICRIVHCQTIHGTMVGRYAQTYQEVCYYQPYGXX

SEQ ID NO: 17937 - DNA, 810 bp, Streptococcus agalactiae
  misc_feature 805, 806, 807, 808, 809: n = A,T,C or G
gtgacttacccagatggttcaaaagatactgtagatgtgactgttaaggttgtcgatccacgtacagatgccgataagaatgatccagcaggtaaagatcagcaagtcaatgtaggtgagacaccgaaggcagaagattctattggtaacttaccagatcttccgaaaggtacaacagtagcctttgaaactccagttgatacggcaacaccgggagacaaaccagcaaaagttgttgtgacttacccagatggttcaaaagatactgtagatgtgactgttaaggttgtcgatccacgtacagatgccgataagaatgatccagcaggtaaagatcagcaagtcaatgtaggtgagacaccgaaggcagaagattctattggtaacttaccagatcttccgaaaggtacaacagtagcctttgaaactccagttgatacggcaacaccgggagacaaaccagcaaaagttgttgtgacttacccagatggttcaaaagatactgtagatgtgactgttaaggttgtcgatccacgtacagatgccgataagaatgatccagcaggtaaagatcagcaagtcaatgtaggtgagacaccgaaggcagaagattctattggtaacttaccagatcttccgaaaggtacaacagtagcctttgaaactccagttgatacggcaacaccgggagacaaaccagcaaaagttgttgtgacttacccagatggttcaaaagatactgtagatgtgactgttaaggttgtcgatccaagtacagatgccgataagaatgatccagcaggtnnnnnt

SEQ ID NO: 17938 - protein, 270 aa, Streptococcus agalactiae
  VARIANT 269, 270: Xaa = Any Amino Acid
MTYPDGSKDTVDVTVKVVDPRTDADKNDPAGKDQQVNVGETPKAEDSIGNLPDLPKGTTVAFETPVDTATPGDKPAKVVVTYPDGSKDTVDVTVKVVDPRTDADKNDPAGKDQQVNVGETPKAEDSIGNLPDLPKGTTVAFETPVDTATPGDKPAKVVVTYPDGSKDTVDVTVKVVDPRTDADKNDPAGKDQQVNVGETPKAEDSIGNLPDLPKGTTVAFETPVDTATPGDKPAKVVVTYPDGSKDTVDVTVKVVDPSTDADKNDPAGXX

SEQ ID NO: 17939 - DNA, 993 bp, Streptococcus agalactiae
  misc_feature 980, 981, 982, 983, 984: n = A,T,C or G
atgtcagagggatatacagagttcctaggttacttaccatttcaaaataatgacggaactgattatgattccctgacagcttcaggtatgcaagttcatcatcaaattataaaagatggagaatctctaggagaagttgggattccgacgattaaagcaggagagcattttaatggttggtatacctatgatcctactactggaaagtatggtgaccctgttaaatttggtgagccaataactgtaactgagacaaaagaaatttgtgttcgtccatttatgagtaaagtggcgacagtaactttatatgatgattctgctggtaaaagtattttggagcgttatcaagtaccattggatagttcaggaaacggaaccgcggatttaagttcatttaaagtttcaccacccacttcaacattgttatttgtaggttggtctaaaactcaaaatggagctccactttctgaatcagaaattcaagcattacctgtatcttcagacataagtctttatcctgtctttaaagaatcgtacggtgttgaattcaacacaggcgacttatcaacaggagttacctatattgcacctcgtcgtgtgttaacaggccaacctgcttcgacaattaagcctaatgatccaacgaggccaggttatacttttgcagggtggtacacagctgctagtggtggggcagcctttgattttaatcaagtcttgaccaaggatacgacgctatatgcacattggtcgcccgcacaaacaacctacacgataaactactggcaacaatcagcaacggataataaaaatgctactgatgcgcaaaagacatatgagtacgcagggcaagtaacacgatcaggcctatctttatctaatcagacgctaacacaacaagatattaatgataaactaccgactggctttaaagttaataatacgaggacagaaacttctgtcatgataaaagacgaggnnnnnttaattaat

SEQ ID NO: 17940 - protein, 331 aa, Streptococcus agalactiae
  VARIANT 327, 328: Xaa = Any Amino Acid
MSEGYTEFLGYLPFQNNDGTDYDSLTASGMQVHHQIIKDGESLGEVGIPTIKAGEHFNGWYTYDPTTGKYGDPVKFGEPITVTETKEICVRPFMSKVATVTLYDDSAGKSILERYQVPLDSSGNGTADLSSFKVSPPTSTLLFVGWSKTQNGAPLSESEIQALPVSSDISLYPVFKESYGVEFNTGDLSTGVTYIAPRRVLTGQPASTIKPNDPTRPGYTFAGWYTAASGGAAFDFNQVLTKDTTLYAHWSPAQTTYTINYWQQSATDNKNATDAQKTYEYAGQVTRSGLSLSNQTLTQQDINDKLPTGFKVNNTRTETSVMIKDEXXLIN

SEQ ID NO: 17941 - protein, 783 aa, Streptococcus agalactiae
ATGGTTAAATACAACGTTCCAACAGCAGCCTATGGCACATATTCAGATTTTGAAAAAGCTAAAGCCTACATCGAAGAGCAGGGTGCACCAATCGTGGTCAAGGCTGATGGCTTGGCGTTAGGCAAGGGCGTGGTCGTGGCTGAAACCGTTGAGCAGGCGGTAGAGGCGGCGCAAGAGATGCTTTTGGACAACAAGTTTGGCGACTCAGGAGCGCGTGTGGTTATCGAGGAATTTTTGGATGGTGAAGAGTTCTCCCTCTTTGCCTTCGCTAATGGCGACAAGTTTTACATCATGCCGACAGCTCAGGATCACAAGTGTGCCTATGACGGTGATATGGGACCAAACACTGGCGGTATGGGTGCCTATGCGCCAGTTCCCCACCTGCCTCAGAGCGTAGTGGATACGGCGGTTGAAACCATCGTTAAGCCTATCCTTGAGGGTATGATTACTGAAGGGCGTCCTTATCTAGGCGTCCTCTATGCGGGGCTTATCCTGACGGCTGATGGTCCGAAGGTTATCGAGTTCAACTCACGTTTCGGTGACCCAGAAACTCAGATTATCCTCCCTCGCCTGACTTCTGATTTTGCTCAGAACATCGACGACATCATGATGGGCATCGAGCCTTACATCACTTGGCAGAAGGACGGCGTGACTTTGGGCGTTGTCGTTGCCTCAGAAGGCTATCCGCTCGATTACGAGAAAGGTGTGCCACTGCCTGAAAAGACCGACGGCGACATCATCACCTACTATGCCGGAGCTAAGTTGCGGAAAAGGCAANNNNNT

SEQ ID NO: 17942 - protein, 261 aa, Streptococcus agalactiae
  VARIANT 260, 261: Xaa = Any Amino Acid
MVKYNVPTAAYGTYSDFEKAKAYIEEQGAPIVVKADGLALGKGVVVAETVEQAVEAAQEMLLDNKFGDSGARVVIEEFLDGEEFSLFAFANGDKFYIMPTAQDHKCAYDGDMGPNTGGMGAYAPVPHLPQSVVDTAVETIVKPILEGMITEGRPYLGVLYAGLILTADGPKVIEFNSRFGDPETQIILPRLTSDFAQNIDDIMMGIEPYITWQKDGVTLGVVVASEGYPLDYEKGVPLPEKTDGDIITYYAGAKLRKRQXX

SEQ ID NO: 17943 - protein, 249 aa, Streptococcus agalactiae
TTGGAAGCTCGTAAAGCATGGGACAAACTTGTTGGTCGTGAAGGTGAAGTTGTTACTGTTAAAGGTACACGTGCTGTTAAAGGCGGACTTTCAGTTGAATTTGAAGGACTTCGTGGTTTCATCCCAGCTTCAATGATTGATACTCGTTTTGTACGTAACACTGAAAAATTTGTTGGACAAGAATTTGATGCTAAAATCAAAGAAGTTGATGCAGCAGAAAATCGCTTCATCCTTTCACGTCGTNNNNNT

SEQ ID NO: 17944 - protein, 83 aa, Streptococcus agalactiae
  VARIANT 82, 83: Xaa = Any Amino Acid
MEARKAWDKLVGREGEVVTVKGTRAVKGGLSVEFEGLRGFIPASMIDTRFVRNTEKFVGQEFDAKIKEVDAAENRFILSRRXX

SEQ ID NO: 17945 - protein, 93 aa, Streptococcus agalactiae
ATGGAACTACAGCTTCAGGAATTATCGCCGGAACAACTAAATAATATCACTGGTGGTGGTTGGATTGATGGTATTAAGAAAATAATANNNNNT

SEQ ID NO: 17946 - protein, 31 aa, Streptococcus agalactiae
  VARIANT 30, 31: Xaa = Any Amino Acid
MELQLQELSPEQLNNITGGGWIDGIKKIIXX

SEQ ID NO: 17947 - protein, 180 aa, Streptococcus agalactiae; identical to SEQ ID NO: 17143

SEQ ID NO: 17948 - protein, 60 aa, Streptococcus agalactiae; identical to SEQ ID NO: 17144

SEQ ID NO: 17949 - protein, 525 aa, Streptococcus agalactiae
ATGCAATACCCTTCAGAGGTTCCAGGGATTACTAATGCTGAATTTATCCGAGCAGCTATGAATGCGGGAAAGGCTGATGATGATAAAATTTCCATCCGCCAATTTATTACTAAGTTAGATGAAAAGATGGAACTACTTGGCATGAAAGAAGAAATGGCGGAACGTTATCTTAACGAAGGTTTTTCAGGTGGTGAGAAGAAGCGCAATGAAATTTTACAACTCCTAATGTTAGAGCCTAAGTTTGCCCTCTTGGATGAGATTGACTCTGGCCTGGATATTGATGCTCTTAAAGTGGTATCAAAGGGAGTCAATGAAATGCGTGGTGAAGGTTTTGGTGCTATGATTATTACACACTATCAACGCCTTTTGAATTACATTACACCAGATAAAGTACACGTTATGATGGACGGGAAGGTAGTATTGTCAGGAGGACCAGAATTAGCGGTTCGCCTTGAGAAAGAAGGTTATGCTCAAATCGCTGAAGAGCTTGGTTTAGAGTATAAAGAAAAAGNNNNNTTAATTAAT

SEQ ID NO: 17950 - protein, 175 aa, Streptococcus agalactiae
  VARIANT 171, 172: Xaa = Any Amino Acid
MQYPSEVPGITNAEFIRAAMNAGKADDDKISIRQFITKLDEKMELLGMKEEMAERYLNEGFSGGEKKRNEILQLLMLEPKFALLDEIDSGLDIDALKVVSKGVNEMRGEGFGAMIITHYQRLLNYITPDKVHVMMDGKVVLSGGPELAVRLEKEGYAQIAEELGLEYKEKXXLIN

SEQ ID NO: 17951 - DNA, 168 bp, Streptococcus agalactiae
gtgcttaatgccgataaaatcaacgaaggacaagagaaagacttgaataagctaggtgttaaggcagaaggcgatgacaaagttgttattactttatctagtccgtctccgcaattcatctactaccttgcattcactaacttcatgccacaaaaacaagaaattggt

SEQ ID NO: 17952 - protein, 56 aa, Streptococcus agalactiae
MLNADKINEGQEKDLNKLGVKAEGDDKVVITLSSPSPQFIYYLAFTNFMPQKQEIG

SEQ ID NO: 17953 - DNA, 132 bp, Streptococcus agalactiae
atgagaactgtttttgaacaggccattgatcaacgctcttcaactgatgcctggagaaatgctctttctatttgggaacctgtctgcaatgaaattttcgatcgtctgattaaaccacgctgggagattaga

SEQ ID NO: 17954 - protein, 44 aa, Streptococcus agalactiae
MRTVFEQAIDQRSSTDAWRNALSIWEPVCNEIFDRLIKPRWEIR

SEQ ID NO: 17955 - DNA, 912 bp, Streptococcus agalactiae
atgattaaatatattttaaagcgtgttgctattttgttagtaacgctatgggttgtcataaccctatcgttctttctgatgcagatccttccaggaacaccctacaataatccaaaactcactgaagaaatgatcgcattgcttaataaacagtatggtttagacaagcctgtatggcaacaatatttgacttacctttggaatgtacttcatggtgactttggaacgagttatcaatcagtgaatcagccagtatcacgtatgattagcttgagattaggagtttcagtacatctaggtgttcaggctctcgtatttggtgttttaggcggtattttggtaggagctatttcggcacgtcataagaatgataaagtcgatggtatcttaagtgttattgcaacgctagggatttctatgccttcatttatcattggtatcttattattagactattttggatttaagtggaacttgttgcctttatcaggttgggggactttctctcaaaccattttaccttctttagctctaggactccctacattagcatctgtttcacgcttcttccgtagtgaaatgattgaaactttaaattctgattatgtgcaactagctcgttcaaaaggtatgacaattcgtcaagtaactcgcaaacatgcttaccgtaattctatgattccaattttaactctaattggccctttggcggcgggtctgttaactggttctgcactaattgagcagattttctcgattccaggaattgggcagcagtttgttacttcgattccaacaaaagactatcctgttattatggggacaaccattgtttatgcagtaatgttgatggttgctatcttgataacagacgttgttattagtatcgtagacccacgtgttcgcttgcag

SEQ ID NO: 17956 - protein, 304 aa, Streptococcus agalactiae; identical to SEQ ID NO: 4634

SEQ ID NO: 17957 - DNA, 1029 bp, Streptococcus agalactiae
atggcagataaaaacagaacatttaaacttgtaggtgcaggatcttctagcacacaagaaaaaattgaaaagcctgctctttcgtttatgcaagatgcgtggcgtcgcttgaaaaaaaacaaattagcagtagtttcactctatttattagctcttttacttactttttcgttagcctcaaatttatttgtaactcagaaggatgctaatgggtttgattcgaaaaaagtaactacatatcgcaacttaccacctaaattgagttcaaaccttcctttttggaatggtagcattaagtacgctggaaatacagaatctacagacgcttataagtctcaaaatgtccctgaaaaagttaagtatgctttaggtacagattctctagggagaagtgttgctaagcgcatcatcgtaggtattcggatttccttacttgtagctattgcagctacattcattgatttaattatcggtgttacatacggtcttgtttcaggttttgctggaggacgccttgatacattaatgcaacgtatcgtagaggtaatttcatcaattccaaacttagttatcgttacaatgttaggtttggtccttggtaacggtattacggctattattatctctattgcttttaccggatggacttctatgtctcgtcaggtaaggaatttaaccctatcatatcgagaaagagagtttgtgcttgctgcacgttcacttggggaaagtccaattaaaatagccttcaaacatattttacctaacatttctggtattatcattgtacaaattatgatgacaatcccaagtgctattatgtatgaagcggtactttcagcaatcaatttaggtgttaaaccaccgacagcttcattaggatcattgatttcagatgcacaagaaaatttacaatattatccatatcaagttatcttgccagctttagcattggtaatgatttcattggcatttattttgcttggtgatgggttgcgagatgcttttgatccaaaatctagcgatgaa

SEQ ID NO: 17958 - protein, 343 aa, Streptococcus agalactiae; identical to SEQ ID NO: 4636

SEQ ID NO: 17959 - DNA, 1044 bp, Streptococcus agalactiae
atggaaaaagaaactattttaagtgttaataatcttcatgttgacttccacacatatgctggagaagtaaaagcaattcgtgatgtcaactttgaattaaaaaaaggtgagactcttgcaatcgttggtgaatctggttcaggaaaatctgtaactaccagaactttaattggtttaaatgctaaaaattcagagatatcagggaatgttcaatttaaggggcgtaaccttgttgaactatcagaagaagagtggactaaggtacgcgggaatgagatttctatgattttccaagaccctatgactagtttggatccaacgatgaaaattggcatgcaaatagcagaaccaatgatgattcatcaaaaaatttcaaaaaaggatgctttaaaattagctcttgagctaatgaaagatgtaggtatcccaaatgctgaagagcatattaatgattacccacatcagtggtctggaggaatgcgccaacgtgcggttatagcgattgctttagctgctgatcctgaaattcttattgctgatgaaccaacgactgctttagatgtaacaattcaagcacaaattttgaacttaatgaaaaaaattcaagcagaacgagactcctccattgttttcataactcatgacttaggggtcgttgcagggatggcagaccgtgtagcagttatgtatgcagggaaaattgttgaatttggaactgttgatgaagtcttttataatccacaacatccatatacttggggattattgaattcaatgccgacaaccgacacagaatcaggtagtttagagtcaattccgggaacaccaccagatttgttgaacccacctaaaggagatgcatttgcagctcgtaatgaatttgcattagatattgatcatgaagaagaaccaccgtacttcaaagtttcagaaacacatttcgctgctacatggcttttagatgaaagatcacctaaggtgcttcctccattaccgatccaaaaacgttgggaaaaatggaacgagattgaagggaggaaagcc

SEQ ID NO: 17960 - protein, 348 aa, Streptococcus agalactiae; identical to SEQ ID NO: 320

SEQ ID NO: 17961 - protein, 930 aa, Streptococcus agalactiae; identical to SEQ ID NO: 9079

SEQ ID NO: 17962 - protein, 310 aa, Streptococcus agalactiae; identical to SEQ ID NO: 322

SEQ ID NO: 17963 - protein, 1299 aa, Streptococcus agalactiae
ATGAAAAAAAGAATATTATCAGCAGTCCTTGTGAGTGGAGTAACTCTTGGAACTGCTGCCGTAACAGTAAACGCTGATGACTTTGACTCGAAAATTGCTGCTACTGATTCAGTAATCAATACTTTATCAGGGCAACAAGCAGCAGCACAAAAACAGGTGACTGCTATTAAAGGACAAGTTGGTGCTTTAGAGTCTCAACAATCAGAATTAGAAGCGCAAAATGCTCAACTTGAGGCAGTATCTCAGCAGTTAGGTCAAGAGATTCAAACTCTTTCTAATAAAATTGTTGCACGTAACGAATCTTTGAAAAAGCAAGTTCGTAGTGCTCAAAAGGGTAACTTGACTAACTATATTAATACTATTTTAAATTCGAAATCAGTATCTGATGCTGTTAATCGTGTTGTTGCTATTCGTGAGGTTGTTTCAGCTAATGAAAAGATGTTAGCACAACAAGAGGCTGACAAAGCAGCCTTAGAAGCTAAACAAATTGAAAATCAAAATGCTATAAATACTGTAGCAGCTAACAAGCAAGCTATCGAAAATAATAAAGCAGCCTTAGCAACACAAAGAGCACAATTAGAAGCAGCTCAATTAGAGTTATCTGCTCAATTGACTACAGTCCAAAATGAAAAAGCATCTTTAATTCAGGCAAAAGCACAAGCTGAGGAAGCTGCGCGTAAGGCAGCTGAAGCACAAGCTGAGTCTGTAGCAAAAGCACAGGCAGCAGCACAAGTTGAGTCTGCCACAGCTCCTACTGAAACAGTTCAAACACAACCGAGAACTGAAATAAAGCCTTCTAATCTTACGGCTACTTCTTCGGCAACTACTGTTGCTAAAACTACAGCTACAGCTACTAATGAGCCAAAAGTTACTCAACCTTCTGTAGTAACTAAAGCAGTTGAAGCACCTAAAGCAGTTGTTTCTTCAACACCTAGAGCGGTATCAAAACCTGTTGTCAGAAGTTATGATTCAAGTAACACATACCCAATGGGACAATGTACTTGGGGAGCTAAGTCAATGGCTTCTTGGGTTGGTAACTATTGGGGAAATGCTAATCAGTGGGGTGCTAGTGCACGTGCAGCTGGTTATTCTGTAGGAACTACCCCTCGTGTTGGTGCAGTAGCTGTTTGGCCATATGATGGTGGTGGTTACGGGCACGTTGCAGTAGTAACGTCAGTGGCTAACAATTCATCTATCCAAGTTATGGAATCAAACTATGCTGGAAATATGAGCATTGGCAATTACCGTGGTTCATTTAACCCTAGTGCTTCTGGCTCTGTTTACTATATTTACCCAAAT

SEQ ID NO: 17964 - protein, 433 aa, Streptococcus agalactiae
MKKRILSAVLVSGVTLGTAAVTVNADDFDSKIAATDSVINTLSGQQAAAQKQVTAIKGQVGALESQQSELEAQNAQLEAVSQQLGQEIQTLSNKIVARNESLKKQVRSAQKGNLTNYINTILNSKSVSDAVNRVVAIREVVSANEKMLAQQEADKAALEAKQIENQNAINTVAANKQAIENNKAALATQRAQLEAAQLELSAQLTTVQNEKASLIQAKAQAEEAARKAAEAQAESVAKAQAAAQVESATAPTETVQTQPRTEIKPSNLTATSSATTVAKTTATATNEPKVTQPSVVTKAVEAPKAVVSSTPRAVSKPVVRSYDSSNTYPMGQCTWGAKSMASWVGNYWGNANQWGASARAAGYSVGTTPRVGAVAVWPYDGGGYGHVAVVTSVANNSSIQVMESNYAGNMSIGNYRGSFNPSASGSVYYIYPN

SEQ ID NO: 17965 - protein, 966 aa, Streptococcus agalactiae
ATGTCTTATTCTAATTTAAAATTGTTTGCACTGTCATCAAACAAAGAACTAGCGAAAAAAGTGTCTCAGACGATTGGAATTCCGCTAGGTCAATCGACAGTTCGCCAATTTTCTGATGGTGAGATTCAAGTTAATATTGAAGAGTCTATTCGTGGCCATCATGTTTTTATTTTACAATCAACAAGCTCACCAGTTAATGATAATTTGATGGAAATTTTAATTATGGTTGACGCTTTAAAGCGTGCTAGTGCGGAGTCTGTTAGTGTGGTAATGCCTTACTATGGGTATGCTCGTCAAGATCGCAAGGCACGTTCTCGTGAACCTATTACTTCGAAACTCGTTGCGAACATGCTAGAAGTTGCTGGTGTTGATCGTCTTTTAACAGTTGATTTACATGCAGCTCAAATTCAGGGATTCTTTGATATTCCCGTTGATCACCTTATGGGGGCTCCCCTTATTGCAGATTACTTTGATCGTCAGGGATTGGTTGGTGATGATGTTGTTGTCGTTAGTCCTGATCATGGTGGCGTAACACGTGCACGTAAGCTGGCACAGTGTTTAAAGACACCGATTGCTATCATTGATAAGCGCCGTAGTGTTACTAAAATGAATACATCTGAAGTAATGAATATTATTGGTAATATCAAAGGTAAAAAATGTATTTTAATTGATGATATGATTGATACTGCAGGTACTATTTGCCATGCTGCAGACGCTTTAGCTGAAGCAGGGGCAACAGCTGTTTATGCTTCATGTACTCACCCTGTTTTATCAGGGCCGGCTTTGGATAATATTCAAAATTCAGCTATTGAAAAATTAATTGTGTTAGATACGATTTACCTCCCTGAAGAACGTTTGATTGATAAGATTGAACAAATTTCAATTGCGGAATTGATTGGTGAAGCTATTATTCGTATTCACGAGAAACGTCCTTTATCACCATTATTTGAAATGAATAAACTAAAA

SEQ ID NO: 17966 - protein, 322 aa, Streptococcus agalactiae; identical to SEQ ID NO: 54

SEQ ID NO: 17967 - protein, 1173 aa, Streptococcus agalactiae
ATGACATTAGAGAAACGATTTAATAAGTACTTAGATAGAATAGAGGTCTCCTTAATTCGTCAGTTTGATCAATCTATTTCAGATATACCTGGAATGGTAAAATTAACTCTTGGAGAACCAGATTTTACCACTCCTGATCATGTTAAAGAAGCAGCTAAATCAGCTATTGATGCGAATCAATCGTATTACACTGGTATGAGCGGTTTATTAGCTCTAAGGCAAGCTGCTGCAGATTTTGCAAAGGATAAATATAATCTTACTTATAATCCTGATAGTGAGATCTTGGTTACGATAGGTGCCACAGAAGCTCTGTCTGCATCTCTTATAGCTATTTTAGAAGCTGGTGATGTTGTTCTATTACCTGCCCCCGCTTATCCAGGCTATGAGCCAATAGTTAACCTTGTAGGAGCTGATATCGTAGAAATTGATACTAGAGAAAATGACTTTAGACTAACCCCTGAAATGTTAGAAACGGCTATTATCCAACAAGGTGAAAAATTAAAGGCTGTTTTACTTAATTATCCTACTAATCCTACAGGTATTACCTATTCAAGGCAAGAAATTGCTGCATTAGCTGAAGTCCTTAAAAAATATGATATTTTTGTTATTAGTGATGAAGTTTACTCTGAGTTAACTTACACTGGTCAGCAGCATGTTTCAATTGCAGAATATTTACCTAACCAAACTATCTTAATTAATGGCTTATCAAAATCACATGCTATGACTGGTTGGAGAGTTGGATTGGTGTATGCTCCTGAAGCATTTACTGCTCAAATCATTAAAAGTCATCAATACATGGTGACAGCTGCTAGTACTATTTCGCAATTTGCTGGGGTAGAAGCCTTATCTGTGGGTAAAAATGATACGTTACCTATGCGTCAAGAATATATTAAACGTAGAGATTATATCATTGATAAAATGTCTAAACTTGGTTTCAAAATAATTAAACCGAGTGGCGCTTTTTATATCTTTGCTAAAATACCTGATAGTTATCCACAGGATTCTTTTAAGTTTTGTCAGGATTTTGCTTATCAACAAGCAGTAGCTATTATTCCAGGGGTGGCTTTTGGTAAATATGGTGAAGGATATATACGTCTTTCTTATGCTGCTAGTATGGAAGTTATTGAAACAGCAATGGCTAGATTGAAAGTTTTTATGGAATCATATGAGGGT

SEQ ID NO: 17968 - protein, 391 aa, Streptococcus agalactiae
MTLEKRFNKYLDRIEVSLIRQFDQSISDIPGMVKLTLGEPDFTTPDHVKEAAKSAIDANQSYYTGMSGLLALRQAAADFAKDKYNLTYNPDSEILVTIGATEALSASLIAILEAGDVVLLPAPAYPGYEPIVNLVGADIVEIDTRENDFRLTPEMLETAIIQQGEKLKAVLLNYPTNPTGITYSRQEIAALAEVLKKYDIFVISDEVYSELTYTGQQHVSIAEYLPNQTILINGLSKSHAMTGWRVGLVYAPEAFTAQIIKSHQYMVTAASTISQFAGVEALSVGKNDTLPMRQEYIKRRDYIIDKMSKLGFKIIKPSGAFYIFAKIPDSYPQDSFKFCQDFAYQQAVAIIPGVAFGKYGEGYIRLSYAASMEVIETAMARLKVFMESYEG

SEQ ID NO: 17969 - protein, 759 aa, Streptococcus agalactiae
ATGAGGGTTAGTCAAACATACGGTCTCGTTTTGTATAATCGTAATTATCGTGAAGATGATAAATTAGTTAAAATCTTTACGGAGACTGAGGGAAAAAGGATGTTTTTTGTAAAGCATGCTTCAAAGTCAAAATTCAATGCTGTGCTCCAACCTTTGACTATTGCTCATTTTATTTTAAAAATTAATGATAATGGTCTTTCTTATATTGATGATTATAAAGAAGTTTTAGCATTTCAAGAAATTAATTCAGACTTGTTTAAGTTGTCATATGCGAGTTATATTACTTCTTTGGCTGATGTGGCTATTAGTGATAATGTAGCGGATGCTCAATTATTTATTTTCCTAAAGAAAACGTTAGAATTGATTGAGGACGGTTTAGATTATGAGATTCTAACGAATATTTTTGAAGTACAACTACTAGAGAGGTTCGGTGTTGCTTTAAATTTTCATGATTGTGTTTTTTGTCATAGGGCAGGATTACCTTTTGATTTTTCACACAAATATTCTGGATTATTATGTCCAAACCATTATTATAAAGACGAGAGAAGAAACCACCTAGATCCTAATATGCTGCACTTAATCAATCGTTTTCAGTCAATTCAATTTGATGATTTACAAACAATTTCTGTGAAACCTGAGATGAAACTTAAAATTCGTCAATTTTTGGACATGATTTACGATGAATATGTAGGGATTCATCTTAAAAGTAAAAAATTTATTGATGATTTGTCTAGTTGGGGAAGTATTATGAAATCAGAT

SEQ ID NO: 17970 - protein, 253 aa, Streptococcus agalactiae
MRVSQTYGLVLYNRNYREDDKLVKIFTETEGKRMFFVKHASKSKFNAVLQPLTIAHFILKINDNGLSYIDDYKEVLAFQEINSDLFKLSYASYITSLADVAISDNVADAQLFIFLKKTLELIEDGLDYEILTNIFEVQLLERFGVALNFHDCVFCHRAGLPFDFSHKYSGLLCPNHYYKDERRNHLDPNMLHLINRFQSIQFDDLQTISVKPEMKLKIRQFLDMIYDEYVGIHLKSKKFIDDLSSWGSIMKSD

SEQ ID NO: 17971 - DNA, 849 bp, Streptococcus agalactiae
atgaaaaaaacattatacattaccaataaactcttttttgctaactggtttgtgccagttattggtgcagttctaattcaagttatcggcatcattgtaagtagacgccttgtagtaaaattgctacctgatgattataaattcaatttatacattgcgcttttactatttgttcctattttggcaagtattttactatttttaatctatttccaaaaaagggattttacttccttgggatttactaaagataataatattttaacaacgatctcaggatttattactggtagtttactgatgttttttatttatatttgccactggttatcaggttttgtggaaatttcttccagcaattccttttcttttggaccttttttctttttatttcttgcatactttatccaaagcttgacagaggaaattttatttagaggatatgttatgacaacagttaccaaatttaaaggtagttttgcaggtgttttatgcaattctatgttgttttcctttatccactttagaaactatggtatcacagcaatagcactttttaatttatttttacttggtattattttttctattctttttaatatgaccaaaaatattctttttgttacaggagttcatactacatggaattttactatgggatgtgtattaggtaataaggttagtggggggtattctcctgtttctctttttagaattactgaaaattctagctttgctctttggaatggtggggattttggttttgaagggggagtactatgttctttgatattagtaggttgtttagcatacttttctttggaaagagtgagagtatctgttagatat

SEQ ID NO: 17972 - protein, 283 aa, Streptococcus agalactiae
MKKTLYITNKLFFANWFVPVIGAVLIQVIGIIVSRRLVVKLLPDDYKFNLYIALLLFVPILASILLFLIYFQKRDFTSLGFTKDNNILTTISGFITGSLLMFFIYICHWLSGFVEISSSNSFSFGPFFFLFLAYFIQSLTEEILFRGYVMTTVTKFKGSFAGVLCNSMLFSFIHFRNYGITAIALFNLFLLGIIFSILFNMTKNILFVTGVHTTWNFTMGCVLGNKVSGGYSPVSLFRITENSSFALWNGGDFGFEGGVLCSLILVGCLAYFSLERVRVSVRY

SEQ ID NO: 17973 - DNA, 990 bp, Streptococcus agalactiae
atgaagaaaattgctgtagatgctatgggtggagattacgctcccaaagctattgtagagggtgttaatcaagctatttcagattttagtgatattgaagtacaactctatggcgatcagaaaaaaattgagaaatatttaacagtaacggagcgagttagtattattcatactgaagaaaaaattaattctgatgatgagcctgctaaagctgttcgtcgtaaaaaacagtcttcgatggtcttaggagctaaggcagtcaaagatggtgttgcacaggcctttatttctgcagggaatacaggagctttattagctgctggtttgtttgtagtaggacgtataaaaggtgttgatcgaccaggcttaatgtcaactatgcctacgttagatggtgtgggttttgatatgcttgatttaggagctaatgcagaaaacacagcttctcatcttcatcaatatgctattttagggtcgttttatgcaaaaaatgtccgtggtattgaaattcctcgtgtaggtctcttaaataacggaacggaagaaacaaaaggcgattctcttcataaagaagcctatgaactgttagcagcagagccttctattaattttattggaaatattgaagcacgtgatttgatgtctagtgtagcagatgttgttgtcactgatggttttactggaaatgctgttctaaagacaatggaaggtacagctatgagtattatgggaagcctaaaatcttcaattaaatcaggtggcgtgaaagctaaattaggagcacttctattaaaagatagcctatatcagctaaaagataatatggactattcaagcgcgggtggtgcggttctttttggtttaaaagctccaatagtaaaatgccatggatcaagtgattctaaagctgtttattctactttgaagcaagttcgtacaatgttggaaactcaagtagttgatcaattagttgatgcctttacagatgaa

SEQ ID NO: 17974 - protein, 330 aa, Streptococcus agalactiae
MKKIAVDAMGGDYAPKAIVEGVNQAISDFSDIEVQLYGDQKKIEKYLTVTERVSIIHTEEKINSDDEPAKAVRRKKQSSMVLGAKAVKDGVAQAFISAGNTGALLAAGLFVVGRIKGVDRPGLMSTMPTLDGVGFDMLDLGANAENTASHLHQYAILGSFYAKNVRGIEIPRVGLLNNGTEETKGDSLHKEAYELLAAEPSINFIGNIEARDLMSSVADVVVTDGFTGNAVLKTMEGTAMSIMGSLKSSIKSGGVKAKLGALLLKDSLYQLKDNMDYSSAGGAVLFGLKAPIVKCHGSSDSKAVYSTLKQVRTMLETQVVDQLVDAFTDE

SEQ ID NO: 17975 - DNA, 237 bp, Streptococcus agalactiae
atgtcaagagatgaagtttttgaaaagatgctggaattattaaggcagcaacttggtgacccacagttagatatcacaccagagacatcgttacatgatgatttagcaattgactctatcgctttaacagagtttattatcaatttggaagatgtgtttcatctagagattccagatgaggctgtcgaacatatgtcaagcgtccaacaactattagattatatcattgaacataag

SEQ ID NO: 17976 - protein, 79 aa, Streptococcus agalactiae
MSRDEVFEKMLELLRQQLGDPQLDITPETSLHDDLAIDSIALTEFIINLEDVFHLEIPDEAVEHMSSVQQLLDYIIEHK

SEQ ID NO: 17977 - DNA, 705 bp, Streptococcus agalactiae
gtgactaaccagcttatttatacaggaaaagcgaaagatatttatagtacaaaagatgaaaatatgattagaacggtctataaagaccaagctactatgttgaatggagctcgtaaggagactattgatggcaagggagcactaaataatcagatttcatgtcttatttttgagaaattaaatatggctggtgtggtgacacattatattgagcaaatttcaaaaaacgaacaattgaataaaaaagttgatattattccacttgaggtggtgttacggaatgtgacagcaggctcattttcaaaacgttttggagtggaagaaggacgcgttcttgaaactccaatcgtggaattttactacaaaaatgatgatctgaatgatccttttatcaatgatgagcatgtgaagtttttgggtattgttaatgatgaggagattgcttatctgaaaggagagactcgccgtattaatgaacttttgaaagattggtttgctcagattgggattaacttgatcgacttcaagttggagtttggatttgacaatgatggtaagatcatcttggctgatgagttctcacctgataactgccgtctatgggatgctgaaggaaatcatatggataaagatatctttcgcagggatttaggtagtttaactgatgcttatcaagttgtcttagataaattaaagaccttagat

SEQ ID NO: 17978 - protein, 235 aa, Streptococcus agalactiae
MTNQLIYTGKAKDIYSTKDENMIRTVYKDQATMLNGARKETIDGKGALNNQISCLIFEKLNMAGVVTHYIEQISKNEQLNKKVDIIPLEVVLRNVTAGSFSKRFGVEEGRVLETPIVEFYYKNDDLNDPFINDEHVKFLGIVNDEEIAYLKGETRRINELLKDWFAQIGINLIDFKLEFGFDNDGKIILADEFSPDNCRLWDAEGNHMDKDIFRRDLGSLTDAYQVVLDKLKTLD

SEQ ID NO: 17979 - DNA, 3609 bp, Streptococcus agalactiae
gtgcaggtctatgatgtctttcatttggctgaggatttgctggcgcgtgcggagaagcatattttctctgagcaggtgacagaccgtcttttgacagaagctgaaatcactgcggagcttgataaggttgccttctttgctattgaggcccttcctggtcaatttgaccaacgtgcagctagttcgcaagaagctttgctattgcttggaggtgacagtcaggtcaaggtcaacaccgcccagctttacttggtcaataaggatattgcagaagcagaacttgaagcggttaaaaactatcttttgaatccagttgattcacgtttcaaggacattactttgccgcttgaagagcaggctttctctgtgtctgataagacgatccctaatcttgatttcttcgagacttatacagctgacgattttgtggcctataaggcagagcagggcttggctatggaggtcgatgaccttctcttcatccaagattatttcaaatcaatcgggcgtgtgccaactgagactgagctgaaagttttggacacttactggtcagaccactgccgtcacacaacctttgaaactgaattgaagaacattgatttttcagcttctaaattccaaaaacaattgcaggcgacttatgacaaatatatcgccatgcgtgatgaacttgatcgttctgaaaagccgcagacacttatggatatggcgactatttttggtcgttatgagcgtgccaacggtcgtctggacgatatggaagtctcagatgaaatcaatgcctgctcagttgaaattgaagtagatgttgatggtgtaaaagagccttggctcctcatgtttaagaatgagactcacaatcacccaacagaaattgagccatttggtggcgcagcaacttgtatcggtggtgccattcgtgacccgttgtcaggacgttcatacgtttatcaggctatgcgtatttcaggcgcaggcgatatcacgactccgattgcggaaacacgtgctggaaaattgccacaacaggttatttctaagactgcggcgcacggctattcttcatatggtaaccaaattgggcttgcgacaacgtatgtgcgtgagtacttccaccctggcttcgtagccaaacgtatggagcttggagctgtggttggtgctgcacctaaggaaaatgtggttcgtgaaaaaccagaaacaggcgatgtggtcatcttgctcggtggtaaaacaggtcgtgatggtgtcggtggtgcgacaggttcatctaaggttcaaacggttgaatctgtggaaacagctggcgcagaggtacaaaaagggaatgccattgaagagcgtaagattcaacgtcttttccgtgatggcaatgtcactcgtcttatcaagaaatcaaatgacttcggtgcaggtggtgtctgtgttgccatcggtgaattggctgatggtcttgaaatcgatttggacaaggtgccacttaaataccaaggtcttaatggtactgaaattgcaatctcagaatcacaagagcgtatgtcagtcgttgttcgtccaagtgatgtggatgccttcatcgcagcctgtaacaaggaaaatatcgatgcagtcgtagttgcgactgtgactgaaaaaccaaatcttgtcatgacttggaatggcgaaatcatcgttgacttggaacgccgtttccttgataccaacggtgtccgtgtcgttgttgatgctaaagtcgttgacaaggacttgacagttccagaagcacgcacaacatctgcagagacacttgaagcagatacgcttaaggtcttgtctgacctcaaccatgctagccaaaaaggtcttcaaactatctttgactcatctgttggtcgctcaaccgttaaccacccaatcggtggtcgctaccaaatcacaccgacagaaagttctgttcaaaaattgccagttcaacatggtgtgacgacaacagcctctgttattgctcaaggttataatccttatattgcagagtggtcaccttatcacggtgctgcctatgctgttattgaagcgacagctcgcttggtagcaacgggtgctgactggtctcgtgcacgcttctcttaccaagagtatttcaagcgtatggataaacaggcagagcgttttggtcagccagtatcagctcttcttggttctattgaggctcagattcaacttggcttgccatcaatcggtggtaaggactctatgtctggtactttcgaagacttgacagtaccaccaaccttggtagctttcggtgtgacgaccgcggatagccgcagggttctctctcctgagtttaaagcggctggtgagaacatctactacattccaggtcaagctatttcagaagatattgattttgaccttatcaaggctaactttagccagttcgagactattcaagctcaacataagattactgctgcttcagctgttaaatacggtggtgtcctagaaagtcttgctctcatgacttttggtaaccgtatcggggcctctgttgaaattgcagagcttgacagcagcttgacagctcaactcggaggctttgtttttacatcagctgaggaaatcgctggcgctgtgaaaatcggtcaaactcaggcagactttacagtcactgtcaatggaaatgaccttgctggcgctagccttctagcagccttcgaaggtaaattggaagaggtttatccaacagaattcgaacaggcagacgctcttgaagaagttcctgctgtggtatcagacaccgtcatcaaggctaaggaaacaattgaaaaaccagtggtttacattccagtcttccctggtaccaactcagaatatgattcagctaaggcttttgaacaggttggagctagtgtcaacttggtagcatttgtaaccttgaatgaggctgctattgctgaatcagttgacacaatggtcgctaatattgctaaggcaaatatcatcttctttgctggaggtttctcagcagcggatgaaccagatgggtctgctaagtttatcgtcaatatcttgcttaacgagaaggtccgcgcagctattgacagcttcatcgaaaaaggtggctttatcatcggtatctgtaatggattccaagctcttgttaaatcaggtcttcttccatacggaaacttcgaggaagctggtgagacaagtccaactctcttctataacgatgctaaccagcacgttgcaaagatggttgagactcgtatcgcaaataccaactcaccatggttggcaggagttgaggtcggcgatattcatgccattccagtttcacacggtgaaggtaaatttgttgtcagcgcttctgaatttgcagagctaagagacaatggtcaaatctggagccaatatgtggactttgacggacaaccatctatggattctaaatacaatccaaacggctctgtcaatgccatcgaagggattaccagcaagaatggtcaaatcatcggtaagatggggcactcagaacgctgggaagacggcctcttccaaaatatccctggtaacaaagaccaagccttgtttgctagtgcagtaaaatattttacaggaaaa

SEQ ID NO: 17980 - protein, 1203 aa, Streptococcus agalactiae
MQVYDVFHLAEDLLARAEKHIFSEQVTDRLLTEAEITAELDKVAFFAIEALPGQFDQRAASSQEALLLLGGDSQVKVNTAQLYLVNKDIAEAELEAVKNYLLNPVDSRFKDITLPLEEQAFSVSDKTIPNLDFFETYTADDFVAYKAEQGLAMEVDDLLFIQDYFKSIGRVPTETELKVLDTYWSDHCRHTTFETELKNIDFSASKFQKQLQATYDKYIAMRDELDRSEKPQTLMDMATIFGRYERANGRLDDMEVSDEINACSVEIEVDVDGVKEPWLLMFKNETHNHPTEIEPFGGAATCIGGAIRDPLSGRSYVYQAMRISGAGDITTPIAETRAGKLPQQVISKTAAHGYSSYGNQIGLATTYVREYFHPGFVAKRMELGAVVGAAPKENVVREKPETGDVVILLGGKTGRDGVGGATGSSKVQTVESVETAGAEVQKGNAIEERKIQRLFRDGNVTRLIKKSNDFGAGGVCVAIGELADGLEIDLDKVPLKYQGLNGTEIAISESQERMSVVVRPSDVDAFIAACNKENIDAVVVATVTEKPNLVMTWNGEIIVDLERRFLDTNGVRVVVDAKVVDKDLTVPEARTTSAETLEADTLKVLSDLNHASQKGLQTIFDSSVGRSTVNHPIGGRYQITPTESSVQKLPVQHGVTTTASVIAQGYNPYIAEWSPYHGAAYAVIEATARLVATGADWSRARFSYQEYFKRMDKQAERFGQPVSALLGSIEAQIQLGLPSIGGKDSMSGTFEDLTVPPTLVAFGVTTADSRRVLSPEFKAAGENIYYIPGQAISEDIDFDLIKANFSQFETIQAQHKITAASAVKYGGVLESLALMTFGNRIGASVEIAELDSSLTAQLGGFVFTSAEEIAGAVKIGQTQADFTVTVNGNDLAGASLLAAFEGKLEEVYPTEFEQADALEEVPAVVSDTVIKAKETIEKPVVYIPVFPGTNSEYDSAKAFEQVGASVNLVAFVTLNEAAIAESVDTMVANIAKANIIFFAGGFSAADEPDGSAKFIVNILLNEKVRAAIDSFIEKGGFIIGICNGFQALVKSGLLPYGNFEEAGETSPTLFYNDANQHVAKMVETRIANTNSPWLAGVEVGDIHAIPVSHGEGKFVVSASEFAELRDNGQIWSQYVDFDGQPSMDSKYNPNGSVNAIEGITSKNGQIIGKMGHSERWEDGLFQNIPGNKDQALFASAVKYFTGK

SEQ ID NO: 17981 - protein, 1452 aa, Streptococcus agalactiae
ATGACATACGAAGTAAAATCTCTAAATGAAGAATGTGGAGTCTTTGGTATCTGGGGGCATCCTCAGGCAGCTCAAGTCACTTACTTTGGGCTTCATAGCCTTCAACATCGCGGTCAAGAAGGTGCTGGTATTGTTTCGAATGATAATGGGAAACTCTATGGTTATCGAAATGTTGGGCTCCTTTCTGAAGTTTTTAAGAATCAATCTGAATTAGATAATTTAACTGGGAATGCGGCTATTGGACATGTTCGGTATGCTACTGCAGGTTCTGCAGATATTCGCAATATTCAGCCTTTTCTTTATAAATTTCATGACGGGCAATTTGCTTTATGTCATAATGGTAATTTGACAAATGCTATTTCCTTAAGGAAAGAATTAGAAAAGCAAGGTGCAATTTTCAATGCCTCCTCAGATACTGAAATTTTGATGCATTTGATTCGTCGAAGCCATAACCCAAGTTTTATGGGGAAGGTAAAAGAAGCTTTAAGCACTGTAAAGGGAGGCTTCGCCTATCTACTGATGACAGAAGATAAATTAATTGCTGCTCTTGACCCTAATGCCTTTCGTCCTTTGTCAATTGGACAAATGCAAAATGGTGCCTGGGTTATTTCCAGTGAGACCTGTGCTTTTGAGGTGGTAGGCGCAAAATGGGTTAGAGATGTTGAACCTGGCGAGGTTATTCTTATAGACGATAGTGGTATTCAATGTGATCGTTATACTGATGAAACGCAACTGGCAATTTGTTCGATGGAATATGTCTATTTTGCAAGGCCGGATTCAACTATACATGGTGTTAACGTTCATACGGCTCGAAAAAATATGGGAAAGCGTCTTGCACAAGAATTTAAACAGGATGCTGATATTGTAATTGGTGTCCCAAATTCGTCCTTATCGGCTGCTATGGGCTTTGCTGAAGAATCCGGACTACCAAATGAGATGGGTCTTGTAAAAAATCAGTATACGCAGCGAACCTTTATTCAACCGACACAAGAATTAAGGGAACAAGGTGTTCGAATGAAACTATCAGCGGTATCTGGTGTTGTCAAAGGAAAGCGCGTTGTTATGATTGATGATTCAATTGTAAGAGGAACGACTTCTAGAAGGATTGTCGGATTATTAAGAGAAGCAGGAGCTAGTGAAGTACATGTTGCTATAGCTAGTCCAGAATTAAAGTATCCTTGTTTTTATGGTATTGATATTCAAACAAGACGAGAATTAATTTCAGCAAATCACGCTGTTGACGAAGTGTGTGATATTATTGGCGCAGATAGTCTGACCTATCTCTCACTAGATGGGTTGATTGAATCAATTGGACTCGAAACAAAAGCACCAAATGGTGGTTTATGCGTAGCTTACTTTGATGGACATTATCCAACACCGCTTTATGATTATGAAGAAGAATACCTCAGAAGTTTAGAAGAAAAAACAAGTTTTTATATTCAAAAAGTGAAA

SEQ ID NO: 17982 - protein, 484 aa, Streptococcus agalactiae
MTYEVKSLNEECGVFGIWGHPQAAQVTYFGLHSLQHRGQEGAGIVSNDNGKLYGYRNVGLLSEVFKNQSELDNLTGNAAIGHVRYATAGSADIRNIQPFLYKFHDGQFALCHNGNLTNAISLRKELEKQGAIFNASSDTEILMHLIRRSHNPSFMGKVKEALSTVKGGFAYLLMTEDKLIAALDPNAFRPLSIGQMQNGAWVISSETCAFEVVGAKWVRDVEPGEVILIDDSGIQCDRYTDETQLAICSMEYVYFARPDSTIHGVNVHTARKNMGKRLAQEFKQDADIVIGVPNSSLSAAMGFAEESGLPNEMGLVKNQYTQRTFIQPTQELREQGVRMKLSAVSGVVKGKRVVMIDDSIVRGTTSRRIVGLLREAGASEVHVAIASPELKYPCFYGIDIQTRRELISANHAVDEVCDIIGADSLTYLSLDGLIESIGLETKAPNGGLCVAYFDGHYPTPLYDYEEEYLRSLEEKTSFYIQKVK

SEQ ID NO: 17983 - protein, 1020 aa, Streptococcus agalactiae
ATGTCTGAAAAAAATGCTTATGCAAAATCTGGTGTTGATGTTGAAGCTGGTTATGAAGTGGTTGAAAGAATAAAAAAACACGTTGCTCGTACAGAACGTGCGGGAGTCATGGGAGCTCTAGGTGGCTTTGGTGGGATGTTTGACTTGAGTAAAACAGGAGTTAGAGAGCCTGTTTTGGTCTCAGGGACAGACGGTGTTGGCACAAAACTCATGCTTGCGATTAAATATCAACAGCATGACACCATTGGCCAAGACTGTGTTGCCATGTGTGTCAACGATATTATTGCAGCAGGTGCTGAACCCCTTTACTTCCTTGACTATGTAGCGACTGGTAAAAACGAACCTGCCAAATTGGAACAGGTTGTCGCTGGCGTTGCTGAAGGTTGTGTTCAAGCTGGCGCAGCTCTTATTGGTGGTGAAACGGCTGAGATGCCTGGTATGTATGGCGAAGATGATTATGACCTTGCAGGCTTTGCTGTTGGTGTGGCTGAAAAATCTCAAATCATCGACGGTTCAAAAGTAAAAGAGGGAGATATTCTTCTTGGACTTGCTTCAAGTGGTATCCACTCGAATGGTTACTCATTGGTACGTCGTGTCTTTGCTGACTACACTGGTAATGAGGTGCTTCCAGAGCTTGAAGGCAAACAACTCAAGGATGTTCTTCTTGAGCCAACTCGTATCTATGTTAAAGCAGTTCTGCCATTGATCAAGGAAGAGCTAGTCAACGGTATCGCCCACATTACGGGTGGTGGTTTTATCGAGAATGTTCCTCGTATGTTTGCGGATGATTTGGCTGCGGAAATCGATGAGGATAAGGTGCCAGTACTTCCGATTTTCAATGCGATTGAAAAATATGGTGATATCAAGCACGAAGAAATGTTTGAAATCTTCAATATGGGTGTCGGTCTTATGCTAGCTGTTAGTCCTGAAAATGTTAACCGCGTCAAAGAGCTCTTGGACGAACCAGTTTATGAAATCGGTCGTATCATCAAGAAAGCAGACGATAGTGTGGTGATTAAA

SEQ ID NO: 17984 - protein, 340 aa, Streptococcus agalactiae
MSEKNAYAKSGVDVEAGYEVVERIKKHVARTERAGVMGALGGFGGMFDLSKTGVREPVLVSGTDGVGTKLMLAIKYQQHDTIGQDCVAMCVNDIIAAGAEPLYFLDYVATGKNEPAKLEQVVAGVAEGCVQAGAALIGGETAEMPGMYGEDDYDLAGFAVGVAEKSQIIDGSKVKEGDILLGLASSGIHSNGYSLVRRVFADYTGNEVLPELEGKQLKDVLLEPTRIYVKAVLPLIKEELVNGIAHITGGGFIENVPRMFADDLAAEIDEDKVPVLPIFNAIEKYGDIKHEEMFEIFNMGVGLMLAVSPENVNRVKELLDEPVYEIGRIIKKADDSVVIK

SEQ ID NO: 17985 - protein, 549 aa, Streptococcus agalactiae
ATGAAAATCGCTGTTTTTGCTTCTGGTAATGGTTCCAACTTTCAGATCATAGCAGAGCAGTTTCCAGTTAGTTTTGTCTTTTCAGATCATCGTGATGCCTATGTTTTAGAGCGTGCTCAGAACTTAACCATTCCAAGTTTCGCTTTTGAACTCAAGGAGTTTGAGAACAAGGCGGCTTACGAGCAAGCCATCGTTAATTTGTTGGACAAACACGAAATTGACTTGGTCTGTCTGGCGGGCTACATGAAGATTGTCGGAGAAGCCTTGCTCTCAGCCTATGAAGGGCGTATCATCAATATTCACCCAGCCTACTTGCCTGAATTTCCAGGTGCCCACGGTATCGAGGATGCTTGGGAGGCAGGTGTTGACCAGTCTGGTGTGACCATCCACTGGGTGGACTCTGGTGTGGATACTGGTCAGGTCATCCAACAAGTGCGCGTGCCACGCCTAGCAGATGATAGTCTAGAAAGCTTTGAAACCCGCATCCACGAAACCGAATACCAACTCTACCCAGCTGTCTTAGATAGCCTGGGCATAAAGAGAAAACAG

SEQ ID NO: 17986 - protein, 183 aa, Streptococcus agalactiae
MKIAVFASGNGSNFQIIAEQFPVSFVFSDHRDAYVLERAQNLTIPSFAFELKEFENKAAYEQAIVNLLDKHEIDLVCLAGYMKIVGEALLSAYEGRIINIHPAYLPEFPGAHGIEDAWEAGVDQSGVTIHWVDSGVDTGQVIQQVRVPRLADDSLESFETRIHETEYQLYPAVLDSLGIKRKQ

SEQ ID NO: 17987 - protein, 750 aa, Streptococcus agalactiae
ATGAAACTAGTGAAAAATTTAGAGATAGTAGAGTCTATTTTTGGTGATTGGGACGAGACCATAATCTGGTCGTGTGTCCAAGGTATTATGGGAGAAGTTTTTGTAGATAGTTTAGACCAACCAAAATCTTCTTTGGCAAAATTGGGAAGGAAATCATCTTTTGGTTTTCTAGCAGGTCAGCCTACTTTATTTCTACTAGAAGTTTGCTCTGGGGAGGATATTATCCTTGTTCCTCAGCATAAAGGATGGTCAGATTTGATTGAATCAACTTATGGTCAGAATGCTCATTCTTTTAAGCGTTATGCGACGAAAAAAGATACTTTGTTTGAGCGAAGTAGGTTAGAGAAGTTTGTTACTCAATTGCCAAATGGTTTTGAATTACGTGCTATTGATGAGAAAGTTTACAACTCTTGCTTAGAAAAGGAATGGTCACAGGATTTAGTAGCAAATTACGCTACTTATCAGTACTATAAAAAACAAGGTATAGGTTATGTTGTATATTATCAGGGGAATATCATTGCAGGAGCTTCATCTTATTCAACCTATAAAAATGGGATTGAGATAGAAGTAGATACGCATCCAGATTTTCGTCGGCGTGGTTTAGCAACAATAGTTGCAGCTCAGTTGATACTAACTTGTTTAGACAAGGGAATTTATCCTAGCTGGGATGCTCATACAAGGACTTCATTAAATTTAGCTGAAAAACTCGGTTATGAATTTTCTCATGAATACATAGCCTATGAAATAGAT

SEQ ID NO: 17988 - protein, 250 aa, Streptococcus agalactiae
MKLVKNLEIVESIFGDWDETIIWSCVQGIMGEVFVDSLDQPKSSLAKLGRKSSFGFLAGQPTLFLLEVCSGEDIILVPQHKGWSDLIESTYGQNAHSFKRYATKKDTLFERSRLEKFVTQLPNGFELRAIDEKVYNSCLEKEWSQDLVANYATYQYYKKQGIGYVVYYQGNIIAGASSYSTYKNGIEIEVDTHPDFRRRGLATIVAAQLILTCLDKGIYPSWDAHTRTSLNLAEKLGYEFSHEYIAYEID

SEQ ID NO: 17989 - protein, 1545 aa, Streptococcus agalactiae
ATGACTAAACGTGCTTTAATCTCAGTTTCTGATAAGTCAGGAATTGTTGACTTTGCAAAAGAATTAAAAAACTTGGGTTGGGATATTATCTCAACTGGTGGGACTAAGGTTTCCCTAGATGATGCTGGTGTTGAGACCATTGCCATCGACGATGTGACTGGATTCCCAGAAATGATGGACGGTCGTGTTAAGACCCTCCACCCAAACATTCACGGTGGGCTTCTGGCTCGTCGCGACGCTGACAGCCACCTTCAGGCTGCTAAGGACAATAATATCGAGCTGATTGACCTCGTGGTTGTCAACCTCTATCCCTTCAAGGAGACCATCCTTCGCCCAGACGTGACCTACGATTTGGCGGTGGAAAATATCGACATCGGCGGTCCATCAATGCTTCGCTCAGCTGCTAAAAACCACGCTAGCGTAACCGTTGTGGTTGATCCAGCTGACTATGCCACTGTTTTGGGAGAATTGGCTGACGCTAGTCAGACGACATTTAAAACTCGTCAACGCTTGGCAGCTAAGGCCTTCCGTCATACGGCAGCCTACGACGCTTTGATTGCTGAGTACTTCACAGCTCAAGTGGGAGAGGCTAAGCCTGAAAAATTGACCATCACTTATGACCTTAAACAGGCTATGCGTTACGGAGAAAATCCACAGCAAGACGCTGATTTCTACCAAAAAGCCTTGCCAACAGACTACTCAATCGCTTCAGCTAAACAGCTCAACGGTAAAGAATTGTCCTTCAATAATATCCGTGATGCTGATGCGGCGATCCGTATTATCCGCGATTTCAAAGCCAGTCCAACGGTTGTTGCCCTCAAACACATGAACCCATGTGGTATCGGACAGGCTGATGATATTGAGACAGCTTGGGATTACGCTTATGAAGCTGACCCAGTTTCAATCTTTGGTGGAATTGTTGTCCTTAACCGTGAAGTTGACGCAGCGACAGCTGGGAAGATGCACCCTATCTTCTTGGAAATCATCATCGCACCATCATACTCAGAAGAAGCGCTAGCTATTCTCACAAATAAAAAGAAAAACTTGCGTATCCTTGAGTTGCCGTTTGATGCCCAAGCTGCTAGCGAAGTGGAAGCTGAGTACACTGGCGTAGTTGGTGGACTTTTGGTGCAAAACCAAGACGTTGTGGCTGAAAATCCATCTGACTGGCAAGTGGTGACAGACCGCCAGCCAACAGAACAAGAGGCGACTGCCCTTGAGTTTGCCTGGAAGGCTATCAAGTATGTTAAATCTAACGGGATTATCATCACTAACGACCACATGACGCTTGGACTCGGTGCAGGTCAAACCAACCGTGTCGGCTCAGTTAAGATTGCTATCGAGCAGGCTAAGGACCACCTTGACGGTGCCGTTCTAGCATCAGATGCCTTCTTCCCATTTGCGGACAACATTGAAGAAATCGCTGCCGCAGGGATCAAAACAATCATCCAACCAGGTGGTTCAGTTCGTGACCAAGAATCTATTGACGCCGCAAACAAACATGGCTTGACCATGATCTTCACAGGCGTGAGACATTTTAGACAT

SEQ ID NO: 17990 - protein, 515 aa, Streptococcus agalactiae
MTKRALISVSDKSGIVDFAKELKNLGWDIISTGGTKVSLDDAGVETIAIDDVTGFPEMMDGRVKTLHPNIHGGLLARRDADSHLQAAKDNNIELIDLVVVNLYPFKETILRPDVTYDLAVENIDIGGPSMLRSAAKNHASVTVVVDPADYATVLGELADASQTTFKTRQRLAAKAFRHTAAYDALIAEYFTAQVGEAKPEKLTITYDLKQAMRYGENPQQDADFYQKALPTDYSIASAKQLNGKELSFNNIRDADAAIRIIRDFKASPTVVALKHMNPCGIGQADDIETAWDYAYEADPVSIFGGIVVLNREVDAATAGKMHPIFLEIIIAPSYSEEALAILTNKKKNLRILELPFDAQAASEVEAEYTGVVGGLLVQNQDVVAENPSDWQVVTDRQPTEQEATALEFAWKAIKYVKSNGIIITNDHMTLGLGAGQTNRVGSVKIAIEQAKDHLDGAVLASDAFFPFADNIEEIAAAGIKTIIQPGGSVRDQESIDAANKHGLTMIFTGVRHFRH

SEQ ID NO: 17991 - DNA, 897 bp, Streptococcus agalactiae
ttgaataaatggttagttaaggcaagttccttagttgttttaggtggtatggttttatctgcgggttcccgagttttagcggatacttatgtccgtccaattgataatggtagaattacaacaggtttcaatggttatcctggacattgtggggtggattatgctgttccgactggaacgattattagggcagtggcagatggtactgtgaaatttgcaggagctggagccaacttttcttggatgacagacttagcaggaaattgtgtcatgattcaacatgcggatggaatgcatagtggttacgctcatatgtcacgtgtggtggctaggactggggaaaaagtcaaacaaggagatatcatcggttacgtaggagcaactggtatggcgacgggacctcaccttcattttgaatttttaccagctaaccctaattttcaaaatggtttccatggacgtatcaatccaacgtcactaattgctaatgttgcgacctttagtggaaaaacgcaagcatcagctccaagcattaagccattacaatcagctcctgtacagaatcaatctagtaaattaaaagtgtatcgagtagatgaattacaaaaggttaatggtgtttggttagtcaaaaataacaccctaacgccgactgggtttgattggaacgataatggtataccagcatcagaaattgatgaggttgatgctaatggtaatttgacagctgaccaggttcttcaaaaaggtggttactttatctttaatcctaaaactcttaagactgtagaaaaacccatccaaggaacagctggtttaacttgggctaagacacgctttgctaatggtagttcagtttggcttcgcgttgacaacagtcaagaactgctttacaaa

SEQ ID NO: 17992 - protein, 299 aa, Streptococcus agalactiae; identical to SEQ ID NO: 4372

SEQ ID NO: 17993 - DNA, 1302 bp, Streptococcus agalactiae
atgaaaatgaataaaaaggtactattgacatcgacaatggcagcttcgctattatcagtcgcaagtgttcaagcacaagaaacagatacgacgtggacagcacgtactgtttcagaggtaaaggctgatttggtaaagcaagacaataaatcatcatatactgtgaaatatggtgatacactaagcgttatttcagaagcaatgtcaattgatatgaatgtcttagcaaaaattaataacattgcagatatcaatcttatttatcctgagacaacactgacagtaacttacgatcagaagagtcatactgctacttcaatgaaaatagaaacaccagcaacaaatgctgctggtcaaacaacagctactgtcgatttgaaaaccaatcaagtttctgttgcagaccaaaaagtttctctcaatacaatttcggaaggtatgacaccagaagcagcaacaacgattgtttcgccaatgaagacatattcttctgcgccagctttgaaatcaaaagaagtattagcacaagggcaagctgttagtcaagcagcagctaatgaacaggtatcaccagctcctgtgaagtcgattacttcagaagttccagcagctaaagaggaagttaaaccaactcagacgtcagtcagtcagtcaacaacagtatcaccagcttctgttgccgctgaaacaccagctccagtagctaaagtagcaccggtaagaactgtagcagcccctagagtggcaagtgttaaagtagtcactcctaaagtagaaactggtgcatcaccagagcatgtatcagctccagcagttcctgtgactacgacttcaacagctacagacagtaagttacaagcgactgaagttaagagcgttccggtagcacaaaaagctccaacagcaacaccggtagcacaaccagcttcaacaacaaatgcagtagctgcacatcctgaaaatgcaaggctccaacctcatgttgcagcttataaagaaaaagtagcgtcaacttatggagttaatgaattcagtacataccgtgcgggagatccaggtgatcatggtaaaggtttagcagttgactttattgtaggtaaaaaccaagcacttggtaatgaagttgcacagtactctacacaaaatatggcagcaaataacatttcatatgttatctggcaacaaaagttttactcaaatacaaatagtatttatggacctgctaatacttggaatgcaatgccagatcgtggtggcgttactgccaaccactatgaccacgttcacgtatcatttaacaaa

SEQ ID NO: 17994 - protein, 434 aa, Streptococcus agalactiae
MKMNKKVLLTSTMAASLLSVASVQAQETDTTWTARTVSEVKADLVKQDNKSSYTVKYGDTLSVISEAMSIDMNVLAKINNIADINLIYPETTLTVTYDQKSHTATSMKIETPATNAAGQTTATVDLKTNQVSVADQKVSLNTISEGMTPEAATTIVSPMKTYSSAPALKSKEVLAQGQAVSQAAANEQVSPAPVKSITSEVPAAKEEVKPTQTSVSQSTTVSPASVAAETPAPVAKVAPVRTVAAPRVASVKVVTPKVETGASPEHVSAPAVPVTTTSTATDSKLQATEVKSVPVAQKAPTATPVAQPASTTNAVAAHPENARLQPHVAAYKEKVASTYGVNEFSTYRAGDPGDHGKGLAVDFIVGKNQALGNEVAQYSTQNMAANNISYVIWQQKFYSNTNSIYGPANTWNAMPDRGGVTANHYDHVHVSFNK

SEQ ID NO: 17995 - DNA, 696 bp, Streptococcus agalactiae
atgccacatctaagtaaagaagcttttaaaaagcaaataaaaaatggcattattgtgtcatgtcaagctttgcctggggagcctctttatactgaaagcggaggtgttatgcctcttttagctttggcagctcaagaagcaggagcggttggtataagagccaatagtgtccgcgacattaaggaaattcaagaagttactaatttacctatcatcggcattattaaacgtgaatatcctccacaagaaccatttatcactgctacgatgacagaggtggatcaattagctagtttagatattgcagtaatagccttagattgtacacttagagagcgtcatgatggtttgagtgtagctgagtttattcaaaagataaaaaggaaatatcctgaacagttgctaatggctgatataagtacttttgaagaaggcaaaaatgcttttgaagcaggagttgattttgtgggtacaactctatcgggatacacagattacagccgccaagaagaaggaccggatatagaactccttaataagctttgtcaagccggtatagatgtgattgcggaaggtaaaattcatactcctaagcaggctaatgaaattaatcatataggtgttgcaggaattgtagttggtggtgctatcactagaccaaaagaaatagcggagcgtttcatctcaggacttagt

SEQ ID NO: 17996 - protein, 232 aa, Streptococcus agalactiae
MPHLSKEAFKKQIKNGIIVSCQALPGEPLYTESGGVMPLLALAAQEAGAVGIRANSVRDIKEIQEVTNLPIIGIIKREYPPQEPFITATMTEVDQLASLDIAVIALDCTLRERHDGLSVAEFIQKIKRKYPEQLLMADISTFEEGKNAFEAGVDFVGTTLSGYTDYSRQEEGPDIELLNKLCQAGIDVIAEGKIHTPKQANEINHIGVAGIVVGGAITRPKEIAERFISGLS

SEQ ID NO: 17997 - DNA, 1314 bp, Streptococcus agalactiae
atgagtatcaaaaaaagtgtgattggtttttgcctcggagctgcaacattatcaatgtttgcttgtgtagacagtagtcaatctgttatggcttccgagaaggataaagtcgaaattacgtggtgggcttttccaacctttactcaagaaaaggctaaggatggagtaggtacttatgagaaaaaagtcatcaaggcttttgaaaagaaaaatcctaatataaaagtaaaactagagacaattgatttcacatctggacctgaaaaaatcactacagcaattgaagcagggacagcacctgatgtgctttttgatgcaccagggcgaattattcaatatggtaaaaatggtaaattagcagatttgaatgatttatttacagaccaatttattaaggatgtcaataataagaacatcattcaagcttctaagtctggcgataaagcctacatgtatccaataagttctgccccattttatatggcgttcaataaaaaaatgcttaaagatgcaggagttttgaaacttgtaaaagaaggttggactactagtgattttgaaaaagtactaaaagcactaaaaaataaaggctatacaccaggttcattctttgcaaacgggcaaggaggagatcaaggaccacgtgcattttttgctaatctttatagtgctccaataacagataaagaagtaacaaaatataccactgacactaaaaattctgtaaaatcaatgaaaaaaatagttgaatggattaagaaaggctacttgatgaatgggtctcagtatgatggctcagctgacattcaaaactttgctaatggacaaactgctttcactatcctatgggctccagctcaaccaaaaactcaagcaaaattattagagtcaagtaaagtggattaccttgaagtgccattcccatcagaagatggaaaaccagatttagaataccttgttaatggttttgcggtctttaataataaagatgaaaacaaagtaaaagcctctaagaaatttatcacttttattgctgacgataaaaaatggggaccaaaagatgttatacgtacaggtgctttcccagttagaacatcatttggggatctttataaaggtgataaacgtatgatgaagatttcaaaatggactcaatattattcaccatattacaacactatcgatggattttctgaaatgagaaccttatggttcccaatggttcaatctgtatccaatggtgatgaaaaaccggcagatgctttgaaagactttactcaaaaagcaaatgataccattaaaaaagcagctaaa

SEQ ID NO: 17998 - protein, 438 aa, Streptococcus agalactiae
MSIKKSVIGFCLGAATLSMFACVDSSQSVMASEKDKVEITWWAFPTFTQEKAKDGVGTYEKKVIKAFEKKNPNIKVKLETIDFTSGPEKITTAIEAGTAPDVLFDAPGRIIQYGKNGKLADLNDLFTDQFIKDVNNKNIIQASKSGDKAYMYPISSAPFYMAFNKKMLKDAGVLKLVKEGWTTSDFEKVLKALKNKGYTPGSFFANGQGGDQGPRAFFANLYSAPITDKEVTKYTTDTKNSVKSMKKIVEWIKKGYLMNGSQYDGSADIQNFANGQTAFTILWAPAQPKTQAKLLESSKVDYLEVPFPSEDGKPDLEYLVNGFAVFNNKDENKVKASKKFITFIADDKKWGPKDVIRTGAFPVRTSFGDLYKGDKRMMKISKWTQYYSPYYNTIDGFSEMRTLWFPMVQSVSNGDEKPADALKDFTQKANDTIKKAAK

SEQ ID NO: 17999 - DNA, 885 bp, Streptococcus agalactiae
atgcgtactaataagttaaagatgagggaaacgatgatagcttatgcttttctagcgcctattctcttatttttcttaatttttgtttttgcaccgatggttatgggctttgtcactagtttttttaattattctatgacacagttcacttttattgggttagctaattacaatcgtatgtttcatgattctattttcatgaaatccttgataaatacagtaatcattgtgattggctctgtgccagtagtggttttcttctcactttttgttgctgccaatacttatgaaaaaaatgttttttcacgctctttctaccgttgtgtcttcttcttgccagtagtaactggtagtgttgcagtcacagttgtttggaaatggatttatgaccctatgtccggaattttaaattacatcttgaaatcaggtcatgtcattgaacagaatattagctggcttggtgataagcactgggcattacttgctattattattattttgctaacgacctcagttggtcaacctattattctatatattgcggcgatgggaaatattgataattctctttgcgaagctgcgcgcgttgatggagccaatgaaatgcaagttttttggcaaattaaatggccgagtctcttaccaactacactctatattgcagttataacaacaattaattcatttcaatgttttgccttaatccagctcctgacatctggtggaccaaattattcaacaagcactttgatgtattatctttatgaaaaagcctttaaactatcagaatatggctatgctaatactatgggagtattcctagcagtaatgattgctttaataagttttgctcaatttaagatcttaggaaatgatgtggaatat

SEQ ID NO: 18000 - protein, 295 aa, Streptococcus agalactiae; identical to SEQ ID NO: 94

SEQ ID NO: 18001 - protein, 828 aa, Streptococcus agalactiae
ATGAAAAAGAAAACATTCAGTGCTTATAACTTTTTAACGGCTCTTATCCTTTGTCTTTTGACAGTGCTTTTTATCTTTCCATTTTATTGGATTATGACAGGAGCTTTTAAATCTCAACCTGATACTATTATCATCCCCCCACAATGGTGGCCCAAAGCACCGACCTTAGAAAATTTTAAAGCTTTAACTGTACAAAACCCAGCTTTGAGATGGCTTTGGAATAGTGTCTTTATCTCAATTATGACAATGTTCCTAGTTTGCTGTACATCGTCAATGGCAGGCTATGTTTTAGCTAAGAAACGATTTTACGGTCAAAAAATATTGTTCTCCCTTTTTATTGCTGCTATGGCTTTACCTAAACAGGTTGTTTTAGTGCCATTAGTTAGAATTATCAATTTTATGGGGATACATGATACCTTATGGGCGGTTATTTTACCTCTTGTTGGTTGGCCTTTTGGGGTCTTCTTGATGAAACAGTTTTCTGAAAATATTCCAACAGAATTATTGGAATCAGCTAAAATTGATGGTTGTGGAGAGATTCGAACATTTATTAATGTAGCATTTCCAATTGTCAAACCTGGATTTGCTGCCCTAGCTATTTTCACATTTATCAATACTTGGAATGACTATTTTATGCAATTAGTTATGCTAACTTCTAGAAATAATCTGACCATTTCTCTTGGGGTAGCTACTATGCAGGCTGAAATGGCAACAAACTATGGCTTAATTATGGCAGGTGCAGCCTTAGCTGCTGTTCCTATTGTGACAGTATTCTTAGTTTTCCAAAAATCCTTTACTCAGGGGATTACAATGGGAGCTGTTAAAGGA

SEQ ID NO: 18002 - protein, 276 aa, Streptococcus agalactiae; identical to SEQ ID NO: 96

SEQ ID NO: 18003 - protein, 441 aa, Streptococcus agalactiae
ATGATTTACGATCATTTATTGAATTTAACGCATTATAAAGATATTAATCCTAATTTAGATTTAGCGATTGATTATCTACTAAGTCATGATTTAAGGAATTTAGATATAGGCACCTATCATATTAGCCCAGAAGTGATACTCATGGTCCAATCAAATCAACTTAGTGAGTCATTTGATCATATTTTTGAATACCATAAAAAATACCTTGATATACATTATGTCATTGAAGGACATGAAGTTATCAAATTGGGAAAAGGTGATAAGGTAGAGGTAGAGGAATACTTAGGCGATATAGGATTTATCAAGTGCTCAGAAGAGACTTCTTTTGATTTGAGAGATAATTATATAGCCTTCTTTTTCCCAGAAGAAGCTCATCAGCCAAATGGTATGGGAAGTCTAGATAATTATGTCAAAAAAGGGGTATTGAAAGTGTTAATGGCG

SEQ ID NO: 18004 - protein, 147 aa, Streptococcus agalactiae
MIYDHLLNLTHYKDINPNLDLAIDYLLSHDLRNLDIGTYHISPEVILMVQSNQLSESFDHIFEYHKKYLDIHYVIEGHEVIKLGKGDKVEVEEYLGDIGFIKCSEETSFDLRDNYIAFFFPEEAHQPNGMGSLDNYVKKGVLKVLMA

SEQ ID NO: 18005 - protein, 660 aa, Streptococcus agalactiae
GTGAAAAAAGCAAATCAATTAATAGCAGCGATTTTTGATGTTAACAACCCCTTTATGCAAGGTTGCAATGTTGTTTTTGATCTAGCATTACTAAACCTTCTTTTTATGATAACTTGCCTACCATTGGTAACTATTGGTGCTGCTAAAATTAGTTTGTATCGAACGTTGTGGCAAAAATTAGAAGGTGATCAGACAAATCTTTTAATATTGTATATAAAACACCTAAAAAAAGAGTGGTTCCAAGGTATGCTTTTAGGTTTGGTTGAACTAAGTATTTTGGTTGTGATCATATTTGATTTAACAATTCTTCATTATCAAATAGGTTTCATTGTGTCTTTCTTGAAGATAACTTGTTACGCCTTTTTGTTATTGACTGTGATGACGAGCATATACCTATTTCCTATGGCTGCCCGCTACGAAATGTCTCTTTTAGATACCGTGAAAAAGAGCTTTATAATGGCATGTTTAAACTTGAAATGGACTGGTGTATTGATGTTTTTATTAATCATGACTTGGTTTATTATGGTGCAGTCTAGTCTCTTATTTATGCTTACAGTGTCAGCTATATTTATTTTTGCTTATACCGCCTTTGCTTACTTTAAAATTATTATTTTACAAAAACAATTTGCCTATTTCAGCAAACAACAAGGAGATTATCAA

SEQ ID NO: 18006 - protein, 220 aa, Streptococcus agalactiae; identical to SEQ ID NO: 100

SEQ ID NO: 18007 - protein, 915 aa, Streptococcus agalactiae
ATGAAAGATTTACAAAAATATCAAGGAATTATTCCTGCATTTTATGCTTGCTATGATGATAAGGGTGATATTTGTCCCGAACGAGTAAAAGCCCTGACCAATTATTTTATTGATAAAGGTGTTCAAGGACTTTATGTTAATGGTTCATCAGGAGAATGTATTTACCAAAGTGTAGCAGATCGTAAACTTGTACTGGAAAATGTTATGTCCGTTGCTAAGGGTAAACTAACAGTAATAGCGCATGTGGCATGTAATAATACTAAGGATAGCGTAGAGTTGGCTATGCATGCTGAAGCTATAGGTGTTGATGCTATTGCAGCAATTCCACCAATTTATTTTCGATTACCAGAGTATGCCATAGCAGATTATTGGAATACTATTAGTCAAGCAGCACCACAAACTGATTTTATTATTTACAATATTCCTCAATTGGCAGGGGTTGCTTTGACATCGGATTTATATCGAAAAATGTTACAAAATCCGCAAGTAATTGGTGTTAAAAATTCTTCCATGCCAGTTCAAGATATTCAGAATTTTGTGGCTATTGGAGGAGAAAATCATATTGTTTTTAATGGTCCAGATGAACAATTTTTGGGTGGTCGTCTCATGGGAGCCGCTGCAGGTATTGGTGGTACCTATGGCGTAATGCCAGAATTATACTTGACTTTAAATCAGTTAATTGTTGATAAAGATTTAGAAAAAGCGCGTGAACTTCAATTTACAATTAACGATATTATCACAAAGCTTTGTTCAGGTCATGGTAATATGTATGCTGTGATCAAAGCTGTATTGGAAATCAATGAGCAACTAACTATAGGTTCCGTTCGGTTACCTTTAGCATCTGTAACAGAAGAAGATAAACCTATTATTAAAGAGGCAGCAGAAATGATTCGACATGCTAAAAAACAGTTTTGT

SEQ ID NO: 18008 - protein, 305 aa, Streptococcus agalactiae; identical to SEQ ID NO: 102

SEQ ID NO: 18009 - protein, 879 aa, Streptococcus agalactiae
ATGACCAGAACAGTAGCAATTGATATTGGCGGTACAATGATTAAGCATGGCATTGTGGATAATTTAGGTTGTATTGTTGAGGCAAGTGAGCTTGCCACAGAAGCCTACAAAGGTGGTCCAGGCATTTTACAAAAAGTTTGTCAAATTATCGATAATTATCTAACAGAAGGGAGCATTGATGGAATTGCTATCTCATCTGCTGGCATGGTAGATCCAGATGAAGGATGCATATTTTACTCTGGTCCTCAAATTCCAAACTATGCTGGGACACAATTTAAGAAAGTTTTAGAAGACACTTATCAAGTACGCACAGAAATTGAAAATGATGTTAATTGTGCAGGGTTAGCTGAAGCTGTCTCAGGTAGTGCCAAAGATAGTTCAATAGCGCTTTGTCTTACTATTGGAACAGGTATTGGTGGTTGTCTGATTATTGATAAAACAGTTTTTCATGGCTTTAGTAATTCTGCTTGTGAAGTTGGCTATATGCACCTTTCAGATGGTGATTTTCAAGATTTAGCCTCTACAACTGCACTGATTGCTGATGTTGCCAAAGCGCATGGAGATGAAATTAGCCGATGGGATGGACGTCGTATTTTTCAGGAGGCTAAAAAAGGCAATGAAAAATGTATTGCAAGTATAGACCGTATGATAAACTACCTTGGTCAAGGAATCGCTAATATGGTTTATGTGGTAAATCCTGAAAAAGTTGTTTTAGGTGGTGGAATCATGGCTCAAAAAGATTATTTACAAGATAAACTTAGTGAATCTTTGAAACGAAATCTTGTGACAAGTCTTGCTGAAAAAACAACAATAGTTTTTGCACAACACGAAAACCAAGCTGGTATGCTAGGAGCTTACTACCATTTTAAAAACAGGGGG

SEQ ID NO: 18010 - protein, 293 aa, Streptococcus agalactiae
MTRTVAIDIGGTMIKHGIVDNLGCIVEASELATEAYKGGPGILQKVCQIIDNYLTEGSIDGIAISSAGMVDPDEGCIFYSGPQIPNYAGTQFKKVLEDTYQVRTEIENDVNCAGLAEAVSGSAKDSSIALCLTIGTGIGGCLIIDKTVFHGFSNSACEVGYMHLSDGDFQDLASTTALIADVAKAHGDEISRWDGRRIFQEAKKGNEKCIASIDRMINYLGQGIANMVYVVNPEKVVLGGGIMAQKDYLQDKLSESLKRNLVTSLAEKTTIVFAQHENQAGMLGAYYHFKNRG

SEQ ID NO: 18011 - protein, 975 aa, Streptococcus agalactiae
ATGATTGAAACAATGTCGCTAGATGACATGAGAGAATACCTAGGTCAAGACCAAATTCCCGAGGATTTTGATGATTTCTGGAAAAAACAAACAATGAAATATCAAGGGAATATTGAGTATCGTCTAGACAAAAAAGATTTCAATATTACTTTTGCACAAGCTTATGATCTTCATTTTAAAGGTAGCAATGACTCTATTGTCTATGCCAAATGTTTATTCCCTAAAACAAATAAACCCTATCCTGTAGTTTTTTATTTTCATGGCTACCAAAACCAAAGTCCTGACTGGAGTGACCAACTTAATTATGTAGCAGCAGGTTATGGCGTTGTTTCAATGGATGTTCGAGGTCAAGCTGGACAGTCTCAAGACAAGGGGCATTTTGATGGCATTACAGTTAAGGGCCAGATTGTGCGAGGAATGATCTCAGGACCAAATCATCTTTTTTATAAAGACATTTATCTTGATGTTTTCCAATTGATTGATATCGTTGCTACATTAGAGAGTGTTGATAGTAATCAACTTTATAGTTATGGCTGGTCTCAAGGTGGAGCACTTGCTTTGATAGCTGCAGCCCTTAATCCCAAAATCGTCAAGACCGTTGCTGTTTACCCATTTTTGTCAGACTTTAGACGAGTATTAGATTTAGGGAATGTCAGTGAGCCTTATGATGAACTCTTCCGCTATTTTAAATATAGTGATCCTTTTCATAAAACAGAAAATAATGTGTTAAAAACTTTGGCTTATATTGATGTTAAAAATTTTGCACATAGGATTTCTTGCCCCGTTGTTTTACTAACAGCCTTAAAAGATGATATTTGTCCTCCATCAACTCAATTTGCCATTTTTAATCGTCTGACATCAACTAAAAAGCATCTTTTATTACCAGACTATGGACATGATCCAATGACAGTGCAAGTAAAAGACTATATTTTTGATCAACTGACAGGAAGTCAATTTACAAAGCAAAAAATCGAG

SEQ ID NO: 18012 - protein, 325 aa, Streptococcus agalactiae
MIETMSLDDMREYLGQDQIPEDFDDFWKKQTMKYQGNIEYRLDKKDFNITFAQAYDLHFKGSNDSIVYAKCLFPKTNKPYPVVFYFHGYQNQSPDWSDQLNYVAAGYGVVSMDVRGQAGQSQDKGHFDGITVKGQIVRGMISGPNHLFYKDIYLDVFQLIDIVATLESVDSNQLYSYGWSQGGALALIAAALNPKIVKTVAVYPFLSDFRRVLDLGNVSEPYDELFRYFKYSDPFHKTENNVLKTLAYIDVKNFAHRISCPVVLLTALKDDICPPSTQFAIFNRLTSTKKHLLLPDYGHDPMTVQVKDYIFDQLTGSQFTKQKIE

SEQ ID NO: 18013 - protein, 801 aa, Streptococcus agalactiae
ATGACTATTTATGACCAAATTGAGTCTGCTCTTGATTTAATGACTGATTTAGAACGTGAAATTGCTTGTTATTTTATGGGGCAGCCCATTTCAAAAGACGCTCTTGCTTCTTCCATTGTCACTAAGCAACTACACATTTCACAAGCAGCCTTAACGCGTTTTGCTAAAAAATGTGGGTTTAAAGGCTATCGTGAATTTGTTTTTGAATATTTAAAAAGCCATGAGACCATCAGTCAACAATTATACGGTCTTCAAAATGACAACACTAAGAAAGTATTTATGAATTATCAAGAGATGGTTTCTAAATCCGCTGATATTATTGATGAAGAACAGCTTCTAGAAGTATCACATATGATTGAGCAAGCTGATCGTGTTTATTTTTATGGCAAAGGGAGCTCATCGCTAGTAGCTAAAGAATTTAAAATACGCCTTATGAGGCTGGGAGTGATTTGTGAGGCTCTGGATGATACAGATAGTTTCTCATGGACTAATAGTATTGTTAATGATAGATGCCTCGTCATTGCCTTCTCACTTTCTGGGAACACCAACTCTGTTATCGGTGCCTTAAAAATCGCAAGTTGTCACGGAGCTAAAACCGTTCTATTTACAAAACAACCTCACACAATTGACTATGCTTTTGACAAGATTATTCAGGTGGCCTCTGCTAGGCATTTAGACTACGGCAATAGAATTTCGCCTCAGATCCCAATGTTAATCATGGTAGATATTATCTATGCACAATTTTTAGATATTAATAAAATAGAAAAAGAGCGAATTTTTAGAGAAACCATTATTCAACGC

SEQ ID NO: 18014 - protein, 267 aa, Streptococcus agalactiae
MTIYDQIESALDLMTDLEREIACYFMGQPISKDALASSIVTKQLHISQAALTRFAKKCGFKGYREFVFEYLKSHETISQQLYGLQNDNTKKVFMNYQEMVSKSADIIDEEQLLEVSHMIEQADRVYFYGKGSSSLVAKEFKIRLMRLGVICEALDDTDSFSWTNSIVNDRCLVIAFSLSGNTNSVIGALKIASCHGAKTVLFTKQPHTIDYAFDKIIQVASARHLDYGNRISPQIPMLIMVDIIYAQFLDINKIEKERIFRETIIQR

SEQ ID NO: 18015 - protein, 1260 aa, Streptococcus agalactiae
ATGAAATTGCTTGTTGTTGGTTCTGGTGGTCGTGAGCATGCGATTGCTAAGAAGTTGTTAGCGTCTAAGGGTGTAGATCAGGTTTTTGTGGCACCTGGTAATGATGGTATGACCTTGGATGGTCTAGGCTTGGTAAATATCGGAATTTCCGAACATTCTAGGCTGATTGACTTTGCTAAGGAGAATGAGATTGCTTGGACTTTTATTGGTCCTGATGATGCGCTAGCGGCTGGTATCGTTGATGATTTCAACAGTGCTGGACTTAGAGCTTTTGGGCCAACAAAGGCAGCAGCGGAGCTAGAGTGGTCAAAAGACTTTGCTAAGGAAATCATGGTTAAATACAATGTCCCAACAGCAGCCTATGGCACATTTTCAGATTTTGAAAAAGCTAAAGCCTACATCGAAGAGCAGGGCGCACCAATCGTGGTCAAGGCTGATGGCTTGGCGCTAGGTAAGGGTGTTGTCGTGGCTGAAACCGTTGAGCAGGCGGTAGAGGCGGCGCAAGAGATGCTTCTAGATAACAAGTTTGGCGACTCAGGAGCGCGTGTGGTTATCGAGGAATTCTTGGATGGCGAGGAGTTTTCCCTCTTTGCCTTTGCTAATGGCGATAAGTTCTACATCATGCCGACAGCTCAGGATCACAAGCGTGCCTTTGACGGAGACAAGGGGCCAAATACTGGTGGTATGGGTGCCTATGCGCCTGTTCCTCACCTGCCTCAGAGCGTGGTGGATACAGCAGTTGAGACGATCGTTAAACCTGTCCTGGAGGGTATGATTGCCGAAGGGCGTCCTTATCTAGGTGTCCTCTATGCGGGGCTTATCCTGACAGCTGATGGCCCTAAGGTTATCGAGTTCAACTCACGTTTCGGTGACCCTGAAACTCAGATTATCCTCCCTCGCCTGACTTCTGATTTCGCTCAGAACATCGACGACATCATGATGGGCATTGAGCCTTACATCACTTGGCAGAAGGACGGCGTGACTCTTGGCGTTGTCGTTGCATCAGAAGGCTATCCGCTCGATTACGAGAAAGGTGTGCCACTGCCTGAGAAGACCGACGGCGACATCATCACCTACTACGCAGGAGCTAAGCTTGCGGAAAATAGCAAAGCACTACTCTCAAACGGAGGACGTGTCTATATGCTAGTCACCACAGAAGACAGCGTCAAAGCAGGGCAGGACAAAATCTATACCCAACTAGCCCAACAAGACACAACAGGCCTCTTCTACCGAAATGATATCGGAAGCAAAGCTATTAAG

SEQ ID NO: 18016 - protein, 420 aa, Streptococcus agalactiae
MKLLVVGSGGREHAIAKKLLASKGVDQVFVAPGNDGMTLDGLGLVNIGISEHSRLIDFAKENEIAWTFIGPDDALAAGIVDDFNSAGLRAFGPTKAAAELEWSKDFAKEIMVKYNVPTAAYGTFSDFEKAKAYIEEQGAPIVVKADGLALGKGVVVAETVEQAVEAAQEMLLDNKFGDSGARVVIEEFLDGEEFSLFAFANGDKFYIMPTAQDHKRAFDGDKGPNTGGMGAYAPVPHLPQSVVDTAVETIVKPVLEGMIAEGRPYLGVLYAGLILTADGPKVIEFNSRFGDPETQIILPRLTSDFAQNIDDIMMGIEPYITWQKDGVTLGVVVASEGYPLDYEKGVPLPEKTDGDIITYYAGAKLAENSKALLSNGGRVYMLVTTEDSVKAGQDKIYTQLAQQDTTGLFYRNDIGSKAIK

SEQ ID NO: 18017 - protein, 582 aa, Streptococcus agalactiae
GTGGGTGCGTCTTCGAAATCAAAGATTTCGGACTTACCGCATATTTTTCTACGAAAATTTTCGACAAGTCGAAACGTCCCTATGTATCTTAATATTATGCAACCAATTATTTCTATTATCATGGGATCCAAATCTGACTGGACAACCATGCAAAAAACGGCTGAAGTTCTAGATAACTTTGGCATTGCTTACGAGAAGAAAGTCGTCTCTGCCCACCGCACACCAGACCTCATGTTCAAGCATGCTGAGGAAGCACGTGACCGTGGCATCAAAATCATCATCGCTGGTGCAGGTGGAGCAGCTCACTTGCCTGGTATGGTGGCAGCTAAAACAACGCTACCTGTTATCGGTGTGCCTGTCAAATCACGTGCTCTTTCAGGTTTGGATTCGCTCTATTCCATTGTGCAGATGCCTGGCGGTGTGCCTGTGGCAACCATGGCTATCGGAGAAGCGGGAGCGACTAACGCTGCCCTGACAGCCCTCCGTATCCTCTCTATCGAAGACCAAAATTTGGCTGATGCGCTAGCTCATTTCCATGAGGAACAAGGAAAAATCGCAGAGGAGTCAAGCAATGAACTCATT

SEQ ID NO: 18018 - protein, 194 aa, Streptococcus agalactiae
MGASSKSKISDLPHIFLRKFSTSRNVPMYLNIMQPIISIIMGSKSDWTTMQKTAEVLDNFGIAYEKKVVSAHRTPDLMFKHAEEARDRGIKIIIAGAGGAAHLPGMVAAKTTLPVIGVPVKSRALSGLDSLYSIVQMPGGVPVATMAIGEAGATNAALTALRILSIEDQNLADALAHFHEEQGKIAEESSNELI

SEQ ID NO: 18019 - protein, 1089 aa, Streptococcus agalactiae
ATGAACTCATTTAAGACCATTGGGATTATTGGTGGTGGTCAGCTGGGGCAGATGATGGCGATTGCGGCTATCTACATGGGCCACAAGGTCATTACGCTGGATCCTGCTAGCGACTGCCCTGCCTCTCGCGTTAGCGAGGTGGTTGTGGCGCCTTACGATGATGTTGAGGCTTTGGGACAATTGGCTGCGCGTTGCGATATTTTGACCTATGAGTTTGAGAATGTCGATGCCGACGGTCTGGATGCCGTTGTGTCAGCTGGTCATCTACCGCAGGGGACTGATCTGCTCCGCATTTCCCAAAATCGTATCTTTGAAAAAGACTTTCTGGCAAATAAGGCTGGTGTGACTGTCGCTCCCTATAAGGTGGTGACGTCTAGCCTTGATCTAGAGGGGATTGACTTGACCAAGACCTATGTCCTCAAGACAGCGACAGGTGGTTATGACGGTCATGGGCAAAAGGTTATCCGCTCAGCAGAAGACCTGTCAGAGGCGCAGCAATTAGCCAACTCAGCTCAGTGTGTCTTGGAAGAGTTTGTCAACTTCGACCTTGAAATCTCAGTCATCGTGTCTGGAAATGGTCAGGATGTGACGGTCTTTCCTGTTCAGGAAAATATCCACCGCAACAATATCCTGTCAAAAACCATCGTACCAGCTCGCATCTCAGACCAACTAGCTGACAAGGCTAAAGAAATGGCGGTGCAGATTGCCAAGAAACTCCAGCTATCAGGAACTCTCTGTGTGGAAATGTTTGCGACCGCAGACGACATCATTGTCAACGAAATCGCTCCACGCCCTCACAACTCAGGACACTACTCTATCGAAGCCTGCGACTTTTCACAGTTTGACACCCACATCTTGGGCGTACTGGGGCAACCTCTCCCACCAATCAAGCTTCATGCTCCAGCCGTTATGCTCAATGTCCTCGGACAACATGTCCAGCAGGCAATTGACTATGTTGCCGAAAACCCTAGCGCCCACCTCCACATGTATGGTAAACTAGAAGCGAAACACAACCGCAAAATGGGACATGTGACAGTGTTTAGTAATACACCTGATGAGGTGGAAGAGTTTGAAGAAAGGATGGATTTC

SEQ ID NO: 18020 - protein, 363 aa, Streptococcus agalactiae
MNSFKTIGIIGGGQLGQMMAIAAIYMGHKVITLDPASDCPASRVSEVVVAPYDDVEALGQLAARCDILTYEFENVDADGLDAVVSAGHLPQGTDLLRISQNRIFEKDFLANKAGVTVAPYKVVTSSLDLEGIDLTKTYVLKTATGGYDGHGQKVIRSAEDLSEAQQLANSAQCVLEEFVNFDLEISVIVSGNGQDVTVFPVQENIHRNNILSKTIVPARISDQLADKAKEMAVQIAKKLQLSGTLCVEMFATADDIIVNEIAPRPHNSGHYSIEACDFSQFDTHILGVLGQPLPPIKLHAPAVMLNVLGQHVQQAIDYVAENPSAHLHMYGKLEAKHNRKMGHVTVFSNTPDEVEEFEERMDF

SEQ ID NO: 18021 - protein, 1389 aa, Streptococcus agalactiae
ATGAATAGAATAATAAACAGGGATATTTTACCTAGAATTTCAAAGATTTCTAAAAATAATAAAGAGAAAGATTTACTATCTATAGCTTATATTACTTGGCTAATCTTTATAATATTTGCTTTGGGAGTAGTTACAGTTAATGATTTAAAACCGATGTTTAATCAATTAATAGTAAACCTCTTAAACATTTATTATTATATGGAAGCCTTCATATTGGGTATGGACAGCTATTTACAATATAACCTTCCATACAGTTTTGATTTTTGGAGTATTTTTGTAGAGGCTATAAATTTATTTGTAAAAGTATTTTTAATTGCTTTTATCCCTTTTGTTATTAGAAAAGTATTGAAAAAAGAAAGTTTTTTCAATGAAGTTGTTATTTTACTAGGAGCGATTGTTACTATAATTCTAAGTTTCCATTTATATTTAGAGATATTGATAGTAGTGGGACTAGTACTTTTATTAATTGCTTTTGTTTCAATAGGCAAGAATCGTGTTTATAACTTTGTTCAAAATTTAAACTATTTTGAAGAAGTGATTTGGAATTATTTTGAAGAAAATCCGGTTGAAATTAAAGAAAAATCATTGATTATTAAAATTTTACTTACTATTTCCTTTGTTTTTGTAATTGATTTTGCAATGGTTAGATTGTTGAATTTTAATATAAAATTTTCTACAATATTAGCTTGTTCTGCTATTTTATTAGCATGGTTATACCAAAATAAATCTGTTACAGAACCCTTCCTATTAAAAAAGTTAGCTATCTATTTTATTTTTTTCATTGCCACTTTAATTGGTAATTTTAAAAATGAGTCGTCAATCTTAGAAACACCATTACTTTTTATCAGTATATTTTTTACTATGGATAGAATTATTGCTCTATCTAAAGAAATGCGTGATTTGATTATATCTAAGAGTATTTTATTTTATTATGATCATGAAAAAATAAAGCCAGCAATATTACTTAGTGAGATGAAAGAAATTAAGTATCTTGAAAATGTAGATATTGGAGAACTTGAACTTGTTAGGCAAATGGTAATTAGGTTGCGTCTAGAGTTAGAGGAAGAATTTTTAATTTTATCAGATATATATATGAATAATGGCTATGAAAAATATATACAATTTGTTCAAGGGAATGTTTATTTTATCAACTTAGAATTGGATAAAACTCCCAATTACGCTAACTTGAAATTAATACTAGAATCAATATTTGATCATAATAATCAAAAGATATTTATACCTAAACTTTATGAGGAATATATATATATCTTAATTTCTTTAGGAGAAGTTGAAAAAGCTAAAGAAATATTAAGAGAAGTGTCGGATTATTTAACTGAAGAATCTTTGAATTATTTTGAAAAAGAATATGATAAAGCTAAGGGAAGTAAT

SEQ ID NO: 18022 - protein, 463 aa, Streptococcus agalactiae
MNRIINRDILPRISKISKNNKEKDLLSIAYITWLIFIIFALGVVTVNDLKPMFNQLIVNLLNIYYYMEAFILGMDSYLQYNLPYSFDFWSIFVEAINLFVKVFLIAFIPFVIRKVLKKESFFNEVVILLGAIVTIILSFHLYLEILIVVGLVLLLIAFVSIGKNRVYNFVQNLNYFEEVIWNYFEENPVEIKEKSLIIKILLTISFVFVIDFAMVRLLNFNIKFSTILACSAILLAWLYQNKSVTEPFLLKKLAIYFIFFIATLIGNFKNESSILETPLLFISIFFTMDRIIALSKEMRDLIISKSILFYYDHEKIKPAILLSEMKEIKYLENVDIGELELVRQMVIRLRLELEEEFLILSDIYMNNGYEKYIQFVQGNVYFINLELDKTPNYANLKLILESIFDHNNQKIFIPKLYEEYIYILISLGEVEKAKEILREVSDYLTEESLNYFEKEYDKAKGSN

SEQ ID NO: 18023 - protein, 1296 aa, Streptococcus agalactiae
ATGATCGAACGTTATTCACGCCCTGAGATGGCGGCAATTTGGACAGAGGAAAATAAATACCGTGCTTGGTTGGAGGTCGAGATTTTGGCTGACGAGGCATGGGCTGAGTTGGGTGAGATTCCTAAGGAGGATGTGGCTAAGATTCGTGAGAAGGCGGATTTTGACATTGACCGCATTCTTGAGATTGAGCAGGATACGCGTCACGATGTGGTGGCTTTCACTCGTGCGGTTTCTGAGACGCTTGGTGAGGAGCGCAAGTGGGTGCACTACGGTTTGACATCGACTGACGTGGTAGACACTGCCTACGGTTACCTCTACAAGCAAGCTAACGACATTATTCGTCGCGATCTTGAGAATTTCACAAATATCGTGGCTGATAAGGCTCGAGAACATAAAATGACCATCATGATGGGTCGTACCCACGGTGTTCACGCTGAGCCAACGACTTTCGGTCTTAAGTTGGCAACTTGGTACAGTGAGATGAAACGTAATATTGAGCGTTTTGAACATGCTGCCGCAGGAGTGGAAGCTGGTAAGATTTCAGGTGCTGTTGGTAACTTTGCCAACATCCCACCTTTTGTGGAAGAATATGTCTGTGACAAATTAGGCATCCGTCCGCAAGAAATTTCAACACAGGTTCTTCCACGTGATCTCCACGCAGAATATTTTGCAGTGCTTGCAAGTATTGCAACATCTATCGAACGTATGGCGACAGAGATTCGTGGTCTGCAAAAATCAGAACAACGTGAAGTTGAAGAGTTCTTTGCCAAAGGTCAGAAAGGTAGCTCTGCTATGCCTCACAAACGCAACCCGATCGGTTCAGAGAACATGACTGGGCTAGCGCGCGTGATTCGTGGTCACATGGTGACAGCTTATGAGAACGTGGCACTTTGGCACGAGCGTGACATTTCGCACTCATCAGCTGAGCGTATCATCACACCAGACACAACTATCTTGATTGATTACATGCTCAACCGTTTTGGCAATATTGTTAAGAACTTGACTGTCTTCCCGGAAAATATGATGCGCAATATGGAATCAACTTTTGGTTTGATTTATAGTCAACGTGTTATGCTCAAATTGATTGAAAAAGGAATGACACGAGAAGAAGCTTATGACTTAGTTCAACCTAAGACAGCTTATTCCTGGGACAATCAAGTGGATTTCAAACCACTTTTAGAAGAAGACACCAAAGTTACCTCTTGTCTTACACAGGAAGAAATTGATGAACTATTTAATCCGATTTATTACACAAAACGTGTTGATGATATTTTTGAAAGACTAGGATTAGAAAAA

SEQ ID NO: 18024 - protein, 432 aa, Streptococcus agalactiae
MIERYSRPEMAAIWTEENKYRAWLEVEILADEAWAELGEIPKEDVAKIREKADFDIDRILEIEQDTRHDVVAFTRAVSETLGEERKWVHYGLTSTDVVDTAYGYLYKQANDIIRRDLENFTNIVADKAREHKMTIMMGRTHGVHAEPTTFGLKLATWYSEMKRNIERFEHAAAGVEAGKISGAVGNFANIPPFVEEYVCDKLGIRPQEISTQVLPRDLHAEYFAVLASIATSIERMATEIRGLQKSEQREVEEFFAKGQKGSSAMPHKRNPIGSENMTGLARVIRGHMVTAYENVALWHERDISHSSAERIITPDTTILIDYMLNRFGNIVKNLTVFPENMMRNMESTFGLIYSQRVMLKLIEKGMTREEAYDLVQPKTAYSWDNQVDFKPLLEEDTKVTSCLTQEEIDELFNPIYYTKRVDDIFERLGLEK

SEQ ID NO: 18025 - protein, 903 aa, Streptococcus agalactiae
ATGTTAAAACATTTTGGTAGTAAAGTAAGGAAGTTTAGGGAATCTCAACAGGTGACACGAGAAGAATTTTGTGGCGATGAATCAGAGTTATCGGTCCGACAGCTGGCTCGGATTGAAGCAGGAGAATCTGTTCCAAATTTATCTAAGGCGCATTATATCGCTAGAAATCTAGGAGTTAGTTTAGATTCCTTAACAGCAGGAGCGAGTTTAGAACTGTCAAAAAAATATAAGGAATTAAAGTATCTTATATTAAGGACGCCTACCTACAATGATACAGATAGACTTGATTTGATTGAAAAATATCTAGATGAGATTTATTTAATTTCTATGATGATTTACCTGAAGATGAAAAAATAGCAATTGAGTCCATACAAAGTTCTTTAGATATTTATATTTCTAAAAGCCATCATTTTGGAGATGACTGATTAGGGAATACATGAATCAAATTAAACGAAAAAAGATTTACTCTATCAATGACTTACTTATAATTAAACTATGGCAATATAAGATTACTGCTAGCAGGTATGATCCCAATATTTTTAAAATAGATACATTTATTGGTACTATAGATAAGTTGCTTAATCAAGTAAAGGTATTATCAATTGAAAACCTGTTTTTATTAAGGGATGTCCTCATTTATTCGTTAGGTATATTGTTTATATTAGCTGAATATCAGCAAATAGAAAATATAATAAATACTCTAAATGATATTTTAATAAAAACTCAGGATTTTCAAAAGAGGCCAATAATAGATATGTTCGAATGGAAATATCAGTTGTTTTATAAAGAAAATAGGGAAGTGGCTAAAAGAAAGTATCAGGAATCAACTCTTTTTGCTCAATTAATTGGCGATCAAGTTTTATTACACAGCTAAAAGAGGAATGGAAAGCAGACTATATAGAA

SEQ ID NO: 18026 - protein, 302 aa, Streptococcus agalactiae
  VARIANT 107, 289: Xaa = Any Amino Acid
MLKHFGSKVRKFRESQQVTREEFCGDESELSVRQLARIEAGESVPNLSKAHYIARNLGVSLDSLTAGASLELSKKYKELKYLILRTPTYNDTDRLDLIEKYLDEIYXNFYDDLPEDEKIAIESIQSSLDIYISKSHHFGDDLIREYMNQIKRKKIYSINDLLIIKLWQYKITASRYDPNIFKIDTFIGTIDKLLNQVKVLSIENLFLLRDVLIYSLGILFILAEYQQIENIINTLNDILIKTQDFQKRPIIDMFEWKYQLFYKENREVAKRKYQESTLFAQLIGDQVLXTQLKEEWKADYIE

SEQ ID NO: 18027 - protein, 996 aa, Streptococcus agalactiae
ATGACAAGATTTTTAGATAGTGATGCAATGGGTGACGAAGAATTGGTAGAACGTACACTTCGTCCGCAGTATTTAAGAGAGTATATTGGACAAGATAAGGTTAAAGATCAGCTAAAAATATTTATTGAAGCTGCTAAATTGCGTGATGAGTCATTGGATCATGTGTTATTATTTGGCCCTCCTGGTTTAGGGAAAACAACCATGGCATTTGTAATTGCTAATGAGTTGGGTGTCAATCTCAAACAAACATCAGGTCCCGCAATTGAAAAATCAGGGGATTTAGTAGCCATTTTAAATGATTTAGAACCAGGTGATGTTCTTTTTATTGATGAAATTCATCGTATGCCGATGGCGGTTGAAGAGGTACTTTATAGTGCAATGGAAGACTTTTATATTGACATTATGATCGGTGCAGGAGAAACTAGTAGAAGTGTTCATTTAGATTTGCCGCCCTTTACCTTAATTGGTGCAACGACACGTGCAGGTATGTTATCTAATCCCTTACGTGCTCGCTTTGGTATTACAGGGCATATGGAGTATTATGAAGAAAACGATTTGACAGAAATTATTGAGCGTACAGCAGATATTTTTGAAATGAAAATTACTTATGAAGCTGCTTCTGAATTAGCGCGTCGCAGTCGTGGAACGCCACGTATCGCTAACCGTTTATTGAAACGTGTTCGAGATTATGCTCAAATCATGGGAGATGGTTTGATAGATGACAATATTACAGATAAAGCATTAACGATGTTAGATGTTGATCACGAGGGGCTTGATTACGTCGATCAAAAAATCTTAAGAACCATGATTGAAATGTATAATGGAGGTCCTGTTGGTTTAGGAACTCTATCCGTTAATATTGCTGAAGAACGAGATACTGTTGAAGACATGTACGAACCTTATTTAATTCAAAAAGGTTTTATTATGCGTACCCGTACCGGTCGTGTAGCTACGGATAAGGCATACGAACATTTAGGTTATCAGCGATTTGATAAA

SEQ ID NO: 18028 - protein, 332 aa, Streptococcus agalactiae
MTRFLDSDAMGDEELVERTLRPQYLREYIGQDKVKDQLKIFIEAAKLRDESLDHVLLFGPPGLGKTTMAFVIANELGVNLKQTSGPAIEKSGDLVAILNDLEPGDVLFIDEIHRMPMAVEEVLYSAMEDFYIDIMIGAGETSRSVHLDLPPFTLIGATTRAGMLSNPLRARFGITGHMEYYEENDLTEIIERTADIFEMKITYEAASELARRSRGTPRIANRLLKRVRDYAQIMGDGLIDDNITDKALTMLDVDHEGLDYVDQKILRTMIEMYNGGPVGLGTLSVNIAEERDTVEDMYEPYLIQKGFIMRTRTGRVATDKAYEHLGYQRFDK

SEQ ID NO: 18029 - protein, 435 aa, Streptococcus agalactiae
ATGAAGAAAGTCTGTTTTGTTTGTCTTGGAAATATCTGCCGTAGCCCTATGGCTGAGTTTGTTATGGCGAATTTAGATAAGGAGGATAGCCTCTCGGTTGAGAGTCGTGCGACTTCAACATGGGAGCATGGAAATCCTATACATAGGGGAACGCAAGCGATTTTGCAGCGTTATCAAATTCCTTACACTAACGATAAAGGGTCACAACCTATTTCTAAAGACGATTTAGCATATTTTGATTATATCATCGGTATGGATGAGCAAAATGTCAAGGATTTAAAAGCTCTATCACAAGGAACCTATGATGATAAGATTAGCCTTTTTTGTGATGGTGGTGTTCCTGATCCATGGTATACTGGTGATTTTGAGGAAACCTATCGTCTAGTCAATGATGGCTGTAAACAGTGGTTAACGCTAATAAATAATAGTAGAGAT

SEQ ID NO: 18030 - protein, 145 aa, Streptococcus agalactiae
MKKVCFVCLGNICRSPMAEFVMANLDKEDSLSVESRATSTWEHGNPIHRGTQAILQRYQIPYTNDKGSQPISKDDLAYFDYIIGMDEQNVKDLKALSQGTYDDKISLFCDGGVPDPWYTGDFEETYRLVNDGCKQWLTLINNSRD

SEQ ID NO: 18031 - protein, 186 aa, Streptococcus agalactiae
ATGAAGAATTTTAAAATAACACGAACTCATCTAGAAATATTATCTTTGATAATTATTGTTGTTTTTGGTTTATCAGTATTTACCTTAACGACTTCTAGTCAAGGAGTCCTTAGCTATGATGGCGGTAAGATAAAATATGTGGGCTCTATTGTTAATCACCATATGACTGGTAAAGGTAAATTAACC

SEQ ID NO: 18032 - protein, 62 aa, Streptococcus agalactiae
MKNFKITRTHLEILSLIIIVVFGLSVFTLTTSSQGVLSYDGGKIKYVGSIVNHHMTGKGKLT

SEQ ID NO: 18033 - protein, 261 aa, Streptococcus agalactiae
GTGGAAGTAGGACGCGTTCTTGAAACTCCAATCGTGGAATTTTACTACAAAAATGATGATCTGAATGATCCTTTTATCAATGATGAGCATGTGAAGTTTTTGGGTATTGTTAATGATGAGGAGATTGCTTATCTGAAAGGAGAGACTCGCCGTATTAATGAACTTTTGAAAGATTGGTTTGCTCAGATTGGGATTACTTGGATCGACTTCAGTGGAGTTGGGATTGACATGATGGTAGATCATCTGGCTGATGAGTCTCAC

SEQ ID NO: 18034 - protein, 87 aa, Streptococcus agalactiae
MEVGRVLETPIVEFYYKNDDLNDPFINDEHVKFLGIVNDEEIAYLKGETRRINELLKDWFAQIGITWIDFSGVGIDMMVDHLADESH

SEQ ID NO: 18035 - protein, 276 aa, Streptococcus agalactiae
GTGAAGTTTTTGGGTATTGTTAATGATGAGGAGATTGCTTATCTGAAAGGAGAGACTCGCCGTATTAATGAACTTTTGAAAGATTGGTTTGCTCAGATTGGGATTAACTTGATCGACTTCAAGTTGGAGTTTGGATTTGACAATGATGGTAAGATCATCTTGGCTGATGAGTTCTCACCTGATAACTGCCGTCTATGGGATGCTGAAGGAAATCATATGGATAAAGATATCTTTCGCAGGGATTTAGGTAGTTTAACTGATGCTTATCAAAGACCT

SEQ ID NO: 18036 - protein, 92 aa, Streptococcus agalactiae
MKFLGIVNDEEIAYLKGETRRINELLKDWFAQIGINLIDFKLEFGFDNDGKIILADEFSPDNCRLWDAEGNHMDKDIFRRDLGSLTDAYQRP

SEQ ID NO: 18037 - protein, 180 aa, Streptococcus agalactiae
ATGATGAATAAACGTATTTTTGTTGAGAAAAAGGCTGACTTTGGCATTAAATCGGCTAGTCTTGTGAAAGAGTTGACGCATAATTTGCAATTGACTTCTTTGAAGGAGTTGCGTATTGTGCAGGTCTATGATGTCTTTCATTTGGCTGAGGATTTGCTGGCGCGTGNNNNNTTAATTAAT

SEQ ID NO: 18038 - protein, 60 aa, Streptococcus agalactiae
  VARIANT 56, 57: Xaa = Any Amino Acid
MMNKRIFVEKKADFGIKSASLVKELTHNLQLTSLKELRIVQVYDVFHLAEDLLARXXLIN

SEQ ID NO: 18039 - protein, 333 aa, Streptococcus agalactiae
GTGGTTATCGAGGAATTCTTGGATGGCGAGGAGTTTTCCCTCTTTGCCTTTGCTAATGGCGATAAGTTCTACATCATGCCGACAGCTCAGGATCACAAGCGTGCCTTTGACGGAGACAAGGGGCCAAATACTGGTGGTATGGGTGCCTATGCGCCTGTTCCTCACCTGCCTCAGAGCGTGGTGGATACAGCAGTTGAGACGATCGTTAAACCTGTCCTGGAGGGTATGATTGCCGAAGGGCGTCCTTATCTAGGTGTCCTCTATGCGGGGCTTATCTTGACAGCTGATGGCCTTAAGGTTATCGAGTTCAACTCACGTTNNNNNTTAATTAAT

SEQ ID NO: 18040 - protein, 111 aa, Streptococcus agalactiae
  VARIANT 107, 108: Xaa = Any Amino Acid
MVIEEFLDGEEFSLFAFANGDKFYIMPTAQDHKRAFDGDKGPNTGGMGAYAPVPHLPQSVVDTAVETIVKPVLEGMIAEGRPYLGVLYAGLILTADGLKVIEFNSRXXLIN

SEQ ID NO: 18041 - protein, 174 aa, Streptococcus agalactiae
ATGGGTGCCTATGCGCCTGTTCCTCACCTGCCTCAGAGCGTGGTGGATACAGCAGTTGAGACGATCGTTAAACCTGTCCTGGAGGGTATGATTGCCAAAGGGCGTCCTTATCTAGGTGTCCTCTATGCGGGGCTTATCCTGACAGCTGATGGCCCTACGGTTATNNNNNTTAAT

SEQ ID NO: 18042 - protein, 58 aa, Streptococcus agalactiae
  VARIANT 55, 56, 57: Xaa = Any Amino Acid
MGAYAPVPHLPQSVVDTAVETIVKPVLEGMIAKGRPYLGVLYAGLILTADGPTVXXXN

SEQ ID NO: 18043 - protein, 1628 aa, Streptococcus agalactiae
TTGTTGATTGATGAATTTTCTAAAACGAAAAAAATTGATTTTGTTAGTTTTTGTCGTAGACGTTTTTACCGTATTTTCCCACCATTAGTATTGATGGTTTTGCTGACAATACCTTTTGTATTTCTGGTTAAAAGCGATTTTAGAGCAAGTATTGGCTCTCAAATTATGACTGCTTTAGGTTTTACCAGCAACTTTTACGAAATCTTGACTGGTGGTAACTACGAAAGTCAATTTATCCCTCACTTATTTGTGCATACCTGGAGTCTTTCTATTGAAGTCCATTTTTATGTTTTATGGGGCTTAACGGTATGGCTCTTATCAAAAGATCAAAGATCAAAGCAATTGAGGGGGACTTTGTTCCTTATTTCCATGGGAGTTTTTGGAGTCAGCTTCCTTACCATGTTTGTTAGAGCCTTTTTCGTTGATAATTTTTCAACGATATATTTCTCTACATTATCACATATATTTCCGTTCTTTTTAGGAGCGATGGTGGCTACAATATCTGGTATTCGAGAGATCACCGGACGATTCAAGAAAAATATCAAAAATCTGACTTTGAAGCATAATTTAATCATGATGGGTAGTGCTTTTGCTGGTCTAATGATTTTAACTTTTGCACTTGATTTTGATAATCGGCTAACATATCTTTTTGGTTTTGTATTGTCTAGCATTTTTGCTAGTGTAATGATTTACAATGCACGTATTTTACACGAGCATACACCAGATATTTCAGAACCTTTCGTGATTACTTATCTTGCTGATATCAGTTACGGTATGTACCTTTTTCATTGGCCATTTTATATTATTTTTAGTCGTTTATCCCCAAACTGGATAGCTGTTATTTTGACAGTAGTATTATCAGCAGTCTTCTCAACATTATCGTTTTATGTCATTGAACCTTTTATTTTAGGTAGAAAACCTAAATTCCTTGATTATGAATTTGACTTGTTGCCTTACAAAAAGTGGTTATTTAGTATCGGAGGGGTACTAACTCTTATTACTGTAGTGACAATGTTGACAGCTCCAAGTATAGGTAGTTTTGAGACAGAATTATTGCAGAATTCGTTACAACAAGCTAGAACAAATACTAACCGAACACATACACTAGCCGCAGGGGATGCAGGTGCTCTTAGTGATGTGACAGTAATCGGAGATTCAGTTGCCTTAAGGTCAAGTGCTGCTTTTAATAAATTGTTACCAGAAGTACAATTAGATGCTGCGGTGAGTCGTAATTTTAGTAAATCATTTGATATTTTTGAAAACCGTATTCAAAATAAAGCCTTGTCCAAAATTGTTGTTTTGGCAGTTGGTGTGAATTCATTAGATAACTACAAGACAGACTTGAGCCAATTTATTAAATCTTTGCCTAAGGGACACCGTTTGATTATAGTAACACCTTATAATGCTAAAAATATGAGTCAAGTTACGACAGTGCGTGATTATGAACTCTCGCTAATGAAAAAATATAATTACATAACGGTTGCTGAGTAAAGGTTGCGACAGAACATCCAGAAATCTGGGGAAATACAGATGGTGTGCATTATAGTGATAGCGATACTACAGGGGCTGATTTATATGTTAGTAACGTCAAAAAAGCTATTCAAAAATCAGCTCAACGAGCTGCAAAA

SEQ ID NO: 18044 - protein, 545 aa, Streptococcus agalactiae
  VARIANT 113, 497, 498: Xaa = Any Amino Acid
MLIDEFSKTKKIDFVSFCRRRFYRIFPPLVLMVLLTIPFVFLVKSDFRASIGSQIMTALGFTSNFYEILTGGNYESQFIPHLFVHTWSLSIEVHFYVLWGLTVWLLSKRSKDXKQLRGTLFLISMGVFGVSFLTMFVRAFFVDNFSTIYFSTLSHIFPFFLGAMVATISGIREITGRFKKNIKNLTLKHNLIMMGSAFAGLMILTFALDFDNRLTYLFGFVLSSIFASVMIYNARILHEHTPDISEPFVITYLADISYGMYLFHWPFYIIFSRLSPNWIAVILTVVLSAVFSTLSFYVIEPFILGRKPKFLDYEFDLLPYKKWLFSIGGVLTLITVVTMLTAPSIGSFETELLQNSLQQARTNTNRTHTLAAGDAGALSDVTVIGDSVALRSSAAFNKLLPEVQLDAAVSRNFSKSFDIFENRIQNKALSKIVVLAVGVNSLDNYKTDLSQFIKSLPKGHRLIIVTPYNAKNMSQVTTVRDYELSLMKKYNYITVAXXYKVATEHPEIWGNTDGVHYSDSDTTGADLYVSNVKKAIQKSAQRAAK

SEQ ID NO: 18045 - protein, 846 aa, Streptococcus agalactiae
TTGGATGCCCATGGAGAACTTGCTCTTCATGCAGTAGAGGAAACTGGTCGTGGTGTCTTTGAAGATAAAGCGACAAAAAATTTATTTGCATGTGAACACGTCGTTAACAACATGCGTCATACAAAGACAGTGGGAGTTATTGAAGAAGACGATGTCACAGGCTTGACATTAATTGCTGAACCAGTGGGAGTTGTCTGTGGTATTACGCCAACAACCAACCCGACTTCAACTGCTATTTTCAAGTCATTAATCTCTCTTAAAACACGTAATCCAATTATTTTTGCCTTCCACCCATCAGCACAAGAATCATCAGCACATGCAGCACGTATTGTTCGTGATGCTGCTATCGCTGCTGGAGCTCCTGAAAATTGTGTCCAATGGATTGAACAACCATCGATTGATGCAACTAATGCTTTGATGAACCATGATGGTATTGCCACTATCCTTGCGACAGGTGGTAATGCGATGGTTAAAGCTGCCTACTCATGTGGGAAACCTGCCCTTGGTGTAGGTGCTGGGAATGTTCCAGCTTATGTTGAAAAATCAGCTAATATCCGACAAGCCGCTCACGATATTGTTATGTCTAAATCATTTGATAACGGTATGGTATGTGCATCAGAACAGGCTGTTATTATTGATAAAGAAATTTATAAAGAATTTGTTGAAGAATTTAAATCTTATCATACCTATTTCGTTAATAAGAAAGAAAAAGCTCTTCTTGAAGAATTCTGTTTTGGTGCAAAAGCAAATAGCAAAAACTGTGCTGGTGCAAAATTAAATCCAAATATTGTTGGAAAATCAGCAGTTTGGATTGCTGAACAAGCTGGATTTACTGTTCCANNNNNT

SEQ ID NO: 18046 - protein, 282 aa, Streptococcus agalactiae
  VARIANT 281, 282: Xaa = Any Amino Acid
MDAHGELALHAVEETGRGVFEDKATKNLFACEHVVNNMRHTKTVGVIEEDDVTGLTLIAEPVGVVCGITPTTNPTSTAIFKSLISLKTRNPIIFAFHPSAQESSAHAARIVRDAAIAAGAPENCVQWIEQPSIDATNALMNHDGIATILATGGNAMVKAAYSCGKPALGVGAGNVPAYVEKSANIRQAAHDIVMSKSFDNGMVCASEQAVIIDKEIYKEFVEEFKSYHTYFVNKKEKALLEEFCFGAKANSKNCAGAKLNPNIVGKSAVWIAEQAGFTVPXX

SEQ ID NO: 18047 - protein, 264 aa, Streptococcus agalactiae
ATGGTTGAGTTTAATGGTCTAGGGCACTCAGCTGCTATTCATACAAAAGATGCAGACTTAGCTCGTGAATTTGGAACTAGAATTCGTGCTATCCGTGTTATTTGGAATTCTCCTTCTACTTTTGGTGGTATTGGGGATGTTTACAATGCTTTCTTGCCATCATTGACTCTTGGTTGTGGTTCGTATGGACGTAACTCAGTTGGTGATAACGTTAGTGCTATAAATCTCTTGAATATCAAAAAAGTAGGAANNNNNTTAATTAAT

SEQ ID NO: 18048 - protein, 88 aa, Streptococcus agalactiae
  VARIANT 84, 85: Xaa = Any Amino Acid
MVEFNGLGHSAAIHTKDADLAREFGTRIRAIRVIWNSPSTFGGIGDVYNAFLPSLTLGCGSYGRNSVGDNVSAINLLNIKKVGXXLIN

SEQ ID NO: 18049 - protein, 432 aa, Streptococcus agalactiae
ATGATTGTTACAGATCACGCCATGGTTGAGCTTGGTTTCTTGGATCGTATCATTGAACAACTTGATCTTCGTCGCAATAAAGTTGTTTATCAGATTTTTGCTGAAGTAGAACCAGATCCAGACATTACAACAGTAATGAAAGGAACAGATTTGATGCGTACCTTCAAACCAGACACTATTATTGCATTAGGTGGTGGTTCTCCTATGGATGCTGCGAAAGTTATGTGGCTCTTCTATGAACAACCAGAAGTTGATTTCCATGACCTCGTTCAAAAATTCATGGATATCCGTAAACGTGCGTTCAAATTCCCAGAACTTGGTAAGAAAACAAAATTTGTTGCTATTCCAACAACTTCTGGAACAGGTTCTGAAGTGACACCATTTGCCGTTATCTCTGACGAAGCAAATAATCGTAAATATCCAATCNNNNNT

SEQ ID NO: 18050 - protein, 144 aa, Streptococcus agalactiae
  VARIANT 143, 144: Xaa = Any Amino Acid
MIVTDHAMVELGFLDRIIEQLDLRRNKVVYQIFAEVEPDPDITTVMKGTDLMRTFKPDTIIALGGGSPMDAAKVMWLFYEQPEVDFHDLVQKFMDIRKRAFKFPELGKKTKFVAIPTTSGTGSEVTPFAVISDEANNRKYPIXX

SEQ ID NO: 18051 - protein, 510 aa, Streptococcus agalactiae
GTGTTTGACTACTTAGAACGCTCAGTAAAAGATGCTGATTTTGAAGCACGTGAAAAGATGCACAATGCGTCAACTATGGCAGGTATGGCTTTCGCCAATGCATTCTTAGGTATTTCTCACTCAATGGCGCATAAAATTGGCGCACAATTCCATACCGTACACGGACGTACAAATGCAATTCTTTTGCCGTATGTTATCCGCTATAATGGAACTCGTCCAGCTAAAACAGCAACATGGCCTAAGTACAATTACTATCGTGCTGATGAAAAGTATCAAGATATCGCTAAATTACTCGGCTTACCAGCAGCAACACCAGAAGAAGCTGTCGAATCATATGCAAAAGCTGTGTATGACCTTGGAACACGTTTAGGTATTAAGATGAATTTCCGTGACCAAGGCATTGATGAAAAAGAATGGAAAGAAAAATCTCGTGAACTAGCTTTCTTAGCATATGAAGATCAATGTTCACCAGCAAATCCACGCCTTCCAATGGTAGATCANNNNNTTAAT

SEQ ID NO: 18052 - protein, 170 aa, Streptococcus agalactiae
  VARIANT 167, 168, 169: Xaa = Any Amino Acid
MFDYLERSVKDADFEAREKMHNASTMAGMAFANAFLGISHSMAHKIGAQFHTVHGRTNAILLPYVIRYNGTRPAKTATWPKYNYYRADEKYQDIAKLLGLPAATPEEAVESYAKAVYDLGTRLGIKMNFRDQGIDEKEWKEKSRELAFLAYEDQCSPANPRLPMVDXXXN

SEQ ID NO: 18053 - protein, 846 aa, Streptococcus agalactiae
TTGGGTCACGTAGGCATTGGTATAGTAGAAGAAATTGGAGAAGGCGTAACGTCTTTGAGGGTTGGTGATCGTGTCTCTATTGCATGGTTCTTTGAAGGATGCGGTCATTGCGAATACTGTACTACAGGACGTGAGACGCTTTGTCGTAGTGTTAAAAATGCTGGATACAGTGTTGATGGTGGTATGAGTGAATACGCTATTGTTACCGCGGACTATGCGGTTAAGGTTCCTGAGGGATTAGATCCAGCTCAAGCATCATCAATCACTTGTGCTGGAGTAACAACATACAAGGCTATCAAAGAAGCTGGAGCTGCTCCTGGTCAGTGGATTGCAGTGTATGGTGCAGGTGGTCTTGGAAACTTAGCAGTCCAATATGCAAAAAAAGTATTCAATGCTCATGTTGTAGCTGTTGATATTAACGCAGATAAACTTCAATTAGCTAAAGAGGTTGGAGCAGATTTGACAGTTAATGGCAAAGAAATAAAAGATGTTGCGGCCTATATTCAAGAAAAGACAGGCGGTTGTCATGGAGTGGTTGTGACTGCTGTTTCTAAAATTGCGTTTAATCAGGCGATTGACAGCGTTCGTGCTGGAGGTACAGTGGTAGCTGTTGGTCTTCCATCAGAATATATGGAATTGAGTATTGTAAAAACAGTACTTGATGGGATTCGTGTGGTTGGTTCCTTAGTTGGAACTCGTAAAGATTTAGAAGAAGCCTTCGCATTTGGAGCAGAAGGCTTGGTAGTACCGGTGGTTGAAAAAGTGCCTGTGGATACAGCTCCTCAAGTATTCGATGAAATGGAAAGAGGATTGATTCAAGGGCGTAAAGTTCTTGACTTTACAAAG

SEQ ID NO: 18054 - protein, 282 aa, Streptococcus agalactiae
MGHVGIGIVEEIGEGVTSLRVGDRVSIAWFFEGCGHCEYCTTGRETLCRSVKNAGYSVDGGMSEYAIVTADYAVKVPEGLDPAQASSITCAGVTTYKAIKEAGAAPGQWIAVYGAGGLGNLAVQYAKKVFNAHVVAVDINADKLQLAKEVGADLTVNGKEIKDVAAYIQEKTGGCHGVVVTAVSKIAFNQAIDSVRAGGTVVAVGLPSEYMELSIVKTVLDGIRVVGSLVGTRKDLEEAFAFGAEGLVVPVVEKVPVDTAPQVFDEMERGLIQGRKVLDFTK

SEQ ID NO: 18055 - protein, 1488 aa, Streptococcus agalactiae
ATGGCAATAGTATATCAATCAACACGTGATGCTAGTAATAAAGTGACAGCTAGTCAAGCGATTCTAAAGGGATTAGCTGACGATGGAGGACTCTTTACCCCCATCACATTTCCAAAAGTTGATTTAGATTTCACTAAACTTAAGGATGCTTCCTACCAAGAAGTGGCTAAACTCGTTTTGTCAGCTTTTTTTGATGATTTTACTGAACAAGAATTGGATTACTGTATTAGTCAAGCTTATGATACTAAATTTGATACAACTGAAATAGCCCCGTTAGTAAAGGTTGGAGACCGGTATCACCTTGAATTATTTCACGGTCCTACAATTGCATTTAAAGATATGGCTTTATCCATTCTTCCTTATTTGCTAACAACAGCAGCCAAAAAACAAGGGGTCGATAATAAAATCGTTATTTTAACAGCAACATCAGGTGACACTGGCAAGGCAGCGATGGCAGGTTTTGCAGATGTTCCAGGAACTGAGATTATTGTCTTTTATCCTAAAAATGGTGTTAGTTATATCCAAGAATTGCAGATGATAACACAAGCCGGGCAAAATACCCATGTTGTTGCGATTGAAGGAAATTTTGATGATGCACAGACTTCGGTTAAAGAAATGTTCAATAATTCCATTCTTCGATCAAAATTATCACAGCAGCATATGCAGTTATCATCAGCCAATTCAATGAACATCGGTCGCCTTGTTCCTCAAATTGTTTACTATATATATGCATATGCTCAATTAGTTAAGTCAAAGGAAATCTCAATTGGTCAACCAATTAATTTTAGTGTACCTACAGGAAATTTTGGTAATATTTTAGCAGCATATTATGCTAGTCAAATTGGATTACCTGTTACCAAACTCATTTGTGCCTCAAATGATAATAACGTTCTAACAGATTTTTTTAAGACACAAACCTACGATAAAAATCGAGAATTTAAAGTGACATCAAGTCCCTCTATGGATATTTTGGTCTCCTCTAATCTAGAACGATTAATCTTTCACCTTTTAGGCGATGATGCAGAAACGACTAAAAAATTAATGGAAGATTTAGTGACTACTGGGGAGTATGCCTTAGAGGCTAGGCAAGCAAATATTTTAGAGAGCTTTGTAGCGGGATTTGCGACAGAACAATTTGTTGAATTAGACATCAAACGTTTATTTGACCAGTATCAGTATATAGAGGATCCGCATACAGCTGTAGCATCAGCTGTTTACCAAGCTTATCAGACAGAAACTAAAGATCAAACTCCAACAGTAATTGTGTCAACAGCAAGTCCTTATAAGTTCCCGTGTGTTGTTACAAAGGCTATTACAAATAAAGAAGAGATACAGGATTTCGCTGCTATTTCAATCTTAAACGATTTGTCAGGTGTTTCTTTACCTAGGGCGGTTACAGATCTACAAAAGGCCGAAGTAATCCATAGAACGGTAGTACCTACCTCAAATATGCGAGAAACGCTTGAAGAGTGTCTAGGTTTGAAACAA

SEQ ID NO: 18056 - protein, 496 aa, Streptococcus agalactiae
MAIVYQSTRDASNKVTASQAILKGLADDGGLFTPITFPKVDLDFTKLKDASYQEVAKLVLSAFFDDFTEQELDYCISQAYDTKFDTTEIAPLVKVGDRYHLELFHGPTIAFKDMALSILPYLLTTAAKKQGVDNKIVILTATSGDTGKAAMAGFADVPGTEIIVFYPKNGVSYIQELQMITQAGQNTHVVAIEGNFDDAQTSVKEMFNNSILRSKLSQQHMQLSSANSMNIGRLVPQIVYYIYAYAQLVKSKEISIGQPINFSVPTGNFGNILAAYYASQIGLPVTKLICASNDNNVLTDFFKTQTYDKNREFKVTSSPSMDILVSSNLERLIFHLLGDDAETTKKLMEDLVTTGEYALEARQANILESFVAGFATEQFVELDIKRLFDQYQYIEDPHTAVASAVYQAYQTETKDQTPTVIVSTASPYKFPCVVTKAITNKEEIQDFAAISILNDLSGVSLPRAVTDLQKAEVIHRTVVPTSNMRETLEECLGLKQ

SEQ ID NO: 18057 - protein, 1236 aa, Streptococcus agalactiae
ATGATTGAAAATATCTTACAAATGCTCATGGGAGTAGTTGATAATTATCTAGTGGCTCAGTTAGGTGTTGTAGCAGTATCAGGTGTTTCAGTTGCTAATAATATAATTACTGTTTATCAAGCTATCTTTATAGCTTTAGGGGCGAGTATAGCAAGTCTATTGGCCAAGTCGTTAGCAGGTAGTGAGAAGGATGATGCAATTTCAGTATGTTCTCAAGCCATTTTTCTAACATTACTGATAGGGGCAATATTAGGAATTATCTCGATTGTTTTTGGACAAACTTTCTTTAAACTTTTAGGGACAACAAAAAGTGTCGCACAAGTTGGTGGTTTATATTTAGCAATTGTGGGTGGAGGTGTTGTTACTTTAGGAATGTTAACCACCCTAGGCTCATTTTTACGTGTGCAAGGGCAACCTCGTTTACCAATGTATGTCAGTATTTTTGTCAATTTCCTCAATGCAGTCTTATCAGGTTTTGCTATTTTTGAGTGGCGCTATGGTTTGGTCGGAGTGGCAGTATCAACTCTTATCGCAAGATTAATTGGTATTTGTATCCTTGCGAAGTATCTTCCTATTAAAAAGATAATAAAAAGAATGACTTGGAAAATCAGTGCACAAATTTGGAATCTTGCCTTACCATCAGCAGGAGAACGTCTGATGATGCGAGCTGGAGATGTTGTTATAGTTGCTATTGTTGTTCAGTTAGGTACAAATGTTGTAGCGGGAAATGCTATTGGAGAAACCTTGACACAATTTAATTATATGCCAGGACTTGGCATCGCAACTGCTACAATTATCCTAACTGCAAAATATGTAGGACAAAAAAATAGAGAATCTATAGAGGAAACTATTCAAAGTTCGTATTATATTGGCTTAGTTCTAATGATCCTTATATCGAGTTTTATGCTTCTTGCCGGCAAACCATTGACACAGTTATTTACAAATAATCCTTCTGCCATTAAAGGAAGTTTGATTGTTATTTTGCTATCTTTCGTAGGAGTACCTGCTACTATTGGGACCTTGGTTTATACAGCAGCTTGGCAAGGATTAGGAAATGCTAAACTCCCATTTTACACAACGACTATAGGCATGTGGTTAATCAGAGTAGTTCTTGGTTATTTATTAGGAATACTTTTTGAATTAGGTTTGCTTGGGGTTTGGATGGCTACGATAGCAGATAATATCTTTAGGTGGCTGTTTTTGAAAGTTCACTATCATCGATATATTCAAAAAATG

SEQ ID NO: 18058 - protein, 412 aa, Streptococcus agalactiae
MIENILQMLMGVVDNYLVAQLGVVAVSGVSVANNIITVYQAIFIALGASIASLLAKSLAGSEKDDAISVCSQAIFLTLLIGAILGIISIVFGQTFFKLLGTTKSVAQVGGLYLAIVGGGVVTLGMLTTLGSFLRVQGQPRLPMYVSIFVNFLNAVLSGFAIFEWRYGLVGVAVSTLIARLIGICILAKYLPIKKIIKRMTWKISAQIWNLALPSAGERLMMRAGDVVIVAIVVQLGTNVVAGNAIGETLTQFNYMPGLGIATATIILTAKYVGQKNRESIEETIQSSYYIGLVLMILISSFMLLAGKPLTQLFTNNPSAIKGSLIVILLSFVGVPATIGTLVYTAAWQGLGNAKLPFYTTTIGMWLIRVVLGYLLGILFELGLLGVWMATIADNIFRWLFLKVHYHRYIQKM

SEQ ID NO: 18059 - protein, 302 aa, Streptococcus agalactiae
ATGGCAAACAAAAAAATCCGTATCCGTTTGAAAGCGTACGAACACCGTACACTTGATACAGCGGCAGAAAAAATCGTTGAAACTGCAAACGTACAGTGCTACAGTGCTGGACCAGTTCCACTTCCAACTGAACGCAGTTTTACACAATTATTCGTGCGACTCACAAATATAAAGATTCTCGCGAACAGTTTGAAATGCGTACACACAAACGTTTGGTAGACATCATCAACCCAACACAAAAAACTGTTGATGCTTTGATGAAACTTGATCTTCCAAGTGGTGTCAACGTAGAAATCAAACTT

SEQ ID NO: 18060 - protein, 102 aa, Streptococcus agalactiae; identical to SEQ ID NO: 142

SEQ ID NO: 18061 - protein, 624 aa, Streptococcus agalactiae
ATGACAAAAGGAATCTTAGGGAAAAAAGTGGGAATGACTCAAATCTTCACTGAATCAGGCGAATTCATCCCTGTTACTGTCATTGAAGCAACTCCAAACGTTGTGCTTCAAGTTAAAACTGTTGAAACAGACGGTTACGAAGCAGTTCAGGTTGGTTTTGATGACAAACGTGAAGTATTGAGTAACAAACCTGCCAAAGGCCATGTTGCAAAAGCAAACACAGCTCCTAAGCGCTTCATTCGTGAATTCAAAAACATTGAAGGCTTAGAAGTTGGTGCAGAATTATCTGTAGAACAATTTGAAGCTGGTGATGTTGTTGACGTCACAGGGACATCAAAAGGTAAAGGTTTCCAAGGTGTTATCAAACGCCATGGTCAATCACGTGGTCCTATGGCTCACGGTTCTCGTTACCATCGCCGTCCAGGTTCTATGGGACCTGTTGCGCCTAACCGCGTTTTCAAAAACAAACGCTTGGCAGGACGTATGGGTGGTAACCGTGTAACAGTTCAAAACCTTGAAATTGTACAAGTTATCCCAGAGAAAAACGTTGTCCTCATCAAAGGTAACGTACCAGGTGCTAAGAAATCTCTTATCACTATCAAATCAGCAGTTAAAGCTGCTAAA

SEQ ID NO: 18062 - protein, 208 aa, Streptococcus agalactiae; identical to SEQ ID NO: 144

SEQ ID NO: 18063 - protein, 621 aa, Streptococcus agalactiae
ATGGCAAACGTTAAACTATTTGACCAAACTGGTAAAGAAGTTAGCTCAGTTGAGCTTAACGAAGCTATCTTCGGTATCGAACCAAACGAATCAGTTGTTTTTGATGTTGTAATCAGCCAACGCGCTAGCCTTCGCCAAGGTACTCACGCGGTTAAAAACCGTTCAGCAGTATCTGGTGGTGGACGTAAACCATGGCGTCAAAAAGGAACTGGACGCGCTCGTCAAGGTTCTATCCGCTCACCACAATGGCGTGGTGGTGGTGTTGTCTTTGGACCAACTCCACGTTCATACGGCTACAAACTTCCACAAAAAGTTCGTCGCCTTGCGTTGAAATCAGTTTATTCAGCAAAAGTTGCTGAAGATAAATTTGTAGCTGTAGAAAACCTTTCATTTGCAGCTCCAAAAACTGCTGAATTTGCGTCAGTTCTTTCAGCACTTAGCATTGATTCAAAAGTACTTGTAATCCTTGAAGAAGGTAACGAATTTGCTGCACTTTCAGCGCGTAACCTTCCAAACGTTACAGTTGCTACTGCAACTACTGCAAGTGTTCTTGATATCGTTAACGCAGACAAACTTCTTGTTACTAAAGAAGCAATCTCTACAATCGAGGGGGTTCTTGCA

SEQ ID NO: 18064 - protein, 207 aa, Streptococcus agalactiae; identical to SEQ ID NO: 146

SEQ ID NO: 18065 - protein, 294 aa, Streptococcus agalactiae; identical to SEQ ID NO: 4447

SEQ ID NO: 18066 - protein, 98 aa, Streptococcus agalactiae; identical to SEQ ID NO: 148

SEQ ID NO: 18067 - protein, 703 aa, Streptococcus agalactiae
GTGGGTATTAAAGTTTATAAACCAACGACAAATGGCCGTCGTAATATGACTTCTTTGGATTTTGCAGAAATCACTACAAACACTCCTGAGAAATCATTGCTTGTTTCACTAAAGAATAAAGCAGGACGTAACAATAACGGACGTATTACTGTTCGTCACCAAGGTGGTGGACACAAACGTCATTACCGTTTGATTGACTTCAAACGTAATAAAGATGGTGTTGAAGCAGTTGTTAAAACAATTGAATACGATCCAAATCGTACTGCAAATATTGCTCTTGTACACTATACTGATGGTGTTAAAGCTTACATCCTTGCGCCTAAAGGCCTTGAAGTAGGTCAACGCATTATTTCTGGTCCAGAAGCAGATATCAAAGTTGGTAACGCACTTCCACTTGCTAACATTCCAGTCGGTACAGTTATCCATAATATTGAATTGCAACCAGGTAAAGGTGCTGAATTGATTCGTGCTGCTGGTGCTTCTGCTCAAGTACTTGGTCAAGAAGGTAAATATGTTCTTGTTCGCCTTCAATCAGGTGAAGTACGTATGATCCTTGGTACTTGCCGTGCAACAATTGGTACTGTTGGTAATGAACAACAATCACTTGTTAACATTGGTAAAGCAGGACGTAATCGTTGGAAAGGTGTTCGCCCTACAGTTCGTGGTCTGTAATGAACCCTAATGATCACCCCACGGGTGGTGG

SEQ ID NO: 18068 - protein, 235 aa, Streptococcus agalactiae
MGIKVYKPTTNGRRNMTSLDFAEITTNTPEKSLLVSLKNKAGRNNNGRITVRHQGGGHKRHYRLIDFKRNKDGVEAVVKTIEYDPNRTANIALVHYTDGVKAYILAPKGLEVGQRIISGPEADIKVGNALPLANIPVGTVIHNIELQPGKGAELIRAAGASAQVLGQEGKYVLVRLQSGEVRMILGTCRATIGTVGNEQQSLVNIGKAGRNRWKGVRPTVRGSVMNPNDHPHGWW

SEQ ID NO: 18069 - protein, 89 aa, Streptococcus agalactiae
ATGATCACCCCACGGGTGGTGGTGAAGGTAAAGCACCAGTTGGTCGTAAAGCACCATCTACTCCATGGGGTAAACCTGCACTTGGACTT

SEQ ID NO: 18070 - protein, 30 aa, Streptococcus agalactiae
MITHTGGGEGKAPVGRKAPSTPWGKPALGL

SEQ ID NO: 18071 - protein, 293 aa, Streptococcus agalactiae
TTGAAATCAGTTTATTCAGCAAAAGTTGCTGAAGATAAATTTGTAGCTGTAGAAACCTTTCATTTGCAGCTCCAAAAACTGCTGAATTTGCGTCAGTTCTTTCAGCACTTAGCATTGATTCAAAAGTACTTGTAATCCTTGAAGAAGGTAACGAATTTGCTGCACTTTCAGCGCGTAACCTTCCAAACGTTACAGTTGCTACTGCAACTACTGCAAGTGTTCTTGATATCGTTAACGCAGACAAACTTCTTGTTACTAAAGAAGCAATCTCTACAATCGAGGGGGTTCTTGCA

SEQ ID NO: 18072 - protein, 98 aa, Streptococcus agalactiae
  VARIANT 19: Xaa = Any Amino Acid
MKSVYSAKVAEDKFVAVEXLSFAAPKTAEFASVLSALSIDSKVLVILEEGNEFAALSARNLPNVTVATATTASVLDIVNADKLLVTKEAISTIEGVLA

SEQ ID NO: 18073 - protein, 199 aa, Streptococcus agalactiae
ATGAATTTGTATGACGTAATCAAAAAACCTGTTATCACTGAGAAATCAATGGTTGCTCTTGAAGCAGGGAAATATACATTTGAAGTTGACACACGTGCACACAAACTTTTGATCAAACAAGCTGTTGAAGCTGCATTTGACGGAGTAAAAGTTCAAGTGTAAACACTGTGCTGAAAGCTTCCACANNNNNTTAATTAAT

SEQ ID NO: 18074 - protein, 67 aa, Streptococcus agalactiae
  VARIANT 52, 63, 64: Xaa = Any Amino Acid
MNLYDVIKKPVITEKSMVALEAGKYTFEVDTRAHKLLIKQAVEAAFDGVKVXSVNTVLESFHXXLIN

SEQ ID NO: 18075 - protein, 591 aa, Streptococcus agalactiae
ATGAAATACGATCCAAATCGTACTGCAAATATTGCTCTTGTACACTATACTGATGGTGTTAAAGCTTACATCCTTGCGCCTAAAGGCCTTGAAGTAGGTCAACGCATTATTTCTGGTCCAGAAGCAGATATCAAAGTTGGTAACGCACTTCCACTTGCTAACATTCCAGTCGGTACAGTTATCCATAATATTGAATTGCAACCAGGTAAAGGTGCTGAATTGATTCGTGCTGCTGGTGCTTCTGCTCAAGTACTTGGTCAAGAAGGTAAATATGTTCTTGTTCGCCTTCAATCAGGTGAAGTACGTATGATCCTTGGTACTTGCCGTGCAACAATTGGTACTGTTGGTAATGAACAACAATCACTTGTTAACATTGGTAAAGCAGGACGTAATCGTTGGAAAGGTGTTCGCCCTACAGTTCGTGGTTCTGTAATGAACCCTAATGATCACCCACACGGTGGTGGTGAAGGTAAAGCACCAGTTGGTCGTAAAGCACCATCTACTCCATGGGGTAAACCTGCACTTGGACTTAAAACTCGTAATAAGAAAGCTAAATCAGACAAACTTATTGTTCGTCGTCGTAACCAAAAA

SEQ ID NO: 18076 - protein, 197 aa, Streptococcus agalactiae
MKYDPNRTANIALVHYTDGVKAYILAPKGLEVGQRIISGPEADIKVGNALPLANIPVGTVIHNIELQPGKGAELIRAAGASAQVLGQEGKYVLVRLQSGEVRMILGTCRATIGTVGNEQQSLVNIGKAGRNRWKGVRPTVRGSVMNPNDHPHGGGEGKAPVGRKAPSTPWGKPALGLKTRNKKAKSDKLIVRRRNQK

SEQ ID NO: 18077 - protein, 276 aa, Streptococcus agalactiae; identical to SEQ ID NO: 4451

SEQ ID NO: 18078 - protein, 92 aa, Streptococcus agalactiae; identical to SEQ ID NO: 152

SEQ ID NO: 18079 - protein, 342 aa, Streptococcus agalactiae; identical to SEQ ID NO: 8895

SEQ ID NO: 18080 - protein, 114 aa, Streptococcus agalactiae; identical to SEQ ID NO: 154

SEQ ID NO: 18081 - protein, 624 aa, Streptococcus agalactiae
ATGCGTGTCGGAATCATCCGTGACTGGGATGCGAAATGGTATGCTGAAAAAGAATACGCGGATTACCTTCATGAAGATCTTGCAATCCGTAAATTCATTAATAAAGAATTAGCTGACGCATCAGTTTCAACTATTGAAATTGAACGTGCAGTAAACAAAGTTATTGTTTCACTTCACACTGCTAAACCAGGTATGGTTATCGGTAAAGGTGGAGCAAACGTTGACGCTCTTCGTGGTCAACTTAACAAATTAACTGGAAAACAAGTACACATCAACATCATTGAAATCAAACAACCTGATTTAGATGCTCACCTTGTTGGTGAAAATATTGCTCGTCAATTAGAGCAACGTGTTGCTTTCCGTCGTGCTCAAAAACAAGCAATTCAACGTACAATGCGTGCAGGAGCTAAAGGTATTAAAACTCAAGTTTCTGGTCGTTTGAACGGTGCTGATATCGCTCGTGCTGAAGGTTATTCAGAAGGAACTGTTCCACTTCACACGCTTCGTGCTGATATCGACTATGCTTGGGAAGAAGCTGACACAACTTATGGTAAACTTGGCGTTAAAGTTTGGATTTACCGTGGAGAAGTTCTTCCAGCTCGTAAAAACACTAAAGGAGGCAAA

SEQ ID NO: 18082 - protein, 208 aa, Streptococcus agalactiae; identical to SEQ ID NO: 156

SEQ ID NO: 18083 - protein, 411 aa, Streptococcus agalactiae; identical to SEQ ID NO: 4457

SEQ ID NO: 18084 - protein, 137 aa, Streptococcus agalactiae; identical to SEQ ID NO: 158

SEQ ID NO: 18085 - protein, 255 aa, Streptococcus agalactiae; identical to SEQ ID NO: 4459

SEQ ID NO: 18086 - protein, 85 aa, Streptococcus agalactiae; identical to SEQ ID NO: 4460

SEQ ID NO: 18087 - protein, 204 aa, Streptococcus agalactiae; identical to SEQ ID NO: 4461

SEQ ID NO: 18088 - protein, 68 aa, Streptococcus agalactiae; identical to SEQ ID NO: 160

SEQ ID NO: 18089 - protein, 258 aa, Streptococcus agalactiae; identical to SEQ ID NO: 4463

SEQ ID NO: 18090 - protein, 86 aa, Streptococcus agalactiae; identical to SEQ ID NO: 162

SEQ ID NO: 18091 - protein, 366 aa, Streptococcus agalactiae; identical to SEQ ID NO: 4465

SEQ ID NO: 18092 - protein, 122 aa, Streptococcus agalactiae; identical to SEQ ID NO: 164

SEQ ID NO: 18093 - protein, 303 aa, Streptococcus agalactiae
ATGTTTGTAAAAAAAGGCGACAAAGTTCGCGTTATTGCTGGTAAGGACAAAGGCACTGAAGCTGTAGTTCTCAAAGCTCTTCCAAAAGTAAACAAAGTTGTTGTTGAAGGCGTAGCCCTCATCAAGAAACATCAAAAACCAAATAACGAAAACCCTCAAGGCGCTATCGTTGAAAAAGAAGCTCCAATCCATGTGTCAAACGTTCAAGTTCTTGATAAAAATGGTGTAGCAGGACGTGTTGGTTACAAAGTTGTTGACGGCAAAAAAGTTCGTTACAACAAAAAATCAGGCGAAGTGCTTGAT

SEQ ID NO: 18094 - protein, 101 aa, Streptococcus agalactiae; identical to SEQ ID NO: 166

SEQ ID NO: 18095 - protein, 540 aa, Streptococcus agalactiae; identical to SEQ ID NO: 4469

SEQ ID NO: 18096 - protein, 180 aa, Streptococcus agalactiae; identical to SEQ ID NO: 168

SEQ ID NO: 18097 - protein, 396 aa, Streptococcus agalactiae; identical to SEQ ID NO: 4471

SEQ ID NO: 18098 - protein, 132 aa, Streptococcus agalactiae; identical to SEQ ID NO: 4472

SEQ ID NO: 18099 - protein, 534 aa, Streptococcus agalactiae
ATGTCACGTATTGGTAATAAAGTAATTACATTGCCTGCAGGTGTTGAAATCATTAACAAGGATAATGTTGTTACTGTAAAAGGACCTAAAGGCGAACTCACTCGTGAGTTTAATAAAAATATTGGAATCACTGTTGAAGGGACTGAAGTAACAGTTACTCGTCCTAACGACTCAAAAGAAATGAAAACAATTCATGGTACAACTCGTGCGAACTTGAACAACATGGTTGTTGGTGTTTCTGAAGGTTTCAAAAAAGCTCTTGAAATGCGCGGTGTTGGTTATCGTGCACAACTTCAAGGATCAAAACTTGTTCTTTCTGTTGGTAAGTCTCACCAAGACGAAGTTGAAGCTCCAGAAGGTGTTACTTTTGAAGTGCCAACTCCAACAACAATCAACGTAATCGGTATCAACAAAGAAAGCGTTGGACAAACTGCTGCTTACGTTCGTAGCTTACGTTCACCAGAACCATATAAAGGTAAAGGTATTCGTTACGTTGGTGAATTCGTACGCCGTAAAGAAGGTAAAACAGGTAAA

SEQ ID NO: 18100 - protein, 178 aa, Streptococcus agalactiae; identical to SEQ ID NO: 4474

SEQ ID NO: 18101 - protein, 354 aa, Streptococcus agalactiae; identical to SEQ ID NO: 4475

SEQ ID NO: 18102 - protein, 118 aa, Streptococcus agalactiae; identical to SEQ ID NO: 176

SEQ ID NO: 18103 - protein, 492 aa, Streptococcus agalactiae; identical to SEQ ID NO: 13321

SEQ ID NO: 18104 - protein, 164 aa, Streptococcus agalactiae; identical to SEQ ID NO: 178

SEQ ID NO: 18105 - protein, 321 aa, Streptococcus agalactiae; identical to SEQ ID NO: 13323

SEQ ID NO: 18106 - protein, 107 aa, Streptococcus agalactiae; identical to SEQ ID NO: 4480

SEQ ID NO: 18107 - protein, 177 aa, Streptococcus agalactiae; identical to SEQ ID NO: 8923

SEQ ID NO: 18108 - protein, 59 aa, Streptococcus agalactiae; identical to SEQ ID NO: 180

SEQ ID NO: 18109 - protein, 438 aa, Streptococcus agalactiae; identical to SEQ ID NO: 13327

SEQ ID NO: 18110 - protein, 146 aa, Streptococcus agalactiae; identical to SEQ ID NO: 182

SEQ ID NO: 18111 - protein, 1302 aa, Streptococcus agalactiae
ATGTTTTTAAAATTACTTAGAGATGCACTCAAAGTAAAGATGGTAAGAAATAAAATTTTATTTACTATCTTTATCCTTCTTGTATTTCGTATCGGAACGCATATCACAGTACCGGGCATCAATGTTAAGAGTTTAGAACAAATGGGTGAACTTCCATTTCTAAATATGCTTAACTTAGTTAGTGGTAATGCAATGAGAAACTTTTCGGTATTCTCTATGGGAGTTAGCCCATACATTACTGCGTCTATTGTTGTTCAGCTACTTCAAATGGATATTCTTCCGAAGTTTGTTGAATGGGGAAAACAAGGAGAGGTAGGTCGTCGTAAGCTTAACCAAGCTACACGTTATATTTCTTTGTTCCTTGCATTCGTACAATCAATTGGTATTACTGCTGGTTTTAACACTCTATCAAGTGTTGCTTTAGTTAAAACTCCGAATGTACAAACATATTTGCTTATTGGTGCAATCCTTACAACAGGTAGTATGGTGGTTACTTGGCTAGGTGAACAAATTACTGATAAGGGATTCGGAAATGGAGTGTCTATGATTATCTTTGCGGGGATCATTTCTTCCATTCCAAGTGCAATTACAACTATCTACGAAGATTTCTTTGTAAATGTACGCTCTTCAGCAATTACAAATTCTTACATCTTTGTCGGGATTCTTATTGTAGCAGTATTAGCAATTGTATTTTTTACAACATTTATTCAACAAGCTGAATACAAAATTCCAATCCAATATACAAAACTTGTTCAAGGAGCTCCTACAAGTTCATATCTTCCTCTAAAAGTAAATCCAGCTGGTGTTATTCCCGTTATCTTTGCTAGCTCGATTACAACAATTCCAAGTACGATTATTCCTTTCTTTCAAAATGGTAAAGAAATTCCTTGGCTTACTAAACTCCAAGAATTACTTAATTATCAAACCCCAGTCGGTATGATTATCTATGCTATCTTGATTATTCTGTTCTCTTTCTTCTATACTTTTGTACAAGTAAACCCTGAAAAGACAGCAGAGAATCTTCAAAAAAATTCGTCCTACATTCCAAGTATTCGACCAGGACGAGAAACAGAAGAGTATATGTCATCGCTATTGAAAAAATTAGCAACAATTGGTTCAGTATTTCTAGCATTTATTTCCTTGTTACCAATTATTGCTCAACAAGCGTTGCATTTGTCATCAAGTATTGCGTTAGGTGGTACAAGCTTACTCATTTTGATTGCAACAGGTATTGAAGGTATGAAACAACTTGAGGGCTATCTTTTGAAGAGACGCTATGTTGGATTCATGAATACAACAGAA

SEQ ID NO: 18112 - protein, 434 aa, Streptococcus agalactiae; identical to SEQ ID NO: 4486

SEQ ID NO: 18113 - protein, 636 aa, Streptococcus agalactiae
ATGAATCTTTTAATTATGGGTTTGCCTGGTGCTGGTAAAGGTACTCAAGCAGCTAAGATCGTTGAAGAATTTGGTGTTGCTCACATCTCAACAGGGGATATGTTCCGCGCCGCAATGGCTAATCAAACCGAAATGGGACGTTTAGCTAAAAGTTATATTGATAAAGGTGAATTGGTTCCTGATGAAGTAACAAACGGGATTGTAAAAGAGCGCTTAGCTGAGGATGATATCGCAGAAAAAGGTTTTTTACTTGATGGATATCCACGTACTATTGAACAAGCACACGCCTTAGATGCTACGCTTGAAGAACTAGGACTACGCTTAGATGGTGTTATTAATATTAAAGTGGATCCATCATGTCTTATAGAGCGTTTGAGTGGTCGTATTATCAATCGTAAAACTGGTGAAACTTTCCACAAAGTGTTCAACCCACCAGTAGATTATAAAGAAGAAGATTACTATCAACGTGAAGATGATAAGCCTGAAACTGTCAAACGTCGCTTGGACGTTAATATTGCTCAAGGAGAATCTATTCTTGAACACTATCGTAAGCTTGGTCTTGTTACAGATATTGAAGGTAATCAAGAAATAACAGAAGTTTTTGCAGATGTTGAAAAAGCGTTGCTAGAACTCAAA

SEQ ID NO: 18114 - protein, 212 aa, Streptococcus agalactiae
MNLLIMGLPGAGKGTQAAKIVEEFGVAHISTGDMFRAAMANQTEMGRLAKSYIDKGELVPDEVTNGIVKERLAEDDIAEKGFLLDGYPRTIEQAHALDATLEELGLRLDGVINIKVDPSCLIERLSGRIINRKTGETFHKVFNPPVDYKEEDYYQREDDKPETVKRRLDVNIAQGESILEHYRKLGLVTDIEGNQEITEVFADVEKALLELK

SEQ ID NO: 18115 - protein, 216 aa, Streptococcus agalactiae
GTGGCAAAAGAAGATGTGATTGAAATTGAAGGTAAAGTTGTTGAAACTATGCCTAATGCAATGTTTACTGTTGAGTTGGAAAATGGACACCAAATTTTGGCAACTGTATCAGGAAAAATCCGTAAAAACTACATCCGTATTTTGGTAGGTGATCGTGTTACTGTTGAAATGAGCCCATACGATTTAACACGTGGACGCATCACATACCGCTTTAAA

SEQ ID NO: 18116 - protein, 72 aa, Streptococcus agalactiae; identical to SEQ ID NO: 188

SEQ ID NO: 18117 - protein, 363 aa, Streptococcus agalactiae; identical to SEQ ID NO: 8935

SEQ ID NO: 18118 - protein, 121 aa, Streptococcus agalactiae; identical to SEQ ID NO: 190

SEQ ID NO: 18119 - protein, 353 aa, Streptococcus agalactiae
GTGAAAAAGAACATCGAATCTGGTGTTGCTCATATTCACGCTACATTCAATAACACTATTGTTATGATTACAGATGTGCATGGTACGCTCTTGCATGGTCATCAGCTGGTGCTCTTGGATTTAAAGGTTCTCGTAAATCTACTCCATTTGCTGCTCAAATGGCTGCTGAAGCTGCTGCTAAATCTGCACAAGAACACGGTCTTAAAACTGTTGAAGTTACTGTAAAAGGTCCTGGTTCAGGTCGTGAATCTGCTATCCGTGCCCTTGCTGCAGCTGGTCTTGAAGTAACTGCAATTCGTGATGTGACTCCTGTACCACATAATGGTGCTCGTCCTCCAAAACGTCGTCGTGTA

SEQ ID NO: 18120 - protein, 118 aa, Streptococcus agalactiae; identical to SEQ ID NO: 192

SEQ ID NO: 18121 - protein, 327 aa, Streptococcus agalactiae
ATGATTGAGTTTGAAAAACCAATAATAACAAAAATTGATGAAAATAAAGATTACGGCAGATTTGTCATCGAACCACTAGAACGTGGCTACGGTACAACTCTAGGAAACTCTCTTCGTCGGGCTTCTGTCTTCACTTCCAGGTGCAGCAGTCACATCAATCAAAATTGATGGAGTATTACACGAATTTGATACTATCCCAGGTGTACGTGAAGATGTGATGCAAATCATCCTTAATGTAAAAGGACTTGCTGTGAAATCTTACGTCGAAGACGAAAAGATTATCGAACTAGACGTTGAAGGTCCTGCAGAAATCTGCCGGAGATATTT

SEQ ID NO: 18122 - protein, 110 aa, Streptococcus agalactiae
  VARIANT 41: Xaa = Any Amino Acid
MIEFEKPIITKIDENKDYGRFVIEPLERGYGTTLGNSLRRXLLSSLPGAAVTSIKIDGVLHEFDTIPGVREDVMQIILNVKGLAVKSYVEDEKIIELDVEGPAEILPEIF

SEQ ID NO: 18123 - protein, 537 aa, Streptococcus agalactiae
TTGAAAGCAACAATGACAGTTGCTAAAAACCGAGGTTATGTTCCAGCAGAAGGAAATAAAAAAGATGATGCACCAGTGGGAACATTGGCTGTAGATTCAATCTATACACCAGTGAAAAAAGTTAATTATCAAGTTGAACCTGCTCGTGTAGGTAGTAACGATGGCTTTGATAAATTAACTATTGAAATCATGACAAATGGCACAATCATTCCTGAGGATGCTCTTGGTCTTTCAGCTCGCGTCTTAATTGAACACTTAAACTTGTTTACTGATTTAACAGAGGTTGCTAAAGCAACTGAAGTAATGAAGGAAACAGAGAAAGTGAACGATGAGAAAGTGCTTGACCGCACAATTGAGGAACTTGATTTGTCAGTGCGCTCATATAACTGTTTAAAACGTGCTGGAATTAATACAATATTTGATTTAACAGAAAAAACTGAGCCTGAAATGATGAAAGTCCGAAACTTAGGACGTAAGAGTCTTGAAGAAGTTAAAATCAAACTTGCCGATCTAGGTCTTGGATTAAAAAACGATAAA

SEQ ID NO: 18124 - protein, 179 aa, Streptococcus agalactiae
MKATMTVAKNRGYVPAEGNKKDDAPVGTLAVDSIYTPVKKVNYQVEPARVGSNDGFDKLTIEIMTNGTIIPEDALGLSARVLIEHLNLFTDLTEVAKATEVMKETEKVNDEKVLDRTIEELDLSVRSYNCLKRAGINTIFDLTEKTEPEMMKVRNLGRKSLEEVKIKLADLGLGLKNDK

SEQ ID NO: 18125 - protein, 384 aa, Streptococcus agalactiae; identical to SEQ ID NO: 4497

SEQ ID NO: 18126 - protein, 128 aa, Streptococcus agalactiae; identical to SEQ ID NO: 196

SEQ ID NO: 18127 - protein, 456 aa, Streptococcus agalactiae; identical to SEQ ID NO: 9475

SEQ ID NO: 18128 - protein, 152 aa, Streptococcus agalactiae; identical to SEQ ID NO: 504

SEQ ID NO: 18129 - protein, 1631 aa, Streptococcus agalactiae
TTGAGTAATTGGAACTTAGATAATTTTGATAACTTACATAGCTCTTTAGCAGAAAGTGCATATAATAGTCGACCTAATTCATTTCCTGAATTATTTGAGACTGACTCAGTAACAGAAGTAAAATTTTCTCAACCCTCAGAAGATAACAAAGGTCAAATCACACAGGGTGGCACTAACCTCCCCAATGATGGTATTGTCTACCTGCAACCAGATAAGTCCTTAAAATCTATTGATGAAAATGTAAAGGTCCTCATTCCAGATGTCAATGGAGGCTATCACACTGAGCATTATGTTACTCATTCTTATCAAAAAGGTGTGCTTACTGACGATAAGGCAGGTTTTAATGCTTACTACCTGTCAGATACTGAAAAAATAGATAGCACTACAAAGCACACTTATCTAGCCATTCGTGGTAGTGATGGGATTGGTCTAGATACACTAAACGATTGGGTTAGTAACAATGCAATGTTTGCTGTCTCTAACAAGTATATTCCACAAGCGAAATTGGCTAATAAGGCTATGAAAGAAAAAATTGCCGAGCTAAAAGGAAAAGCGCCTGGAGCTATTATGGATGTTACTGGTCACTCACTCGGTACGATTGTATCTTCTCAAGCAGTTGTTAATCTTAGCTATGCAGAATTGGAGAATGTTGGTCAAGTAGTCCTTTTCGATGGCCCTGATGTATCAAGAAGCTTGGAAAAAATGGAAGGCATTTCTGCTAAAAAAATCCAAGAAGCTGGGAAGCATGTTACCTACTATGTCAATCCCTTTGATATAGTTAGTATGCTTAATCGTGAAAAGCCATGGAAAGACCAATTCGGGAAAGTAAATGTCATTGTTCCTAGTAAATATACGGGTACTTTTGATGAGCAATCTTCTCACGATTTTGGTGCCTTCCAAATGATAGTAGCGGAAATCCTTTAGTTGCTTCTGAAAGCTATCATCCAGAATTATTAACATCTGGTCAAGACTTAGCTAGACTCGAAAAAAAATTCATAAAGAATCTTTTAGGAGAGCATTATGATTCGGATAAGCTAGGACCAGTACTCAAAGGCGCTCTGACTGGGGACCTGACTCGACTAATTGCAACATTAAAAGCTTGTGGTATCAGTGTCACTGTAAACGAAGCTAAAAAACTGTACGATAACTTCCAAAAAGACTACAAAGCCATAATTTCCAAAGCTAAAAAAGATGGCCTCGAGTGGGATCGCAAAAACATCGCAAGCTTCCATAGTAGGATCAAATCAGCATCAGGCAGTCAACGGATTTTACTTAGAACTCAAATGCTCTATATGGCAACGCAATTAGCAGAAGCAGATGTTTCAGAAAAAGTCTCTGCAACAAAAAAACATATTAGTGAAGCTAAGGATACGATTGTAGAAATATCGACATCCACTATTTCATCAGCTGAAATAATGGCTATGCACCTTGACCAATCAGAAGTTGATGCTCTGGTTTCAGATATAAAAATGTCAACAGTTTGGAATGATGGCGTAGAGACTTCTGATTATGAAGCACTTGATCACTATAAAACAAAAATGACCACATTTACGACCAATTTGGTAACAGTTGCACAAAATTTAACAGCTCAAGATGAGCAACTAGCTGGTGATATTGTCACGAACTTATCC

SEQ ID NO: 18130 - protein, 544 aa, Streptococcus agalactiae; identical to SEQ ID NO: 9478

SEQ ID NO: 18131 - protein, 270 aa, Streptococcus agalactiae; identical to SEQ ID NO: 9479

SEQ ID NO: 18132 - protein, 90 aa, Streptococcus agalactiae; identical to SEQ ID NO: 508

SEQ ID NO: 18133 - protein, 348 aa, Streptococcus agalactiae; identical to SEQ ID NO: 9481

SEQ ID NO: 18134 - protein, 116 aa, Streptococcus agalactiae; identical to SEQ ID NO: 510

SEQ ID NO: 18135 - protein, 429 aa, Streptococcus agalactiae
ATGAAAAAATATGTAAAATGGTTAATTCCCATATCTATTATTGGGATGTTACTAGCAGGCTGTCAAATGAATAGTGAATCTAAAAGTCAGTCAAACGAAGTAAAAAATAGCAAACAGTCAGCAGTAAAGAAAGGTAAAAAAGTAATGAAAAAAGAACAAGTAGCTTATCTCAAAAAGCATGAAAAAGAATTAACTGAATATGTCAAAATCCAAAATCCAGATATTAGTGAAATTAAGTATGATTGGAATAGTGTGCGTATAGTGGAAGCTAGTAATGGAACCCCTCAAGGCGGAGAGCAACTATTATTAATTTTGGGTTATGCAAATGGCAGTGAATTAACCAATTTTACTCTAAATTTCACATTGGGTGATAATCAAATGCCTAATATTGACTCAGTTGGCTCAGATAATTTATCAACTATTGAAGAT

SEQ ID NO: 18136 - protein, 143 aa, Streptococcus agalactiae
MKKYVKWLIPISIIGMLLAGCQMNSESKSQSNEVKNSKQSAVKKGKKVMKKEQVAYLKKHEKELTEYVKIQNPDISEIKYDWNSVRIVEASNGTPQGGEQLLLILGYANGSELTNFTLNFTLGDNQMPNIDSVGSDNLSTIED

SEQ ID NO: 18137 - protein, 168 aa, Streptococcus agalactiae
ATGGCAGAAAGTGCTAATACAGGACGATCGAATTCTTTTGTTTTAGAAGAATTAACTGAATTTCAAAGAGAAAAGTTAAAAAATGGGGAGTCAGTTAAGTTTAATTTTTCTAAAGATGTTAAGAAAGAAAATAAGGTTATCGAAGGAGGGCACCCCCAAGTCATAGGG

SEQ ID NO: 18138 - protein, 56 aa, Streptococcus agalactiae; identical to SEQ ID NO: 204

SEQ ID NO: 18139 - protein, 549 aa, Streptococcus agalactiae
ATGACTAAAATTTATCATATGATTTTATGTAATTCTGATATAATGAAGATTTTAGCTATAATAAAATCTCTTCCACTGAATGATTGTTGGCTGTGTGCTGGCACATTGAGAAACTTTATATGGAATAAACTTTCTGGAATAAATGAGACATTGACATCAGATATTGATGTTGTATTTTTTGATAAAAATATTTCTTATGAAGAAACGGTGGCATTAGAACAACAATTAAAGGATAACTATCCACAGTACGATTGGGAACTTAAAAATGAATTTTACATGAACACTCATTCTCCTAATACCCCAAAGTATACTAGCTCTAAAGATGCTATTTCGAAATTTCCTGAAAAGTGTACTGCAGTGGGAGCAAGGTTAGATGATAGAAATCAACTCGAACTTTACCTCCCTTATGGTGAAGAGGAAATATTAAATTTCATTGTTAGTCCTACGCCATATTTTGAAGAGGATCTATTACGTTATAATGTTTATTTGAAGCGAGTGGATAAGAAGAAATGGAATAATATTTGGCCTCGTTTAACAATCATAAAAAAA

SEQ ID NO: 18140 - protein, 183 aa, Streptococcus agalactiae
MTKIYHMILCNSDIMKILAIIKSLPLNDCWLCAGTLRNFIWNKLSGINETLTSDIDVVFFDKNISYEETVALEQQLKDNYPQYDWELKNEFYMNTHSPNTPKYTSSKDAISKFPEKCTAVGARLDDRNQLELYLPYGEEEILNFIVSPTPYFEEDLLRYNVYLKRVDKKKWNNIWPRLTIIKK

SEQ ID NO: 18141 - protein, 417 aa, Streptococcus agalactiae
ATGAAAATGACAGTCTATTTTGATGGTAATTTTTGGTTGGGTTTGATTGAGTACGATGATGATGGTGATTACAAAGTTTTTCGTTATTTTTTTGGAAAAGAACCTAAAGATGATGATGTTTTTAATTTTATAAATCATAAACTTAATGATTTGATAAAAAAATATGAGTTTGTTAAAACGGATATTTCTCTAAAGCGTACGAATGAACACAAAAAAAGCCCTAAAAGAATGCAAAGAGAAATTAATAGAGAAAAACGTAAGCCAGTAGTATCTACAAAAGCGCAATTGGCGATGAAAACTATTCATATGAGTATAAAAAACGAACGTCAATTAAGTCAGAAATGTAAGAAAAATGAGTTAAGAAAGCATCGGTACCAATTAAAACAAGAAAAACGTTACCAAAAGAAAAAAGGGCAT

SEQ ID NO: 18142 - protein, 139 aa, Streptococcus agalactiae; identical to SEQ ID NO: 208

SEQ ID NO: 18143 - protein, 432 aa, Streptococcus agalactiae
ATGAAGCTGAGAAGAAATTATTTTGTTCAACTTTGGGAATATGATGATTGGATTCAAGAAGGACGTATTGTACTTTTTAGGTTGCTTGAAGAGCATCCGTATTTATTGGATAATGAAAGCAAACTATTCATTTACTTTAAAACAAAATTTTCAAATTATTTAAACGATGTATTAAGACACCAAGATTGTCAAAAGCGACAATTTAATAAAATGCCTTATGAAGAAATCAGTGAAGTTAGTCACTATGTTAAGAGTAAAGGACTAGTTTTAGATGACTATATTGCTTATCGTGATACTTTAACAAAAGTGGAAGAAACTTTGTCAGATATTGATAAAGAAAAATTTGAAAAACTGATTAGTGGTGAACGTTTTGCGGGGAAGAAACAATTCATACGAGATATTCAACCTTTTTTCAATGCTTTTAAAGCGGAT

SEQ ID NO: 18144 - protein, 144 aa, Streptococcus agalactiae; identical to SEQ ID NO: 210

SEQ ID NO: 18145 - protein, 690 aa, Streptococcus agalactiae
ATGAGTAAAGTTCGTTTATATATCGCTCGTCATGGTAAAACAATGTTTAATACAATTGGTCGCGCTCAGGGGTGGAGTGATACTCCTTTAACTACCTTTGGAGAACTCGGGATTAAAGAGCTTGGTTTGGGACTAAAGGCTTCAAATATTAGTTTTAAAGAAGCTTTTTCTAGTGATAGTGGACGTACTTTACAAACTATGGAAATTATTCTCAGGGAAGTGCAACAAGAAAATATTCCCTATACGAGAGATAAACGAATCCGCGAGTGGTGCTTTGGTAGTTTGGATGGAGGATATGATGGCGACCTTTTTAATGGCGTTCTGCCTCGAGTTTCAAACGGAGATATGAGCCATTTGACACACGAAGAAATTGCTAATTTGATTTGTCAAGTTGATACGGCTGGCTGGGCAGAACCGTGGGCAATATTGAGTAACCGTATTCTGTCAGGCTTCACTGCTATAGCTAAAAAAATAGAGGATATTGGGGGAGGTAATGCGATTGTTGTCAGTCATGGGATGACTATTGCGACTTTTTTATGGTTAATCGACCATAGTACCCCTCGTAGTTTAGGCTTAGACAATGGTAGTGTCTCAGTCGTTGATTTTGAAGATGGAACATTTTCTATTCAATCTATTGGGGATATGTCCTATCGAGAAAAAGGAAGAGAAATTTTAGAAAAAACATTACAA

SEQ ID NO: 18146 - protein, 230 aa, Streptococcus agalactiae; identical to SEQ ID NO: 212

SEQ ID NO: 18147 - protein, 749 aa, Streptococcus agalactiae
ATGAAAAAAAATAAAGTTATCCGATTCAGTTTAGTTGGTGTTCTACTTGCGATACTATGCTTTAGTCTTTTTGCTTTATGAAGCCTAACAGTCAACAATCATCATCTCAAAAGTTGAGGAATGAGGATATAAAAAAGACATCCTCTCAAAAAAGAAATAAGAAATTACGATTACCAGCTGTATCATCAAAAGATTGGAACTTGATTTTGGTCAATCGTGACCATAAACATGAAGAATTAAGTCCAGATGTGGTGCCTGTTGAAAATATTTATTTGGATAAACGTATTACGAAGCAAGCTACTCAGTTTTTAGAGGCTGCTAGAGCAATTGATTCACGAGAACATTTAATTTCGGGTTATCGTAGTGTTGCCTATCAGGAGAAGTTGTTCAATTCTTATGTTACTCAAGAAATGACTAGTAACCCTAATTTGACGAAGGAACAAGCAGAAAAGTTGGTAAAAACTTACTCTCAGCCTGCAGGTGCTAGTGAACACCAGACTGGATTAGCGATGGATATGAGTACTGTAGATTCTTTGAATGAGAGCGATCCTAGAGTAGTCAGTCAGTTGAAAAAGATAGCTCCACAATATGGTTTTGTCTTACGGTTTCCGGATGGTAAAACAGCAGAAACAGGGGTAGGTTATGAAGATTGGCATTACCGCTATGTTGGGGTAGAGTCTGCAAAATATATGGCCAAACATCATTTAACATTAGAAGAATACATAACTTTATTAAAGGAGAATAACCAA

SEQ ID NO: 18148 - protein, 250 aa, Streptococcus agalactiae
MKKNKVIRFSLVGVLLAILCFSLFALLKPNSQQSSSQKLRNEDIKKTSSQKRNKKLRLPAVSSKDWNLILVNRDHKHEELSPDVVPVENIYLDKRITKQATQFLEAARAIDSREHLISGYRSVAYQEKLFNSYVTQEMTSNPNLTKEQAEKLVKTYSQPAGASEHQTGLAMDMSTVDSLNESDPRVVSQLKKIAPQYGFVLRFPDGKTAETGVGYEDWHYRYVGVESAKYMAKHHLTLEEYITLLKENNQ

SEQ ID NO: 18149 - protein, 573 aa, Streptococcus agalactiae
ATGAGGAAACGTTTTTCCTTGCTAAATTTTATTGTTGTTACTTTTATTTTCTTTTTCTTTATTCTTTTTCCGCTTTTAAACCATAAGGGAAAAGTAGATGCTAATTCTAGGCAGAGTGTTACCTACACCAAAGAAGAATTTATACAAAAAATTGTGCCAGATGCGCAAGATCTAGGAAAGTCGTACGGTATTCGTCCTTCATTTATTATTGCACAGGCGGCTTTGGATTCTGATTTCGGAGAGAAAATATTAGCTAATAAGTATCATAATCTGTTTGGTTTGCTTGCAGAACCAGGAACGCCCTCAATTACCTTAAATGATAGTAGTACAGGAAAAAAACAGGAAAAGCAATTTACTCATTATAAATCTTGGAAGTATTCAATGTATGATTACCTTGCTCATATAAAATCTGGAGCGACAGGCAAAAAAGATTCGTATACTATAATGGTGTCTGTTAAAAATCCAAAAACTTTAGTGCAAAAATTACAAGATAGTGGTTTTGATAATGACAAAAAGTACGCTAAAAAAATGACGGAAATCATTGATTTGTATGATTTAACAAGATATGATAAG

SEQ ID NO: 18150 - protein, 191 aa, Streptococcus agalactiae; identical to SEQ ID NO: 216

SEQ ID NO: 18151 - protein, 1080 aa, Streptococcus agalactiae
ATGTGTAAGAGTGCTAATTTCAAAAAGACCGAGAGGGGTGATGTTTTTGTGATTACACAACGTCAAAATGATATTTTGAATTTAATCGTTGAGTTATTTACACAAACTCATGAACCAGTAGGGTCTAAAGCTTTACAGAGAACGATTGATTCTAGTAGCGCCACTATTCGTAATGATATGGCAAAACTAGAAAAGTTGGGGTTATTGGAAAAAGCGCACACTTCTAGTGGACGGATGCCGAGTCCAGCTGGTTTTAAGTATTTTGTAGAGCACTCCCTTAGACTAGATAGTATTGATGAGCAAGATATTTATTATGTCATAAAAGCTTTTGATTTTGAAGCATTCAAATTAGAAGACATGCTTCAAAAAGCTAGTCATATTTTATCGGAGATGACGGGCTATACATCCGTTATTTTAGATGTGGAGCCAGCTCGTCAACGTTTAACAGGGTTTGATGTTGTTCAGCTTAGCAACCATGATGCTCTAGCAGTCATGACTTTAGATGAATCTAAGCCAGTGACAGTGCAGTTTGCTATTCCAAGAAACTTTTTGACACGTGACTTGATAGCATTTAAAGCTATCGTAGAGGAGCGCTTGCTGGATGGTAGTGTCATGGATATTCATTATAAGTTGAGGACAGAAATTCCTCAGATCGTTCAGAAGTATTTTGTAACTACGGATAATGTGTTACAACTATTTGATTATGTTTTTTCAGAGCTGTTTCTGGAAACGGTATTTGTAGCTGGCAAGGTAAATTCTTTAACGTATTCAGATCTATCAACGTATCAGTTTTTGGATAATGAGCAGCAGGTAGCGATTTCTTTGAGGCAAAGTTTGAAAGAGGGTGAGATGGCTTCTGTCCAAGTGGCAGATAGTCAAGAAGCCGCACTTGCAGATGTGTCAGTTTTAACTCACAAATTTTTGATTCCTTACCGTGGATTTGGACTCCTGAGTTTGATTGGTCCTATTGATATGGATTATCGTAGGTCTGTTAGTTTGGTAAACATTATCGGAAAGGTATTGGCTACTAAATTAGGTGATTATTATCGATACCTAAATTCTAACCATTATGAAGTTCAC

SEQ ID NO: 18152 - protein, 360 aa, Streptococcus agalactiae
MCKSANFKKTERGDVFVITQRQNDILNLIVELFTQTHEPVGSKALQRTIDSSSATIRNDMAKLEKLGLLEKAHTSSGRMPSPAGFKYFVEHSLRLDSIDEQDIYYVIKAFDFEAFKLEDMLQKASHILSEMTGYTSVILDVEPARQRLTGFDVVQLSNHDALAVMTLDESKPVTVQFAIPRNFLTRDLIAFKAIVEERLLDGSVMDIHYKLRTEIPQIVQKYFVTTDNVLQLFDYVFSELFLETVFVAGKVNSLTYSDLSTYQFLDNEQQVAISLRQSLKEGEMASVQVADSQEAALADVSVLTHKFLIPYRGFGLLSLIGPIDMDYRRSVSLVNIIGKVLATKLGDYYRYLNSNHYEVH

SEQ ID NO: 18153 - protein, 570 aa, Streptococcus agalactiae
ATGGCAGTATTCAATAAGTTATTTAAAAGGAGGCACTCAGTGTCAGAAGAAATTAAAAAAGACGATTTACAGGAAGAAGTGGAAGCCACTGAAACTGAAGAGACAGTTGAGGAAGTTATTGAAGAAATTCCTGAAAAATCAGAGTTAGAACTCGCAAACGAGCGTGCTGATGAGTTTGAAAATAAATACTTGCGTGCTCATGCAGAAATGCAGAATATACAGCGTCGCTCTAGTGAAGAACGTCAGCAACTTCAACGCTATCGTTCTCAGGATCTGGCAAAAGCAATCTTACCATCGCTTGACAATCTAGAACGCGCCTTGGCTGTTGAAGGGTTGACAGATGATGTTAAAAAAGGTTTAGAAATGACTCGTGATAGCCTTATTCAAGCACTAAAGGAAGAAGGCGTAGAAGAAGTAGAAGTCGACTCATTTGACCACAACTTTCATATGGCAGTTCAGACCCTTCCAGCCGATGATGAACATCCAGCCGATAGCATTGCAGAAGTCTTTCAAAAGGGATATAAATTGCACGAGCGTCTGCTAAGACCAGCGATGGTAGTTGTCTATAAC

SEQ ID NO: 18154 - protein, 190 aa, Streptococcus agalactiae; identical to SEQ ID NO: 220

SEQ ID NO: 18155 - protein, 1827 aa, Streptococcus agalactiae
ATGTCTAAAATTATTGGTATTGACTTAGGTACAACAAACTCAGCAGTAGCAGTTCTTGAAGGGACTGAATCAAAAATCATTGCTAACCCAGAAGGCAATCGTACAACTCCTTCAGTAGTATCATTCAAAAATGGTGAAATTATCGTGGGTGATGCTGCAAAACGTCAAGCGGTAACAAATCCAGATACTGTTATCTCTATCAAATCAAAGATGGGAACTTCTGAAAAAGTTTCTGCAAATGGTAAAGAATATACTCCTCAAGAAATTTCAGCAATGATTCTTCAATACCTTAAAGGTTATGCTGAAGACTATCTTGGAGAAAAAGTAGAAAAAGCAGTTATTACTGTTCCAGCTTACTTCAACGATGCACAACGTCAGGCAACTAAAGACGCTGGTAAAATTGCAGGTCTTGAAGTAGAACGTATCGTTAACGAACCAACAGCAGCCGCACTTGCTTATGGTATGGACAAGACTGACAAGGATGAAAAAATCTTAGTTTTTGACCTTGGTGGTGGTACATTTGACGTATCAATCCTTGAATTAGGTGATGGTGTCTTCGACGTTCTTGCAACAGCAGGTGATAACAAACTTGGTGGTGACGACTTTGACCAGAAAATTATTGATTTCTTGGTAGAAGAATTCAAGAAAGAAAATGGTATTGATCTTTCTCAAGACAAAATGGCTCTTCAACGCTTGAAAGATGCTGCTGAAAAAGCTAAAAAAGACCTTTCAGGTGTAACTCAAACTCAAATTTCATTACCGTTCATCACTGCTGGTTCTGCTGGTCCTCTTCACTTGGAGATGAGCTTATCACGTGCTAAATTTGACGATCTCACTCGTGACCTTGTTGAACGTACGAAAACTCCAGTTCGTCAAGCTCTTTCAGATGCAGGCTTGTCATTGTCAGAAATTGATGAAGTTATCCTCGTTGGTGGATCAACACGTATCCCAGCAGTTGTTGAAGCTGTAAAAGCTGAAACTGGTAAAGAACCAAACAAATCAGTTAACCCTGATGAAGTGGTTGCTATGGGTGCTGCTATCCAAGGTGGTGTTATCACTGGGGATGTGAAAGACGTTGTTCTTCTTGACGTTACACCATTGTCACTTGGTATTGAAACAATGGGTGGTGTCTTCACTAAATTGATCGACCGCAACACAACTATCCCAACATCTAAATCACAAGTCTTCTCAACAGCAGCAGACAACCAACCAGCCGTTGATATCCACGTTCTTCAAGGTGAACGCCCAATGGCAGCAGATAACAAAACACTCGGTCGCTTCCAATTGACTGATATCCCAGCTGCACCTCGTGGAATCCCACAAATTGAAGTAACATTTGATATCGATAAAAATGGTATTGTATCTGTTAAAGCTAAAGATCTCGGTACTCAAAAAGAACAACACATTGTTATCCAATCTAATTCAGGATTAACTGATGAAGAAATTGATAAAATGATGAAAGATGCTGAAGCAAATGCTGAAGCAGATGCAAAACGTAAAGAAGAAGTTGATCTTAAAAATGAAGTTGACCAAGCCATCTTTGCAACAGAAAAAACTATTAAAGAAACTGAAGGCAAAGGCTTTGATACAGAACGCGATGCAGCGCAATCAGCACTTGATGAGTTGAAAAAAGCTCAAGAATCAGGTAACCTTGACGACATGAAAGCTAAACTTGAAGCTCTTAACGAAAAAGCACAAGCTCTTGCAGTTAAACTTTACGAACAAGCGGCTGCAGCACAACAAGCAGCTCAAGGGGCTGAAGGTGCACAATCAGCTGATTCATCAAGCAAGGGTGATGATGTTGTAGATGGCGAATTCACTGAGAAA

SEQ ID NO: 18156 - protein, 609 aa, Streptococcus agalactiae; identical to SEQ ID NO: 222

SEQ ID NO: 18157 - protein, 1137 aa, Streptococcus agalactiae
ATGAACAATACAGAATTTTATGATCGTCTTGGCGTTTCAAAAGATGCTTCTCAGGACGAAATAAAAAAAGCTTACCGTAGGATGTCTAAGAAATACCATCCAGATATTAATAAGGAAGCGGGAGCAGAGGAAAAATATAAAGAGGTTCAAGAAGCTTATGAAACCTTGAGTGATACACAAAAACGTGCTGCCTATGATCAATATGGCGCTGCTGGGGCAAATGGCGGTTTTGGTGGCTTCGATGGTGGCGGTTTTGGTGGCTTCGATGGTGGTGGCTTTGGTGGTTTTGAAGACATCTTCTCAAGCTTTTTTGGTGGAGGAGGGATGCGCAATCCTAATGCACCACGTCAAGGAGATGACCTACAATATCGTGTTAATTTAAGTTTTGAAGAAGCTATCTTTGGAGCTGAAAAAGAAGTATCTTATAATCGGGAGTCATCATGTCATACTTGTTCAGGAAGTGGAGCTAAGCCAGGTACTAGCCCTGTGACTTGTCAAAAGTGTCATGGTTCGGGTGTGATTAATGTTGATACACAAACACCTCTAGGAACAATGCGTCGCCAAGTGACTTGTGATGTTTGTCAGGGTAGTGGTCAAGAAATCAAAGAGAAATGTCCAACATGTCATGGAACTGGTCATGAGAAGAAGACGCATAAAGTATCAGTTAAAATACCTGCAGGAGTTGAAACTGGGCAACAAATTCGTTTAACAGGACAAGGTGAAGCTGGCTTCAATGGTGGGCCTTATGGTGATCTCTTTGTTATTATTAACGTTCTCCCAAGCCAACAGTTTGAGCGTAATGGATCAACAATTTATTATACTTTGAATATTAGCTTTGTCCAAGCTGCTTTGGGTGATACAATTGATATACCTACTGTCCATGGAGCGGTAGAAATGTCAATTCCTGCTGGTACTCAGACAGGAAAAACATTCCGTCTTCGCGGAAAAGGTGCCCCTAAACTTCGAGGGGGTGGACAAGGTGATCAGCATGTTACTGTTAACATCGTAACTCCTACTAAATTGAATGATGCTCAAAAAGAGGCATTGCACGCTTTTGCAGAGGCAAGTGGAGATAAGATGGTACATCCGAAGAAGAAAGGTTTCTTTGATAAAGTCAAAGATGCTTTAGATGTTGAT

SEQ ID NO: 18158 - protein, 379 aa, Streptococcus agalactiae
MNNTEFYDRLGVSKDASQDEIKKAYRRMSKKYHPDINKEAGAEEKYKEVQEAYETLSDTQKRAAYDQYGAAGANGGFGGFDGGGFGGFDGGGFGGFEDIFSSFFGGGGMRNPNAPRQGDDLQYRVNLSFEEAIFGAEKEVSYNRESSCHTCSGSGAKPGTSPVTCQKCHGSGVINVDTQTPLGTMRRQVTCDVCQGSGQEIKEKCPTCHGTGHEKKTHKVSVKIPAGVETGQQIRLTGQGEAGFNGGPYGDLFVIINVLPSQQFERNGSTIYYTLNISFVQAALGDTIDIPTVHGAVEMSIPAGTQTGKTFRLRGKGAPKLRGGGQGDQHVTVNIVTPTKLNDAQKEALHAFAEASGDKMVHPKKKGFFDKVKDALDVD

SEQ ID NO: 18159 - protein, 1245 aa, Streptococcus agalactiae
ATGGTAACCAAAGTTGAAGAAATTCGTTCATATTTGATAGCTTCTATACAAAATGGTAAGTTGGCTCCAGGAGATCGCCTACCATCTATAAGACAGTTAGCTAATCAATTTTCCTGTAACAAAGATACAGTGCAACGAGTTTTGATGGAATTGCGTTTTGATAATTATATCTATGCAAAGCCGAGGTCAGGCTATTACGTCTTTGATTCTCATCAAGAGGAAGTTGAAGAAGGGGTTAGTTTACCAAACTCTGAGATTGCAAATATAGCTTATGATGATTTTAGATTGTGTTTGAATGAGACCCTTATTGGTAGGGAAGATTACCTTTTCAATTATTACCATCGTCAAGAAGGTCTTCTTGATTTAAGTAAAGCGGTGGCTAAATTAATGGAAGAAACAGGGGTCTATGTTCCTCTTGATGATATTGTTATTACAGCTGGTACTCAACAGGCATTATTTATTTTGACACAGGTTACCTTTCCAAATCGAAAATCTCGAGTTTTAATAGAAGAACCGACCTATCCTCGTATGATTGAACTAATCAAAACACAAAATTTACCCTATGAAACTATTTCTCGAGGTACTCATGGAATTGATTTTCAGCGCTTAGAGGAGATTTTCCAGACACAATCAATTAAGTTTTTTTATGTTATACCTCGCATGCATAATCCTTTGGGAACATCCTATAATCCGGTAGAGATGAAAAGATTAATAGAGATGGCAGAGAAGTATGATGTTTATATTGTGGAAGATGACTATATGTCTGATTTTGCAAGTCAGTCACCATTACATTATTATGATACTCACGGGCGTGTTATTTATCTAAAATCTTTTTCAAAGGCTATTTTCCCTGCTTTAAGATTAGCTGCGATTTGTTTACCACAAGCTTTAAAATCAACATTTATGGCTTACAAGAAGTTGATGGATTATGATACTAATCTGATTTTACAAAAAGCATTAGCGCTTTATATTGAAAATGGCCTTTATGCTAAGAATAGTCAATATTTGAAATATCGTTATCAGAAAGACCTTGCAAATTCAAAATCTATTTTAGCTGATCAGCCTAATCTACCCCCATATAGTTTACATCACGATAGTGTATTATTTGATTGTTCGAAACTCGATAACTTCAAAATATTACGGCAATACGGCGATACTTTGGAAAATTATTTTTGTCAAAAATCGCATCAATCTCTCTTACAAGTAAAAAATGATTCCTGCTTAAAGCAGTTCTTGGGATCGTTG

SEQ ID NO: 18160 - protein, 415 aa, Streptococcus agalactiae
MVTKVEEIRSYLIASIQNGKLAPGDRLPSIRQLANQFSCNKDTVQRVLMELRFDNYIYAKPRSGYYVFDSHQEEVEEGVSLPNSEIANIAYDDFRLCLNETLIGREDYLFNYYHRQEGLLDLSKAVAKLMEETGVYVPLDDIVITAGTQQALFILTQVTFPNRKSRVLIEEPTYPRMIELIKTQNLPYETISRGTHGIDFQRLEEIFQTQSIKFFYVIPRMHNPLGTSYNPVEMKRLIEMAEKYDVYIVEDDYMSDFASQSPLHYYDTHGRVIYLKSFSKAIFPALRLAAICLPQALKSTFMAYKKLMDYDTNLILQKALALYIENGLYAKNSQYLKYRYQKDLANSKSILADQPNLPPYSLHHDSVLFDCSKLDNFKILRQYGDTLENYFCQKSHQSLLQVKNDSCLKQFLGSL

SEQ ID NO: 18161 - protein, 774 aa, Streptococcus agalactiae
ATGACAAGGTATAAGGCACAGATTTCTTATGATGGTTCAGCTTTTTCAGGCTTCCAAAGACAACCAAATTGTAGGACAGTTCAAGAAGAAATTGAGAGAACTCTTAAGCGCCTAAATAGCGGGAACGATGTGATAATCCATGGTGCTGGTCGCACAGATGCTGGTGTTCATGCTTATGGACAAGTTATTCATTTTGATTTACCACAGGCGCGTGATGTAGAAAAATTACGCTTTGGTTTAGATACACAGTGTCCAGACGATATTGATATTGTCAAAGTAGAGCAAGTGTCTGATGATTTTCATTGTCGATATGATAAACACATTAAAACTTATGAGATTTTAGTAGATATCGGTAGGCCGAAAAATCCTATGATGAGAAACTATGCGACACATTACCCTTATCCTGTCATTATTGAGCTTATGAAAGAAGCTATTAAAGATTTAGTAGGTACCCATGACTTTACAGGCTTTACTGCTTCAGGTACGAGTGTAGAAAATAAAGTACGTACTATTTTTGATGCGAAAATTCAGTTTGAAGCGTCTAAAAATCTTTTAATTTTTACCTTTACAGGAAATGGTTTTTTGTATAAACAGGTGCGTAATATGGTTGGTACCCTGCTAAAAATTGGTAATGGACGCATGCCTATTAGCCAAATCAAAACAATTTTACAGGCTAAAAATCGGGATTTAGCAGGTCCAACTGCGGCAGGAAATGGTTTATATTTGAAGGAGATTATTTATGAAGACGAGGAATGTTTTAGCAATTTCAGGAAA

SEQ ID NO: 18162 - protein, 258 aa, Streptococcus agalactiae
MTRYKAQISYDGSAFSGFQRQPNCRTVQEEIERTLKRLNSGNDVIIHGAGRTDAGVHAYGQVIHFDLPQARDVEKLRFGLDTQCPDDIDIVKVEQVSDDFHCRYDKHIKTYEILVDIGRPKNPMMRNYATHYPYPVIIELMKEAIKDLVGTHDFTGFTASGTSVENKVRTIFDAKIQFEASKNLLIFTFTGNGFLYKQVRNMVGTLLKIGNGRMPISQIKTILQAKNRDLAGPTAAGNGLYLKEIIYEDEECFSNFRK

SEQ ID NO: 18163 - protein, 756 aa, Streptococcus agalactiae
ATGAAGACGAGGAATGTTTTAGCAATTTCAGGAAATGATATTTTCTCTGGCGGCGGCTTGCATGCAGATTTAGCAACTTACGTTGTTAATAAATTACATGGTTTTGTGGCAGTAACATGCTTAACAGTAATGTCAGATAAAGGGTTTGAAGTCATTCCTATAGAGGCATCTATACTAAAGCAGCAACTAGAAAGTTTAAAAGATGTAGAGTTTGGGTCTATTAAACTAGGATTGCTTCCCAATGTAGAAACAGCACAAGTTGTTTTGGAATTTGTAAAATCAAAACAAGAATGTCCAGTAGTCTTAGACCCAGTCTTAGTTTGTAAAGAAAATCATGATTTAGAAGTTAGCCAATTACGTGAGCAGCTAATTGCGTTTTTCCCATATACTGATGTGATTACTCCTAATTTAGTAGAGGCTCAATTATTGACGGGTCTTTCAATTGAAAACTTAGATCAAATGAAAATTGCTGCTGAGAAACTTTACGATATGGGGGCTAAACATGTTGTTATCAAAGGGGGCAACCGTTTAAATGCTGAAGAGGCTACAGACCTTTACTATGATGGTGAACGTTTTGAAACCTATGTTTTTCCTGTAGTAGATGCCAATAATACAGGTGCTGGATGTACATTTGCGTCAAGTATTGCCAGCCAATTAGCTATGGGTAAAAATGTAGAAGATGCAGTCAAAATGTCTAAAGGTTTTGTCTATCAAGCTATTAAAGCATCGGATAAGTACGGAGTTGTCCAACATTTT

SEQ ID NO: 18164 - protein, 252 aa, Streptococcus agalactiae
MKTRNVLAISGNDIFSGGGLHADLATYVVNKLHGFVAVTCLTVMSDKGFEVIPIEASILKQQLESLKDVEFGSIKLGLLPNVETAQVVLEFVKSKQECPVVLDPVLVCKENHDLEVSQLREQLIAFFPYTDVITPNLVEAQLLTGLSIENLDQMKIAAEKLYDMGAKHVVIKGGNRLNAEEATDLYYDGERFETYVFPVVDANNTGAGCTFASSIASQLAMGKNVEDAVKMSKGFVYQAIKASDKYGVVQHF

SEQ ID NO: 18165 - protein, 462 aa, Streptococcus agalactiae
ATGAGGAAAGAGAAAACTAATCAATTGGTTCAATTGGCAATTGTAACAGCTATATCTATTGTATTGGGGATGTTTATAAGTATTCCGACACCAACAGGTTTTTTGACATTACTAGATGCTGGAATATTCTTTGCTGCCTTTTACTTTGGCAAAAAAGAAGGGGCTGTGGTAGGTGCCTTAGCTGGTTTTTTAATTGATTTATTGAAAGGTTATCCCAATTGGATGTTCTTTAGTTTATTGATTCATGGGGCGCAAGGGTATTTAGCGGGTTTACCAGGTAGAAGACGTCTTTTAGGTCTTATTAGTGCAACTCTTGTTATGGTATTAGGTTATGCTATAGCTAGTGGATTGATGTATGGTTGGGGAGCTGTTCTACCAGATATTCCTGGCAATATTATGCAAAATATGGTTGGTATGGTCGTTGGTTTTGCTCTTAATAAGTCTCTAGAAAGAGTGAAGAAA

SEQ ID NO: 18166 - protein, 154 aa, Streptococcus agalactiae
MRKEKTNQLVQLAIVTAISIVLGMFISIPTPTGFLTLLDAGIFFAAFYFGKKEGAVVGALAGFLIDLLKGYPNWMFFSLLIHGAQGYLAGLPGRRRLLGLISATLVMVLGYAIASGLMYGWGAVLPDIPGNIMQNMVGMVVGFALNKSLERVKK

SEQ ID NO: 18167 - protein, 567 aa, Streptococcus agalactiae
ATGATACTAGATTATAATAAGTTAAAGCAGGAAACTAAAGCTATTGTAGTTGATATTATTGAGCGTAGCGCTCTTAAAAAAGGTCAAATTTTTGTACTAGGTCTATCATCTAGTGAGGTTTCTGGTGGTTTAATTGGAAAAAATTCTAGTTCTGAAATTGGTGAAATTATCGTTGAAGTTATCCTCAAAGAGTTACATTCACGCGGCATCTATTTAGCAGTTCAAGGTTGTGAACATGTTAATAGGGCGTTGGTTGTTGAAGCAGAATTGGCTGAACGTCAACAGTTGGAAGTCGTTAATGTTGTTCCTAATCTACATGCTGGCGGTAGTGGTCAGGTTGCAGCTTTTAAGTTGATGACATCACCAGTTGAGGTTGAAGAAATTGTGGCACATGCTGGAATTGATATTGGAGATACTTCTATTGGAATGCATATCAAGAGAGTACAAGTTCCCTTGATTCCAATTAGTCGTGAGTTGGGAGGAGCACACGTTACAGCACTAGCTAGTCGTCCTAAATTAATTGGCGGTGCTAGAGCAGGATATACGAGCGATCCAATCCGTAAATTT

SEQ ID NO: 18168 - protein, 189 aa, Streptococcus agalactiae; identical to SEQ ID NO: 4532

SEQ ID NO: 18169 - protein, 840 aa, Streptococcus agalactiae
ATGATTACTTTAGAAAAATTTATAGACCATCTTAATGTAGAGGAAGTTTTATTTACTTTCTTCACCAAACTAATATCAATCTTATTATTGATCATTGCATTCGTTATCGTTAGGCAAGTCATCAATTATCTTTTCGAAAAGACTGTTAATCGCTCACTCGCCTTTTCTAGACAAAAAGTAGCTCGTCAAAAAACATTAGCTAAACTTTCTCACAATGTTTTAAACTATACCCTTTATTTCTTTCTATTCTATTGGATTTTAAGTATATTGGGCGTTCCAATTTCTAGTTTATTAGCTGGGGCTGGTATTGCTGGGGTTGCTATTGGACTTGGTGCTCAAGGCTTCTTATCAGATGTTGTCAATGGCTTTTTTATTCTGCTAGAAAACCAATTTGATGTTGGTGATATTATCAATGTTGGTACTGTATCAGGCACTGTTACTAATGTTGGGATACGCACCACACAAATTCATGATTTCGATGGAACCTTACACTTCATTCCTAATCGTAATATTACAATTGTCAGCAATAAGTCTCGTAGCAATATGCGTGCTCAAATTGATATTCCTTTATTTGTTCATACAAACCTTGATCAGATTTCTGATATTGTAACAAAAATCAATGAAGAGTATGTTTCAAAACACCCTGCTATCGTTGGAGAGCCTACTGTTTTTGGTCCTACAACCAATGCTAATGGTCAATTTGTTTATCGTATTAATATCTTCACGCAAAACGGTGCTCAGTTTGACATCTATGCTGAATTTTACAAACTTTATCAAAAAGCTATTCTTGAAAAAGGTATTGACTTACCAACATACAATTTCTCCAATAACCACTCTCGT

SEQ ID NO: 18170 - protein, 280 aa, Streptococcus agalactiae
MITLEKFIDHLNVEEVLFTFFTKLISILLLIIAFVIVRQVINYLFEKTVNRSLAFSRQKVARQKTLAKLSHNVLNYTLYFFLFYWILSILGVPISSLLAGAGIAGVAIGLGAQGFLSDVVNGFFILLENQFDVGDIINVGTVSGTVTNVGIRTTQIHDFDGTLHFIPNRNITIVSNKSRSNMRAQIDIPLFVHTNLDQISDIVTKINEEYVSKHPAIVGEPTVFGPTTNANGQFVYRINIFTQNGAQFDIYAEFYKLYQKAILEKGIDLPTYNFSNNHSR

SEQ ID NO: 18171 - protein, 270 aa, Streptococcus agalactiae
ATGACTTTATATGAATCTAAGCCAGTGACAGTGCAGTTTGCTATTCCAAGAAACTTTTTGACACGTGACTTGATAGCATTTAAAGCTATCGTACAGGAGCGCTTGCTGGATGGTAGTGTCATGGATATTCCTTATAAGTTGAGGACAGAAATTCCTCAAATCGTTCAGAAGTATTTTGTAACTACGGATAATGAGTTACAACTATTTGATTATGATTTTTCTCAGCTGTTTCTGGATACCGTATTTGTAGCTGGCANNNNNTTAATTAAT

SEQ ID NO: 18172 - protein, 90 aa, Streptococcus agalactiae
  VARIANT 86, 87: Xaa = Any Amino Acid
MTLYESKPVTVQFAIPRNFLTRDLIAFKAIVQERLLDGSVMDIPYKLRTEIPQIVQKYFVTTDNELQLFDYDFSQLFLDTVFVAGXXLIN

SEQ ID NO: 18173 - protein, 768 aa, Streptococcus agalactiae
TTGAACGTTCCAGGATTCCGTAAAGGACATATGCCTCGTACAGTTTTCAACCAAAAATTTGGTGAAGAAGCACTCTACGAAAATGCATTGAATTTAGTGTTGCCAAAGGCTTACGAAGCAGCTGTTGCAGAACTTGGTTTAGACGTTGTTGCTCAACCAAAAATTGATGTTGTATCAATGGAAAAAGGTCAAGATTGGAAGTTGACAGCTGAAGTTGTTACAAAACCAGAAGTTAAACTTGGTGATTACAAAGACCTTTCAGTAGAAGTTGATGCTTCAAAAGAAGTTTCAGATGAAGAAGTTGATGCTAAAGTTGAACGTGAGCGTAACAACCTTGCAGAATTGACTGTTAAAGATGGTGAAGCAGCACAAGGTGATACAGTTGTTATTGACTTTGTAGGTTCAGTTGATGGTGTTGAATTTGATGGTGGTAAAGGAGATAACTTCTCACTTGAACTTGGTTCAGGTCAATTTATCCCAGGATTTGAAGAACAATTAGTAGGTTCTAAAGCTGGTCAAACTGTAGACGTTAATGTAACATTCCCAGAAGATTATCAAGCAGAAGATCTTGCTGGTAAAGATGCTAAATTTGTTACAACAATTCATGAAGTAAAAACTAAAGAAGTTCCAGCACTTGATGATGAACTTGCAAAAGATATTGATGAAGAAGTTGAAACACTTGATGAGTTGAAAGCAAAATATCGCAAAGAGCTAGAATCAGCAAAAGAAATGCATTTGATGATGCAGTTGAAGGNNNNNTTAATTAAT

SEQ ID NO: 18174 - protein, 256 aa, Streptococcus agalactiae
  VARIANT 252, 253: Xaa = Any Amino Acid
MNVPGFRKGHMPRTVFNQKFGEEALYENALNLVLPKAYEAAVAELGLDVVAQPKIDVVSMEKGQDWKLTAEVVTKPEVKLGDYKDLSVEVDASKEVSDEEVDAKVERERNNLAELTVKDGEAAQGDTVVIDFVGSVDGVEFDGGKGDNFSLELGSGQFIPGFEEQLVGSKAGQTVDVNVTFPEDYQAEDLAGKDAKFVTTIHEVKTKEVPALDDELAKDIDEEVETLDELKAKYRKELESAKEMHLMMQLKXXLIN

SEQ ID NO: 18175 - protein, 1065 aa, Streptococcus agalactiae
TGCAAAGGCTTACGAAGCAGCTGTTGCAGAACTTGGTTTAGACGTTGTTGCTCAACCAAAAATTGATGTTGTATCAATGGAAAAAGGTCAAGATTGGAAGTTGACAGCTGAAGTTGTTACAAAACCAGAAGTTAAACTTGGTGATTACAAAGACCTTTCAGTAGAAGTTGATGCTTCAAAAGAAGTTTCAGATGAAGAAGTTGATGCTAAAGTTGAACGTGAGCGTAACAACCTTGCAGAATTGACTGTTAAAGATGGTGAAGCAGCACAAGGTGATACAGTTGTTATTGACTTTGTAGGTTCAGTTGATGGTGTTGAATTTGATGGTGGTAAAGGAGATAACTTCTCACTTGAACTTGGTTCAGGTCAATTTATCCCAGGATTTGAAGAACAATTAGTAGGTTCTAAAGCTGGTCAAACTGTAGACGTTAATGTAACATTCCCAGAAGATTATCAAGCAGAAGATCTTGCTGGTAAAGATGCTAAATTTGTTACAACAATTCATGAAGTAAAAACTAAAGAAGTTCCAGCACTTGATGATGAACTTGCAAAAGATATTGATGAAGAAGTTGAAACACTTGATGAGTTGAAAGCAAAATATCGCAAAGAGCTAGAATCAGCAAAAGAAATTGCATTTGATGATGCAGTTGAAGGTGCAGCAATCGAATTAGCTGTTGCCAATGCAGAAATTGTTGAATTACCAGAAGAGATGGTCCATGATGAAGTACATCGTGCTATGAATGAGTTCATGGGTAATATGCAACGTCAAGGAATTTCACCAGAAATGTATTCCAATTAACAGGTACAACTGAAGAAGACCTTCATAAGCAATACCAAGCAGATGCTGACAAACGCGTTAAAACTAACCTTGTTATTGAAGCAATTGCAGCTGCAGAAGGCTTTGAAGCAACAGATGAAGAAATCGAAAAAGAAATCACAGATCTTGCTTCAGAATATAATATGGAAGCTGACCAAGTACGCGGTCTACTTTCAGCAGATATGCTTAAACATGATATTGCAATGAAAAAAGCGGTTGACGTTATCACTAGCTCAGCTACTGTAAAA

SEQ ID NO: 18176 - protein, 356 aa, Streptococcus agalactiae
VPKAYEAAVAELGLDVVAQPKIDVVSMEKGQDWKLTAEVVTKPEVKLGDYKDLSVEVDASKEVSDEEVDAKVERERNNLAELTVKDGEAAQGDTVVIDFVGSVDGVEFDGGKGDNFSLELGSGQFIPGFEEQLVGSKAGQTVDVNVTFPEDYQAEDLAGKDAKFVTTIHEVKTKEVPALDDELAKDIDEEVETLDELKAKYRKELESAKEIAFDDAVEGAAIELAVANAEIVELPEEMVHDEVHRAMNEFMGNMQRQGISPEMYFQLTGTTEEDLHKQYQADADKRVKTNLVIEAIAAAEGFEATDEEIEKEITDLASEYNMEADQVRGLLSADMLKHDIAMKKAVDVITSSATVK

SEQ ID NO: 18177 - protein, 573 aa, Streptococcus agalactiae
TTGGAATTAGAAGTATTTGCTGGGCAAGAAAAAAGTGAACTTTCGATGATTGAAGTTGCTCGCGCTATTTTAGAGCAACGTGGTCGTGATAACGAAATGTACTTCAGCGATTTGGTAAATGATATTCAAACCTACCTTGGAAAATCTGACTCAGCAATCCGTGAGTCATTGCCATTTTTCTATTCAGATTTGAATACAGACGGAAGTTTTATTCCACTTGGCGAAAACAAATGGGGACTTCGTTCATGGTATGCTATCGATGAAATTGACGAGGAAATCATCACTCTTGAAGAAGATGAAGATGGCGCTCCAAAACGTAAGAAGAAACGTGTCAATGCTTTCATGGATGGTGATGAAGATGCTATTGATTACAATGATGATGATCCAGAAGATGAAGATTTCACAGAAGAAACACCAAGTTTAGAATATGATGAAGAAAAACCTGACGATGAAAAATCAGAGGTAGAATCGTATGATTCTGAGATTAATGAAATCATTCCTGATGAAGATTTAGATGAGGATGTAGAAATCAACGAAGAAGACGATGAAGAGGAAGAAGAGGAAGAAGAGGTT

SEQ ID NO: 18178 - protein, 191 aa, Streptococcus agalactiae
MELEVFAGQEKSELSMIEVARAILEQRGRDNEMYFSDLVNDIQTYLGKSDSAIRESLPFFYSDLNTDGSFIPLGENKWGLRSWYAIDEIDEEIITLEEDEDGAPKRKKKRVNAFMDGDEDAIDYNDDDPEDEDFTEETPSLEYDEEKPDDEKSEVESYDSEINEIIPDEDLDEDVEINEEDDEEEEEEEEV

SEQ ID NO: 18179 - protein, 1599 aa, Streptococcus agalactiae
ATGACAAAGTATATTTTTGTTACAGGTGGTGTGGTCTCTTCTATTGGTAAGGGGATTGTTGCAGCAAGTCTTGGGCGCTTACTAAAAAACCGTGGGCTAAAGGTGACAATTCAAAAATTTGATCCATATATTAATATTGACCCAGGGACAATGAGCCCTTATCAACATGGAGAAGTTTATGTTACAGATGATGGTGCAGAAACTGACCTTGACCTTGGACACTACGAGCGTTTTATTGATATTAACTTAAACAAATATTCAAATGTTACAACGGGTAAGATTTATAGTGAAGTTCTTAAAAAAGAACGCCGTGGAGAATACCTTGGTGCAACTGTTCAAGTTATCCCACACGTTACAGATGCTTTGAAAGAAAAAATTAAACGTGCTGCGACAACTACAGATTCAGATGTTATTATTACTGAAGTTGGCGGTACTGTTGGAGATATTGAGAGCCTTCCGTTTTTAGAAGCACTTCGTCAAATGAAGGCAGATGTTGGTTCTGATAATGTTATGTACATTCATACAACATTATTACCATACCTAAAGGCTGCCGGCGAAATGAAAACAAAACCGACTCAACATTCTGTTAAAGAGTTACGTGGCTTAGGTATCCAACCTAATATGCTTGTTATCCGTACAGAGCAACCAGCAGGTCAAAGTATTAAGAATAAATTGGCACCATTTTGTGATGTTGCACCAGAGGCTGTTATAGAGTCCCTTGATGTTGACCATATTTATCAAATTCCACTTAATATGCAAGCTCAAAATATGGATCAAATTGTTTGTGATCACTTGAAGCTTGAGACACCTGCTGCTGATATGACAGAATGGTCAGCAATGGTTGATAAAGTAATGAACCTTGAGAAAAAAGTTAAAATTGCATTGGTTGGTAAATATGTTGAATTACCTGATGCCTACCTTTCAGTTGTGGAAGCCCTTAAGCACTCAGGGTACGTCAACGATGTTGCTATTGATCTAAAATGGGTAAATGCTGCTGAAGTGACAGAAGATAATATTAAAGAACTTGTCGGAGATGCAGATGGTATTATCGTTCCTGGTGGATTTGGCCAAAGAGGTAGTGAGGGTAAAATTGAAGCAATTCGCTATGCACGTGAAAATGATGTTCCAATGCTTGGTGTTTGTCTCGGAATGCAGCTAACTTGTGTCGAATTTGCGCGTAATGTTTTAAAACTTCATGGAGCTAATTCAGCAGAGCTTGACTAAAACACCGTTCCCAATCATTGATATTATGCGTGATCAAATCGATATTGAAGATATGGGTGGTACTCTTCGCCTTGGTCTATATCCATGTAAATTGAAAGCAGGTTCAAGAGCTGCGGCAGCTTATAATAATCAAGAAGTTGTCCAACGTCGTCACGTCACCGTTATGAATTTAATACAAAATTCCGTGAACAATTTGAGGCTGCTGGATTTGTCTTCTCAGGGGTATCACCGGATAATCGTTTGATGGAAGTTGTTGAGTTACCAGAGAAAAAATTCTTTGTTGCGGCACAATACCATCCAGAATTACAATCACGTCCTAACCATGCTGAAGAGCTTTACACAGCTTTTGTAACAGCAGCAGTTGAAAATATGAAA

SEQ ID NO: 18180 - protein, 534 aa, Streptococcus agalactiae
  VARIANT 408, 461: Xaa = Any Amino Acid
MTKYIFVTGGVVSSIGKGIVAASLGRLLKNRGLKVTIQKFDPYINIDPGTMSPYQHGEVYVTDDGAETDLDLGHYERFIDINLNKYSNVTTGKIYSEVLKKERRGEYLGATVQVIPHVTDALKEKIKRAATTTDSDVIITEVGGTVGDIESLPFLEALRQMKADVGSDNVMYIHTTLLPYLKAAGEMKTKPTQHSVKELRGLGIQPNMLVIRTEQPAGQSIKNKLAPFCDVAPEAVIESLDVDHIYQIPLNMQAQNMDQIVCDHLKLETPAADMTEWSAMVDKVMNLEKKVKIALVGKYVELPDAYLSVVEALKHSGYVNDVAIDLKWVNAAEVTEDNIKELVGDADGIIVPGGFGQRGSEGKIEAIRYARENDVPMLGVCLGMQLTCVEFARNVLKLHGANSAELDXKTPFPIIDIMRDQIDIEDMGGTLRLGLYPCKLKAGSRAAAAYNNQEVVQRRHXHRYEFNTKFREQFEAAGFVFSGVSPDNRLMEVVELPEKKFFVAAQYHPELQSRPNHAEELYTAFVTAAVENMK

SEQ ID NO: 18181 - protein, 924 aa, Streptococcus agalactiae
ATGAAAAAGATTCGATTATCAAAGTTTATTAAAATGATTGTTGTTATTTTGTTTTTAATTAGTGTAGCAGCTAGTTTTTATTTTTTCCACGTTGCCCAAGTTCGAGATGATAAATCCTTTATTTCAAATGGTCAACGTAAGCCTGGAAACTCTTTATATGCTTATGATAAATCCTTTGATAAGCTATTAAAGCAAAAAATAGAAATGACAAACCAAAATATAAAGCAAGTTGCTTGGTATGTTCCTGCTGCTAAGAAAACTCATAAGACAGCTGTTGTCGTTCATGGTTTTGCGAATAGCAAAGAGAATATGAAGGCATATGGTTGGCTGTTTCATAAGTTAGGATACAATGTTCTTATGCCTGACAACATTGCACATGGTGAAAGTCATGGGCAGTTGATAGGCTATGGCTGGAACGACCGCGAGAACATTATCAAATGGACAGAAATGATAGTTGATAAGAATTCATCAAGCCAAATTACTTTATTTGGTGTTTCAATGGGTGGAGCAACAGTCATGATGGCTAGTGGTGAAAAATTACCTAGTCAGGTTGTTAATATCATTGAAGATTGCGGTTATTCTGGTGTTTGGGATGAATTAAAATTTCAGGCTAAAGAGATGTATGGTTTACCAGCCTTCCCACTCTTATATGAAGTTTCAACAATTTCTAAAATCAGAGCAGGTTTTTCGTATGGACAAGCAAGTAGTGTCGAACAATTGAAAAAGAATAATTTACCAGCCCTCTTTATTCATGGTGATAAGGATAATTTTGTTCCAACAAGTATGGTTTATGACAACTATAAAGCTACAGCAGGTAAGAAAGAGCTTTATATTGTAAAAGGGGCAAAACATGCGAAATCTTTTGAAACAGAGCCAGAAAAATATGAGAAACGTATCTCTAGTTTTTTGAAAAAATATGAAAAA

SEQ ID NO: 18182 - protein, 308 aa, Streptococcus agalactiae
MKKIRLSKFIKMIVVILFLISVAASFYFFHVAQVRDDKSFISNGQRKPGNSLYAYDKSFDKLLKQKIEMTNQNIKQVAWYVPAAKKTHKTAVVVHGFANSKENMKAYGWLFHKLGYNVLMPDNIAHGESHGQLIGYGWNDRENIIKWTEMIVDKNSSSQITLFGVSMGGATVMMASGEKLPSQVVNIIEDCGYSGVWDELKFQAKEMYGLPAFPLLYEVSTISKIRAGFSYGQASSVEQLKKNNLPALFIHGDKDNFVPTSMVYDNYKATAGKKELYIVKGAKHAKSFETEPEKYEKRISSFLKKYEK

SEQ ID NO: 18183 - protein, 137 aa, Streptococcus agalactiae
ATGCAAAATATTACTGATCAGGCTGTTATTTTAGAAGAAGGGGAACGGATTGTTCAGGCTGTTTTTGCCCCATTCTTATTGGCAGATGACGATCAGGCTACAGGAATGCGTACAGGTGGTTTTGGTAGTACTGAAAA

SEQ ID NO: 18184 - protein, 46 aa, Streptococcus agalactiae; identical to SEQ ID NO: 8992

SEQ ID NO: 18185 - protein, 1362 aa, Streptococcus agalactiae
GTGGCTAAGAAAAAATCAGTCTTCACCTGTCAAGAGTGTGGTTACCAATCACCTAAGTATTTGGGACGTTGTCCAAATTGCTCAGCCTGGTCTTCATTTGTAGAAGAGGTTGAAGTTCAAGAAGTTAAAAATGCACGAGTTAGTTTGAACGGTGAAAAGTCCCGACCGACGAAGTTAAAAGATGTTTCCTCAATTAACTATTCTAGAACTAAGACTGATATGGATGAATTTAACCGTGTTCTAGGAGGCGGTGTTGTACCAGGAAGTTTGGTTCTGATTGGAGGAGACCCTGGGATAGGTAAATCTACTTTATTACTACAAGTATCAACTCAGCTAGCTAATAAAGGTACAGTATTATATGTCTCAGGTGAGGAATCTGCAGAACAGATTAAGTTACGAAGTGAGCGTCTAGGCGATATCGATAATGAATTTTACCTTTATGCCGAGACTAATATGCAAAGTATTCGGTCGGAGATTGAGAAGATTAAACCAGATTTTCTTATTATTGATTCTATACAAACTATTATGAGTCCCGAAGTATCAAGTGTCCAAGGCTCTGTTAGCCAAGTTCGCGAAGTGACCGCTGAGTTGATGCAGTTAGCTAAAACTAATAATATTGCTACTTTTATTGTAGGTCATGTGACTAAGGAGGGAACATTAGCAGGCCCTCGAATGCTAGAACATATGGTGGATACGGTTCTTTATTTTGAAGGGGAGCGTCATCACACGTTCCGTATTTTACGGGCAGTCAAAAACCGTTTTGGTTCGACCAATGAAATAGGTATCTTTGAAATGCAGTCGGGTGGTCTAGTTGAAGTTTTGAATCCAAGTCAAGTTTTTCTTGAAGAACGTTTAGACGGTGCAACAGGATCTGCTATTGTTGTTACTATGGAAGGAACAAGGCCTATTTTAGCAGAGGTTCAAGCTTTAGTGACTCCAACTGTTTTTGGAAATGCTAAGCGCACAACCACAGGTCTTGACTTTAATCGTGTCAGTCTTATTATGGCAGTTCTAGAAAAACGTTGTGGTTTATTGCTTCAAAATCAAGATGCCTATTTAAAATCAGCGGGTGGTGTTAAATTGGATGAACCAGCAATTGATTTAGCTGTAGCTGTAGCTATTGCTTCCAGTTACAAAGAAAAACCCACAAATCCACAAGAATCATTTATTGGAGAAATTGGACTCACTGGTGAGATTCGTCGCGTGACACGTATTGAGCAACGTATTAATGAGGCTAGTAAATTGGGCTTTACTAAAATTTACGCACCAAAGAATTCTCTAGCTGGGATTGAAATACCTAAAGGCATTGATGTTATTGGTGTGACAACTGTTAGTCAGGTCTTAAAAGCAGTGTTTTCAACA

SEQ ID NO: 18186 - protein, 454 aa, Streptococcus agalactiae; identical to SEQ ID NO: 8994

SEQ ID NO: 18187 - protein, 495 aa, Streptococcus agalactiae
ATGACCACTTATTTTGATAACTTTTTAAAAACCAATCAAGCCTATGCTGACTTACATGGAACAGCTCATCTACCTATCAAGCCAAAGACAAAGGTTGCTATTGTAACCTGTATGGATTCTCGTTTACACGTTGCTCAAGCTCTAGGGCTAGCTTTAGGAGATGCTCATATTTTACGTAATGCTGGTGGACGAGTTACAGATGATGTTCTACGTTCTTTAGTTATTTCGCAACAACAATTAGGAACACGAGAAATCGTTGTTCTACACCATACAGATTGTGGAGCACAGACGTTTACTAACGAAGCTTTTGCTGCTCAATTACAGAGAGATTTGGGTGTTGATATGCATGGACATGATTTTCTTCCTTTTAATGATATTGAAGAAAGCGTTCGTGAAGATGTGGCAAAATTACATGCTTCTCCATTAATCCCAAATGATGTTGTTATTTCTGGTGCTATTTATGATGTAGATACTGGTCGTATGGTGGAAGTTAAA

SEQ ID NO: 18188 - protein, 165 aa, Streptococcus agalactiae
MTTYFDNFLKTNQAYADLHGTAHLPIKPKTKVAIVTCMDSRLHVAQALGLALGDAHILRNAGGRVTDDVLRSLVISQQQLGTREIVVLHHTDCGAQTFTNEAFAAQLQRDLGVDMHGHDFLPFNDIEESVREDVAKLHASPLIPNDVVISGAIYDVDTGRMVEVK

SEQ ID NO: 18189 - protein, 1206 aa, Streptococcus agalactiae; identical to SEQ ID NO: 13407

SEQ ID NO: 18190 - protein, 402 aa, Streptococcus agalactiae; identical to SEQ ID NO: 13408

SEQ ID NO: 18191 - protein, 1164 aa, Streptococcus agalactiae
ATGACAAAACACAAACACCTAACTCTCTCAGACCGTAATGACATCCAATCTGGTTTGGATAGAGGAGAAACCTTTAAAGCCATCGGGCTTAATCTACTGAAACACCCTACTACTATCGCAAAAGAAGTCAAACGAAATAAGCAACTAAGAGAATCAACCAAAGACTGCCTAGACTGTCCGCTACTAAGAAAAGCTCCCTATGTTTGTAATGGGTGTCCAAAGAGGAGGATCAACTGTGGTTACAAGAAGACCTTCTATCTTGCTAAGCAAGCTCAAAGAAACTATGAAAAACTTTTAGTTGAATCTAGAGAAGGAATCCCTTTGAACAAAGAGACCTTCTGGAAAATAGATAGAGTGCTTTCTAATGGGGTCAAGAAAGGCCAACGTATCTATCATATCCTCAAAACCAACGATCTAGAAGTGAGTTCTTCAACCGTTTATCGACACATCAAGAAAGGCTACCTATCCATCACACCAATCGACCTACCCAGAGCTGTGAAGTTCAAAAAAAGGCGAAAGAGCACACTCCCTCCTATTACAAAAGCGATTAAAGAAGGGCGACGGTACGAGGATTTTATAGAACACATGAACCAATCAGAGCTGAACTCCTGGCTTGAAATGGACACGGTTATTGGACGGATTGGTGGAAAGGTCCTTCTCACCTTCAATGTCGCCTTCTGTAACTTCATCTTTGCCAAACTGATGGATTCTAAGACAGCTATCGAAACTGCTAAACACATACAGGTCATTAAGAGGACACTCTATGATAACAAGAGAGACTTCTTCGAACTCTTTCCTGTTATCCTAACGGATAATGGTGGGGAATTCGCTAGAGTGGATGATATTGAGATAGATGTTTGTGGACAGTCTCAACTCTTCTTTTGTGACCCTAATCGGTCTGACCAGAAAGCAAGAATCGAGAAGAATCATACCCTCGTGAGAGACATACTGCCTAAGGGGACTTCCTTCGACAACTTGACTCAAGAGGACATTAATCTGGCACTATCTCATATCAACAGCGTTAAGAGACAGGCTCTAAATGGTAAAACGGCTTATGAGCTATTCTCTTTTACTTACGGAAAAGACATCGCAAGTATACTCGGTATTGAGGAAATTACTGCGGAAGACGTCTGCCAATCTCCCAAACTATTAAAAGACAAAATC

SEQ ID NO: 18192 - protein, 388 aa, Streptococcus agalactiae
MTKHKHLTLSDRNDIQSGLDRGETFKAIGLNLLKHPTTIAKEVKRNKQLRESTKDCLDCPLLRKAPYVCNGCPKRRINCGYKKTFYLAKQAQRNYEKLLVESREGIPLNKETFWKIDRVLSNGVKKGQRIYHILKTNDLEVSSSTVYRHIKKGYLSITPIDLPRAVKFKKRRKSTLPPITKAIKEGRRYEDFIEHMNQSELNSWLEMDTVIGRIGGKVLLTFNVAFCNFIFAKLMDSKTAIETAKHIQVIKRTLYDNKRDFFELFPVILTDNGGEFARVDDIEIDVCGQSQLFFCDPNRSDQKARIEKNHTLVRDILPKGTSFDNLTQEDINLALSHINSVKRQALNGKTAYELFSFTYGKDIASILGIEEITAEDVCQSPKLLKDKI

SEQ ID NO: 18193 - protein, 1434 aa, Streptococcus agalactiae
GTGCGTTATGCACCAAGTCCAACAGGATTGTTACACATCGGAAATGCGCGTACTGCGCTCTTTAACTACCTTTATGCTCGCCATCATGGTGGAGATTTTGTTATTCGTATTGAAGATACTGACCGAAAACGCCACGTCGAAGATGGTGAACGCTCTCAATTGGAGAACTTACGTTGGCTAGGTATGGACTGGGATGAAAGTCCTGAAACACATGAAAATTATCGTCAATCAGAACGCCTTGAGCTCTACCAACGTTATATTGATCAGTTGTTAGCAGAAGGTAAAGCCTACAAGTCCTATGTGACTGAGGAAGAATTAGCAGCAGAGCGTGAACGCCAAGAATTGGCAGGCGAAACACCTCGCTATATCAACGAATTTATCGGAATGTCAGAAACTGAAAAAGAAGCTTACATTGCAGAGCGTGAAGCAGCAGGCATCATTCCGACAGTACGCCTTGCTGTTAGTGAATCTGGGATTTATAAATGGACTGATATGGTAAAAGGTGACATTGAGTTTGAAGGCTCTAATATCGGCGGAGACTGGGTTATTCAGAAGAAAGATGGTTATCCAACTTACAATTTCGCAGTAGTCATTGATGATCATGACATGCAAATTTCGCATGTTATCCGTGGCGATGACCATATTGCAAATACGCCAAAACAATTAATGGTTTATGAAGCACTCGGTTGGGAAGCGCCACAATTTGGTCACATGACATTGATTATAAACTCAGAGACTGGTAAGAAGTTATCAAAACGCGACACCAATACTCTTCAATTTATCGAAGACTATCGTAAAAAAGGTTATATGTCGGAAGCTGTCTTTAATTTCATTGCCCTTCTTGGCTGGAATCCTGGTGGAGAAGAAGAAATCTTCTCACGCGAGCAATTAATTAATCTATTTGATGAAAATCGTCTTAGCAAATCACCAGCAGCATTCGATCAGAAGAAAATGGATTGGATGAGTAATGATTACCTAAAAAATGCTGATTTTGAGAGTGTTTTTGCACTTTGCAAACCATTCTTAGAAGAAGCTGGTCGACTTACAGACAAAGCTGAAAAATTAGTTGAGCTTTATAAACCTCAATTAAAATCGGCTGATGAGATTGTACCATTAACAGACCTTTTCTTTGCAGATTTTCCAGAATTAACAGAAGCCGAAAAAGAAGTAATGGCAGCAGAAACAGTCCCAACAGTCTTATCTGTTTTTAAGGAAAAGTTAGTATCGCTTTCTGACGAAGAATTCACTAGAGATACTATTTTCCCTCAAATTAAGGCTGTTCAAAAAGAAACAGGTATTAAAGGTAAGAACCTATTTATGCCTATTCGTATTGCGGTTTCTGGTGAAATGCATGGACCAGAGTTACCAGATACTATTTATTTATTAGGTAAAGAAAAATCAGTTCAACATATCGATAATATGTTAGCAAAATTA

SEQ ID NO: 18194 - protein, 478 aa, Streptococcus agalactiae
MRYAPSPTGLLHIGNARTALFNYLYARHHGGDFVIRIEDTDRKRHVEDGERSQLENLRWLGMDWDESPETHENYRQSERLELYQRYIDQLLAEGKAYKSYVTEEELAAERERQELAGETPRYINEFIGMSETEKEAYIAEREAAGIIPTVRLAVSESGIYKWTDMVKGDIEFEGSNIGGDWVIQKKDGYPTYNFAVVIDDHDMQISHVIRGDDHIANTPKQLMVYEALGWEAPQFGHMTLIINSETGKKLSKRDTNTLQFIEDYRKKGYMSEAVFNFIALLGWNPGGEEEIFSREQLINLFDENRLSKSPAAFDQKKMDWMSNDYLKNADFESVFALCKPFLEEAGRLTDKAEKLVELYKPQLKSADEIVPLTDLFFADFPELTEAEKEVMAAETVPTVLSVFKEKLVSLSDEEFTRDTIFPQIKAVQKETGIKGKNLFMPIRIAVSGEMHGPELPDTIYLLGKEKSVQHIDNMLAKL

SEQ ID NO: 18195 - protein, 966 aa, Streptococcus agalactiae
ATGAAATTTGGAAAAAAACTTGGCTTTCTAGCCTTATTGATGTCTATTGTCCTCATTCTCGGTGCATGTGGTAAAACTGGACTTGGAAATTCTTCTGAGAATTCTACAAAAAATGTAACCAAAAAATCTGCTAAAGATTTGAAACTAGGTGTATCTATTTCAACAACTAACAACCCCTACTTTGTTGCGATGAAAGACGGTATTGACAAATATGCGAGCAATAAAAAAATAAGCATTAAGGTAGCTGATGCTCAAGATGACGCCGCACGTCAAGCAGATGATGTCCAAAACTTTATTAGTCAAAACGTAGATGCTATTTTGATTAATCCCGTTGACTCAAAAGCTATTGTAACAGCTATTAAGTCTGCAAACAACGCTAATATTCCTGTTATTCTAATGGACCGTGGTAGTGAGGGAGGCAAAGTATTAACTACTGTCGCTTCAGATAACGTTGCTGCTGGTAAGATGGCTGCGGATTATGCTGTTAAAAAACTAGGCAAAAAAGCAAAAGCCTTTGAATTATCTGGAGTACCAGGTGCCTCTGCTACTGTAGACCGTGGTAAAGGATTTCATTCAGTTGCAAAATCTAAACTTGACATGCTTTCAAGCCAATCTGCCAATTTTGACCGCGCCAAAGCTTTGAATACTACACAAAATATGATTCAAGGACATAAAGATGTCCAAATTATTTTCGCGCAAAATGATGAAATGGCACTTGGGGCTGCACAGGCTGTCAAATCTGCTGACTTGCAAAATGTTCTTATCGTAGGAATTGATGGTCAGCCAGATGCCCATGATGCCATTAAAAAAGGAGATATTTCAGCCACTATTGCACAACAACCAGCTAAGATGGGAGAAATAGCAATTCAAGCAGCAATTGATCATTATAAAGGCAAAAAAGTAGAGAAAGAAACAATTTCTCCAATTTACCTTGTTACCAAAGACAATGTTGAAAAATACAATTGG

SEQ ID NO: 18196 - protein, 322 aa, Streptococcus agalactiae
MKFGKKLGFLALLMSIVLILGACGKTGLGNSSENSTKNVTKKSAKDLKLGVSISTTNNPYFVAMKDGIDKYASNKKISIKVADAQDDAARQADDVQNFISQNVDAILINPVDSKAIVTAIKSANNANIPVILMDRGSEGGKVLTTVASDNVAAGKMAADYAVKKLGKKAKAFELSGVPGASATVDRGKGFHSVAKSKLDMLSSQSANFDRAKALNTTQNMIQGHKDVQIIFAQNDEMALGAAQAVKSADLQNVLIVGIDGQPDAHDAIKKGDISATIAQQPAKMGEIAIQAAIDHYKGKKVEKETISPIYLVTKDNVEKYNW

SEQ ID NO: 18197 - protein, 927 aa, Streptococcus agalactiae
ATGAAATATATATCAGAGTTAACAACCCTGATTGCGTTAGCTGGTTTAATGGTTATTATCACACTCATTAATCCTAATTTCCTCACAACCAATAATCTACTCAATTTATTATTACAAGTAACTGCAAATGGTTTTATCGCTTTCGGGATGACCTTCGTTATTTTGACTGGCGGTATTGATTTATCAGTCGGGTCCATATTAGCCCTATCTAGTGCATTAACAGCTGGATTAATCGGCCACGGAGTACCCGTTGGTATTGCTATCGTTTTATCTGTTGCCTTAGGTGGCATCTTGGGAATGCTAAACGGACTCTTCATTTCTTACGGAAAATTAGCACCATTTATCGTTACACTGGCAACAATGACTATCTTTAGAGGAGCAACGCTAGTTTATTCAAACGGCAACCCAATTACCGCTGGCTTATCCGATAGTTTTCTATTCCAATTTTTGGGACAAGGCTATATTGTTGGTATCCCATTCCCAGTCATTCTCATGTTTCTTACTTTTATTATTTTGTATATTTTGTTACATAAAACAGCCTTCGGGAAATCTGTTTACGCTTTAGGAGGTAATGAAAAAGCAGCGTATATCTCGGGTATTAAGTTAAACAAAGTTAAAATTATCATCTACACTATCTCAGGTATCATGGCTTCCATTTCTGGGTTAATTATCACATCACGCCTTAGCTCAGCACAACCAACAGCTGGAGCAAGTTATGAGATGGATGCTATTGCCGCTGTTGTCTTAGGTGGAACGTCTTTATCTGGTGGGAAAGGACGTATCATTGGAACATTGATTGGTGCTCTTATTATTGGTGTCCTGAACAATGGATTAAACATCATTGGTGTCTCTGCATTTTGGCAACAAGTTGTGAAAGGTATCGTTATTTTAATGGCTGTTTTACTTGATCGCTTTAAAGTAGCAAAA

SEQ ID NO: 18198 - protein, 309 aa, Streptococcus agalactiae; identical to SEQ ID NO: 4566

SEQ ID NO: 18199 - protein, 1476 aa, Streptococcus agalactiae
ATGAAAATTGACATGAGGAATATCTCCAAATCCTTCGGTACTAATAAAGTTCTAGAGAAGATTGATTTGGAATTACAATCTGGTCAAATACACGCACTTATGGGTGAAAATGGTGCGGGTAAATCAACTTTAATGAACATTCTAACAGGACTTTTTCCAGCAAGTACAGGAACTATTTATATTGATGGCGAGGAACGAACTTTTTCAAACCCTCAAGAAGCAGAGGAATTTGGCATTAGTTTTATTCACCAAGAGATGAATACTTGGCCGGAAATGACTGTCTTGGAAAATCTCTTTCTTGGACGTGAAATCAAGACAACTTTTGGCTTACTCAATCAAAAATTAATGAGACAAAAAGCACTTGAAGCTTTTAAAAGATTAGGTGTGACTATTCCCCTAGACATCCCGATTGGTAACTTGTCTGTTGGACAACAACAAATGATTGAAATCGCCAAAAGTCTCCTAAGCCAACTCTCTATTTTGGTAATGGATGAACCGACTGCTGCTTTAACAGATCGTGAAACTGAAAATCTTTTCCGAGTTATCCGAAGTTTGAAACAAGAAGGAGTGGGCATTGTCTATATCTCCCATCGAATGGAGGAAATTTTTAAAATCACTGACTTCGTAACCGTCATGAGAGATGGTGTCATTGTAGATACAAAAGAAACATCACTCACAAATTCTGACGAATTGGTTAAAAAAATGGTTGGCCGAAAATTGGAAGATTACTATCCTGAAAAACATTCTGAAATTGGGCCTGTTGCTTTTGAAGTTAGTAACCTCTGTGGAGATAATTTCGAGGACGTTTCCTTTTATGTCCGTAAAGGCGAGATTCTTGGATTTTCTGGATTAATGGGAGCTGGGCGTACTGAAGTTATGCGAACTATCTTTGGAATTGATAAAAAGAAGTCTGGTAAGGTGAAAATTGATGACCAAGAAATCACTATTACTAGCCCAAGCCAAGCTATCAAGCAGGGCATTGGTTTTTTGACCGAAAATAGAAAAGATGAAGGTCTCATCCTAGACTTCAATATCAAGGACAATATGACTCTCCCTAGCACTAAAGATTTTAGCAAACATGGTTTCTTTGATGAAAAAACAAGCACAACATTTGTGCAACAATTGATTAATCGTCTCTACATTAAATCAGGTAGACCAGATTTAGAGGTTGGAAATCTTTCTGGAGGTAACCAACAAAAGGTCGTTCTCGCTAAATGGATTGGTATTGCTCCTAAAGTCTTAATTCTTGATGAGCCAACGCGTGGTGTTGATGTCGGAGCTAAACGAGAGATTTACCAATTAATGAATGAACTAGCAGACAGAGGTGTTCCAATTGTCATGGTATCATCAGACTTACCTGAAATTCTAGGTGTTAGTGACCGCATCATGGTAATGCACGAAGGTCGAATCAGTGGAGAACTCAGTCGAAAAGAAGCTGACCAAGAAAAAGTTATGCAACTAGCCACAGGAGGTAAG

SEQ ID NO: 18200 - protein, 492 aa, Streptococcus agalactiae
MKIDMRNISKSFGTNKVLEKIDLELQSGQIHALMGENGAGKSTLMNILTGLFPASTGTIYIDGEERTFSNPQEAEEFGISFIHQEMNTWPEMTVLENLFLGREIKTTFGLLNQKLMRQKALEAFKRLGVTIPLDIPIGNLSVGQQQMIEIAKSLLSQLSILVMDEPTAALTDRETENLFRVIRSLKQEGVGIVYISHRMEEIFKITDFVTVMRDGVIVDTKETSLTNSDELVKKMVGRKLEDYYPEKHSEIGPVAFEVSNLCGDNFEDVSFYVRKGEILGFSGLMGAGRTEVMRTIFGIDKKKSGKVKIDDQEITITSPSQAIKQGIGFLTENRKDEGLILDFNIKDNMTLPSTKDFSKHGFFDEKTSTTFVQQLINRLYIKSGRPDLEVGNLSGGNQQKVVLAKWIGIAPKVLILDEPTRGVDVGAKREIYQLMNELADRGVPIVMVSSDLPEILGVSDRIMVMHEGRISGELSRKEADQEKVMQLATGGK

SEQ ID NO: 18201 - protein, 396 aa, Streptococcus agalactiae
ATGAAAAAGACTGGCATATTAAATAGTCATCTCGCTAAATTAGCAGATGACCTTGGGCATACTGATCAAGTTTGTATTGGAGATCTGGGTCTACCTGTTCCAAATGGCATTCCAAAGATTGATTTATCTTTGACCTCTGGAGTACCTAGTTTCCAAGAGGTACTTGATATCTATTTAGAGAATATATTAGTTGAAAAAGTCATTTTAGCAGAAGAAATCAAGGAAGCAAATCCGGATCAATTATCAAGGTTATTAGCTAAACTTGATAACTCTGTTAGCATAGAGTACGTCAGTCACGATCATTTAAAACAAATGACCCAAGATGTCAAAGCAGTTATTCGTACAGGTGAAAATACACCGTATTCAAATATTATTCTACAATCTGGTGTTATCATC

SEQ ID NO: 18202 - protein, 132 aa, Streptococcus agalactiae
MKKTGILNSHLAKLADDLGHTDQVCIGDLGLPVPNGIPKIDLSLTSGVPSFQEVLDIYLENILVEKVILAEEIKEANPDQLSRLLAKLDNSVSIEYVSHDHLKQMTQDVKAVIRTGENTPYSNIILQSGVII

SEQ ID NO: 18203 - protein, 909 aa, Streptococcus agalactiae
ATGAGTAACATTGTCATTATCGGTAGTATTTCCATGGACTTAGTTATGGAAACCAATCGTATCGCCAAAGAGGGAGAAACCGTATTTGGCCAACGTTTTTCAATGGTTCCAGGAGGTAAAGGTGCTAATCAGGCTGTCGCTATTGGGCGTCTTAGCCAAGATCGAGATAATATTACTATTCTTGGTGCCATTGGCGAGGATTCTTTTGGTCCCATTCTTTTGGATAATTTAAACAAAAATCATGTTACTACGGATTTTGTGGGAACGATACCATCTTCTTCAGGTGTTGCCCAAATCACTCTTTATAATAATGATAATCGAATCATTTACTGTCCTGGAGCCAACGGAAAAGTTGATACTAAAAAATGGTCTCAGGAGTGGGCAATAATTAAAAAAGCTGATTTAGTTGTATTACAAAATGAAATTCCTCATCAAGCAAATATGAAAATTGCTAATTTTTGTAAAGAACATAGTATTAAATTACTCTATAATCCTGCGCCATCTAGAGAGACTGATATTGAGATGCTTGATAAGGTCGATTATTTCACACCAAATGAACACGAATGTCAAGAGCTGTTCCCAAACCAAAAACTAGAGGATATATTAGCCACATATCCTGAGAAACTAATTGTAACACTCGGCACAAAAGGAGCCATCTACTCTGATGGAAAAGAAAGCCATTTAATTCCTGCCTTAGAAACTAAAGCTGTTGATACAACTGGTGCAGGTGATACTTTTAACGGTGCATTCGGTTATGCTATCTCGAAAAAATTTAAGATTGCTAATGCCTTACGTTTTGCAACTCTAGCTGCTCACTTATCCGTGCAAAAATTTGGTGCACAGGGTGGCATGCCTACAATTAAAGAAATGGAGGACAACCAACATTATGAAAAAGACTGGCATATTAAA

SEQ ID NO: 18204 - protein, 303 aa, Streptococcus agalactiae
MSNIVIIGSISMDLVMETNRIAKEGETVFGQRFSMVPGGKGANQAVAIGRLSQDRDNITILGAIGEDSFGPILLDNLNKNHVTTDFVGTIPSSSGVAQITLYNNDNRIIYCPGANGKVDTKKWSQEWAIIKKADLVVLQNEIPHQANMKIANFCKEHSIKLLYNPAPSRETDIEMLDKVDYFTPNEHECQELFPNQKLEDILATYPEKLIVTLGTKGAIYSDGKESHLIPALETKAVDTTGAGDTFNGAFGYAISKKFKIANALRFATLAAHLSVQKFGAQGGMPTIKEMEDNQHYEKDWHIK

SEQ ID NO: 18205 - protein, 984 aa, Streptococcus agalactiae
ATGAGTACGATTAGACAAGTCGCCGAGAAAGCTGGCGTATCAACATCTACTGTCTCAAGGTATATATCCCAAAATGGTTACGTTAGTCAAAAAGCAAGTCAAAAAATCGAGCAAGCTATCCGCGAACTCCATTATGTTCCAAATTTCCTTGCACAATCTCTAAAAACCAAAAAAAATCAACTTGTTGGATTACTACTTCCCGATATTTCAAACCCTTTCTTTCCAAGACTTGCTAGAGGAGTTGAAGAATTTCTAAAAGAACAGGGTTATCGTGTCATGCTTGGCAACACAAATAACAAGAGCCATTTAGAAGAAGAGTACTTAAATGTGCTATTACAAAGTAATGCTGCAGGGATTATTACAACACACGATTTCACCAAAAATCATCCTGAAATAGATATTCCAGTTGTAGTTGTTGACCGCGTTAATCAAGAAACACAGTACGGCGTTTTCTCTGATAATAAAGAGGGAGGAAAATTAGCAGCTCAAGCTATTTGGACAGCAGGTGCTACCAATATATTACTCATTCGTGGTCCGCTAGATAAAGCTGATAACCTTAACCAAAGGTTTCAAGGAAGCCAAAATTACCTATTAAACAAAGGGGCTTGTTTTGCTATCGAAGATAGTGCCAGTTTTGATTTTGCAGAGATTCAAATTGAAGCGAAAACTTTACTTGACCACCATCCAGACATTGATAGCATTATCGCTCCATCTGATATACATGCTATTGCCTACCTACACGAGATTCTTAATCGAGGGAAGCGAATCCCTGAAGATGTACAAATTATTGGTTATGATGATATTTTAATGAGCCAATTTATCTACCCTTCGTTGTCAACTATTCACCAATCGTCATATATTATGGGACAAAAAGCAGCTGAATTAATTTTCAAAATTACTAATCAATTACCTATTACCAATAAGCGTATTAAATTACCCGTTCATTATGTCGAACGTGAAACCCTAAGGAGGAAAATAGATGAG

SEQ ID NO: 18206 - protein, 328 aa, Streptococcus agalactiae; identical to SEQ ID NO: 256

SEQ ID NO: 18207 - protein, 96 aa, Streptococcus agalactiae; identical to SEQ ID NO: 4575

SEQ ID NO: 18208 - protein, 32 aa, Streptococcus agalactiae; identical to SEQ ID NO: 4576

SEQ ID NO: 18209 - protein, 1086 aa, Streptococcus agalactiae
ATGTCACATGCTTGGAAAGAATTAACCTTTTATAAGAAAAAATACCTCCTGATTGAATTGCTAATCATTGTTATGATGTTCATGGTAGTTTTTTTATCAGGTTTAGCAAACGGTTTAGGTAGAGCTGTTAGTGCTGCTATTGAAAATAACCCAGCTCAAACCTATATTTTGAATGAAGGTGCTGAACAAGTGATTACATCATCTGTATTGACAACTAAAGATCAGACAGACTTAAACAGTTTGAATTTAAAAGATAGTACCACTTTAAATATCCAACGTTCGAGTTTAACTCGACAAGGACATGAAAAGAAAATTGATATTTCTTATTTTGCTATTGATAAAGATTCTTTTATGGCACCTACACTTTCTGAGGGAAAACAACTGACAAGTTACAAAAAAGCTATTATTTTAAATGATAGTTTAAAAGCTGAAGGGATAAAGTTAGGTGATAAGGTGATTGATAAGTCATCATCTATATCACTAACAGTCGTTGGATTTGTCCATAATAGTATGTATGGTCACGGACCTGTGGCATTTATTGATAAAGACATTTATACCGAAATTAATAAAAAGATTAATCCTCAATACCAGTTCTTACCTCAGGCATTAGTTATGAAAAATGATAAAAGTATATCTCATTTACCAACTCAATTAGAAGCTGTTAGTAAAAAAGATGTCATTCAACATATTCCTGGTTATAGTGCCGAACAATCCACTTTGAATATGATTTTATGGGTCCTTGTCGTAGCCTCAGCTGGTATTTTAGGTGTCTTTTTCTACATCATCACACTTCAAAAACGTCATGAATTTAGCGTCATGAAAGCTATTGGGACAAAAATGTCAGAGATTGCCCTATTTCAATTGAGTCAAGTCATCATATTGGCACTGTTTGGTATCATTGTTGGAGATGGATTGGCGATTGCTCTCTCTTATGTATTACCAGCTCAAATGCCATTTGTTATTAATTGGCAAAATATTATTCTAGTATCGTTTGTATTTTTAGTTATTGCAATGATTAGTAGTGCTTTGTCAATTGTAAAAGTTGCTAAAATCGACCCAGTCGAAGTTATTAATGGGGGAGGAGAA

SEQ ID NO: 18210 - protein, 362 aa, Streptococcus agalactiae; identical to SEQ ID NO: 4578

SEQ ID NO: 18211 - protein, 684 aa, Streptococcus agalactiae
ATGTCAGCAATCTTAGAATTAAAACACATCTCAAAACACTATCCAGATGGAGATGAGCTTTTATCAATATTAGATAATTTAGATTTATCAGTTTCTGCAGGTGAGTTTGTAGCTATACTGGGACCCTCAGGTTCAGGTAAAAGCACACTTTTATCCATTGCAGGGTTACTTCTTGGCGCAGATCAAGGTAGCTTGTATGTCAATCATGAGAACGTTACGGATTTGTCTCAAAGACAAAGAACACAATTGCGCCGTGAAGCACTAGGTTTTATATTTCAAAGTCATCAACTGCTTCCTTATTTAACAATCCAAGAACAGTTGCAACAAGAGGCTCGATTTGCAAAACACTATGATAAGAAAACAAGCTTGGAAGAAATTAATAAATTATTATCAGATTTAGGAATAGAGCAGTGTGCACATAAATACCCTAACCAATTATCGGGAGGACAAAAGCAACGCGCAGCAATTGCTAGAGCATTTATTAATCATCCTAAGGTTATCTTGGCAGATGAGCCGACAGCTAGCCTTGATGAAGAACGTGGGCGTCAAGTTACAGAACTTATTCGTCAGGAAGTTAAATCACATAATACTGCAGCTATTATGGTGACACACGATGAGCGCGTTCTAGATTTAGTAGATACCGTTTATCGTTTAAAGGACGGGAAATTAGTTAAAGAAAACTTC

SEQ ID NO: 18212 - protein, 228 aa, Streptococcus agalactiae; identical to SEQ ID NO: 4580

SEQ ID NO: 18213 - protein, 668 aa, Streptococcus agalactiae
ATGATTAAAATATTAGTTGTAGAGGATAACATTGTTCAACAAAAAATCATTACCACAAAATTAACACAAGAGGGCTACCAATTTATCACTGCTTCAAATGGACAAGAAGCTCTAAATTGTCTAGATACAGAAGAAGTACAATTGATTATAACTGATATCATGATGCCCATGATGGATGGTTATCAATTAATTCAAGAACTCAGGTCAGCTGCTTATAATGTCCCAATCATTGTTATGACAGCAAAATCACAAATGGAAGATATGACAAAAGGGTTTGGCCTTGGTCAGATGATTATATGGTTAAGCCTGTGCAGTTACAAGAATTAGCTTTACGTATTAAGGCACTCTTGAGGAGAGCTAATATTGTAGCTCAACATCAGCTAATTATTGGGAATACTTGTCTTAATGAAGATGAATTAAGCTTGAAATATTTTGAGCAAGAAATTGTATTTCCTCAGAAAGAATTTAGGGTTCTTTTCCACTTACTTAGCTATCCTAATAGGATTTTCACACGTTTAGAACTATTGGATAGTATTTGGGGAATGGATACTGATTTAGATGAGCGGGTGGTAGATGCTTGCATCAATAAAATTAGACGAAAAGTAGAACACTTACCAGATTTTAAGATTGAAACGGTGAGAGGGGTAGGGTATCGTGCAAAAAATGAC

SEQ ID NO: 18214 - protein, 223 aa, Streptococcus agalactiae
  VARIANT 96: Xaa = Any Amino Acid
MIKILVVEDNIVQQKIITTKLTQEGYQFITASNGQEALNCLDTEEVQLIITDIMMPMMDGYQLIQELRSAAYNVPIIVMTAKSQMEDMTKGFGLGXDDYMVKPVQLQELALRIKALLRRANIVAQHQLIIGNTCLNEDELSLKYFEQEIVFPQKEFRVLFHLLSYPNRIFTRLELLDSIWGMDTDLDERVVDACINKIRRKVEHLPDFKIETVRGVGYRAKND

SEQ ID NO: 18215 - protein, 1068 aa, Streptococcus agalactiae
ATGACTAAGCTAAGGCGATTTCGGTTTCCGTTAAGATTTTATTTCACATTAATGTTTGTGTTAACGATGCTTTTCTCAGTCCTAGCTTCTCTTTTACTAGTTGCAGCAATAGTTTTTACTTTTTTTCAAGGAGTCTTAACTACTCATGTATTACAAGTTAGCGCTCTCGCTGTTGTTTTTTTAAGCCTTGTGATAGCTAGTATTAGTATGTGGTACGGTTCTTATCATTTAACAAAACCAATTTTAGATATTAGCCATATTGTGTCCAATGTTGCAGACGGTGACTTTGAAGGGCATATTTATCGAAACAGTAATCGTCGTAAATCCTATGAGTATTATAATGAATTGGATGAGCTATCTGAAAGTATTAATCAGATGATTGTTTCTTTATCTCATATGGATTATATGCGAAAAGACTTTATCACTAATGTTTCTCATGAGCTAAAGACTCCGATTGCTGCAGTAGCTAATATTGTAGAACTATTACAAGATCCAGAATTAGATGAAGAAACACAAAGTGAGTTATTAGGTCTTGTTAAAACAGAGAGCCTAAGGTTAACAAGATTATGTGATACGATGTTGCAAATGTCGCGCGTGGATAATCAGGAGACTATTGGGGAGCTATCCTCTGTTCGTGTAGATGAACAAATTCGTCAAGCAATGATTAGTTTAACAGAACGTTGGCAAGCTAAAAGGATAAATTTTCAACTGGATTCAAAACCATATACTGTTTACTCAAACTCTGACTTGCTGATGCAAGTTTGGATAAACCTTTTAGATAATGCAATAAAATATTCCGATGATATTGTAGACTTAAGTGTACGAATGGAAGAAACTAATAATCATTATCTGAGAGTTATTATTTCTGATAAAGGTAGGGGAATTTCTCAATATGATGTTCAGCATATATTTGATAAATTTTACCAAGCGGATCAGTCGCATAATCAACAAGGAAATGGATTAGGACTAGCAATAGTTAAACGTATAATTGTTCTTTGTAAGGGACGTATTAGTGTCTCCAGTCAGTTGGAAATTGGAACAGAATTTTGTGTAGAACTACCCTTATCA

SEQ ID NO: 18216 - protein, 356 aa, Streptococcus agalactiae
MTKLRRFRFPLRFYFTLMFVLTMLFSVLASLLLVAAIVFTFFQGVLTTHVLQVSALAVVFLSLVIASISMWYGSYHLTKPILDISHIVSNVADGDFEGHIYRNSNRRKSYEYYNELDELSESINQMIVSLSHMDYMRKDFITNVSHELKTPIAAVANIVELLQDPELDEETQSELLGLVKTESLRLTRLCDTMLQMSRVDNQETIGELSSVRVDEQIRQAMISLTERWQAKRINFQLDSKPYTVYSNSDLLMQVWINLLDNAIKYSDDIVDLSVRMEETNNHYLRVIISDKGRGISQYDVQHIFDKFYQADQSHNQQGNGLGLAIVKRIIVLCKGRISVSSQLEIGTEFCVELPLS

SEQ ID NO: 18217 - protein, 1188 aa, Streptococcus agalactiae
ATGGGAAAAGAAAAATTAATTTTAGCTTATTCTGGTGGTTTAGATACCTCTGTTGCTATAGCTTGGTTAAAAAAAGATTATGACGTTATTGCTGTCTGTATGGATGTTGGCGAAGGTAAAGATCTTGATTTTATTCACGATAAGGCTTTAACAATAGGTGCCATAGAATCTTATATTTTAGATGTTAAAGATGAGTTCGCTGAGCATTTTGTTTTACCAGCTTTACAGGCACATGCGATGTATGAACAAAAATACCCGCTTGTTTCAGCGCTTAGTCGTCCAATTATTGCTCAAAAATTAGTTGAAATGGCACATCAAACAGGTGCGACCACAATTGCACATGGATGTACAGGTAAAGGAAATGACCAAGTGCGTTTTGAAGTTGCAATTGCAGCACTAGATCCTGAATTAAAAGTAATTGCCCCTGTTCGTGAGTGGAAGTGGCATCGTGAAGAGGAAATTACTTTTGCAAAAGCTAACGGCGTACCTATTCCAGCAGATTTAGATAACCCTTATTCTATAGACCAAAATTTATGGGGACGTGCCAATGAATGTGGTGTGCTTGAGAATCCTTGGAATCAAGCGCCAGAAGAAGCTTTTGGTATTACAAAATCACCAGAAGAAGCTCCTGATTGTGCAGAATATATTGATATTACGTTCCAAAATGGGAAGCCTATAGCTATAAACAATCAAGAAATGACACTATCAGATTTGATTTTATCGCTAAATGAAATTGCAGGAAAACATGGTATTGGACGCATTGATCATGTTGAAAATCGTTTAGTCGGTATCAAATCACGTGAAATTTATGAATGTCCTGCGGCAATGGTACTATTAGCTGCCCATAAAGAAATTGAAGATTTAACACTAGTCCGTGAAGTGTCTCATTTTAAACCTATCCTTGAAAATGAACTATCAAATCTTATTTATAATGCTTTATGGTTTAGTCCAGCTACAAAAGCTATCATTGCCTATGTCAAAGAAACACAAAAAGTGGTTAATGGTACTACAAAAGTTAAGTTATATAAAGGTTCTGCCCAAGTCGTTGCTCGCCACTCATCTAATTCATTATATGATGAGAACTTAGCAACCTATACAGCTGCTGATAGCTTTGATCAAGATGCAGCAGTTGGTTTTATCAAACTCTGGGGACTTCCAACCCAAGTTAATGCCCAAGTAAACAAAGGA

SEQ ID NO: 18218 - protein, 396 aa, Streptococcus agalactiae
MGKEKLILAYSGGLDTSVAIAWLKKDYDVIAVCMDVGEGKDLDFIHDKALTIGAIESYILDVKDEFAEHFVLPALQAHAMYEQKYPLVSALSRPIIAQKLVEMAHQTGATTIAHGCTGKGNDQVRFEVAIAALDPELKVIAPVREWKWHREEEITFAKANGVPIPADLDNPYSIDQNLWGRANECGVLENPWNQAPEEAFGITKSPEEAPDCAEYIDITFQNGKPIAINNQEMTLSDLILSLNEIAGKHGIGRIDHVENRLVGIKSREIYECPAAMVLLAAHKEIEDLTLVREVSHFKPILENELSNLIYNALWFSPATKAIIAYVKETQKVVNGTTKVKLYKGSAQVVARHSSNSLYDENLATYTAADSFDQDAAVGFIKLWGLPTQVNAQVNKG

SEQ ID NO: 18219 - protein, 1386 aa, Streptococcus agalactiae
ATGACAAAAAATCATAAGTTATGGGGTGGTCGTTTTGAAAGTAGTCTTGAAAAATGGGTTGAAGAGTTCGGTGCATCAATCAGTTTCGACCAAAAATTAGCTCCCTATGATATGAAGGCTTCTATGGCCCATGTCACAATGTTAGGCAAAACGGATATTATTAGTCAAGAAGAAGCAGGATTGATAAAAGATGGTTTAAAAATACTGCAAGATAAATACAGAGCAGGTCAATTGACTTTTAGCATATCAAATGAAGACATTCATATGAACATAGAGAGCTTATTAACCGCTGAAATTGGAGAAGTAGCAGGTAAGCTTCATACTGCACGTTCACGAAATGATCAAGTGGCTACAGATATGCACCTTTATTTGAAAGATAAATTGCAAGAAATGATGAAGAAATTGCTTCATTTACGAATAACCTTAGTTAATTTAGCAGAAAATCATATCTATACTGTTATGCCAGGGTATACACATTTACAACATGCTCAGCCGATTTCATTTGGACATCATCTAATGGCTTACTATAATATGTTTACGCGTGATACAGAGCGATTAGAGTTTAATATGAAACACACCAATCTATCACCATTAGGAGCTGCTGCTCTAGCAGGGACAACGTTTCCTATTGACCGCCATATGACAACTCGTTTATTAGATTTTGAAAAACCATATAGTAATTCGCTTGATGCTGTCTCAGATCGTGACTTTATCATAGAATTTTTATCCAATGCTAGCATTTTAATGATGCATTTATCACGTTTTTGTGAAGAAATCATTAATTGGTGCAGTTATGAATATCAATTCATCACATTATCAGATACTTTCTCTACAGGATCATCTATTATGCCTCAAAAGAAAAATCCTGATATGGCAGAATTAATTCGAGGGAAGACAGGCCGTGTTTATGGAAATTTATTTAGTTTACTAACTGTTATGAAATCATTGCCGTTAGCTTATAACAAAGATTTACAAGAAGATAAAGAAGGGATGTTTGATAGCGTAGAAACAGTCAGCATAGCTATTGAAATCATGGCTAATATGCTTGAGACAATGACTGTGAATGAGCACATAATGATGACCTCAACGGAGACTGATTTTTCAAATGCAACAGAATTAGCAGATTATTTAGCAAGTAAGGGGATACCTTTCAGAAAAGCACATGAAATTGTAGGTAAATTGGTTTTAGAATGCAGTAAAAATGGTTCTTATTTACAGGATATACCTTTAAAATATTATCAAGAAATTTCAGAGTTGATAGAAAACGATATCTATGAGATATTAACTGCAAAGACAGCAGTTAAACGAAGAAATTCATTAGGAGGAACGGGGTTTGACCAGGTTAAAAAACAGATCCTATTGGCACGTAAAGAATTGAAAGCGGAA

SEQ ID NO: 18220 - protein, 462 aa, Streptococcus agalactiae
MTKNHKLWGGRFESSLEKWVEEFGASISFDQKLAPYDMKASMAHVTMLGKTDIISQEEAGLIKDGLKILQDKYRAGQLTFSISNEDIHMNIESLLTAEIGEVAGKLHTARSRNDQVATDMHLYLKDKLQEMMKKLLHLRITLVNLAENHIYTVMPGYTHLQHAQPISFGHHLMAYYNMFTRDTERLEFNMKHTNLSPLGAAALAGTTFPIDRHMTTRLLDFEKPYSNSLDAVSDRDFIIEFLSNASILMMHLSRFCEEIINWCSYEYQFITLSDTFSTGSSIMPQKKNPDMAELIRGKTGRVYGNLFSLLTVMKSLPLAYNKDLQEDKEGMFDSVETVSIAIEIMANMLETMTVNEHIMMTSTETDFSNATELADYLASKGIPFRKAHEIVGKLVLECSKNGSYLQDIPLKYYQEISELIENDIYEILTAKTAVKRRNSLGGTGFDQVKKQILLARKELKAE

SEQ ID NO: 18221 - protein, 882 aa, Streptococcus agalactiae
ATGGCAATCGTTTCAGCAGAAAAATTCGTCCAAGCAGCTCGTGATAACGGCTATGCAGTAGGTGGATTTAACACAAACAACCTTGAGTGGACTCAAGCTATCTTGCGCGCAGCAGAAGCTAAAAAAGCTCCAGTACTTATCCAAACTTCAATGGGTGCGGCTAAATACATGGGTGGTTACAAACTTTGTAAACAACTTATTGAAACTTTGGTTGAATCAATGGGTATTACTGTACCAGTTGCTATCCACCTTGACCACGGTCATTACGATGATGCCCTTGAGTGTATTGAAGTAGGTTACACTTCAATTATGTTTGATGGTTCACACCTTCCAGTTGAAGAAAACCTTGAAAAAGCACGCGAAGTTGTTGCTAAAGCACATGCTAAAGGTATTTCAGTAGAAGCTGAAGTTGGTACTATCGGTGGTGAAGAAGATGGTATTGTCGGTAAAGGTGAATTAGCACCAATCGAAGACGCTAAAGCTATGGTTGAAACTGGTATTGACTTCTTGGCTGCAGGTATCGGTAACATTCATGGACCATACCCAGCAAACTGGGAAGGACTTGACCTTGATCACTTGAAGAAATTGACTGAAGCTGTTCCTGGTTTCCCAATGTGTTAACGGTGGTTAGGTATTCCTGATGATCAAATCCAAGAAGCTATCAAACTTGGTGTTGCTAAAGTTAACGTTAACACAGAATGTCAATTAGCTTTCTGTCAAGCAACTCGTGACTACGCTGTTGAATTCAACGCTAACGAAGCTGAATACATGAAGAAAAAACTCTTTGACCCACGTAAATTCTTGAAACCTGGTTTCGATGCAATTACAGAAGCAGTGAAGAACGTATTGACGTGTTGGTTCAGCAAACAAAGNNNNNTTAAT

SEQ ID NO: 18222 - protein, 295 aa, Streptococcus agalactiae
  VARIANT 292, 293, 294: Xaa = Any Amino Acid
MAIVSAEKFVQAARDNGYAVGGFNTNNLEWTQAILRAAEAKKAPVLIQTSMGAAKYMGGYKLCKQLIETLVESMGITVPVAIHLDHGHYDDALECIEVGYTSIMFDGSHLPVEENLEKAREVVAKAHAKGISVEAEVGTIGGEEDGIVGKGELAPIEDAKAMVETGIDFLAAGIGNIHGPYPANWEGLDLDHLKKLTEAVPGFPIVLHGGSGIPDDQIQEAIKLGVAKVNVNTECQLAFCQATRDYAVEFNANEAEYMKKKLFDPRKFLKPGFDAITEAVKNVLTCWFSKQXXXN

SEQ ID NO: 18223 - protein, 186 aa, Streptococcus agalactiae; identical to SEQ ID NO: 13447

SEQ ID NO: 18224 - protein, 62 aa, Streptococcus agalactiae; identical to SEQ ID NO: 13448

SEQ ID NO: 18225 - protein, 216 aa, Streptococcus agalactiae
ATGACTGTAAAAATCAATACAAGAGATGGTCAAATTGAACTCTCTGATGACGTTATTGCAACTGTCGTTGGAGGTTCAACAACGGAAATTTTTGGCGTTGTTGGTATGGCAAGTAAAAGTGCTATCAAAGATAACTTTCAAGCACTTTTGCGTAAGGAAAACTACGCAAAAGGTGTTGTTGTGAGGTCTAGTGAAGCGGGCATCGCAGTANNNNNT

SEQ ID NO: 18226 - protein, 72 aa, Streptococcus agalactiae
  VARIANT 71, 72: Xaa = Any Amino Acid
MTVKINTRDGQIELSDDVIATVVGGSTTEIFGVVGMASKSAIKDNFQALLRKENYAKGVVVRSSEAGIAVXX

SEQ ID NO: 18227 - protein, 1436 aa, Streptococcus agalactiae
ATGGGAGCACGTGGAAATTCAGGTGTAATTACATCCAATTATTCCGTGGTTTTGGTCAAAGTATCAAGGATAAAGAAGAATTAACGGGTCAAGATTTGGCACACGCTTTCCAGAATGGTGTTGAAGTAGCTTATAAAGCCGTTATGAAACCAGTTGAAGGAACTATCTTGACAGTATCACGCGGTGCAGCTACCGCTGCTCTAAAAAAAGCTGAAGAAACTGATGATGCAGTTGAAGTTATGCGCGCAACTCTCAAAGGTGCTAAGCGTGCTCTTGCTAAAACACCGGATATGCTACCTGTTCTTAAAGAGGTTGGTGTTGTTGATTCTGGTGGTCAAGGACTCGTCTTTATTTACGAAGGTTTCCTCTCAGCACTGACTGGGGAATATATCGCATCAGAAGATTTTAAAGCAACTCCCGCAACAATGACTGAAATGGTTAATGCAGAGCACCATAAAGCTGTAGTAGGCCACGTAGCCACAGAAGATATTAAATATGGCTATTGTACAGAAGTCATGGTTGGTTTAAAGCAAGGACCAACTTACGTTAAGGAATTTAACTACGAAGAATTTCAAGGTTATCTTAGCAATCTAGGGGATTCTTTACTAGTTGTTAATGATGATGAAATTGTCAAGGTTCATGTTCATACAGAAGATCCAGGTCTTGTTATGCAAGAAGGTTTGAAATATGGATCGCTTGTGAAGGTTAAAGTTGAAAACATGCGTAACCAACATGATGCCCAAATGCAAAAGGTTGAAGTTGAAGAAACTGTCAAAGAAACTAAAGAATATGGTATTATTGCTGTTGTAGCTGGTGACGGTCTAGCTGAGATTTTTAAATCACAAGGTGTTGATTATATCATCTCTGGCGGCCAGACTATGAACCCATCTACAGAAGATATTGTAAAAGCGATTGAAAAAGTAAACGCTAGAAATGTTATTATTTTACCAAACAATAAGAACATCTTCATGGCTGCACAGTCAGCTGCAGATGTCGTTGATATTCCAGCAGCAGTAGTAGAGACACGTACAGTTCCACAAGGATTTACTAGCTTACTTGCTTTTGATCCTGCTAAGTCTCTTGAAACTAATGTAGCTGATATGACAAATAGCCTCTCAGATGTCATTAGTGGTAGTGTGACTTTAGCTGTTCGTGATACAACGATAGATGGCCTTGAAATTCATGAAAACGACGTCCTTGGGATGGTTGATGGTAAAATTCTAGTATCTACACCAGATATGGAAAAAGCACTTAAAGACACTTTTGATAAAATGATTGATGAAGATAGTGAAATCGTGACAATCTATGTTGGTGAAGATGGTAAACAAGCATTAGCCGAGACCTTGTCGGAATATCTTGAGGAGACTTATGAAGATGTTGAAGTTGAGATCCACCAAGGAGATCAACCTGTATATCCATACCTCATGAGCGTTGAA

SEQ ID NO: 18228 - protein, 479 aa, Streptococcus agalactiae
MGARGNSGVITSQLFRGFGQSIKDKEELTGQDLAHAFQNGVEVAYKAVMKPVEGTILTVSRGAATAALKKAEETDDAVEVMRATLKGAKRALAKTPDMLPVLKEVGVVDSGGQGLVFIYEGFLSALTGEYIASEDFKATPATMTEMVNAEHHKAVVGHVATEDIKYGYCTEVMVGLKQGPTYVKEFNYEEFQGYLSNLGDSLLVVNDDEIVKVHVHTEDPGLVMQEGLKYGSLVKVKVENMRNQHDAQMQKVEVEETVKETKEYGIIAVVAGDGLAEIFKSQGVDYIISGGQTMNPSTEDIVKAIEKVNARNVIILPNNKNIFMAAQSAADVVDIPAAVVETRTVPQGFTSLLAFDPAKSLETNVADMTNSLSDVISGSVTLAVRDTTIDGLEIHENDVLGMVDGKILVSTPDMEKALKDTFDKMIDEDSEIVTIYVGEDGKQALAETLSEYLEETYEDVEVEIHQGDQPVYPYLMSVE

SEQ ID NO: 18229 - protein, 882 aa, Streptococcus agalactiae; identical to SEQ ID NO: 13453

SEQ ID NO: 18230 - protein, 294 aa, Streptococcus agalactiae; identical to SEQ ID NO: 274

SEQ ID NO: 18231 - protein, 114 aa, Streptococcus agalactiae; identical to SEQ ID NO: 4595

SEQ ID NO: 18232 - protein, 38 aa, Streptococcus agalactiae; identical to SEQ ID NO: 276

SEQ ID NO: 18233 - protein, 1020 aa, Streptococcus agalactiae
ATGTCCACTAATCATTCTACCAAAAAATCGTTATACTCACACCTTTCAGCCTCTGAACGCGGAGAAATCAGCGCCTATCTCAAGATGGGCAAAAAACCCTCTGAGATTGCTCATCTGCTTGGGCGTCATCGCTCAACCATCAGTCGTGAAATCAAACGAGGAAGTGTTTCTCAGGTTCAAGATAAGAACGGGAAACGAATCTACTCAACGGTTTATTTTCCAGATAGTGGTCAACGTGTTTATGAAACCAATCGTCGAAAAAGTGCCTATCATAAACTATCGTACTGCTCCCAGACCTTCTTCAAGGAACTTGAGAAAGCCCTGAAAACGAAACCTCGTTGTCACAGTGTCGATAGCTTTGTTCAAACTTACCAAGAAAAACCTCCACTGGAAGTTATCCCTTCCACCAAGACAGTGTATCGTTACATCAAAGACGGACTGTTGAGGGTTAAACCGATTGATTTACCTAAGATGGTGTGCATCCGAAAACGGGCTAAAGTAACGCCTAAGGCCACGAAGAAAATCTTAGGAAAATCCATTGAAGAACGTCCAGAAACTATTACCAATCGTTCTGAATTTGGACATTGGGAAATTGATCTCATGCTTGGCAAGAAGACCAAAGGGGAAGCTGTTGTCATGACCCTAGTAGAGCGTCAAACACGATTTGTCATCGCTGTAAAACTGGCTAATAAACAAGCAGAAACCATCAATAGGGCTGTTAAGAGCTTACTATCACAGTATCCTATTCGCTCTATCGCATCGGACAACGGCTCAGAGTTCAGTAGCTTGTCAGACTTAAAAGGTGTGGAAGTCTATTTTGCCCATCCTTATGCTTCTCATGAAAGAGGAACAAATGAAAATTTCAATGGTCTCTTGAGAGAGTTTCTCCCAAAAGGTGTCTCTCTTAACTCACTAACGACAGAAGAACTCAATCTCTACGTCTCTGCTATCAATGACAGACCTAGACGAATTCAAAAGTATAAAACCGCAAATATTTTGTTTGGGCTAGCCCAAACAGCT

SEQ ID NO: 18234 - protein, 340 aa, Streptococcus agalactiae
MSTNHSTKKSLYSHLSASERGEISAYLKMGKKPSEIAHLLGRHRSTISREIKRGSVSQVQDKNGKRIYSTVYFPDSGQRVYETNRRKSAYHKLSYCSQTFFKELEKALKTKPRCHSVDSFVQTYQEKPPLEVIPSTKTVYRYIKDGLLRVKPIDLPKMVCIRKRAKVTPKATKKILGKSIEERPETITNRSEFGHWEIDLMLGKKTKGEAVVMTLVERQTRFVIAVKLANKQAETINRAVKSLLSQYPIRSIASDNGSEFSSLSDLKGVEVYFAHPYASHERGTNENFNGLLREFLPKGVSLNSLTTEELNLYVSAINDRPRRIQKYKTANILFGLAQTA

SEQ ID NO: 18235 - protein, 216 aa, Streptococcus agalactiae
TTGTCCTTTCTTTTTGATGTTGAGGGCAATGAAAATACGCTTTTTGAAGTTTTCAAAATTCCGAAAACTAAAGATATTGTATTTGAAAAGTTTAATGAGATGATTAGTTGCTTCCAATTTTGCGTTGGAGTAGGTTTACTGAAGGACGTTGACGATATTCTCTTTGCTTTTGAGAATGATTTTAAAGATAGTCTGAAAAAGAGGATGAACTTGCTT

SEQ ID NO: 18236 - protein, 72 aa, Streptococcus agalactiae
MSFLFDVEGNENTLFEVFKIPKTKDIVFEKFNEMISCFQFCVGVGLLKDVDDILFAFENDFKDSLKKRMNLL

SEQ ID NO: 18237 - protein, 2444 aa, Streptococcus agalactiae
AGAGTGAGAGCTTGAGCAGGTGAGAAGAATAAAACATAATTCGGAAGCTATTTAGAAGATTTGGTTGCGAAATCTAAAGAAATCGTAAGAGAGTACGAAGGAAAACTTAATCAATCTAAAAATCTTCCAGAATTAAAGCAACTAGAAGAGGAAGCTCATTCGAAGTTGAAACAAGTTGTGGAGGATTTTAGAAAAAAATTTAAAACGTCAGAGCAAGTGACACCAAAAAAACGTGTCAAACGAGATTTAGCTGCTAATGAAAATAATCAACAAAAGATTGAGTTAACAGTTTCACCAGAGAATATCACTGTATATGAAGGTGAAGACGTGAAATTTACAGTCACAGCTAAAAGTGATTCGAAGACGACGTTGGACTTCAGTGATCTTTTAACAAAATATAATCCGTCTGTATCAGATAGAATTAGTACAAATTATAAGACTAACACGGATAATCATAAGATTGCCGAAATCACTATCAAGAATTTGAAGCTAAATGAAAGTCAAACAGTGACTCTAAAAGCTAAAGATGATTCTGGCAATGTAGTTGAAAAAACATTCACTATTACAGTGCAAAAGAAAGAGGAGAAACAAGTTCCTAAAACACCAGAGCAGAAAGATTCTAAAACGGAAGAAAAGGTTCCTCAAGAACCAAAATCAAATGACAAGAATCAATTACAAGAGTTGATTAAATCAGCTCAACAAGAACTGGAAAAGTTAGAAAAAGCAATAAAAGAATTAATGGAGCAACCAGAGATTCCATCCAATCCAGAGTATGGTATTCAAAAATCTATTTGGGAGTCACAAAAAGAGCCTATCCAGGAAGCCATAACAAGTTTTAAGAAGATTATTGGTGATTCATCTTCAAAATACTACACAGAGCACTATTTTAACAAATATAAATCTGATTTTATGAATTATCAACTTCATGCACAAATGGAGATGCTGACTAGAAAAGTGGTTCAGTATATGAACAAATATCCTGATAATGCAGAAATTAAAAAGATATTTGAGTCAGATATGAAGAGAACGAAAGAAGATAATTACGGAAGTTTAGAAAATGATGCTTTGAAAGGCTATTTTGAGAAATATTTCCTTACACCATTTAATAAAATTAAGCAGATTGTAGATGATTTGGATAAAAAAGTAGAACAAGATCAGCCAGCACCAATTCCGGAAAATTCAGAAATGGATCAGGCTAAGGAAAAGGCTAAGATTGCTGTATCGAAGTATATGAGTAAGGTTTTAGATGGAGTTCATCAACATCTGCAGAAGAAAAATCACAGTAAAATTGTTGATCTTTTTAAGGAACTTGAAGCGATTAAACAACAAACTATTTTTGATATTGACAATGCAAAGACTGAAGTAGAGATTGATAACTTAGTACACGATGCATTCTCAAAAATGAATGCTACTGTTGCTAAATTTCAAAAAGGTCTAGAGACAAATACGCCAGAAACTCCAGATACACCGAAGATTCCAGAGCTACCTCAAGCCCCAGATACACCGCAGGCTCCAGACACACCGCATGTTCCGGAATCACCAAAGGCCCCAGAAGCACCGCGTGTTCCGGAATCACCAAAGACTCCAGAAGCACCGCATGTTCCGGAATCACCAAAGGCCCCAGAAGCACCGCGTGTTCCGGAATCACCAAAGACTCCAGAAGCACCGCATGTTCCGGAATCACCAAAGACTCCAGAAGCACCAAAGATTCCGGAACCCCCTAAGACTCCAGACGTCCCTAAGCTTCCAGACGTCCCTAAGCTTCCAGATGCACCGAAGTTACCAGATGGGTTAAATAAAGTTGGACAAGCAGTATTTACATCAACTGATGGAAATACTAAGGTACGGTTGTATTTGATAAACCTACAGATGCTGATAAGTTACATCTCAAGGAAGTAACGACGAAAGAGTTGGCTGATAAAATTGCTCATAAAACAGGAGGAGGAACAGTTCGTGTGTTTGACTTATCTCTTTCTAAAGGAGGCAAGGAAACACATGTCAATGGAGAACGAACTGTTCGGCTCGCGCTTGGGCAGACTGGCTCAGATGTTCACGTCTATCACGTAAAGGAAAATGGCGACCTTGAGCGTATTCCTTCTAAAGTTGAAAATGGGCAAGTTGTTTTTAAAACGAACCACTTCAGTTTGTTTGCGATTAAGACACTTTCTAAGGATCAAAATGTTACTCCACCGAAGCAGACTAAACCTTCTACCCAAGGCAGTCAAGTAGAGATTGCAGAGAGTCAAACTGGAAAATTCCAGAGTAAAGCAGCTAATCATAAAGCACTGGCTACTGGAAATGAAACAGTGGCAAAAGGAAATCCTACATCAACAACGGAAAAGAAATTGCCATATACAGGAGTGGCATCTAATCTAGTTCTTGAAATTATGGGTCTCCTTGGTTTGATTGGAACTTCATTCATCGCAATGAAAAGAAGAAAATCA

SEQ ID NO: 18238 - protein, 817 aa, Streptococcus agalactiae
  VARIANT 11, 617: Xaa = Any Amino Acid
MSESLEQVEKXLKHNSEANLEDLVAKSKEIVREYEGKLNQSKNLPELKQLEEEAHSKLKQVVEDFRKKFKTSEQVTPKKRVKRDLAANENNQQKIELTVSPENITVYEGEDVKFTVTAKSDSKTTLDFSDLLTKYNPSVSDRISTNYKTNTDNHKIAEITIKNLKLNESQTVTLKAKDDSGNVVEKTFTITVQKKEEKQVPKTPEQKDSKTEEKVPQEPKSNDKNQLQELIKSAQQELEKLEKAIKELMEQPEIPSNPEYGIQKSIWESQKEPIQEAITSFKKIIGDSSSKYYTEHYFNKYKSDFMNYQLHAQMEMLTRKVVQYMNKYPDNAEIKKIFESDMKRTKEDNYGSLENDALKGYFEKYFLTPFNKIKQIVDDLDKKVEQDQPAPIPENSEMDQAKEKAKIAVSKYMSKVLDGVHQHLQKKNHSKIVDLFKELEAIKQQTIFDIDNAKTEVEIDNLVHDAFSKMNATVAKFQKGLETNTPETPDTPKIPELPQAPDTPQAPDTPHVPESPKAPEAPRVPESPKTPEAPHVPESPKAPEAPRVPESPKTPEAPHVPESPKTPEAPKIPEPPKTPDVPKLPDVPKLPDAPKLPDGLNKVGQAVFTSTDGNTKXTVVFDKPTDADKLHLKEVTTKELADKIAHKTGGGTVRVFDLSLSKGGKETHVNGERTVRLALGQTGSDVHVYHVKENGDLERIPSKVENGQVVFKTNHFSLFAIKTLSKDQNVTPPKQTKPSTQGSQVEIAESQTGKFQSKAANHKALATGNETVAKGNPTSTTEKKLPYTGVASNLVLEIMGLLGLIGTSFIAMKRRKS

SEQ ID NO: 18239 - protein, 96 aa, Streptococcus agalactiae
ATGGGGACAACCATTGTTTATGCAGTAATGTTGATGGTTGCTATCTTGATAACAGACGTTGTTATTAGTATCGTAGACCCACGTGTTCGCTTGCAG

SEQ ID NO: 18240 - protein, 32 aa, Streptococcus agalactiae
MGTTIVYAVMLMVAILITDVVISIVDPRVRLQ

SEQ ID NO: 18241 - protein, 441 aa, Streptococcus agalactiae
ATGGCAGATAAAAACAGAACATTTAAACTTGTAGGTGCAGGATCTTCTAGCACACAAGAAAAAATTGAAAAGCCTGCTCTTTCGTTTATGCAAGATGCGTGGCGTCGCTTGAAAAAAAACAAATTAGCAGTAGTTTCACTCTATTTATTAGCTCTTTTACTTACTTTTTCGTTAGCCTCAAATTTATTTGTAACTCAGAAGGATGCTAATGGGTTTGATTCGAAAAAAGTAACTACATATCGCAACTTACCACCTAAATTGAGTTCAAACCTTCCTTTTTGGAATGGTAGCATTAAGTACGCTGGAAATACAGAATCTACAGACGCTTATAAGTCTCAAAATGTCCCTGAAAAAGTTAAGTATGCTTTAGGTACAGATTCTCTAGGGAGAAGTGTTGCTAAGCGCATCATCGTAGGTATTCGGATTTCCCTNNNNNTTAAT

SEQ ID NO: 18242 - protein, 147 aa, Streptococcus agalactiae
  VARIANT 145, 146: Xaa = Any Amino Acid
MADKNRTFKLVGAGSSSTQEKIEKPALSFMQDAWRRLKKNKLAVVSLYLLALLLTFSLASNLFVTQKDANGFDSKKVTTYRNLPPKLSSNLPFWNGSIKYAGNTESTDAYKSQNVPEKVKYALGTDSLGRSVAKRIIVGIRISLXXN

SEQ ID NO: 18243 - protein, 849 aa, Streptococcus agalactiae
ATGAAAATTTTTGAGAAAGCTCCTGCCAAACTTAATTTAGGATTAGATATTAAAGGACGATGTGACGATGGTTATCATGAATTAGCTATGATTATGGTTAGTATTGATCTTAATGACTACGTTACCATTTCTGAGCTAAAGGAAGATTGTATTGTTATCGATTCTGATAGTAGCAAAATGCCTTTAAATAATGATAATGATGTGTTTAAAGCTGCAGATATAATCAAAAATCAATATGGTATTAATAAAGGTGTTCATATTAGATTAGAAAAATCCATTCCTGTCTGTGCAGGACTGGGGGGTGGTTCTACTGATGCTGCTGCTACAATAAGAGCTCTTAATCGATTATGGAATCTTCAAATGGACTATGACGAAATGGTTGCTATTGGTTTTAAAATTGGTAGTGATGTTCCTTATTGTCTTGGTGGGGGATGTTCGTTAGTATTAGGTAAAGGTGAAATTGTTAAACCCTTACCGACATTGAGACCATGTTGGATAGTTCTGGTTAAGCCGGATTTTGGTATTTCAACTAAATCCATTTTTAGAGATATTGATTGTAAGTCTATAAGTAGAGTTGATATTGATTTATTAAAGTCTGCTATTTTGTCATCAGATTATCAGTTAATGGTCAAATCTATGGGAAATTCACTCGAGGATATTACAATTACTAAAAATCCAGTTATAAGTACAATAAAAGAACGTATGTTAAATTCTGGAGCCGATGTTGCATTAATGACAGGAAGTGGACCAACTGTTTTTTCAATGTGTTCTACAGAGAAAAAAGCTGATCGTGTTTTTAATAGTATGAAAGGTTTTTGCAAAGAAGTTTATAAAGTTAGGTTGTTGAGA

SEQ ID NO: 18244 - protein, 283 aa, Streptococcus agalactiae; identical to SEQ ID NO: 324

SEQ ID NO: 18245 - protein, 441 aa, Streptococcus agalactiae; identical to SEQ ID NO: 9087

SEQ ID NO: 18246 - protein, 147 aa, Streptococcus agalactiae; identical to SEQ ID NO: 326

SEQ ID NO: 18247 - protein, 708 aa, Streptococcus agalactiae; identical to SEQ ID NO: 9089

SEQ ID NO: 18248 - protein, 236 aa, Streptococcus agalactiae; identical to SEQ ID NO: 328

SEQ ID NO: 18249 - protein, 810 aa, Streptococcus agalactiae; identical to SEQ ID NO: 9091

SEQ ID NO: 18250 - protein, 270 aa, Streptococcus agalactiae; identical to SEQ ID NO: 4648

SEQ ID NO: 18251 - protein, 1029 aa, Streptococcus agalactiae
ATGAAATTATCTAAACAATTATACAAATCACTCCCACTATTAACTGTCGTGCTATGCGTTGGGGCATTACAACAGAATGTTGAAGCTAAGGCTAAACATTATAAGACGACATCCCATGTTGAGACACAGTATGTAAGTACTTCTTCAAAAAAAATCTTACCGTTTACTCATAATAAGCAAATCAAGGTAGGTTCATTAGATAACTTAGGAAGAGCAACATATTCTCACATACAATTAAGGGATGCAGATGAGCCTAAGATAAAAAGAGAAAGACTGACGTATAATCCAACCGGTTGGCACAACTACAAATTTACTACTGAAAAGGGTAAAACAACTTGGCTTATGGACCGAGGTCACCTCGTTGGTTATCAATTTTCAGGAATGAACAATGTTCCTGAGAACCTAGTTACTATGACCAAATATCTAAATACAGGATTTAGCGAAAATAATCCTGATGGTATGTTATATTACGAAAATAGATTAGATAGTTGGTTGGCAAATCATAAAAATTTCTGGCTTGATTACAAAGTGACTCCAATATACGAAGGAAACAATTTAGTACCTAGCCGAGTTGAACTTCAGTATGTTGGAATTGATAAACAAGGAAAACTTCTAGAAATCAAATTAGGCGGCGGCAAAGAACAAGTTGATGAATACGGCGTCACAACTGTTACATTAGAAAATACGTCTCCTCTCGCAAAAATTGATTACAAAACTGGTATGCTAATCAAAGAAGATGGGAAACAGGCAGAAGAAGGTGAAGATCCAAATAGCGATGCTGATGAAAACGAAGCAGCTATTGAAAGTGCATCTGATATAGAAGAAAATACTAACACTAATACTTCTGAATCAGATACAAATAATGTAGCTCCCCAAAATAGAATCGTCTACGTTGCAAATAAGGGTCGTTCAAATACTTATTGGTATAGTTTAGAAAACATAAAAAATGCAAATACCGCTAATATCGTTCAAATGACTGAACAAGAAGCGTTAAATCAACACAAACATCACAGCACTACTGAAGCACAA

SEQ ID NO: 18252 - protein, 343 aa, Streptococcus agalactiae
MKLSKQLYKSLPLLTVVLCVGALQQNVEAKAKHYKTTSHVETQYVSTSSKKILPFTHNKQIKVGSLDNLGRATYSHIQLRDADEPKIKRERLTYNPTGWHNYKFTTEKGKTTWLMDRGHLVGYQFSGMNNVPENLVTMTKYLNTGFSENNPDGMLYYENRLDSWLANHKNFWLDYKVTPIYEGNNLVPSRVELQYVGIDKQGKLLEIKLGGGKEQVDEYGVTTVTLENTSPLAKIDYKTGMLIKEDGKQAEEGEDPNSDADENEAAIESASDIEENTNTNTSESDTNNVAPQNRIVYVANKGRSNTYWYSLENIKNANTANIVQMTEQEALNQHKHHSTTEAQ

SEQ ID NO: 18253 - protein, 471 aa, Streptococcus agalactiae
GTGTTAAAAGCTGCAGATATAATCAAAAATCAATATGGTATTAATAAAGGTGTTCATATTAGATTAGAAAAATCCATTCCTGTCTGTGCAGGACTGGGGGGTGGTTCTACTGATGCTGCTGCTACAATAAGAGCTCTTAATCGATTATGGAATCTTCAAATGGACTATGACGAAATGGTTGCTATTGGTTTTAAAATTGGTAGTGATGTTCCTTATTGTCTTGGTGGGGGATGTTCGTTAGTATTAGGTAAAGGTGAAATTGTTAAACCCTTACCGACATTGAGACCATGTTGGATAGTTCTGGTTAAGCCGGATTTTGGTATTTCAACTAAATCCATTTTTAGAGATATTGATTGTAAGTCTATAAGTAGAGTTGATATTGATTTATTAAAGTCTGCTATTTTGTCATCAGATTATCAGTTAATGGTCAAATCTATGGGAAATTCACTCGAGGATATTACCAATTTAACC

SEQ ID NO: 18254 - protein, 157 aa, Streptococcus agalactiae
MLKAADIIKNQYGINKGVHIRLEKSIPVCAGLGGGSTDAAATIRALNRLWNLQMDYDEMVAIGFKIGSDVPYCLGGGCSLVLGKGEIVKPLPTLRPCWIVLVKPDFGISTKSIFRDIDCKSISRVDIDLLKSAILSSDYQLMVKSMGNSLEDITNLT

SEQ ID NO: 18255 - protein, 1256 aa, Streptococcus agalactiae
ATGAATATTTTTGATGAACTCAAAGAACGTGGACTCGTTTTTCAGACAACTGACGAAGATGCTTTACGCAAAGCTCTTGAAGAAGGTTTTGTCTCTTACTATACTGGCTACGATCCTACGGCTGACAGCCTTCATCTTGGACATTTAGTTGCTATTTTAACCTCTCGTCGCTTACAACTTGCTGGTCACAAGCCGTATGCACTTGTGGGAGGCGCAACTGGACTTATTGGGGATCCTTCATTTAAAGATGTTGAGCGCAGTTTACAAACAAAGGAAACTGTAGTTAGTTGGGGTAATAAAATCCGCGGTCAATTATCTAATTTTCTAGAGTTTGAAACAGGTGATAACAAAGCCGTATTGGTAAATAATTATGATTGGTTCAGCAATATTAGTTTCATTGATTTCTTACGAGATGTTGGTAAATATTTTACTGTCAATTATATGATGAGTAAAGAATCTGTTAAAAAACGTATCGAAACAGGGATTTCCTATACTGAATTTGCTTATCAAATTATGCAAGGATATGACTTTTACGAATTAAATAAGAACTATAATGTCACTTTGCAAATTGGTGGTTCTGATCAATGGGGCAACATGACTGCTGGAACCGAACTTATTAGACGAAAATCAAATGGTGTATCTCATGTTATGACTGTTCCATTGATAACAGATTCTACAGGAAAAAAATTCGGAAAATCTGAAGGAAATGCTGTTTGGCTTGATGCTGACAAAACCTCTCCTTATGAAATGTACCAATTTTGGCTCAATGTTATGGATGCTGATGCCGTTCGCTTCCTTAAGATTTTTACATTCCTAAGCCTTAAAGAAATAGAAGATATACGTATTCAATTCGAGGAAGCACCTCACCAACGCTTAGCACAAAAAACACTAGCACGTGAAGTTGTAACTCTTGTTCATGGTGAAAAAGCTTATAAGGAGGCCGTTAATATCACGGAACAGCTATTTGCTGGCAATATAAAAGGATTGTCTGTTAAAGAGCTCAAACAAGGTTTACGTGGAGTACCAAATTATCACGTTCAGACGGAAGATAACCTCAATATCATAGACCTTCTAGTCACTTCAGGAGTTGTCAATTCTAAACGTCAAGCTCGAGAAGATGTCTCCAATGGAGCTATTTATATTAATGGAGATCGTATTCAAGATTTAGAATATACTATCTCAAAAATGATAAGCTTGAAAATGAAATTACAGTCATTCGTCGTGGAAAGAAAAAATACTTTGTATTAAACTTTAAA

SEQ ID NO: 18256 - protein, 419 aa, Streptococcus agalactiae
  VARIANT 395: Xaa = Any Amino Acid
MNIFDELKERGLVFQTTDEDALRKALEEGFVSYYTGYDPTADSLHLGHLVAILTSRRLQLAGHKPYALVGGATGLIGDPSFKDVERSLQTKETVVSWGNKIRGQLSNFLEFETGDNKAVLVNNYDWFSNISFIDFLRDVGKYFTVNYMMSKESVKKRIETGISYTEFAYQIMQGYDFYELNKNYNVTLQIGGSDQWGNMTAGTELIRRKSNGVSHVMTVPLITDSTGKKFGKSEGNAVWLDADKTSPYEMYQFWLNVMDADAVRFLKIFTFLSLKEIEDIRIQFEEAPHQRLAQKTLAREVVTLVHGEKAYKEAVNITEQLFAGNIKGLSVKELKQGLRGVPNYHVQTEDNLNIIDLLVTSGVVNSKRQAREDVSNGAIYINGDRIQDLEYTISXNDKLENEITVIRRGKKKYFVLNFK

SEQ ID NO: 18257 - protein, 2295 aa, Streptococcus agalactiae; identical to SEQ ID NO: 9097

SEQ ID NO: 18258 - protein, 765 aa, Streptococcus agalactiae; identical to SEQ ID NO: 9098

SEQ ID NO: 18259 - protein, 3573 aa, Streptococcus agalactiae
TTGGCAGGACATGAAGTTCAGTACGGAAAACACCGTACACGTCGTAGCTTTTCAAGAATTAAGGAAGTTCTTGATTTACCAAACTTAATTGAAATTCAAACTGATTCATTCCAAGATTTTCTTGATGCTGGCTTGAAAGAAGTATTTGAGGATGTACTTCCAATTTCAAACTTTACAGATACTATGGATCTTGAATTTGTTGGTTATGAATTAAAAGAACCTAAATATACTTTGGAAGAAGCTCGTATCCATGATGCTAGCTACTCAGCACCTATTTTTGTTACTTTCCGTTTAGTTAATAAAGAAACTGGTGAAATTAAAACTCAAGAAGTTTTCTTTGGTGATTTTCCAATTATGACTGAAATGGGTACTTTCATCATCAATGGTGGTGAACGTATCATTGTTTCACAATTAGTCCGTTCTCCTGGTGTTTACTTTAATGATAAGGTAGATAAAAATGGAAAAGTTGGTTATGGGTCAACTGTTATCCCTAACCGCGGAGCTTGGTTGGAACTTGAGACAGACGCAAAAGATATTGCTTATACACGTATTGACCGCACACGTAAAATTCCATTCACAACACTAGTCCGTGCACTTGGTTTCTCTGGAGACGATGAAATTGTTGACATCTTTGGTGACAGTGAACTTGTTCGCAATACTATTGAAAAAGACATTCATAAAAATCCAAGTGATTCTCGTACAGATGAAGCACTTAAAGAAATCTATGAACGTCTTCGTCCAGGTGAACCAAAAACTGCAGACAGCTCACGTAGTCTTTTAGTTGCACGTTTCTTTGATCCACGTCGTTATGACTTAGCGGCTGTTGGTCGTTATAAGATTAATAAAAAACTGAATCTTAAAACACGCCTATTGAACCAAACAATCGCTGAAAATTTAGTTGATGGTGAAACAGGAGAGATTCTTGTTGAAGCTGGAACCGTTATGACACGAGATGTCATTGATTCAATTGCAGAGCATATCGATGGAGACTTAAACAAGTTTGTCTACACACCAAATGATTATGCTGTAGTTACTGAACCAGTTATTCTTCAAAAATTCAAAGTTGTTGCTCCAACTGATCCAGACCGTGTTGTTACTATTGTTGGAAACTCAAATCCTGAAGATAAAGTTCGTGCCTTAACTCCTGCAGATATTTTAGCAGAGATGTCATACTTCTTAAACCTTGCAGAGGGTATCGGTAAGGTAGATGACATTGACCATTTAGGTAACCGTCGTATTCGTGCAGTTGGTGAATTACTTGCGAACCAATTCCGTATCGGACTTGCTCGTATGGAACGCAATGTCCGCGAACGTATGTCTGTACAAGACAATGAAGTCTTGACACCTCAACAAATCATTAACATTCGTCCAGTGACTGCCGCCGTTAAAGAATTCTTTGGTTCATCACAGCTGTCACAATTCATGGACCAACACAACCCTCTATCAGAATTGTCGCACAAACGCCGTCTCTCTGCCTTAGGACCTGGTGGTTTGACACGTGACCGTGCTGGATATGAAGTTCGTGACGTGCACTATACCCACTATGGGCGCATGTGTCCGATTGAAACACCTGAAGGTCCAAACATTGGTTTGATTAATAACTTATCTTCATTTGGACACCTCAATAAATATGGATTTATTCAAACACCATATCGTAAAGTAGATCGTTCTACTGGTGCGGTAACGAACGAAATTGTTTGGTTGACTGCTGATGAAGAAGATGAATTTACAGTTGCACAAGCCAACTCTAAGCTTAACGAAGACGGTACATTTGCAGAAGAAATCGTTATGGGTCGTCATCAAGGTAATAACCAAGAGTTTCCTTCAAGCATTGTTGACTTTGTTGACGTGTCACCTAAGCAAGTAGTTGCTGTCGCAACAGCATGTATTCCTTTCTTGGAAAATGATGACTCTAACCGTGCCTTGATGGGTGCCAACATGCAACGTCAGGCTGTGCCATTGATTGATCCAAAAGCACCATATGTTGGTACTGGTATGGAGTATCAAGCAGCCCACGATTCAGGTGCAGCTGTGATTGCTAAACATGATGGTCGTGTTATTTTTTCAGATGCTGAAAAAGTTGAAGTGCGTCGCGAAGATGGTTCTCTTGATGTTTATCATGTTCAAAAATTCCGCCGTTCAAACTCAGGTACTGCTTATAACCAACGTACCTTAGTTAAAGTTGGTGATCTCGTTGAAAAAGGTGATTTTATCGCCGACGGACCATCTATGGAAAATGGTGAAATGGCTCTTGGACAAAACCCAGTTGTTGCTTATATGACTTGGGAAGGTTATAACTTCGAGGATGCCGTTATCATGAGTGAGCGCCTTGTGAAAGAAGATGTCTATACATCTGTTCACTTGGAAGAATTCGAATCTGAAACGCGTGATACAAAGCTTGGGCCTGAAGAAATTACTCGTGAAATTCCAAATGTTGGTGAAGATTCACTACGTGATCTCGATGAAATGGGAATTATCCGCATTGGTGCTGAGGTAAAAGAAGGTGACATTCTTGTTGGTAAGGTAACACCTAAGGGTGAAAAGGACTTATCTGCTGAAGAACGTCTCTTGCATGCCATTTTTGGTGATAAATCACGTGAAGTTCGTGATACTTCACTACGTGTACCTCACGGTGGCGATGGAGTAGTTCGTGACGTTAAAATCTTTACTCGTGCAAATGGTGATGAATTGCAATCAGGTGTTAATATGCTTGTCCGCGTTTATATCGCTCAAAAACGTAAAATCAAAGTCGGTGATAAGATGGCCGGTCGTCACGGAAACAAAGGTGTCGTCTCACGTATTGTTCCTGTTGAAGATATGCCTTACTTACCAGATGGAACGCCAGTTGATATCATGTTGAACCCACTTGGGGTGCCATCACGTATGAATATCGGACAAGTTATGGAGCTTCATTTAGGTATGGCTGCTCGTAATTTAGGTATTCATATTGCAACGCCAGTCTTTGATGGGGCTTCTTCAGAAGACCTTTGGGAAACTGTTCAAGAAGCAGGTATGGATTCAGATGCTAAGACTGTTCTTTATGATGGTCGTACTGGTGAACCATTCGATAACCGTGTGTCAGTTGGTGTCATGTACATGATCAAACTTCACCACATGGTTGATGATAAACTTCATGCCCGTTCAGTAGGACCATACTCACTTGTTACTCAACAACCACTTGGAGGTAAAGCTCAATTTGGTGGACAACGTTTTGGTGAGATGGAGGTTTGGGCGCTTGAAGCTTATGGTGCTTCAAATGTTCTTCAAGAAATTTTAACATACAAATCTGATGATGTTACAGGACGTCTTAAAGCTTATGAAGCTATCACAAAAGGTAAGCCAATTCCAAAACCAGGTGTTCCAGAATCATTCCGTGTTCTTGTAAAAGAATTGCAATCACTTGGTCTTGATATGCGTGTCCTTGATGAAGATGACAACGAAGTTGAACTCCGTGATCTTGATGAAGGTGAAGATGATGATGTGATGCACGTTGATGACCTTGAAAAAGCACGTGTGAAACAAGAAGCTGAAGAAAAACAAGCTGAACAAGTATCTGAAGTCGTTCAAGAAGAT

SEQ ID NO: 18260 - protein, 1191 aa, Streptococcus agalactiae; identical to SEQ ID NO: 338

SEQ ID NO: 18261 - protein, 3678 aa, Streptococcus agalactiae
ATGATGATAAATCGAAGAAAGGTAAAACTAGTGGTTGACGTAAATCGTTTTAAAAGTATGCAAATCACATTAGCATCACCAAGTAAGGTCCGTTCATGGTCTTATGGTGAAGTTAAAAAACCTGAAACAATCAACTACCGCACATTGAAACCAGAACGTGAAGGACTTTTTGATGAAGTTATTTTTGGTCCAACAAAAGATTGGGAATGTGCGTGTGGAAAATACAAACGTATTCGTTACAAAGGAATCATTTGTGACCGTTGTGGCGTTGAAGTAACCCGTGCAAAAGTTCGTCGCGAACGTATGGGACATATCGAGTTAAAAGCACCAGTATCTCATATCTGGTATTTCAAAGGTATCCCATCGCGTATGGGGCTCACATTGGATATGAGTCCTCGTGCACTTGAAGAAGTTATTTATTTTGCGGCTTATGTTGTTATCGATCCAATGGACACACCATTAGAACCGAAGTCACTCCTTACTGAGCGTGAATACCGTGAAAAACTTCAAGAGTACGGTTACGGTTCGTTTGTTGCTAAAATGGGTGCTGAAGCCATTCAAGATCTTCTTAAACGCGTTGATTTAGATGCAGAAATCGCAGTTCTTAAAGAGGAGTTGAAATCAGCGACAGGTCAAAAACGTGTGAAAGCAGTTCGTCGTCTGGATGTGTTAGATGCCTTTAAAAAATCTGGAAATAAACCAGAATGGATGGTTCTTAACATTTTACCGGTTATCCCACCGGATCTTCGTCCGATGGTTCAATTAGATGGTGGTCGTTTTGCGGCATCAGACTTGAATGACCTTTACCGCCGTGTTATTAACCGTAACAATCGTTTGGCACGTTTGTTGGAATTAAATGCTCCTGGCATCATCGTTCAAAATGAAAAACGTATGTTACAAGAAGCTGTTGATGCGCTTATCGACAATGGTCGTCGTGGTCGTCCAATTACCGGACCAGGTAGTCGTCCTTTGAAATCATTAAGCCATATGCTTAAAGGTAAACAAGGTCGTTTCCGCCAAAACTTGCTTGGTAAACGTGTTGACTTCTCTGGACGTTCCGTTATTGCTGTTGGTCCAACACTCAAAATGTACCAATGTGGTGTACCACGTGAAATGGCTATTGAGCTCTTCAAACCTTTTGTAATGCGTGAAATCGTTGCTCGTGACCTCGCAGGGAACGTTAAAGCAGCTAAACGTATGGTTGAACGTGGGGACGAGCGTATTTGGGACATCTTAGAAGAAGTTATTAAAGAGCACCCAGTACTTCTAAACCGTGCACCTACTCTTCACAGATTAGGTATCCAAGCGTTTGAACCTGTCCTTATTGATGGTAAGGCGCTTCGTCTTCACCCACTTGTATGTGAGGCCTACAATGCTGACTTTGATGGAGACCAAATGGCCATCCACGTTCCATTGTCTGAAGAAGCCCAAGCAGAAGCTCGTCTTTTGATGCTTGCTGCAGAGCACATCCTTAACCCTAAAGATGGTAAGCCAGTCGTAACACCATCTCAGGACATGGTTTTAGGAAATTACTACCTGACTATGGAAGATGCTGGTCGTGAAGGTGAAGGCATGATTTTCAAAGATCATGACGAAGCAGTTATGGCATATCAAAATGGTTATGTTCATTTACATACACGTGTTGGTATCGCTGTTGATTCAATGCCGAATAAGCCTTGGACAGAAGAGCAAAAACATAAAATCATGGTTACAACAGTTGGTAAGATTCTCTTCAACGATATCATGCCTGAAGATTTACCGTACTTAATTGAACCTAATAATGCAAACTTGACAGAAAAAACTCCAGATAAATACTTCTTAGAGCCAGGTCAGGATATTCAAGCAGTTATTGATAACTTAGAGATTAATATTCCCTTTAAGAAGAAAAATCTTGGTAATATTATCGCAGAAACTTTTAAACGTTTCCGTACAACAGAAACTTCTGCTTTCCTTGACCGTTTGAAGGACCTTGGATATTATCATTCAACACTTGCTGGTTTGACTGTGGGTATTGCTGATATCCCAGTTATTGACAATAAAGCTGAGATTATTGATGCAGCTCACCACAGAGTTGAAGATATCAATAAAGCCTTCCGTCGAGGTTTGATGACTGAAGAAGATCGTTATGTTGCTGTTACAACAACATGGCGTGAAGCTAAAGAAGCACTTGAAAAACGTCTTATTGAGACACAAGATCCAAAGAACCCTATCGTTATGATGATGGACTCAGGAGCTCGTGGTAACATCTCAAACTTCTCACAACTTGCCGGTATGCGTGGTTTGATGGCTGCTCCTAACGGACGTATCATGGAATTGCCAATCTTATCAAACTTCCGTGAAGGTCTTAGTGTTTTGGAAATGTTCTTCTCAACTCACGGTGCGCGTAAAGGTATGACTGATACGGCCCTTAAGACAGCCGACTCAGGTTACCTTACTCGTCGTTTGGTTGACGTTGCCCAAGATGTTATTATTCGTGAAGATGACTGTGGAACAGACCGCGGTTTGACAATCACAGCAATTACAGATGGTAAAGAGGTTACTGAGACACTTGAAGAGCGTTTGATAGGACGTTATACTAAGAAGTCAATCAAACATCCTGAGACAGGTGAAATTCTCGTTGGTGCAGATACCTTAATTACTGAAGATATGGCTGCTAAAGTTGTTAAAGCGGGCGTTGAGGAAGTAACTATCCGATCAGTATTTACATGTAACACTCGCCATGGTGTTTGTCGTCACTGTTACGGTATTAACTTGGCAACAGGTGATGCTGTTGAGGTTGGTGAAGCAGTTGGTACTATTGCAGCTCAATCTATCGGTGAACCAGGGACACAGCTTACAATGCGTACCTTCCATACCGGTGGTGTTGCTTCAAATACTGATATTACACAAGGTCTCCCACGTATCCAAGAAATCTTTGAAGCACGTAACCCTAAAGGTGAGGCAGTTATTACTGAAGTTAAGGGTGAAGTCGTTGCAATTGAAGAAGACTCTTCAACACGTACTAAGAAAGTATTCGTTAAAGGTCAGACAGGTGAGGGAGAATACGTTGTTCCATTTACAGCACGTATGAAAGTTGAAGTTGGTGATGAAGTAGCTCGTGGTGCGGCCTTAACTGAAGGATCTATCCAACCAAAACGTCTTCTTGAAGTTCGTGATACTTTATCTGTTGAAACGTACCTACTTGCTGAAGTACAAAAAGTTTACCGTAGCCAAGGGGTAGAAATCGGAGATAAACACGTTGAGGTAATGGTTCGTCAAATGCTCCGTAAAGTTCGTGTCATGGATCCAGGAGATACAGATCTTCTTCCAGGTACACTTATGGATATTTCAGACTTTACAGATGCTAACAAAGATATTGTTATTTCTGGTGGAATCCCTGCGACAAGCCGTCCTGTCCTTATGGGTATTACTAAGGCTTCCCTTGAAACTAATTCATTCTTATCAGCTGCATCCTTCCAAGAAACAACACGTGTCCTTACAGATGCTGCTATCCGTGGTAAGAAAGATCACTTACTTGGTCTTAAAGAAAATGTTATTATCGGTAAAATCATTCCAGCGGGTACTGGTATGGCTCGTTACCGTAATATTGAACCACTTGCTGTTAATGAAGTTGAGATTATTGAAGGAACTCCTGTTGATGCAGAAGTTACGGAAGTATCAACACCTACAACAGAAGAT

SEQ ID NO: 18262 - protein, 1226 aa, Streptococcus agalactiae; identical to SEQ ID NO: 340

SEQ ID NO: 18263 - protein, 363 aa, Streptococcus agalactiae; identical to SEQ ID NO: 4665

SEQ ID NO: 18264 - protein, 121 aa, Streptococcus agalactiae; identical to SEQ ID NO: 346

SEQ ID NO: 18265 - protein, 968 aa, Streptococcus agalactiae
ATGGTTCAATCATTAGCAAAGCAAGTCTTCATCAGGCAGTAGAAGTAAATGCTCAAGATATTTATATCATTCCCAAAGGTGATTGTTATGAACTCTATATGCGTATTGATGATGAAAGGCGGTTTATTGATGTTTTTGAGTTTAATAGGATGGCTAGTCTTATTAGTCACTTTAAATTTGTGGCAGGCATGAACGTTGGAGAAAAAAGACGAAGTCAATTAGGTTCTTGTGACTATGAACTGTCAGAGGGAAGACTGGTTTCATTACGACTATCGAGTGTGGGAGATTATCGTGGTCAAGAATCTTTAGTTATTCGTATTTTGTATTCAGGTCATCAGGACTTAAAATATTGGTTTGATAATATAAAGCAAATGAAGGAAGTACTGGGTATAAGAGGGCTATATCTTTTTTCCGGCCCTGTGGGGAGTGGTAAAACAACTCTCATGTATCAATTAGCTTCAGAAGTATTTAAAAATAAGCAAATTATCACGATTGAAGATCCGGTAGAAATCAAGAATGACAAGATGTTACAACTCCAATTGAATGAGGATATTGGAATGACTTATGATGCTTTAATCAAACTGTCTTTACGGCATCGTCCAGATATTTTAATTATCGGAGAGATTAGAGATCAAGCGACGGCCCGTGCTGTTATTCGTGCAAGTTTAACGGGAGTGATGTTTTTTTCTACTATTCATGCTAAAAGTATTCCCGGAGTCTATGATAGGCTTATAGAATTAGGGGTTAACTATCAAGAGTTAGAAAATAGTCTAAAATTAATAGCATATCAACGTTTAATTGGAGGAGGAAGCCTAATTGACTTTGAGACAGGTAATTTTAAAAAACACTCATCAGACAAGTGGAATAGACAAGTGGATATCTTGGCTGAAGAAGGACATATCAGTAAGAAACAGGCACAAGTCGAAAAAATTATCCCTCAAGAAACAACGGAAAGTAGTCCAACTTTT

SEQ ID NO: 18266 - protein, 323 aa, Streptococcus agalactiae
  VARIANT 10: Xaa = Any Amino Acid
MVQSLAKQVXHQAVEVNAQDIYIIPKGDCYELYMRIDDERRFIDVFEFNRMASLISHFKFVAGMNVGEKRRSQLGSCDYELSEGRLVSLRLSSVGDYRGQESLVIRILYSGHQDLKYWFDNIKQMKEVLGIRGLYLFSGPVGSGKTTLMYQLASEVFKNKQIITIEDPVEIKNDKMLQLQLNEDIGMTYDALIKLSLRHRPDILIIGEIRDQATARAVIRASLTGVMFFSTIHAKSIPGVYDRLIELGVNYQELENSLKLIAYQRLIGGGSLIDFETGNFKKHSSDKWNRQVDILAEEGHISKKQAQVEKIIPQETTESSPTF

SEQ ID NO: 18267 - protein, 846 aa, Streptococcus agalactiae; identical to SEQ ID NO: 9107

SEQ ID NO: 18268 - protein, 282 aa, Streptococcus agalactiae; identical to SEQ ID NO: 350

SEQ ID NO: 18269 - protein, 453 aa, Streptococcus agalactiae
ATGAAAAATTTATTGTTAAAATGTAAGGATAAGAAGGTTAAAGCATTTACACTTTTAGAATGTTTGGTAGCATTGGTTACAATCACAGGAGCTTTACTAGTTTATCAAGGACTGACAAAATTGTTGGCTCAACAGATAGTAGTGATGTCTTCTTCCAGTCAGTCTGAATGGGTGTTATTAACTCAGCAACTAAATGCAGAATTTGAAGGCGCTCATCTGGAATATTTAAGACAGAACAAACTTTATTTACGTAAGCAAGATAAGATTGTAACCTTTGGCAAATCTAATAAAGATGATTTCCGTAAGACAGGTTATGATGGTCGAGGTTATCAACCAATGGTTTATGGGTTAGACAATTGTCAAATGAGTCAGACCAAAAGTATGGTAAAACTTGTTTTTTATTTTAAGGACGGGTTAAAAAGGACATTTTACTATGATTTTAAAGAAGAAACT

SEQ ID NO: 18270 - protein, 151 aa, Streptococcus agalactiae; identical to SEQ ID NO: 352

SEQ ID NO: 18271 - protein, 369 aa, Streptococcus agalactiae; identical to SEQ ID NO: 4677

SEQ ID NO: 18272 - protein, 123 aa, Streptococcus agalactiae; identical to SEQ ID NO: 354

SEQ ID NO: 18273 - protein, 972 aa, Streptococcus agalactiae
ATGAATTTTGAAAAAATTGAGACAGCCTATGAGCTGATTTTAGAAAATATCCAAACGATTGAGAACCAATTAAAAACTCATATTTATGATGCCTTAATTGAACAGAACTCTTATTACCTTGGTTCAAGTTGTGATTTAGATATGGTTGTGGTGAATAACCAAAAATTACGTCAACTTGACTTAAGTCAAGAAGAATGGCGTCGCACTTTCCAGTTCATTTTTATCAAATCTGCGCAAACAGAGCAATTACAAGCTAATCATCAGTTTACGCCAGATAGTATTGGTTTTATCTTGTTATTTCTTTTGGAAGAATTAACGAGTCAAGAGACAGTGGATGTCTTGGAAATTGGAAGTGGAACTGGGAATTTAGCTCAGACTCTCCTCAATAACAGCTCGAAAGAGTTAAATTATATGGGCATTGAAGTTGATGATCTTTTGATTGATCTATCAGCAAGCATTGCTGAAATTATAGGTTCTAGTGCCCAATTTATCCAAGAGGATGCTGTTAGACCACAAATTTTGAAAGAAAGCGATGTAATCATTAGTGATTTACCAGTTGGCTATTATCCTAATGATGGTATTGCTAAACGATATGCTGTATCAAGTTCTAAAGAGCACACCTATGCTCACCATCTATTGATGGAGCAATCTCTTAAATATTTGAAAAAAGATGGAATCGCTATATTTTTAGCACCCGAAAACCTTTTAACAAGTCCACAAAGTGATTTGCTGAAGGAGTGGTTAAAAGGATATGCAGATGTCATTGCCGTTTTAACTCTACCAGAAACTATTTTTGGAAGTCGTCAAAATGCGAAATCTATATTTGTTCTCAAGAAGCAAGCAGAACAAAAACCAGAAACCTTTGTATATCCGCTGACAGATTTGCAAAATCGTGAGAATATGGCAAACTTCATTGAAAATTTTCAAAAATGGAGCAGAGAAAATAGTCATTACTCAAAAAATATGATAAAA

SEQ ID NO: 18274 - protein, 324 aa, Streptococcus agalactiae; identical to SEQ ID NO: 356

SEQ ID NO: 18275 - protein, 1191 aa, Streptococcus agalactiae; identical to SEQ ID NO: 9121

SEQ ID NO: 18276 - protein, 397 aa, Streptococcus agalactiae; identical to SEQ ID NO: 358

SEQ ID NO: 18277 - protein, 204 aa, Streptococcus agalactiae; identical to SEQ ID NO: 9123

SEQ ID NO: 18278 - protein, 68 aa, Streptococcus agalactiae; identical to SEQ ID NO: 360

SEQ ID NO: 18279 - protein, 135 aa, Streptococcus agalactiae; identical to SEQ ID NO: 9125

SEQ ID NO: 18280 - protein, 45 aa, Streptococcus agalactiae; identical to SEQ ID NO: 362

SEQ ID NO: 18281 - protein, 594 aa, Streptococcus agalactiae
ATGATGATAAATCGAAGAAAGGTAAAACTAGTGGTTGACGTAAATCGTTTTAAAAGTATGCAAATCACATTAGCATCACCAAGTAAGGTCCGTTCATGGTCTTATGGTGAAGTTAAAAAACCTGAAACAATCAACTACCGCACATTGAAACCAGAACGTGAAGGACTTTTTGATGAAGTTATTTTTGGTCCAACAAAAGATTGGGAATGTGCGTGTGGAAAATACAAACGTATTCGTTACAAAGGAATCATTTGTGACCGTTGTGGCGTTGAAGTAACCCGTGCAAAAGTTCGTCGCGAACGTATGGGACATATCGAGTTAAAAGCACCAGTATCTCATATCTGGTATTTCAAAGGTATCCCATCGCGTATGGGGCTCACATTGGATATGAGTCCTCGTGCACTTGAAGAAGTTATTTATTTTGCGGCTTATGTTGTTATCGATCCAATGGACACACCATTAGAACCGAAGTCACTCCTTACTGAGCGTGAATACCGTGAAAAACTTCAAGAGTACGGTTACGGTTCGTTTGTTGCTAAAATGGGTGCTGAAGCCATTCAAGATCTTCTTGAAAGCGTTGATTTAGATNNNNNT

SEQ ID NO: 18282 - protein, 198 aa, Streptococcus agalactiae
  VARIANT 197, 198: Xaa = Any Amino Acid
MMINRRKVKLVVDVNRFKSMQITLASPSKVRSWSYGEVKKPETINYRTLKPEREGLFDEVIFGPTKDWECACGKYKRIRYKGIICDRCGVEVTRAKVRRERMGHIELKAPVSHIWYFKGIPSRMGLTLDMSPRALEEVIYFAAYVVIDPMDTPLEPKSLLTEREYREKLQEYGYGSFVAKMGAEAIQDLLESVDLDXX

SEQ ID NO: 18283 - protein, 513 aa, Streptococcus agalactiae
ATGTACCAATGTGGTGTACCACGTGAAATGGCTATTGAGCTCTTCAAACCTTTTGTAATGCGTGAAATCGTTGCTCGTGACCTCGCAGGGAACGTTAAAGCAGCTAAACGTATGGTTGAACGTGGGGACGAGCGTATTTGGGACATCTTAGAAGAAGTTATTAAAGAGCACCCAGTACTTCTAAACCGTGCACCTACTCTTCACAGATTAGGTATCCAAGCGTTTGAACCTGTCCTTATTGATGGTAAGGCGCTTCGTCTTCACCCACTTGTATGTGAGGCCTACAATGCTGACTTTGATGGAGACCAAATGGCCATCCACGTTCCATTGTCTGAAGAAGCCCAAGCAGAAGCTCGTCTTTTGATGCTTGCTGCAGAGCACATCCTTAACCCTAAAGATGGTAAGCCAGTCGTAACACCATCTCAGGACATGGTTTTAGGAAAATTACTACCTGACTATGGAAAGATGCTGGTCGTGAAGGTGAAGGGCCATGATTTTTTTCAAAGATTTTCA

SEQ ID NO: 18284 - protein, 171 aa, Streptococcus agalactiae
MYQCGVPREMAIELFKPFVMREIVARDLAGNVKAAKRMVERGDERIWDILEEVIKEHPVLLNRAPTLHRLGIQAFEPVLIDGKALRLHPLVCEAYNADFDGDQMAIHVPLSEEAQAEARLLMLAAEHILNPKDGKPVVTPSQDMVLGKLLPDYGKMLVVKVKGHDFFQRFS

SEQ ID NO: 18285 - protein, 531 aa, Streptococcus agalactiae
ATGGTTCCCATTTACATACACGGTGGTTGGGGTATCGCTGGTTGGAATTTCAATGGCCGAAAAATAAGCCCCTTTGGGAACAGGAAAGAAAAGCAAAAACATAAAATCATGGTTACAACAGGTTGGGTAAGATTCTCTTCAACCGATATCATGCCTGAAGATTTACCGTACTTAATTGAACCTAATAATGCAAACTTGACAGAAAAAACTCCAGATAAATACTTCTTAGAGCCAGGTCAGGATATTCAAGCAGTTATTGATAACTTAGAGATTAATATTCCCTTTAAGAAGAAAAATCTTGGTAATATTATCGCAGAAACTTTTAAACGTTTCCGTACAACAGAAACTTCTGCTTTCCTTGACCGTTTGAAGGACCTTGGATATTATCATTCAACACTTGCTGGTTTGACTGTGGGTATTGCTGATATCCCAGTTATTGACAATAAAGCTGAGATTATTGATGCAGCTCACCACAGAGTTGAAGATATCAATAAAGCCTTCCGTCGAGGTTTGATGACTGAAGAANNNNNT

SEQ ID NO: 18286 - protein, 177 aa, Streptococcus agalactiae
  VARIANT 176, 177: Xaa = Any Amino Acid
MVPIYIHGGWGIAGWNFNGRKISPFGNRKEKQKHKIMVTTGWVRFSSTDIMPEDLPYLIEPNNANLTEKTPDKYFLEPGQDIQAVIDNLEINIPFKKKNLGNIIAETFKRFRTTETSAFLDRLKDLGYYHSTLAGLTVGIADIPVIDNKAEIIDAAHHRVEDINKAFRRGLMTEEXX

SEQ ID NO: 18287 - protein, 213 aa, Streptococcus agalactiae
GTGGCTTATTTTCAAAGTAAGTCTAGTTTGTTGGCAACGTTTTGGAGTATAAAAGAAAAACGTTGGTGTGAAGAATGTGATGAGTACCTCCAACAGTATCATTCCTTAATGTTATTGAAAGAATGGCAAGAAATTCCTAAGGAAGAATCTATTGAGCGATTTGAAGTATTTAATAAGATAGCTGAGTTGCCATCGGCATGTTCTTTAAATTTG

SEQ ID NO: 18288 - protein, 71 aa, Streptococcus agalactiae
MAYFQSKSSLLATFWSIKEKRWCEECDEYLQQYHSLMLLKEWQEIPKEESIERFEVFNKIAELPSACSLNL

SEQ ID NO: 18289 - protein, 663 aa, Streptococcus agalactiae; identical to SEQ ID NO: 9129

SEQ ID NO: 18290 - protein, 221 aa, Streptococcus agalactiae; identical to SEQ ID NO: 366

SEQ ID NO: 18291 - protein, 768 aa, Streptococcus agalactiae
ATGAAAATTGGAATTATCGGCGTCGGAAAAATGGCCAGTGCAATTATTCAAGGCCTCAAACAAACCCAACATGACATTATCATATCCGGATCTTGCTTAGAGCGTTCAAAAGAAATTGCAGAAAGACTTGATGTTACTTACGCCGAATCTCATCAGTCATTAATCAATCAAGCTGATATTATCATGTTAGGTATTAAACCTCAACTATTTGAAAAGGTTCTTCTTCCACTTGATATCACAAAACCAATCATCTCAATGGCAGCAGGAATCTCCTTAGCGCGTTTAAGCCAATTAACTCGTTCTGATTTACCATTGATTCGTATTATGCCAAATATTAACGCACAAATACTTCAAAGTTGCACAGCTATTTGTTACAACAATCATGTATCAGATGAGTTACGACAATTAGCCAAAGAAATTACGGATAGTTTTGGAAGTAGCTTTGATATAGCAGAAACCAATTTTGATACCTTCACTGCTCTAGCAGGTTCTAGCCCTGCCTATATCTATCTATTTATAGAAGCCTTAGCTAAAGCAGGTGTAAAATATGGATTTCCAAAAGAACAAGCACTCTCTATTGTAGGACAGACTGTCTTAGCTTCTAGTCAAAACCTATTACAAGGACAAAATAGCACCTCTGACTTAATCGACAACATTTGTAGCCCAGGCGGAACTACTATTGCTGGCCTTTTAGACTTAGAAAAAAATGGTCTGACGCATAGTGTTATTTCTGCCATTGATGCTACTATTGAGAAAGCAAAAAAACTT

SEQ ID NO: 18292 - protein, 256 aa, Streptococcus agalactiae; identical to SEQ ID NO: 368

SEQ ID NO: 18293 - protein, 1065 aa, Streptococcus agalactiae
ATGTCAGATTTATTTAACAAAATTAAAACCGTAACTGAGCTTGATGGGATTGCTGGCTATGAACACAATATCCGCAACTTCCTTCGTCAAGAAATAACTCCTTTAGTTGATCAAGTTGAGACAGACGGACTTGGTGGAATTTTTGGAGTTAAAAATACTCATGAGACTAATGCTCCTAAAGTCATGGTTGCTGCCCATATGGATGAAGTCGGCTTTATGGTTAGTCATATTCAGCCAGATGGAACATTTCGTGTACTTGAGGTTGGAGGATGGAATCCCCTAGTAGTCAGCTCACAACGCTTTACCCTCTACACACGTTCTGGTGATGCTATTCCTGTTATATCAGGCTCAGTTCCTCCTCACTTTCTTCGTGGACAAAGCGGTGGAACAACATTACCCAAAATTAGTGACATTGTTTTTGATGGAGGATTCACAGATAAAAATGAAGCTGAAAGCTTTGGCATTGCTCCTGGCGATATCATTGTTCCTAAATCTGAAACCATTTTAACTGCAAATCAAAAACATATTATGTCAAAAGCTTGGGATAATCGCTATGGTGTGCTTATGGTGACCGAATTGCTAAAAAGCTTAAAAGATCAAAGTCTTAGCAACACACTTATTGCTGGGGCAAATGTTCAAGAAGAAGTCGGACTTCGTGGCGCACATGTTTCAACAACTAAATTCAACCCAGATATCTTCTTAGCTGTCGATTGTTCCCCAGCTGGAGATATTTATGGGGAACAAGGCAAAATAGGAGAGGGAACCTTAATCCGTTTTTATGATCCCGGACATATCATGCTTAAAGATATGAGAGATTTCTTACTTACAACAGCTGAAGAAGCAGGTATAAAATACCAATATTATGCTGCAAATGGTGGTACCGATGCTGGGGCTGCTCACCTAAAAAATAGTGGTATTCCTTCTACAACTATCGGTGTCTGTGCACGCTACATTCATTCTCATCAAACACTCTACGCTATGGATGATTTTCTACAAGCACAAGCTTACCTTCAGGCCATCGTTAACAAATTAGACCGCTCGACGGTGGATATTATTAAAGGTTAT

SEQ ID NO: 18294 - protein, 355 aa, Streptococcus agalactiae; identical to SEQ ID NO: 370

SEQ ID NO: 18295 - protein, 237 aa, Streptococcus agalactiae
ATGAAAGAAAAATTATTAGTACCTGCTTTAAATTGTTTGCTAGGTCTACTCTTCCTAGGTGATCACTGGTTTTTATTTCGTCTTCAAAATGGAGAACTTTTTGCTATTGTGACGCTAATACTGCTTTGCACAACTTCATTTTTAATCAATAAGAATCACCCCAAAAATTTGACTTTAATTGCTATGGTTATCACTTTTTTAGCCGTATTATCTTTTCTATCTACCTTTTTATTAGCT

SEQ ID NO: 18296 - protein, 79 aa, Streptococcus agalactiae; identical to SEQ ID NO: 9136

SEQ ID NO: 18297 - protein, 318 aa, Streptococcus agalactiae
GTGTCTAATTCCGGGGGGTATGGTATAATAACAGTTATGAAAAATAAAAAAATCTTATTTGGGACTGGCCTTGCTGGTGTGGGTTTACTGGCAGCTGCTGGTTATACCCTAACTAAAAAAGTAACAGATTATAAACGTCAGCAAATCACTCAGACCTTAAGAGAATTTTTTAGTCAGATGGGTGATATTCAGGTATTTTATTTTAATGAATTTGAATCTGATATTAAAATGACCAGTGGTGGTCTTGTCTTGGAAGATGGCAGAATTTTCGAATTCATTTATCGTCAAGGTGTTCTTGATTATGTGGAGGTGAGCAAA

SEQ ID NO: 18298 - protein, 106 aa, Streptococcus agalactiae; identical to SEQ ID NO: 372

SEQ ID NO: 18299 - protein, 321 aa, Streptococcus agalactiae
ATGATTTTACCAGAATCTTATGAAGAAATAGCAGCCTATATTGATAGCACTAAGAAAGTTGTTTTCTTTTTTACAGCAGATTGGTGTCCAGATTGTCAATTTATATATCCAGTAATGCCATCAATTGAAAAAGATTTCTCAGATTTTGTCTTTGTACGTGTTAATCGTGATGACTATATAGAATTAGCTCAGCAGTGGAATATTTTTGGGATTCCGAGTTTCGTTGTTGTGGAAAATGGTCAGGAACTGGGTCGTTTGGTTAATAAGAATCGCAAAACAAAGGCTGAAATTACTAAATTTCTCGCTGAAATTAACTATAAA

SEQ ID NO: 18300 - protein, 107 aa, Streptococcus agalactiae; identical to SEQ ID NO: 374

SEQ ID NO: 18301 - protein, 624 aa, Streptococcus agalactiae; identical to SEQ ID NO: 9141

SEQ ID NO: 18302 - protein, 208 aa, Streptococcus agalactiae; identical to SEQ ID NO: 376

SEQ ID NO: 18303 - protein, 714 aa, Streptococcus agalactiae; identical to SEQ ID NO: 9143

SEQ ID NO: 18304 - protein, 238 aa, Streptococcus agalactiae; identical to SEQ ID NO: 380

SEQ ID NO: 18305 - protein, 393 aa, Streptococcus agalactiae; identical to SEQ ID NO: 9145

SEQ ID NO: 18306 - protein, 131 aa, Streptococcus agalactiae; identical to SEQ ID NO: 382

SEQ ID NO: 18307 - protein, 726 aa, Streptococcus agalactiae; identical to SEQ ID NO: 9147

SEQ ID NO: 18308 - protein, 242 aa, Streptococcus agalactiae; identical to SEQ ID NO: 384

SEQ ID NO: 18309 - protein, 1743 aa, Streptococcus agalactiae
ATGTTGATGGTGTTGTTATTCCAAAGGCTAGGAATTATTATGATTTTAGCCTTTTTATTGGTAAATAATAGTTATTTCAGACAGTTAATTGAAGAGCGGTCTAAACGTGAAACGGTAGTCCTTGTCATCATTTTCGGCTTGTTTGTTATTATATCTAATATAACAGGAATTGAAATAAAAGGGGATCGAAGTTTGGTCGAGCGCCCTTTTCTAACAACGATTTCTCATTCTGACTCACTTGCTAATACAAGGACTTTAGTTATTACAACGGCAAGTTTGGTTGGTGGACCTCTGGTTGGATCAATTGTTGGTTTTATTGGAGGAGTTCATCGCTTTTTTCAAGGAAGCTTTTCAGGTTCTTTCTATATTGTCAGTTCAGTTCTAGTCGGCATTGTTAGCGGAAAGATTGGTGATAAGCTTAAGGAAAACCATCTCTACCCTTCAACAAGCCAAGTTATTTTAATTAGTATTATTGCCGAAAGTATCCAGATGCTATTTGTTGGCATTTTTACAGGATGGGAACTTGTCAAAATGATTGTCATTCCAATGATGATTTTAAATAGTTTAGGTTCCACACTTTTCCTTGCGATTTTGAAAACTTATTTGTCAAATGAAAGTCAGTTACGCGCAGTTCAAACGAGAGATGTTCTTGAATTGACTCGACAGACTCTGCCCTACCTTAGACAAGGTTTGACACCGCAATCTGCTAGGAGCGTTTGCGAAATTATAAAGAGGCATACTAACTTTGATGCTGTGGGATTAACAGATCGGTCAAACGTATTAGCTCATATTGGTGTTGGCCATGATCACCATATTGCAGGACAACCGGTCAAAACAGACTTATCTAAAAGTGTTATTTTTGATGGCGAACCAAGAATTGCGCAAGATAAAGCGGCGATTTCTTGTCCAGATCACAACTGTCAGTTAAATTCTGCTATTGTAGTTCCTCTAAAAATAAATGATAAAACTGTGGGTGCCTTAAAAATGTACTTTGCAGGAGATAAGACAATGTCTGAGGTGGAGGAAAACCTAGTCCTTGGTTTAGCGCAAATATTTTCAGGACAACTGGCAATGGGGATAACAGAGGAACAAAATAAGTTAGCCAGTATGGCAGAGATAAAGGCTTTACAAGCACAAATCAACCCTCATTTCTTCTTTAATGCCATTAACACAATTAGTGCATTAATCCGTATTGATTCTGATAAAGCACGTTATGCACTGATGCAGTTAAGTACTTTTTTTAGAACAAGTTTGCAGGGTGGTCAGGATCGTGAGGTAACGCTTGAGCAAGAAAAATCACATGTGGATGCTTATATGAATGTTGAAAAATTACGTTTCCCTGATAAATATCAGTTATCTTATGATATTAGTGCACCAGAAAAAATGAAGTTACCACCTTTTGGTTTACAGGTACTGGTAGAGAATGCAGTTCGACATGCTTTCAAAGAACGTAAGACGGACAACCATATATTGGTTCAAATAAAGCCAGATGGTCATTATTATTGTGTTTCTGTTAGTGACAATGGACAAGGAATCTCAGATACTATCATTGATAAATTAGGTCAAGAAACAGTTGCAGAGAGTAAGGGTACAGGTACTGCTCTAGTTAATCTAAATAACAGGCTGAATTTATTATATGGTAGTGTAAGTTGCCTTCATTTTTCGAGCGACAAGAATGGTACAAAAGTTTGGTATCGAATACCTAATAGAATAAGGGAGGATGAGCATGAAAATTTTAATTCT

SEQ ID NO: 18310 - protein, 581 aa, Streptococcus agalactiae; identical to SEQ ID NO: 386

SEQ ID NO: 18311 - protein, 738 aa, Streptococcus agalactiae
ATGAAAATTTTAATTCTTGATGATGAAATGTTTGCCAGACAAGAATTATCGTTTTTAGTTGAACATAGCCAGGAGGTTGACAACCCTGAGATTTTTCAGGCTGAGGATATCAGTGAAGCCGAAAAAATCTTATTTAGACAGCAAATTGATTTAATTTTTTTAGATATTTCGCTTAGTGAAGAAAATGGCTTTACTTTGGCTAATCAGTTGAGCCAACTTGCACATCCCCCACTTGTTGTTTTTGCGACAGCTTATGATAACTACGCTGTGAAAGCTTTTGAAAGTAACGCTGTTGATTATATCATGAAACCGTTTGAACAACAGCGCGTTGATATGGCTCTATCAAAAGTGAAGAAATTGAGCCAACTCACCACTGCTTCAGATGTAGAGCAAGCAATACCTAAAAAAGCCAGTGTTGAATTGTTAACCTTGACATTATCAGATCGCAGTGTTGTTGTTAAAATGCAAGATATTGTTGCAGCTAGTGTTGAAGATGGCGAATTAACTGTTAGTACAGTTCAGAAAACTTACACTATTCGGAAGACACTCAATTGGTTTAAGTCACGCGCTGTAGCACCATATTTTCTCCAGATTCATCGAAACACAGTGATTAATCTAGAGATGATTGAGGAAATTCAACCTTGGTTTAATCATACTTTGTTACTAATTATGTCTAATGGAGAGAAATTTCCAGTAGGTCGATCGTATTTAAAAGACCTAAATGAGCATTTAACCATG

SEQ ID NO: 18312 - protein, 246 aa, Streptococcus agalactiae; identical to SEQ ID NO: 388

SEQ ID NO: 18313 - protein, 453 aa, Streptococcus agalactiae
ATGAAACACACCAGTAAAGAAACCAAAACAAAAGAAGCTCCAATGTTTATTCAAATGTCAATATATGCAGCTATTCTATTAGTTTCACAAATGATTTCAATGTTATTACCGAAATCACTACCAATCCCAACGACGGTTATTGGTTTGGTGCTAATGTATGTATTGCTAACTGCTAAAATTATCAAGGTAGAGTGGGTTGACTCTTTTGGGGCTTTGATGATAAGCATGATTGGTTTTATGTTTGTCCCCTCAGGAATATCAGTAGCAGCGAATCTTGATATCCTAAAAGCTGAAGGCTTGCAACTAGTTGCTGTTATTACAATCTCAACTGTTGTTATGTTGGTAGTGGTAGCATATGTTGCACGATTAATACTTGCTATCAGAGAACTCAGTGTCACAGATTTATTTAAAAAGATATTACCTAACCACTATAGTAAGAAAGTAGAGGAAAAA

SEQ ID NO: 18314 - protein, 151 aa, Streptococcus agalactiae; identical to SEQ ID NO: 390

SEQ ID NO: 18315 - protein, 726 aa, Streptococcus agalactiae
ATGGAACTCTTAAAAACACCCATCTTTGGTATTTGCTTTTCTTTAATACTCTATACGATAGGACAACATTTATTTAAGAAGAGTAAAGGTTTCTTCCTTTTGCAGCCTCTTTTCTTTGCAATGGTTAGTGGTATTGTCATTCTTTGGCTTATGTCAAAAGGTTTAGGAACCGATGTTAAGACATTTTATACACAAGCTTATAAACCAGGTGGTGATTTAATATTTTGGTTTTTAAATCCAGCGACAATTGCTTTTGCAGTTCCTCTCTATAAGAAAAATGACGTTGTTAAAAAATATTGGGTAGAAATTCTCAGCAGTTTAGTAATCGGTATGATTGTTTCCCTTATACTTATCGTCGCTATTTCTAAAATGGTTGGGCTTAGTCAAGTCGGAATTGCTTCAATGTTGCCACAAGCAGCAACAACAGCAATTGCTCTTCCAATAACAGCAGCAATTGGAGGGAACACAGCTGTGACAGCAATGGCGTGTATCTTAAATGCAGTTATTATTTATGCATTAGGTAAAAAATTAGTGTCATTTTTCCATTTGAATGATAGTAAGATTGGTGCAGGATTAGGTCTAGGGACCTCTGGTCATACAGTCGGAGCAGCCTTTGCATTGGAATTGGGAGAACTGCAAGGTGCGATGGCAGCTATAGCTGTGGTGGTTATCGGTTTGGTAGTTGATTTGGTTATTCCTATCTTTAGTCATTTGATTGGTTTGCTA

SEQ ID NO: 18316 - protein, 242 aa, Streptococcus agalactiae; identical to SEQ ID NO: 9156

SEQ ID NO: 18317 - protein, 108 aa, Streptococcus agalactiae; identical to SEQ ID NO: 4717

SEQ ID NO: 18318 - protein, 36 aa, Streptococcus agalactiae; identical to SEQ ID NO: 396

SEQ ID NO: 18319 - protein, 174 aa, Streptococcus agalactiae
TTGAATGATAGTAAGATGTGCAGGGATAGTCAGGACCTCTGTCATACAGTCGGAGCAGCCTTTGCATTGGAATTGGGAGAACTGCAAGGTGCGATGGCAGCTATAGCTGTGGTGGTTATCGGTTTGGTAGTTGATTTGGTTATTCCTATCTTTAGTCATTTGATTGGTTTGCTA

SEQ ID NO: 18320 - protein, 59 aa, Streptococcus agalactiae
  VARIANT 15: Xaa = Any Amino Acid
MNDSKMCRDSLGTSXHTVGAAFALELGELQGAMAAIAVVVIGLVVDLVIPIFSHLIGLL

SEQ ID NO: 18321 - protein, 108 aa, Streptococcus agalactiae; identical to SEQ ID NO: 4717

SEQ ID NO: 18322 - protein, 36 aa, Streptococcus agalactiae; identical to SEQ ID NO: 396

SEQ ID NO: 18323 - protein, 1488 aa, Streptococcus agalactiae
ATGGGGGCAAAGCTTCCTCATGAATTCGATCCAAAGGACCGTTATGGAATCCATAATGAAGGTAATATTACTCATAGCACCCTATTGAAACGTTCTCCTGAACTAGATATAAAAGGAGAGCTTGCTAAAAAATATAAAATCTCTAAGGATGGCTTAACGTGGTCGTTCGACTTAAATGATGATTTTAAATTCTCCAATGGTGAGCCTGTTACTGCTGACGATGTTAAGTTTACTTATGATATGTTGAAAGCAGATGGAAAAGCTTGGGATTTGACCTTTATTAAGAATGTTGAAGTAGTTGGGAAAAACCAGGTAAATATTCATTTGACTGAGGCGCATTCGACATTTACAGCACAGTTGACAGAAATCCCAATCGTCCCTAAAAAACATTACAATGATAAGTATAAGAGCAATCCTATCGGTTCAGGACCTTACATGGTGAAAGAATATAAGGCTGGAGAACAAGCAATCTTCGTTCGAAATCCCTATTGGCACGGTAAAAAGCCTTATTTTAAAAAGTGGACTTGGGTATTACTTGATGAAAATACAGCACTAGCTGCTTTAGAATCTGGTGATGTTGACATGATTTACGCAACGCCAGAGCTTGCTAGCAAGAAAGTCAAAGGAACACGTCTTCTAGATATTGCTTCAAACGACGTTCGCGGACTGTCATTGCCTTATGTGAAGAAAGGTGTTGTGAAAAATTCACCAGACGGTTATCCAGTAGGAAATGATGTCACTAGTGATCCAGCAATCAGAAAAGCCTTGACTATTGGTTTAAATAGACAAAAAGTTCTGGATACTGTTTTAAATGGTTATGGTAAACCAGCTTATTCAATTATTGATAGAACACCATTCTGGAATCCAAAAACAGCAATTAAAGATAATAAAGTAGCTAAAGCTAAGCAACTTTTGACAAAAGCTGGATGGAAAGAACAAGCAGACGGTAGCCGTAAAAAAGGAAATCTTAAAGCGGAATTTGACCTTTACTACCCTACTAATGATCAATTACGAGCAAACTTAGCCGTTGAAGTAGCGGAGCAAGCTAAAGCCTTAGGTATTACTATTAAACTCAAGGCTAGTAACTGGGATGAAATGGCAACTAAGTCACATGATTCAGCCTTACTTTATGCGGGAGGACGTCATCATGCGCAGCAATTTTATGAATCACATTACCCAAGTTTAGCTGGTAAAGGTTGGACCAATATTACTTTTTATAACAATCCTACTGTGACTAAGTACCTTGACAAAGCAATGACATCTCCTGACCTTGATAAAGCTAACAAATATTGGAAGTTAGCTCAGTGGGATGGCAAAACAGGTGCTTCCACTCTTGGAGATTTACCAAATGTATGGTTGGTGAGTCTTAACCATACTTATATTGGTGATAAACGTATCAATGTAGGTAAACAAGGTGTCCATAGTCATGGTCATGATTGGTCATTATTGACTAACATTGCTGAATGGACTTGGGATGAATCTGCTAAG

SEQ ID NO: 18324 - protein, 496 aa, Streptococcus agalactiae; identical to SEQ ID NO: 398

SEQ ID NO: 18325 - protein, 974 aa, Streptococcus agalactiae
GTGAAACATATTACCACTGTAGTTATCTGGAAGATACTTAGGTGTTTGTCACTCGTTTTTGGAGTATCAATTTTGACCTTTATTTTACTAAAACAATCACCGGTTGATCCAGTCATGGCAAGTGTCAATTATGACACGTCACTAACCCCTGTTCAGTACAAAGCGATTGCTCACCACTATGGTTTGGATAAGCCAGCTCCGGTCCAGTATTTTATTTGGTTAAAAATTTTATACAGGGACATTTAGGGACTTCACTAGTTTATCGGCAACCTGTTATTGATATTATTAGATCACGGGCAGGTGCCTCTTTCATACTTATGGGACTCTCCTGGGTCTTATCGGGTCTTATTGGATTTATCTTAGGAACTTTATCAGCTTTCCATCAAGGGAAATTGCTTGATCGAATTGTAAGGTGGTTTTCTTACCTTCAGATATCAGTACCAACTTTTTGGATTGGGCTCATTTTTTTATTAATCTTTTCTGTCCAGCTGGGGTGGTTCCCGATTGGTATTTCTTCCCCGATAGGTACTTTGAGTCAAGATATTACGTTAGCTGATCGTATTAAGCACCTTATTTTACCTGTTTTCACGCTAAGTATTCTAGGCATTGCCAATGTAACTCTTCATACTAGAACTAAAATGATGTCGGTACTTTCTAGTGAATATGTCTTATTTGCCAGAGCGCGTGGGGAAACGGAATGGCAAATTTTTAAAAATCATTGTCTTAGAAATGCTATCGTACCAGCTATTACACTGCATTTTTCCTATTTTGGAGAATTGTTTGGAGGATCCGTTCTTGCTGAGCAAGTTTTCTCATATCCAGGACTAGGGTCTACCCTAACTGAAGCAGGACTTAAAAGTGATACACCGCTACTTCTAGCTATTGTGATGATAGGGACATTATTTGTTTTTGCGGGCAATCTTATTGCGGATATTTTAAACAGCATAATCAATCCACAGTTAAGGAGAAAAGTA

SEQ ID NO: 18326 - protein, 325 aa, Streptococcus agalactiae; identical to SEQ ID NO: 400

SEQ ID NO: 18327 - protein, 819 aa, Streptococcus agalactiae; identical to SEQ ID NO: 4723

SEQ ID NO: 18328 - protein, 273 aa, Streptococcus agalactiae; identical to SEQ ID NO: 402

SEQ ID NO: 18329 - protein, 801 aa, Streptococcus agalactiae; identical to SEQ ID NO: 9165

SEQ ID NO: 18330 - protein, 267 aa, Streptococcus agalactiae; identical to SEQ ID NO: 404

SEQ ID NO: 18331 - protein, 624 aa, Streptococcus agalactiae
ATGACCTTAGAGGCTAAAAAGCTTGGCTTTTATCATAAAAAAGATCAATGGCTTTTTAAGGAGATTAATTTAGAGGTAGCACCTGGTCAAGTTTTAGGTATATTTGGACAAAGTGGTTGTGGAAAAACTAGTTTATCCAGGGTGCTTGCAGGTTTTTTACATCCTAAATCTGGTGAAGTATTAGTTGATGGCAGTAATTTGCCTAGCAAAGCATTTAGACCTGTACAACTTATTCAACAACATCCTGAAAAAACGATGAATCCTTTATGGCCTATGAAAAAAAGTTTGGAAGAAGCCTATTACCCAAGTCGAGATTTACTAGATGCTTTTGGAATTCAAGAAAAATGGCTAAATCGTCGACCTAGTGAACTCTCGGGAGGAGAATTACAACGCTTTTCGATTGTGCGTTCATTACATCCAGAGACTAAATACCTTATTGCAGATGAAATGACTACTATGTTGGATAGCATTACACAAGCTAGTGTATGGAAAAGCCTGTTGGAGATTGTAAAGGATAGAAATTTAGGTCTCATCGTTATTAGTCATGATTTCGCTATGTTAGAGAAACTTTGTAACCAATGCTATATGATTGAAGAGAATCGTATCGTATCTTTCAATGGAGAT

SEQ ID NO: 18332 - protein, 208 aa, Streptococcus agalactiae; identical to SEQ ID NO: 406

SEQ ID NO: 18333 - protein, 2028 aa, Streptococcus agalactiae; identical to SEQ ID NO: 9169

SEQ ID NO: 18334 - protein, 676 aa, Streptococcus agalactiae; identical to SEQ ID NO: 408

SEQ ID NO: 18335 - protein, 1623 aa, Streptococcus agalactiae
ATGACGATTGATAAACGTAAAGTTGTCTATCAAATTTATCCAAAATCATACAAAGACACAACTGGTAATGGGGTTGGTGATCTTCGTGGTATTATCGAAAAATTACCCTATTTAGCAGAACTTGGTATTGATATGGTTTGGCTCAACCCATTTTATCCAAGTCCACAACGAGATAATGGATATGATATCTCTGATTATACAGCTATTAACCCTGATTTTGGAACGATGGACGATTTTGAAGAAATGATTGAGGTGGGACGTCAATACCGTATAGATTTTATGCTTGATATGGTGCTTAATCATTGTTCAATAGAACATGAGTGGTTTAAAAAAGCACTTGCAGGAGATCGCTACTATCAAGATTTCTTTATCTTACGTGATAATCCAACAGATTGGGTATCTAAATTTGGTGGAAATGCTTGGGCACCATTTGGTGATACAGGGAAGTATTATCTTCATCTTTTTGATATCACTCAAGCTGACCTTAATTGGCGCAATGCCGATGTTCGCAAGGAACTTTTTAAAGTTGTCAATTTTTGGCGTGATAAAGGGGTTAAAGGTTTTCGATTTGATGTGATTAATTTAATTGGGAAAGATGAGATACTTGAGAACTGCCCAATTAATGATGGAAAACCAGCTTATACTGATCGTCCAATAACACATGATTATCTCAAGATGTTGAATAATGCTAGTTTTGGACAAGATGATTCCTTCATGACAGTTGGTGAAATGTCTTCAACGACAATTGCAAATTGCATTCTTTACACTGCACCAGAACGTGAAGAGTTATCCATGGCTTTTAATTTTCACCACCTCAAAGTAGATTATAAAGATGGGCAAAAGTGGACCATTATGGCTTTTGATTTTCCTGCATTACGTGACCTTTTCCATAGTTGGGGCGAAGGGATGAGCGAAGGAAATGGTTGGAATGCTTTATTCTATAATAATCATGACCAACCGCGAGCATTAAATCGTTTTGTAGACGTGAAACGTTTTCGAAATGAAGGAGCAACCATGTTAGCAGCATCTATCCACTTATCGCGTGGTACTCCTTATATATATATGGGTGAAGAAATCGGAATGCTTGATCCCGATTACAGTTCTATGGATGATTATGTGGATATTGAGAGTTTGAATGCCTACCAAATAATGCTTGATGAAGGCAAGTCACAAGAAGAGGCATTTAGCATTATTCGAGCGAAATCTCGAGACAATTCTCGAGTACCAATGCAATGGGATGATAGTACGAATGCAGGTTTTTCTGAAGGCGCTCCATGGTTGAAAGTAGGAAAATCATATAAAGAAATCAATGTCGCAAAGGAGAAAACAGGGCTGATATTTACTTTCTATCAAGAGTTGATAAGGCTACGTAAACAACTGCCAATAATAGCTGACGGGAATTATAAAGCAGCTTTCAAAGATAATGAAAAAGTATATGCTTTTGAACGCCATCTTGATAAGGAAAAACTTCTTGTTTTAAATAATTTCTTTGCTGAGAAAGTTAAGATAAAATTACCGGAGAATTATCTCCAAGGACAAGTTCTTCTATCAAATTATAAGGATGTTACTCTTGATGAAACGGTTACTTTGCAACCTTATCAAACTTTAGCTATCTTAGTGTCA

SEQ ID NO: 18336 - protein, 541 aa, Streptococcus agalactiae; identical to SEQ ID NO: 9172

SEQ ID NO: 18337 - protein, 2034 aa, Streptococcus agalactiae
ATGGTTGATAATAAGACTGTTGTGATAATGTTGGTATTTTTAGCTCGGAAAAATCTTTCCTTGTATGAGTTAACAGTGCAAACAAAGTTTTCAATAAAAGTTATCATAGAGCAAATTAACTATCTCAATAGTTTTTTAGCAAAAAATCACCTACCAGCTATTGCTCACTCTGCTGGACGTTATCAGTTATTAGGAGATGAAAAAGAGCATGATAAAATTGTCTCCTTATTAGAAGCTGAGCAATTTTACCTAACCCAGGAAGAAAGGGTATGTCTGATTTACCTTTATAGCTTTTGCCGAAGAGAGTTTGTCTCCAATGTGCATTATCAAGATTTTTTGAAAGTAAGTAAGAATACTACTTTATCAGATATCAAGATGCTACGTTCTAAATTAGCAAAAAGAGGTATCTCACTCACTTATACAAGAGCAAAGGGATATAGTCTAGTAGGAGATGAGATGGATAAGCATCAAGTTGCTTTTCAGATGATAACTCAACTACTAGAATCTCCCATTGGTTTTTGGTCTTTGAATTATATCTTGTCTTCTTGGAAATTCGCTCTCTCATATGAGAAGTTAGAAAAGACGGTAGAATATTTCTATGAATCTTTTCAACTTTCTCCAATACAAGATAGGCTTGAGAAATCTTTATATTTTATCATTTTAATACTGTGTCGTTATCAAAGGTCAGTAGATCGTGTTTTGCAGGGTTCTCCTATTGTTTCTGAACAATTAAAAGAGTTAACGACTATTATTGTGACTAATTTAAGTCAGGATATTTCCTTATCTAAACCATTAGATCAGAAAGAAAAAGATTATATTACCTTGATCTTATCTGGCTGTTTTGAAGGTGAGGGAACTAAAGATGATGATTTCTTTGAAGCATTGGCAAAAGCAATCGTTGATGAGATGGAAACTGTTTCACTTCTTAATTTTTCCAATAAAGAAGAGTTATTACAAGGTCTGAAGCGTCATATTATTCCAGCTTATTTCCGATTGAAATATGGTTTAACTGGCGATAGTGGTTATACACAAAATATTAAAGAGCATTACAGTGATTTATTTCTATTGGTTAAAAAGGCACTACGTCCTTTGGAAGAGCAAGTAGGATTAATACCCGATAGTGAAATTTCTTACTTCGTGATTCACTTTGGAGGCTATCTTAGACAATCAGGTGGTACACAATCAATGTCTTATAAAGCTTTGATACTCTGTCCAAACGGCGTTAGTTCATCCTTAGTGATTAAGGAAAAATTGCGTGGATTATTTCCTCAAATTCATTTTCATCGTGTCTCTAAAATTGAGCAGCTGAAACTGATTGACAATCAAACTTACGATATGGTCTTTTCTACTATATTTGTAGAAACAAAAAAACCTAATTATCTAGTTTCGCTGATGATGACAGCAGAGCAAGTACAACAGCTCAAAGAACTGGTTATTTCAGATTTTCCCAAGGCTTGCCTTGACGATTTCCAACTTGATCAATTAATAGCAACTATAAAAAAATACGCTCATGTTCATTGTGAAGAGGAATTAAAATTGGCTTTGAGGACAATGGTAAAACAAGATATACTTAGAAAGGATGTGAGGCCCTTGTTGCACCAACTTATAACAGAGGAAACTTATCAGACAAGTTCTGAACAAATGAATTGGAAAGAGGCAATTCGTTTAGCGGCAAAACTCTTGTTAGCTTCTGGAAAAATTACGGAAAGTTACCCAGAAGCTATGATTGAAAAAGTCGAAGAGTTTGGTCCTTTTATCAATCTTGGTAAAGGTATTGCTATTCCACATGCCAGACCAGAAGATGGGGTAAACTCTGTCGGTATGTCAATGCTTGTTTTGGAACAGCCTATTTATTTATTGGATGACCCCAAACAGGAAATTTATCTCTTATTATGCATAGCAGCTATTGATAATGAAACGCATTTGAAAGCTCTATCGCATTTGACAACAATACTTCGTGATAATAATAATGTTAAAGCTTTGTTAGCTTCACGTAGGTATCAAGATATTGAAATGATTATAAAACAGGAGGAT

SEQ ID NO: 18338 - protein, 678 aa, Streptococcus agalactiae
MVDNKTVVIMLVFLARKNLSLYELTVQTKFSIKVIIEQINYLNSFLAKNHLPAIAHSAGRYQLLGDEKEHDKIVSLLEAEQFYLTQEERVCLIYLYSFCRREFVSNVHYQDFLKVSKNTTLSDIKMLRSKLAKRGISLTYTRAKGYSLVGDEMDKHQVAFQMITQLLESPIGFWSLNYILSSWKFALSYEKLEKTVEYFYESFQLSPIQDRLEKSLYFIILILCRYQRSVDRVLQGSPIVSEQLKELTTIIVTNLSQDISLSKPLDQKEKDYITLILSGCFEGEGTKDDDFFEALAKAIVDEMETVSLLNFSNKEELLQGLKRHIIPAYFRLKYGLTGDSGYTQNIKEHYSDLFLLVKKALRPLEEQVGLIPDSEISYFVIHFGGYLRQSGGTQSMSYKALILCPNGVSSSLVIKEKLRGLFPQIHFHRVSKIEQLKLIDNQTYDMVFSTIFVETKKPNYLVSLMMTAEQVQQLKELVISDFPKACLDDFQLDQLIATIKKYAHVHCEEELKLALRTMVKQDILRKDVRPLLHQLITEETYQTSSEQMNWKEAIRLAAKLLLASGKITESYPEAMIEKVEEFGPFINLGKGIAIPHARPEDGVNSVGMSMLVLEQPIYLLDDPKQEIYLLLCIAAIDNETHLKALSHLTTILRDNNNVKALLASRRYQDIEMIIKQED

SEQ ID NO: 18339 - protein, 282 aa, Streptococcus agalactiae
ATGTTAAGAATTGGAACAGCATGTGGATCAGGTTTAGGTTCAAGTTTTATGGTACAAATGAATATTGAGTCTATTTTGAAGGATTTGGGGGTTTCTGATGTTGAAGTTGAACATTATGATTTAGGTGGAGCAGATCCAAGTGCAGCAGATGTTTGGATTGTTGGTCGTGATTTGGAGGATTCAGCTGGTCACCTGGGGGATGTTCGTATTTTAAACAGTATCATTGATATGGATGAATTGAGAGAATTAGTGACAGGTATTTGCCAAGAAAAAGGCTTAATC

SEQ ID NO: 18340 - protein, 94 aa, Streptococcus agalactiae; identical to SEQ ID NO: 416

SEQ ID NO: 18341 - protein, 1353 aa, Streptococcus agalactiae
ATGAAAGGTCTATTGGATTTTTTAGTTAATATTGCCAGCACGCCAGCTATTTTAGTCGCCTTGATAGCCATTATCGGTTTAGTACTGCAGAAAAAAGGCGTTCCTGATATTGTAAAAGGTGGAATAAAAACATTTGTTGGCTTCTTAGTGGTTTCTGGAGGTACAGGGATAGTCCAAAATTCCTTGAATCCATTTGGAAAAATGTTTGAACATGCTTTTCATTTGGTGGGGGTAGTTCCTAATAATGAAGCCATTGTAGCAGTAGCTCTTACGAAGTATGGCTCAGCAACTGCTTTGATTATGTTAGCGGGAATGATTTTTAATATTTTAATTGCTCGTTTTACAAAATTTAAATATATTTTTCTGACAGGACATCATACATTGTATATGGCTTGTATGATTGCTGTTATTTTTGCCGTAGCAGGCTTTACTTCGTTCTCGCTCATCCTTTTTGGAGGTCTAGCGTTAGGGATTATTATGAGCGTATCTCCTGCATTTGTGCAAAAATACATGATTCAACTGACAGGTAATGATAAGGTGGCACTTGGGCACTTTGGTTCTTTAGGCTATTGGTTGAGTGGATTTATTGGTGGAATTGTTGGAGATAAATCAAAATCAACAGAAGATATTAAATTTCCAAAGAGTTTATCATTTTTACGTGACAGTACCGTAAGTATTACTATCTCAATGGCAATTATTTACCTTATCGTTGCAGTGTTTGCTGGTGAGGCTTATATTGCAAAAGAAATAAGTAACGGTGTCAATGGTCTTGTTTATGCCCTCCAACTAGCTGGGCAATTTGCGGCAGGTGTATTCGTTATTTTAGCAGGTGTACGCCTTATCCTAGGTGAAATTGTACCAGCCTTTAAGGGAATCTCAGAAAAATTGGTTCCAAATTCAAAACCAGCCTTGGATTGTCCAATTGTTTACCCTTATGCACCTAATGCAGTATTGATTGGTTTTATCTCAAGTTTTGTTGGTGGATTGGTTAGTATGATAGTCATGATTGTGACTGGCACTACTGTCATTTTACCAGGGGTCGTTCCTCATTTCTTCTGTGGGGCAACGGCAGGTGTTATCGGTAATGCTTCTGGTGGTGTGAGAGGAGCGACTATTGGTGCATTTGTTCAAGGTATCCTCATCAGTTTCTTGCCGATTTTCTTGATGCCTGTACTAGGTGGACTTGGTTTCAAAGGGTCAACATTCTCAGATGCTGATTTTGGTTTGACCGGTATCATTCTTGGCGCTCTTAATCATGTCGGCGGTGCGATAGCTATTGTTATTGGTATTGTAGTTATCTTAATTGGACTTTTTGGCATTTCATTTGTTGGAAAATCAACCCATAAGGAAGGT

SEQ ID NO: 18342 - protein, 451 aa, Streptococcus agalactiae; identical to SEQ ID NO: 418

SEQ ID NO: 18343 - protein, 855 aa, Streptococcus agalactiae
ATGACATCACCAGAAGAAAGATATTCATCTCTAAGACGATTTGCAACGGAGATTCGTTTAAATACTCTAGAAACGCTAAACCATTTAGGATTCGGTCACTATGGGGGTAGTTTATCAATTGTTGAGGCTTTGGCTGTTCTGTATGGTGATATTATGGATATAAATCCTGAAAAATTCAAAGAAAGTGATCGGGATTATATGGTCTTATCAAAAGGACATGCTGGTCCAGCCTTGTATAGTACACTCTATTTAAAAGGTTTTTTTGATAAAACATTCCTTCATTCGCTCAATACAAACGGTACCAAACTACCTTCGCATCCTGACCGCAATTTAACTCCTGGTATAGATGTAACGACAGGCTCGTTAGGTCAAGGCATTAGTATTGCAACGGGAATTGCTTATGCTCAAAAGATTGAGAATTCAAGCTATTATACTTATACTATTGTAGGTGATGGTGAATTAAATGAAGGACAATGTTGGGAGGCTATACAATTTGCTGCGCATCATCAACTGCACCATTTAATTGTTTTTGTAGATGATAATAAAAAACAATTAGATGGTTTGACAGCTGATATTTGTAATCCTGGAGACTTTGTTGCTAAATTTGAAGCTTTTGGATTTGATGCAGTACGTGTAAAAGGAGATGACATTGAGGCAATTGACAAAGCTATTAAAACTTTTCAAGATTCAAATAGTGTCAGACCAAAATGTATTGTTTTAGATAGCATCAAGGGACAAGGTGTGAAAGAGTTGGAGGAGTTAGCTTCTAATCATCATTTACGACCAGATTTACAACAAAAAACAATGTTAGAGCGAGCGTTGATAAGCTTGAGAGAAAGTTTGGAGGTGGTAGAA

SEQ ID NO: 18344 - protein, 285 aa, Streptococcus agalactiae; identical to SEQ ID NO: 420

SEQ ID NO: 18345 - protein, 927 aa, Streptococcus agalactiae; identical to SEQ ID NO: 9181

SEQ ID NO: 18346 - protein, 309 aa, Streptococcus agalactiae; identical to SEQ ID NO: 422

SEQ ID NO: 18347 - protein, 1257 aa, Streptococcus agalactiae; identical to SEQ ID NO: 9183

SEQ ID NO: 18348 - protein, 419 aa, Streptococcus agalactiae; identical to SEQ ID NO: 9184

SEQ ID NO: 18349 - protein, 267 aa, Streptococcus agalactiae; identical to SEQ ID NO: 9185

SEQ ID NO: 18350 - protein, 89 aa, Streptococcus agalactiae; identical to SEQ ID NO: 428

SEQ ID NO: 18351 - protein, 2127 aa, Streptococcus agalactiae; identical to SEQ ID NO: 9187

SEQ ID NO: 18352 - protein, 709 aa, Streptococcus agalactiae; identical to SEQ ID NO: 430

SEQ ID NO: 18353 - protein, 750 aa, Streptococcus agalactiae; identical to SEQ ID NO: 9189

SEQ ID NO: 18354 - protein, 250 aa, Streptococcus agalactiae; identical to SEQ ID NO: 432

SEQ ID NO: 18355 - protein, 582 aa, Streptococcus agalactiae
ATGGGGTGGTGGAAAGAAAGTATAGCTATTGTCAAAGAACAAGATCCAGCTGCTCGTAGTTCTCTAGAAGTTATTTTAACTTATCCAGGAATAAAAGCTCTTGCAGCTCATAGGCTATCTCATTTTTTATGGAATCATAATTTTAAATTGTTAGCACGTATGCACAGTCAATTTTGGCGTTTCTGGACACAAATTGAAATTCATCCCGGAGCGACGATTTCGGAAGGGGTTTTTATTGACCACGGTTCAGGATTGGTCATTGGAGAAACTGCCATTGTAGAGAAAGGTGCTATGCTATACCATGGGGTTACATTGGGTGGCACAGGTAAAGACAAAGGCAAACGACACCCAACCATACGTAAAGGAGCGCTAATTTCAGCACATTCTCAAATCATTGGTCCAATTGAGGTTGGAGAAAATGCTAAAGTCGGTGCTGCAGCAGTTGTCCTTGCAGATGTGCCAGCAGACGTAACAGTAGTTGGTGTTCCAGCTAAAGTTGTCCGTGTCCATGGTCAAAAGGATGATCTTCAAATCCGAAGTATTGAACATGATCGAGAAGAAAGTTATTATTCGTCCAAACTT

SEQ ID NO: 18356 - protein, 194 aa, Streptococcus agalactiae; identical to SEQ ID NO: 434

SEQ ID NO: 18357 - protein, 180 aa, Streptococcus agalactiae
ATGAAGGATTATGTAACAACTCAAATATTATCAATCTTAGGTATACTAGCAGCAGCTTGTTTAAGCTATTTAAAGTTTGCACAAGGTAACCCTCTCTTAGGAATTATTTGGGCTGCTTTTGTTTTAATGTATGTTGTTCGTTTGTATAAAGCTTATCAAAAACAGAAAAAGGAAAAACCA

SEQ ID NO: 18358 - protein, 60 aa, Streptococcus agalactiae; identical to SEQ ID NO: 436

SEQ ID NO: 18359 - protein, 1341 aa, Streptococcus agalactiae
ATGATAAAAATTTACGACACTATGACTCGCAGTTTACAAGATTTTATACCTCTCAATGAAGGTAAAGTCAACATGTACGTCTGTGGGCCAACAGTTTATAACTATATACACATCGGGAATGCCCGCAGTGTAGTAGCTTTTGATACTATTCGTCGTTATTTTGAGTATTGTGGTTACCAAGTCAATTATATTTCTAACTTTACTGATGTTGATGATAAAATTATAAAAGGTGCAGCTGAAGCAGGTATGGATACAAAATCCTTTTCAGATAAGTTTATTTCAGCATTTATGGAAGATGTTGCTGCATTAGGTGTCAAACCTGCTACAAAAAATCCTCGAGTTATTGACTATATGGATGAGATTATTGATTTTGTTAAAGTTTTAGTTGATAAGGAATTTGCCTATGAAGCTAATGGAGATGTTTATTTTAGAGTAAGTAAATCACATCATTATGCAAAATTAGCCAATAAAACTTTGGAAGATTTAGAGATTGGTGCAAGTGGTCGTGTTGATGGTGAAGGAGAGATTAAAGAGAATCCTTTAGATTTTGCACTTTGGAAATCAGCTAAATCTGGGGAAGTCTCATGGGAAAGTCCTTGGGGGAAAGGGCGCCCAGGGTGGCATATTGAATGTTCTGTTATGGCAACTGAGATCCTTGGTGATACTATTGATATCCATGGTGGAGGAGCTGATTTAGAATTTCCACATCACACGAATGAGATTGCACAATCTGAAGCTAAAACAGGTAAGACCTTTGCAAATTACTGGATGCATAATGGTTTTGTTAACGTTGATAACGAGAAAATGTCTAAATCTCTTGGTAACTTTATTACTGTTCACGATATGTTGAAGAGCGTTGACGGACAAGTAATACGTTTTTTCTTAGCGACACAACAGTATCGTAAACCCGTGAATTTCACTGAAAAGGCCGTTCATGATGCGGAAGTTAACCTTAAATATTTAAAAAATACTTTCAACTTACCAATCCAAGAGAATGCTAATGATGAAGAATTAGAGCAATTTGTGAAAGCATTTCAAGGAGCGATGGATGATGATTTTAATACAGCAAACGGTATTACTGTTATCTTTGAAATGGCAAAATGGATTAATTCAGGACACTATACTTCAAGAGTTAAGGAAACCTTTGCTGAATTATTAGAAATTTTTGGTATTGTATTCCAAGAGGAAGTTCTTGATGCTGATATTGAATCTTTAATAGAACAACGTCAAGAAGCACGAGCTAATCGTGATTTTGCAACTGCTGATCGTATTAGAGATGAATTAGCAAAACAAGGAATTAAATTGTTAGATACTAAGGATGGCGTGAGGTGGACTCGTGAT

SEQ ID NO: 18360 - protein, 447 aa, Streptococcus agalactiae
MIKIYDTMTRSLQDFIPLNEGKVNMYVCGPTVYNYIHIGNARSVVAFDTIRRYFEYCGYQVNYISNFTDVDDKIIKGAAEAGMDTKSFSDKFISAFMEDVAALGVKPATKNPRVIDYMDEIIDFVKVLVDKEFAYEANGDVYFRVSKSHHYAKLANKTLEDLEIGASGRVDGEGEIKENPLDFALWKSAKSGEVSWESPWGKGRPGWHIECSVMATEILGDTIDIHGGGADLEFPHHTNEIAQSEAKTGKTFANYWMHNGFVNVDNEKMSKSLGNFITVHDMLKSVDGQVIRFFLATQQYRKPVNFTEKAVHDAEVNLKYLKNTFNLPIQENANDEELEQFVKAFQGAMDDDFNTANGITVIFEMAKWINSGHYTSRVKETFAELLEIFGIVFQEEVLDADIESLIEQRQEARANRDFATADRIRDELAKQGIKLLDTKDGVRWTRD

SEQ ID NO: 18361 - protein, 384 aa, Streptococcus agalactiae; identical to SEQ ID NO: 13647

SEQ ID NO: 18362 - protein, 128 aa, Streptococcus agalactiae; identical to SEQ ID NO: 442

SEQ ID NO: 18363 - protein, 753 aa, Streptococcus agalactiae
ATGACTATGAAAGATAAACAATTTAAAGAAGAATCAAGTGACCTTGTCTATGGCTTACATGCTGTGACAGAGAGTTTAAGAGCTAATACTGGTAATAAATTATACTTGCAAGATGACTTAAGAGGAAAGAACGTTGATAAAGTCAAAGCACTAGCGACTGAAAAAAAAGTATCCATTTCCTGGACTCCTAAAAAAACCTTATCAGACATGACAAATGGTGGAGTTCACCAAGGATTCGTTCTAAAAGTTTCGGAATTTGCCTATGCGGATTTATCAGAGATAATGACAAAGGCAGAGAATGAAGAAAATCCTCTCATTTTAATCCTTGATGGTCTGACCGACCCTCACAACCTAGGTTCTATTCTACGCACAGCTGATGCAACCAATGTAACAGGTATTATCATCCCCAAACATCGTTCTGTTGGAGTGACCCCAGTGGTTTCAAAGACATCTACAGGAGCTGTTGAACATGTTCCTATTGCAAGGGTAACTAATCTCAGTCAAACTTTGGATACTTTAAAAGATAAGGAGTTCTGGATATTTGGCACTGATATGAATGGGACACCATCGCATAAGTGGAATACCAAAGGTAAATTAGCCCTAGTTATTGGTAATGAAGGAAAAGGTATTTCTCATAATATCAAAAAGCAAGTAGATGAAATGATTACAATTCCCATGAATGGTCATGTTCAGAGTTTAAATGCCAGTGTCGCAGCCGCTATTTTGATGTATGAAGTATTTAGAAACCGCCTA

SEQ ID NO: 18364 - protein, 251 aa, Streptococcus agalactiae; identical to SEQ ID NO: 444

SEQ ID NO: 18365 - protein, 516 aa, Streptococcus agalactiae; identical to SEQ ID NO: 9201

SEQ ID NO: 18366 - protein, 172 aa, Streptococcus agalactiae; identical to SEQ ID NO: 446

SEQ ID NO: 18367 - protein, 858 aa, Streptococcus agalactiae; identical to SEQ ID NO: 9203

SEQ ID NO: 18368 - protein, 286 aa, Streptococcus agalactiae; identical to SEQ ID NO: 448

SEQ ID NO: 18369 - protein, 117 aa, Streptococcus agalactiae; identical to SEQ ID NO: 4781

SEQ ID NO: 18370 - protein, 39 aa, Streptococcus agalactiae; identical to SEQ ID NO: 4782

SEQ ID NO: 18371 - protein, 444 aa, Streptococcus agalactiae
ATGAACAAAACAACTTTCATGGCTAAACCAGGCCAAGTTGAACGCAAATGGTACGTTGTTGACGCAGCAGATGTACCTCTTGGACGTCTTTCTGCAGTAGTTGCTAGCGTACTTCGCGGAAAAAACAAACCAACTTTCACACCACACACTGATACAGGTGACTTTGTGATTGTTATCAATGCTGAAAAAGTTAAATTAACTGGTAAAAAAGCGTCAGATAAAATCTACTACACTCACTCAATGTATCCAGGTGGTTTGAAACAAATCTCAGCAGGTGAACTTCGTTCTAAAAATGCTGTTCGTTTGATTGAAAAATCAGTTAAAGGCATGCTTCCACATAACACTCTTGGACGTGCACAAGGTATGAAATTGAAAGTATTTGTTGGCGGTGAGCATACACATGCTGCACAACAACCAGAAGTACTTGATATCTCAGGACTTATC

SEQ ID NO: 18372 - protein, 148 aa, Streptococcus agalactiae; identical to SEQ ID NO: 450

SEQ ID NO: 18373 - protein, 390 aa, Streptococcus agalactiae
ATGGCACAAGCACAATATGCAGGTACTGGTCGCCGTAAAAACGCTGTTGCACGCGTTCGTTTGGTCCCAGGTACTGGTAAAATTACAATCAATAAAAAAGATGTAGAAGAGTACATCCCACACGCAGACCTTCGTCTTGTTATCAACCAACCTTTCGCAGTTACTTCAACTCAAGGTTCATACGATGTTTTTGTTAACGTTGTAGGTGGTGGATATGCAGGTCAATCAGGTGCGATCCGTCATGGTATCTCACGTGCACTTTTAGAAGTTGACCCAGATTTCCGCGATTCATTGAAACGTGCTGGACTTCTTACACGTGACGCACGTATGGTTGAACGTAAAAAACCAGGTCTTAAGAAAGCTCGTAAAGCTAGCCAGTTCTCAAAACGT

SEQ ID NO: 18374 - protein, 130 aa, Streptococcus agalactiae; identical to SEQ ID NO: 452

SEQ ID NO: 18375 - protein, 1152 aa, Streptococcus agalactiae
ATGTCCATTCACAAATACCCAAGCAAAAAAGCCAAAAATGGCTATTTGTATTTAGTCAAGGTCTATATGACAAGAGACGGTCAACGTGCTGACCATATCAAACGTGGCTTTCGTACTCGAAAGGAAGCCAAAGATTACGAAGCTAGGCTAATCTACCTTAAGGCTTCAGGAAAATTGGAAGAGTTCATCAAGCCAACTCATAAAACTTATAACGAGATATTCGAGAAATGGTATCAAGCCTATCAAGATACGGTAGAGCCGACCACGGCTTCTCGTACTCTTGATATGTTTAGGCTTCACATTCTGCCAGTCATGGGAGACTTACCCATCAGCAAAATATCCCCTTTAGACTGCCAGAACTTCATCATAGAAAAAGCTAAGGTATTTAAGAATATCAAGCAAATCAAGTCCTACACTGGCAAGGTCTTTGATTTTGCTATCAAGATGAAACTGCTCAAACATAACCCTATGACAGAAATCATTATGCCAAAGCGGAAAAAGACACGGATAGAAAACTATTGGACAGTTCAGGAACTTCAAGAGTTTTTAGCCATAGTGCTTCAAGAAGAGCCTTACAAGCATTATGCACTGTTCAGGCTACTAGCCTACAGTGGCTTAAGGAAAGGCGAGCTATACGCCCTTAAATGGGCTGATATAGATTTTCAGAGTGAGACACTAAGCGTCAATAAAAGCTTAGGACGATTAGACGGACAGGCAATCGAAAAAGGAACTAAAAATGATTTTTCGGTTCGAAGGATAAAGCTAGATAGTGAAACTATTTCTATTCTGCAGGAATGGAAGGCAAATTGCCAAAAAGAAAAGGCACAACTAGCAGTCGCACCTCTTTCTATCGAGCAAGATTTTATTTTTACTTACTGCACACGGTCAGGCTCAATAGAGCCACTACATGCAGACTATATCAACAATGTACTATCACGGATTATCAGGAAGCATGGCTTAAGGAAAATCAGTCCTCACGGTTTCAGGCATACCCATGCTACCTTAATGATTGAAATTGGAGTTGACCCAGTCAACACAGCAAAACGATTAGGACATGCCAGTAGTCAAATGACTTTAGATACTTACAGCCATTCAACAACTAACGGAGAAGATAAGTCCATCAAGCAATTTGCGGACTATCTCAAAGCTAAA

SEQ ID NO: 18376 - protein, 384 aa, Streptococcus agalactiae; identical to SEQ ID NO: 454

SEQ ID NO: 18377 - protein, 549 aa, Streptococcus agalactiae
ATGAATACAAGAATTCCATATCTAGTCGCTTTAAGCGGTAAAACACTGAAACAAATTAGCGAAGAAACCGGAATAGCTTATCCAACATTAACAAGCTATAACCAAGGTGTACGCAATCCTAAAAAAAATAACGCAGTTATTCTTGCAAAATATTTTGGAGTATCAGTTGGATACTTATTAGGAGATGAAAAAGAGCCTAACTTAATAAATCCAGGTGATGAGTCTCTAATAAAAGGTCTTTTTAGAGTGGCTCAAGGTAAAACTAATCTAGACAAAGTAACTGAGTGGACACCTTTCAAAGATGACGTCAGTTTCGTAAAAACAATGCTCCTTTCCACCCCAACACTTGAGAGAAAAATCGATGAGATTTTTGAAGGCATTGAACCTAATATAATTCAAGCACTCAAGCAAAGGATAAAAGAAGTTGCCGAAGAATTTCCTTATACAATTAACCATAGCGGAGATGAGAAATCAGATTATCACTTCGTTTGGCAAGCATGGGAAGAATCGGACGAATACAAGAAAAGAATGGCTGAAAAACACAAAAAA

SEQ ID NO: 18378 - protein, 183 aa, Streptococcus agalactiae; identical to SEQ ID NO: 456

SEQ ID NO: 18379 - protein, 291 aa, Streptococcus agalactiae
ATGGCTTACACACTAGAAGAACGAGAAACGATTGTCCGTTACGATGAAATGGATAAGTGTTGGTATTTTGAAAGTAACGTTAGAAGACACGTTACAAAGATTTTGAAAATGGAGCATGCATTCGACGAAATCGAAAAAGAGCTCGAGAATGATTTTTGTATCTATGTTCGTGCAAAACTGTCTGATTTAAATAACTTTTCAGTCAATCCGTTTGTAAAGAATAAACGAAAACTATCTGACGAACAGAGATTAGAGTTAAGTCGACTTGCTAAAAAACGTTTCTCGTCTGAC

SEQ ID NO: 18380 - protein, 97 aa, Streptococcus agalactiae; identical to SEQ ID NO: 458

SEQ ID NO: 18381 - protein, 279 aa, Streptococcus agalactiae
ATGACAGAAGGATTTACCATTCAGCTCCCCAAAGTAACTGAAAAGAAGTTACTGGCTCGCTATGATGACATGCTTCAAAAGGCAATAGAAAAAGCCCTTGAGGATAAAGAACTCTATAAGCCTATAGTTCGTATGGCTGGCTTGTGCCGTTGGCTAGATGTCTCAACGACAACCGTTGTCAAATGGCAAAAACAGGGAGGGATGCCCCACATGGTGATTGATGGTGTGACCCTGTACGATAAGCACAAGGTCGCTCAATGGCTACAACAATTTGAGAGG

SEQ ID NO: 18382 - protein, 93 aa, Streptococcus agalactiae; identical to SEQ ID NO: 460

SEQ ID NO: 18383 - protein, 324 aa, Streptococcus agalactiae
ATGGACTATGATAACGAAAACTACTTAATACCTAAGATTTTACTACAAGATGATTTCTACAGTAGTCTATCTGCGAAAGATATTTTAGTCTATGCTGTCTTGAAAGATAGACAGATAGAAGCTCTTGAAAAAGGTTGGATAGATACTGATGGCAGTATATATCTAAATTTTAAACTGATTGAATTAGCTAAAATGTTTTCTTGCAGCAGAACCACAATGATAGATGTTATGCAACGATTGGAAGAAGTTAATTTGATTGAACGAGAAAGAGTAGACGTTTTTTATGGCTACTCTTTACCCTACAAAACCTATATCAACGAGGTA

SEQ ID NO: 18384 - protein, 108 aa, Streptococcus agalactiae
MDYDNENYLIPKILLQDDFYSSLSAKDILVYAVLKDRQIEALEKGWIDTDGSIYLNFKLIELAKMFSCSRTTMIDVMQRLEEVNLIERERVDVFYGYSLPYKTYINEV

SEQ ID NO: 18385 - protein, 639 aa, Streptococcus agalactiae
ATGATAAAGATTTATTTTGGAAAAGATGCAGCACTTAACCAAGCTATTCAGTCGCGATTGGATAGTTATCAGATTGACTATCAAGCATTCTCAAGTAAAGATATAGATGCTAAAACACTGATGGAATGGCTGTTTAAGTCAACGGATATATTTGAATTACTAAGTACTAAGATGTTGAAGTATAAGCTAAATACACAAATTACCCTCAGTCAATTTGTTCGAAAGATTTTAAAAGATGTCAATAGCACCTTGAAGCTTCCCATTGTTGTGACAGATGAGGTTATTTATTCGAACATGTCCCCTGACTATGTGACAGTACTCTTGCCAAAAGAATATCGGAAAATTAAAAGAATTCAGCTGATGAGGAAGATGGAGCAGTTAGATGAGGGTCGTCTATTCTGGAAAAACTTTGAATTATTCCGTAAGCAATCAGAGCTACGTTGGTTTGAACTGAATGAGTTACTGTTTGCTGATGTATCCGACGATTTAGGAGAAATCAAAAAAGCTAAAGACCGTTTCTTTAGCTACAAGAAAAATAACCAGGTACCTCCTAATGAGATTATCGAAAGAATCCTCAAAATATTTTTGGTTGACCGAGAAGACTTTTTTAAAAAATCTCCTTCGGACTTACAAAATTTC

SEQ ID NO: 18386 - protein, 213 aa, Streptococcus agalactiae
MIKIYFGKDAALNQAIQSRLDSYQIDYQAFSSKDIDAKTLMEWLFKSTDIFELLSTKMLKYKLNTQITLSQFVRKILKDVNSTLKLPIVVTDEVIYSNMSPDYVTVLLPKEYRKIKRIQLMRKMEQLDEGRLFWKNFELFRKQSELRWFELNELLFADVSDDLGEIKKAKDRFFSYKKNNQVPPNEIIERILKIFLVDREDFFKKSPSDLQNF

SEQ ID NO: 18387 - protein, 873 aa, Streptococcus agalactiae
TTGGAATTAAAAGTCAGCTTAGACAATATTACGATAACAGCTTACATCAAATCATACAAGCTCCTAGGCTTAAAAAGATTGGTTGAAGGTCATACAGCTATTATTATTCAAACTGCTATGACTGATATGTTCAGAGCTTACACAAAGGATGGAGGTCAAGTTGTGCTCCACATGGAATATGACAAAATAAAAGGACAAGCCTTTAATGCTCGCCCTTTCCGTTTGGAGTTCAACCCTAATAAACTCCGTTCAGTAGATACTGAAATTATAGACACTATTATACCATATCTTGAAGATATTTCAATATCTCGTGCTGACTTAGCTTTTGATTTGTTTGAGGTTGATTGTAGTGAGTTTGTGCTAGAGAAAAAAGGGCGCCCCACTGCGACCAAAGAATTTCGTTCAGATACTGGAAAACTAGAAACGAAGTATTTAGGTGCTTCTCGCTCGGAAAAACAGGTTAGGCTGTATAACAAGAAAAAAGAGCAACTAGAAAATGGGACTGACAAAGAAAAGGAATTTGCAAGTCAATTTAAGCATTGGTGGCGATTGGAATTTCAGTTAAGAAGTCGTTCAGTTGAGGAGATATTCGAGGTTATCAATACTGTTGTTTTTAAACCATTCAAATTTGAAGGTTTACCTGTTGAAACTCAGATCTATCTTGTAGCTCTTACACGAGATAAAAATCTCTGGAAGCAACTACACAGAAACACACGAGCAAAATACAAAAAGATTTTAGAAACCTATCAAACATCAGATATTGATTATTTAGGTTTGCTGAAAGACTTGTTGAAGCATGAAAGACTAAGACTAGAAAATCAGCTCGCTTATTATGGGGGTAGGATAGACAAAAATAGCTTTCAACCCTTTTGT

SEQ ID NO: 18388 - protein, 291 aa, Streptococcus agalactiae; identical to SEQ ID NO: 464

SEQ ID NO: 18389 - protein, 432 aa, Streptococcus agalactiae
ATGAGAATAAAAGATTATGCTGATAGTCTAGGAGTTAGTAGCCAATCTATCTATAAACGCATACGCTCTCCAAAATATAAAGAAAGGTTGAAAGGTCATTTATACCGAGACAACCAAAAGGTTGAAAATCTTGATTTGATAGGCATTAAGATACTTGAAGATTATCATTTTGAGAATGATGTCATTGAACTGGAAAAAACGCTGGGTGATATTCAAGAAGAATTCGAGCAAGAAAAGAAGGGAATGCAATATCGGATAGATAGACTAGCTGATAAGTTAACTCCTTTACTTGAGGATAACCAAAACTTGGTACAAAAAAATTATGAGTTACTCAACTATGTTCGGAGCTTGGAACGACAGAAGCTATTACTGATTATTGCTTTAGCTGTCATGGTAATCACTTTATTAGTGGCAATATGGCTTGCCATCTTT

SEQ ID NO: 18390 - protein, 144 aa, Streptococcus agalactiae; identical to SEQ ID NO: 466

SEQ ID NO: 18391 - protein, 1254 aa, Streptococcus agalactiae
ATGAGTTATGTTGTTGCTAGAATGGCTAAGTACAAGTCAGGTCAGTTGACGGCTATTTATAATCATAATGAACGGATTTTTAAAAATCACTCAAATAAAGAAATTGACGTTGAGAAATCTCACCTTAATTATGAACTGACAAATCGAGACCAGGCACAAAATTATCACAAACAAATAAAGGAGCATATCAATGAAAATCGCTTATCTACTCGTGGAGTCCGTAAAGATGCTATACTCTGTAACGAATGGATTATTACTTCAGATAAAACGTTTTTTAACTCGTTAGATGAGAAACAGACACGAGAGTTTTTTGATACAGCTAAAGATTATTTTGCTGAAAAATATGGTGATGCTAATATTGCTTACGCTAGAGTTCACCTTGATGAAAGTACTCCGCATATGCATTTAGGTATCGTGCCAATGAAAAATGGTAAGTTAAGTTCAAAAGCACTGTTTGGAAATAAAGAGAAACTTGTAGCAATCCAAGATGAACTTCCCAAGTACCTTAATGAGCATGGCTTTAACCTACAACGTGGCGAAATAGGCAGTAAGAAAAAACATTTGGAAACTGCTGAATTTAAAGAAAAACAACGATTACTGGATAACGCTGATAGAAAACTAGCTGATAAACATGAAGAATTGAAAGCACTTGATGATAAGATTTCAAATGTTAACGATACAATAGCTGATAAAGAAAGTAGGCTTAAAGAATTGGAAGCGAAAGAATGGGATGCTGTTGGCGATTTGAAGCAGTATGAATTAGAGAAACAGTCACTAGCTGAAAGCATTGAAGACATAAAAGACATTGAACTATTACAACTTGATAGAATTCAAAAAGAAGATTTGGTAAAACAAAGCTTTGATGGCAAATTGAAGATGGATAAAGAAACCTATAATAGACTATTTCAAACTGCTTCGAAACATGCATCTAGTAATGCTGAGTTAAAAAGAGACTTGGTTAAAGCCCAGTCGCAGAACAATCACCTTTCTAGAGAATTACTCAATCACCGTAAGACAGCTGAAAAAAATATCAAATTAAGTCAAGAAAACAGAAAATTAAAGGACAAAGTAAAAATGCTTGATGAACAAGTGAAAATTCTGAATAAAAGCCTCTCTGTTTGGAAAGAAAAAGCTAAAGAATTTATGCCTAAACAGGTTTATAGAGAAACATTATCAATCATAAACACTCTAAATCCTATTGGTTTAGCTAAAACAGCAATCAGACAAGTTAAGAAGATGGTTGATAGTAATAGT

SEQ ID NO: 18392 - protein, 418 aa, Streptococcus agalactiae; identical to SEQ ID NO: 468

SEQ ID NO: 18393 - protein, 468 aa, Streptococcus agalactiae
ATGACAGATAAAAAAATTGTTTATTACTTTGACCATGACTTATCAAAAAAAGATATGGGAGGAGTAGGACCTACCTACACCGGTAAAAATCTTTTATTCCTACTTTGGTGGACATATTCTTATGTGGCAGAAGACAATTTAGACATTGATACGTCATTGTTTGAAGTCCCAGAATTCAATGATTTTTACAATAATGGTCTAGAGCTTTATCGTATAAAAAATGAACTAGCTAATTACAATATCAGATTTGGATATGAGGTTAATCCAAAAGATAGTACAAAGATGCTGATAGGTATTTTGCCAACTGATGAAGAAGATTATGTTAAGGGATATAGAAATTTTATTGCTGATATTTCCAATCCTGACACACGTTACGCAATCTATCATCGACTAATTAAAACCATGGACACAATGCTACCGATTGAACAAATTAATGTTTATAAAAGCCTTGCAAAAGGTAATAAAAAG

SEQ ID NO: 18394 - protein, 156 aa, Streptococcus agalactiae; identical to SEQ ID NO: 470

SEQ ID NO: 18395 - protein, 333 aa, Streptococcus agalactiae; identical to SEQ ID NO: 9233

SEQ ID NO: 18396 - protein, 111 aa, Streptococcus agalactiae; identical to SEQ ID NO: 9234

SEQ ID NO: 18397 - protein, 285 aa, Streptococcus agalactiae; identical to SEQ ID NO: 9235

SEQ ID NO: 18398 - protein, 95 aa, Streptococcus agalactiae; identical to SEQ ID NO: 9236

SEQ ID NO: 18399 - protein, 288 aa, Streptococcus agalactiae; identical to SEQ ID NO: 9241

SEQ ID NO: 18400 - protein, 96 aa, Streptococcus agalactiae; identical to SEQ ID NO: 476

SEQ ID NO: 18401 - protein, 405 aa, Streptococcus agalactiae; identical to SEQ ID NO: 9243

SEQ ID NO: 18402 - protein, 135 aa, Streptococcus agalactiae; identical to SEQ ID NO: 478

SEQ ID NO: 18403 - protein, 558 aa, Streptococcus agalactiae
ATGGTATTTACATATACCGAGAAAGAACTTCGTGAATTCAATATTGGAGATAATGTATATTCAGTTAACCCCGATTATGCAGAAAAAAATCATTCAACTGTCATAACGGATTTACCCCAGAAAGATAACGAAACAAATATTATTACAACAGAAGATAGAAAAAAATTTAAGGTATTAAAAACTTCTCCTGACGATATGTCTGGCTATCAGGGTATGGCAGTTGCACCAATTATCAAGGGTAAAGTAGATTATAACAGTGTTGCAGTTATATCCGCCGCAACGGATTCAAGTAATTATAAAGATTTAATTGGCGCAGTTTCATCTGCTCAACCACATCAAAGTTCGACTCAGTTAAAATCAGCTGATAAATTTTTAAAAGACGTACAGTCACATGACAAATGGACTGTGACTCAGCTTTCAGGCTATTCTCAATCTGCATATATGTTAAAATTAGGTGCTCAATATCATATCCCGACTACAGTATTTAATGGATGGTTTAGGTATAGCACTTTAAATGAAGATGAAAAAAATTCATGGCTAAGCATCCTGAATATTTTG

SEQ ID NO: 18404 - protein, 186 aa, Streptococcus agalactiae; identical to SEQ ID NO: 480

SEQ ID NO: 18405 - protein, 260 aa, Streptococcus agalactiae
ATGGCTAAGCATCCTGAATATTTTGTGAATTTTCGACATAAAGAGGATAATGTAACTTGGTGGAACGATTTTAATAAACTAGATGATAAAGATTATGGTACCGTGAAATGGGTAAATGGTAAAAGTCATAAAATAGAGAGTTGGAAATTTACTGATGATGGTAAGTTAAAAGATGAAAAAGGTAACATCGTAAATCCTAAGTCACCAGCTGTTCAGTCTGTTCTTTATGAAGAAGTTCATTTAAAAAGCTAAAGCTAAAT

SEQ ID NO: 18406 - protein, 87 aa, Streptococcus agalactiae
MAKHPEYFVNFRHKEDNVTWWNDFNKLDDKDYGTVKWVNGKSHKIESWKFTDDGKLKDEKGNIVNPKSPAVQSVLYEEVHFKKLKLN

SEQ ID NO: 18407 - protein, 243 aa, Streptococcus agalactiae
GTGATGCCTCCTGGTATAACAGATTTAAGTCCGGAAGAATTAGCTGATACATATAGTGAGGGCGGAGTTAGAGAGGACACCATAGTAACACCAATTGAAACTTTCTTTGATGAAAAAGTTACTAATGCACAAGAGATTACAACTTCATATATTAATCTTCAAAAACAAATTGAATCTGGTGTCCAAAAATTGCTAGAAGAGGACTCCAAATTAGCAGGAGAATTTAAGGAATGGTCACAGTAC

SEQ ID NO: 18408 - protein, 81 aa, Streptococcus agalactiae
MMPPGITDLSPEELADTYSEGGVREDTIVTPIETFFDEKVTNAQEITTSYINLQKQIESGVQKLLEEDSKLAGEFKEWSQY

SEQ ID NO: 18409 - protein, 384 aa, Streptococcus agalactiae; identical to SEQ ID NO: 9251

SEQ ID NO: 18410 - protein, 128 aa, Streptococcus agalactiae; identical to SEQ ID NO: 484

SEQ ID NO: 18411 - protein, 279 aa, Streptococcus agalactiae; identical to SEQ ID NO: 9253

SEQ ID NO: 18412 - protein, 93 aa, Streptococcus agalactiae; identical to SEQ ID NO: 9254

SEQ ID NO: 18413 - protein, 96 aa, Streptococcus agalactiae; identical to SEQ ID NO: 4829

SEQ ID NO: 18414 - protein, 32 aa, Streptococcus agalactiae; identical to SEQ ID NO: 488

SEQ ID NO: 18415 - protein, 102 aa, Streptococcus agalactiae; identical to SEQ ID NO: 4831

SEQ ID NO: 18416 - protein, 34 aa, Streptococcus agalactiae; identical to SEQ ID NO: 490

SEQ ID NO: 18417 - protein, 123 aa, Streptococcus agalactiae; identical to SEQ ID NO: 4833

SEQ ID NO: 18418 - protein, 41 aa, Streptococcus agalactiae; identical to SEQ ID NO: 4834

SEQ ID NO: 18419 - protein, 858 aa, Streptococcus agalactiae; identical to SEQ ID NO: 9261

SEQ ID NO: 18420 - protein, 286 aa, Streptococcus agalactiae; identical to SEQ ID NO: 492

SEQ ID NO: 18421 - protein, 1178 aa, Streptococcus agalactiae
ATGAATATTAATGGTATAAAATTACTATCTAGTCGAGCAGTCAGTAAACTTGGTGATGTGTTTTATGATTATGGAAATAGTACTTGGATTGCTTCGATGGGTGGTCTAGGACAAAAGATTTTAGGTATTTATCAGATAGTAGAGTTGTTGGTTTCTATTGTCCTCAACCCTTTTGGAGGCGCCTTAGCTGATCGCTTTCAACGAAGAAAAATTTTACTAATAACAGATGCTATCTGTGCTATCATGTGTTTCTTACTTTCTTTTATTGGAGATGATAAAGTAATGGTGTATGGTCTAATAGTTGCTAATGCTATCTTAGCGGTTTCCAATGCTTTTTCTTCTCCGGCTTATAAATCTTATATTCCTGAAATAGTAGATAAAGCTGATATCATTACCTATAATGCTAATCTGGAAACCATTGTGCAAATTATTAGTGTAAGTTCCCCTGTTTTAGGTTTCCTTATTTTTAATAATTTTGGTATTAGGATTACTTTAATTGTTGATGCGATTACTTTTTTGATCTCTTTCCTGTTTCTTTATGCTATTAAAGTGGAAAGGGTACAGCTTTCAAAACAAGAAAAGGTAGCGATAAAAAATATTTTAGCTGATATTGCAGATGGATTTACTTACATCAAAAAAGAAAAAGAAATTATGTTTTTTCTAATTATTGCTGCTTTATTAAACACTTTCCAGCAATGTTCAATTATCTTTTACCTTTTACTAACTCCCTATTAAAAACTTCAGGTGCTTATGCAACAATACTTAGTATATCAGCTATCGGATCAATTATTGGAGCGCTTATTGCTAGAAAAATTAAATCTAGTATTAATTCTATGCTATCTATGCTAGTATTCAGTAGTTTGGGAGTCATAGTTATGGGATTCCCATCTCTATTTGAATTACCGATATGGATACCTTACAGTGGTAGTTTTCTTTTTAATAGTCTTCTGACAATGTTTAATATTCATTTTTTCAGTCAGGTACAAATCAGGGTCGATGAAGCGTATATGGGGCGTGTGATGTCGACTATATTTACTATTGCTATTATGTTTATGCCTATAGGAACACTATTTATGACTATCTTTTCATTTGCCTTATCAAATGTTAGCTTTATTGTTATAGGATGTGCCATTGCTATATTGGGAGGATTAGGATTTAGCTATAGTAAAAAACAATTT

SEQ ID NO: 18422 - protein, 393 aa, Streptococcus agalactiae; identical to SEQ ID NO: 494

SEQ ID NO: 18423 - protein, 648 aa, Streptococcus agalactiae
ATGAAACAAATGAATACTTTCCAACAATTTATCTACTACTTCCAACATAATGGTAGTTATATCTTAGAACAATTTATCCACCACTTTTTAATTTCAGTTTACGGCGTTATTTTAGCTGCAATTGTTGGTATCCCTCTAGGTATCTTCATCGCTAGACGTGGTAAAATTAAAACCTTTGTTATGGGAAGCGCAAATGTCATCCAAACCATTCCTTCTTTAGCTATGATCTCTATCATTATGTTAGGTCTAGGGCTAGGTATTAAAACAGTAGTTGCAACTGTCTTTCTTTATTCTCTTCTGCCAATCATCACAAATACTTACACTGGTATTAGAAATGTTGACTCCGACTTACTAGATGCTGCTAAAGGAATGGGCATGACTAAGCGTCAACGTTTATTTATGGTTGAGTTACCACTATCTATTTCCGTTATCATGGCTGGACTTAGAAATGCCCTTGTTGTAGCAATTGGTATTACAGCCATTGGTGCTTTCGTCGGGGGAGGCGGACTTGGAGATATCATCATAAGAGGAACTAATGCAACAAATGGTGGTGCTATTATCTTAGCAGGATCTCTTCCAACAGCCCTTATGGCAATTTTCTCTGATTTAATCCTAGGCGGTATCCAACGCATGCTTGAACCAAGAAAA

SEQ ID NO: 18424 - protein, 216 aa, Streptococcus agalactiae
MKQMNTFQQFIYYFQHNGSYILEQFIHHFLISVYGVILAAIVGIPLGIFIARRGKIKTFVMGSANVIQTIPSLAMISIIMLGLGLGIKTVVATVFLYSLLPIITNTYTGIRNVDSDLLDAAKGMGMTKRQRLFMVELPLSISVIMAGLRNALVVAIGITAIGAFVGGGGLGDIIIRGTNATNGGAIILAGSLPTALMAIFSDLILGGIQRMLEPRK

SEQ ID NO: 18425 - protein, 924 aa, Streptococcus agalactiae; identical to SEQ ID NO: 9267

SEQ ID NO: 18426 - protein, 308 aa, Streptococcus agalactiae; identical to SEQ ID NO: 498

SEQ ID NO: 18427 - protein, 633 aa, Streptococcus agalactiae
ATGGTCAATTTCTTATCACAGTATGGCATGCAAATATTAGTAAAAACATGGGAACAAGTCTATATCTCATTCTTTGCTATAGCACTTGGGATTGCAATTGCTGTTCCATTGGGTGTGGTCTTAACACGTTTTCCCAAAGTAGCCAAAATTATCATTGCTATAGCTAGCATGTTACAAACTATACCAAGTTTAGCCTTATTAGCTTTAATGATTCCATTGTTTGGAATTGGAAAAATCCCAGCTATCGTTGCTTTATTTATTTATTCCTTGCTTCCTATACTAAGGAATACTTATATAGGTATGAATAATGTCAATCCAACACTTAAAGATTGTGCTAAAGGGATGGGAATGAAACCTATTCAATCTATATTTCAAGTTGAGTTACCTTTAGCTACTCCAATTATTATGGCTGGTATTCGCTTGTCTACTATTTATGTTATTGCTTGGGCTACATTGGCTTCTTATATAGGTGCAGGTGGACTTGGTGATCTCATTTTTAGCGGGTTAAATCTTTTTCAGTCCAAATTAATTCTAGGGGGCACAATTCCTGTTATTATCCTGTCACTTATTATAGATTATCTTTTAGGATTACTGGAAACAGCTCTAACGCCCAGAACAACAAGAAGGGAGGCT

SEQ ID NO: 18428 - protein, 211 aa, Streptococcus agalactiae; identical to SEQ ID NO: 500

SEQ ID NO: 18429 - protein, 1143 aa, Streptococcus agalactiae
ATGGGCCAAGAACCTATCATCGAATATCAAAATATCAATAAAGTGTATGGGGAAAATGTTGCGGTTGAAGACATTAACCTTAAAATTTACCCTGGTGATTTTGTTTGTTTCATCGGTACGAGTGGATCAGGTAAAACAACATTAATGCGTATGGTTAACCATATGTTAAAACCAACAAATGGTACTCTATTATTTAAGGGAAAAGATATTTCTACTATTAACCCCATTGAATTAAGACGCAGAATTGGATATGTTATCCAAAACATTGGTTTAATGCCTCATATGACCATTTACGAAAATATAGTTCTTGTACCAAAATTATTGAAATGGTCAGAAGAAGCTAAAAGAGCTAAAGCAAGGGAACTTATTAAATTAGTTGAATTACCCGAAGAATATTTGGATCGCTACCCTAGTGAGTTGTCTGGCGGTCAGCAACAACGTATCGGTGTCATTCGCGCTCTTGCAGCAGACCAAGATATTATTTTAATGGATGAGCCTTTTGGAGCTCTGGATCCTATTACTAGAGAAGGTATTCAAGACTTAGTCAAGTCTCTTCAGGAAGAAATGGGGAAAACTATCATCTTAGTTACTCATGATATGGATGAAGCCCTCAAGTTAGCAACAAAAATTATTGTTATGGACAATGGTAAAATGGTCCAAGAAGGGACACCCAATGATCTCTTACATCATCCTGCTACTAGTTTCGTTGAACAAATGATTGGAGAAGAGCGTCTCCTTCATGCGCAGGCTGATATTACTCCTGTTAAACAGATAATGTTAAATAATCCTGTTTCAATAACTGCTGAAAAAACACTAACTGAAGCTATTACACTAATGCGCCAAAAACGCGTTGACTCACTTCTAGTAACCGATAACGGTAAATTAATTGGTTTTATTGACTTAGAATCTCTAAGCAGTAAATATAAGAAAGATCGACTTGTTTCTGATATCTTAAAACATACTGATTTTTATGTTATGGAAGACGACTTACTTAGAAATACTGCTGAGCGTATTTTAAAACTTGGTTTAAAATACGCTCCAGTTGTTGACCATGAGAATAACTTAAAGGGCATTGTTACTCGTGCATCCCTAGTTGATATGTTATACGATATTATTTGGGGCGATACTGAAACGGAGGATCAA

SEQ ID NO: 18430 - protein, 381 aa, Streptococcus agalactiae; identical to SEQ ID NO: 502

SEQ ID NO: 18431 - protein, 429 aa, Streptococcus agalactiae
ATGTTAGCAGCATCTATCCACTTATCGCGTGGTACTCCTTATATATATATGGGTGAAGAAATCGGAATGCTTGATCCCGATTACAGTTCTATGGATGATTATGTGGATATTGAGAGTTTGAATGCCTACCAAATAATGCTTGATGAAGGCAAGTCACAAGAAGAGGCATTTAGCATTATTCGAGCGAAATCTCGAGACAATTCTCGAGTACCAATGCAATGGGATGATAGTACGAATGCAGGTTTTTCTGAAGGCGCTCCATGGTTGAAAGTAGGAAAATCATATAAAGAAATCAATGTCGCAAAGGAGAAAACAGGGCTGATATTTACTTTCTATCAAGAGTTGATAAGGCTACGTAAACCACTGCCCAATATAGCTGACGGGAATTATAAAGCAGCTTTCAAAGATAATGAAAAAGTATATGCTTTT

SEQ ID NO: 18432 - protein, 143 aa, Streptococcus agalactiae
MLAASIHLSRGTPYIYMGEEIGMLDPDYSSMDDYVDIESLNAYQIMLDEGKSQEEAFSIIRAKSRDNSRVPMQWDDSTNAGFSEGAPWLKVGKSYKEINVAKEKTGLIFTFYQELIRLRKPLPNIADGNYKAAFKDNEKVYAF

SEQ ID NO: 18433 - protein, 684 aa, Streptococcus agalactiae
ATGCTAGAGGCTCTTCTTAAAGGACATGAGGCTGTCTGTGAATTAATCGCCTTTCAAGAAGAGATTGTTACTGCTATTGGTAAAGAAAAAGCCGAGGTAGAACTTCTTCAAGTTGATCCAGAACTTCAAGCAGAAATTATTGCTACTCATAACATAGCTTTACAGGCTGCAGTACAAGTTGAAGAGAAAAAGGCTAGAGAAGCAGCTACAGAAGCAGTTAAAGAAGTAGTTATAGGTGAATATGAGGCACGTTACGCTGAACATGAAGAATATGATCGCATTATGCGTGATGTTGCTGAAATTTTAGAACAAATGGAACATGCAGAAGTTCGTCGCCTCATTACAGAAGATAAGATTCGTCCTGATGGACGTCGTGTGGATGAGATTCGTCCATTAGACGCAGAGATTGATTTTTTACCACAAGTTCATGGATCAGGTCTCTTTACACGAGGACAAACCCAAGCATTATCAGTATTAACGTTAGCACCTATGGGTGAAGCACAAATCATTGATGGGCTAACACCAGAGTATAAGAAACGCTTTATGCACCACTATAACTTCCCACAATATTCAGTTGGTGAGACGGGACGTTATGGAGCTGCAGGGCGTCGTGAAATTGGTCACGGTGCTTTAGGAGAGCGTGCATTAGAACAAGTCCTTCCAAGCTGGCNNNNNTTAATTAAT

SEQ ID NO: 18434 - protein, 228 aa, Streptococcus agalactiae
  VARIANT 224, 225: Xaa = Any Amino Acid
MLEALLKGHEAVCELIAFQEEIVTAIGKEKAEVELLQVDPELQAEIIATHNIALQAAVQVEEKKAREAATEAVKEVVIGEYEARYAEHEEYDRIMRDVAEILEQMEHAEVRRLITEDKIRPDGRRVDEIRPLDAEIDFLPQVHGSGLFTRGQTQALSVLTLAPMGEAQIIDGLTPEYKKRFMHHYNFPQYSVGETGRYGAAGRREIGHGALGERALEQVLPSWXXLIN

SEQ ID NO: 18435 - protein, 519 aa, Streptococcus agalactiae
GTGACAGAGAGTTTAAGAGCTAATACTGGTAATAAATTATACTTGCAAGATGACTTAAGAGGAAAGAACGTTGATAAAGTCAAAGCACTAGCGACTGAAAAAAAAGTATCCATTTCCTGTGCTGGAAAGGCCTATGCGGATTTATCAGAGATAATGACAAAGGCAGAGAATGAAGAAAATCCTCTCATTTTAATCCTTGATGGTCTGACCGACCCTCACAACCTAGGTTCTATTCTACGCACAGCTGATGCAACCAATGTAACAGGTATTATCATCCCCAAACATCGTTCTGTTGGAGTGACCCCAGTGGTTTCAAAGACATCTACAGGAGCTGTTGAACATGTTCCTATTGCAAGGGTAACTAATCTCAGTCAAACTTTGGATACTTTAAAAGATAAGGAGTTCTGGATATTTGGCACTGATATGAATGGGACACCATCGCATAAGTGGAATACCAAAGGTAAATTAGCCCTAGTTATTGGTAATGAAGGGAAAGGTATTTCTCATAANNNNNTTAAT

SEQ ID NO: 18436 - protein, 173 aa, Streptococcus agalactiae
  VARIANT 170, 171, 172: Xaa = Any Amino Acid
MTESLRANTGNKLYLQDDLRGKNVDKVKALATEKKVSISCAGKAYADLSEIMTKAENEENPLILILDGLTDPHNLGSILRTADATNVTGIIIPKHRSVGVTPVVSKTSTGAVEHVPIARVTNLSQTLDTLKDKEFWIFGTDMNGTPSHKWNTKGKLALVIGNEGKGISHXXXN

SEQ ID NO: 18437 - protein, 456 aa, Streptococcus agalactiae
ATGAGAAAATATATAAAATGGTTAATTCCCATATCAATTTTGGGGATGATACTTGAGGGCTGTCAAATGAATAGTGAACATAAAAGTCAGTCAAACGAAGTAAAAAATAGCAAGCAATCAGAAGTGAAGAAAGATAAAAAAATGACAAAAAAAGAACAATTAGCCTATCTCAAAGAGCATGAGCAAGAAATCATAGATTATGTAAAATTACATAACAACCAAATTGAGTCCGTTCAATTCGATTGGTCAAGTGTAAAAGTAGAACAAAGCGGGAATGGAACTCCACAAGGGGGTGATTATAATCTTTCACTGAGAGGAAAGTTTAATCATCTACAAAATTCAAAATTAATAGTTGATTTTTATTTAGCTCATAAAAATGATATCCCAAATATCAAATCAATGGGAATGCTAAATAAGCCGTATATACATAAAAATGGTATTTGGCACATTTATGAA

SEQ ID NO: 18438 - protein, 152 aa, Streptococcus agalactiae
MRKYIKWLIPISILGMILEGCQMNSEHKSQSNEVKNSKQSEVKKDKKMTKKEQLAYLKEHEQEIIDYVKLHNNQIESVQFDWSSVKVEQSGNGTPQGGDYNLSLRGKFNHLQNSKLIVDFYLAHKNDIPNIKSMGMLNKPYIHKNGIWHIYE

SEQ ID NO: 18439 - protein, 216 aa, Streptococcus agalactiae; identical to SEQ ID NO: 9485

SEQ ID NO: 18440 - protein, 72 aa, Streptococcus agalactiae; identical to SEQ ID NO: 9486

SEQ ID NO: 18441 - protein, 558 aa, Streptococcus agalactiae; identical to SEQ ID NO: 9487

SEQ ID NO: 18442 - protein, 186 aa, Streptococcus agalactiae; identical to SEQ ID NO: 9488

SEQ ID NO: 18443 - protein, 576 aa, Streptococcus agalactiae; identical to SEQ ID NO: 9489

SEQ ID NO: 18444 - protein, 192 aa, Streptococcus agalactiae; identical to SEQ ID NO: 9490

SEQ ID NO: 18445 - protein, 678 aa, Streptococcus agalactiae; identical to SEQ ID NO: 9491

SEQ ID NO: 18446 - protein, 226 aa, Streptococcus agalactiae; identical to SEQ ID NO: 522

SEQ ID NO: 18447 - protein, 945 aa, Streptococcus agalactiae; identical to SEQ ID NO: 9493

SEQ ID NO: 18448 - protein, 315 aa, Streptococcus agalactiae; identical to SEQ ID NO: 524

SEQ ID NO: 18449 - protein, 489 aa, Streptococcus agalactiae; identical to SEQ ID NO: 9495

SEQ ID NO: 18450 - protein, 163 aa, Streptococcus agalactiae; identical to SEQ ID NO: 526

SEQ ID NO: 18451 - protein, 159 aa, Streptococcus agalactiae; identical to SEQ ID NO: 4875

SEQ ID NO: 18452 - protein, 53 aa, Streptococcus agalactiae; identical to SEQ ID NO: 4876

SEQ ID NO: 18453 - protein, 599 aa, Streptococcus agalactiae
ATGAAAAATAATATTATTTTTTCTATGAACAGTATATTAATGACCAAGAGATGCCAAAAGGAAAACAAAAAGTTATTTTATCCGCTATAGAGCTCTTTGCCTCACAAGGCTTCCATGGAACTTCCACTGCTCACTAGCTAAAATGCAGAAGTTAGCCAAGCAACTATATATAAATATTTTGAAACTAAAGACAAGCTTTTGTCTTATTCTCGAGTTAATCGTACAAACTATTGGACGCCCCTTCTTTACAGAATTATCTACATTTTCTACTAAAGAGGAACTAATTCATTTCTTTGTACAGGACCGTTTAAATTTTTGAAAAAAATAATGATCTCATTAAAATATTGATGCAAGAATTATTAATCAATAGTGAAACATCAACTATTTTTACTAAGCTAATAAATTCAACTGATCCAAACATTACTAAAATTTTCAACTGTTTAAGTGAAGGAAATTCGTTGAATAAAATGGAAATACTTCGAGCAGTAATCGGACAGTTCATTACTTTCTTTATTCAATTATATATCCTTAATATAAAGCCTGAAAATCTAGAGGAAGAACTAAAACAAATAGAAAAACAAATATTAAAATTACTGAGC

SEQ ID NO: 18454 - protein, 202 aa, Streptococcus agalactiae
  VARIANT 9, 45: Xaa = Any Amino Acid
MKNNIIFSXEQYINDQEMPKGKQKVILSAIELFASQGFHGTSTAXLAKNAEVSQATIYKYFETKDKLLVFILELIVQTIGRPFFTELSTFSTKEELIHFFVQDRFKFIEKNNDLIKILMQELLINSETSTIFTKLINSTDPNITKIFNCLSEGNSLNKMEILRAVIGQFITFFIQLYILNIKPENLEEELKQIEKQILKLLS

SEQ ID NO: 18455 - protein, 257 aa, Streptococcus agalactiae
TTGGCTCTGGTTGCCTTATCATTAGGAATCTTAATGTCTACTCTAGCAAAATCAGAATTTCAAATGATGCAATTTATTCCCTTAATTATAATGCCTCAATTATTCTTTTCAGGAATAATCCCTCTAGAAAATATGGCAAGTTGGGCTCAGACAGTCGGTAAAATTCTACCGCTCTCCTACTCTGGTGATGCACTTACAAAAATAATTATGTACGGTCAAGGATACTAACGTTCTCAAATCTTCTGTACTCTTCTATT

SEQ ID NO: 18456 - protein, 88 aa, Streptococcus agalactiae
MALVALSLGILMSTLAKSEFQMMQFIPLIIMPQLFFSGIIPLENMASWAQTVGKILPLSYSGDALTKIIMYGQGLPNVSSNLLVLLLF

SEQ ID NO: 18457 - protein, 111 aa, Streptococcus agalactiae
TTGCTTCCTCTTAATAGGATATTACCTACTGGCCTAGAAGTACGTCATGATATTTGTAGAAATTGTGGTACTATTGCTAAAAATTATATAAATGACTTGGATAAATTGAAA

SEQ ID NO: 18458 - protein, 37 aa, Streptococcus agalactiae
MLPLNRILPTGLEVRHDICRNCGTIAKNYINDLDKLK

SEQ ID NO: 18459 - protein, 334 aa, Streptococcus agalactiae
ATGAGAATTATTGCAATAACTGAAAAGGTTATAAAAGAACTGTTTCGTGATAAAAGAACACTTGCTATGATGTTTTTAGCACCTATTTTAATTATGTTTTTGATGAATGTTATGTTTTCTGCGAATAGTAATACAAAAGTTAAGATTGGAACTATTAACGTTAACACGAAGGTCGTTTCAAATTTAGATAATATTAAGCATATTCAAGTGAGATCATTTAAATTTAACTCATCTGCTAAAAAAGCACTCAAATCAAATAAAATTGATGCTCTTATTTCGGAGGACAATAAATCTTATACTGTCTTCTATGCGAATACAGATTCTTAGACGACTT

SEQ ID NO: 18460 - protein, 112 aa, Streptococcus agalactiae
MRIIAITEKVIKELFRDKRTLAMMFLAPILIMFLMNVMFSANSNTKVKIGTINVNTKVVSNLDNIKHIQVRSFKFNSSAKKALKSNKIDALISEDNKSYTVFYANTDSSRRL

SEQ ID NO: 18461 - protein, 711 aa, Streptococcus agalactiae
ATGAAAAAAGTCATCGATTTAAAAAAACTACAAAAAGCATATGCCTCAGAAACCGTTTTAAATAATATTAATTTGGAGGTGTTTAAAGGCGAAATAATTGGATTAATAGGACCCTCTGGAGCAGGGAAATCTACCTTGATTAAAACTATGCTTGGCATGGAAAAAGCAGATAAGGGAACAGCTCTTGTTCTTGATACTCAAATGCCAGATCGTAATATTTTAAATCAAATTGGCTATATGGCTCAATCTGATGCCTTATACGAGTCTTTAACTGGCTTAGAAAATTTATTATTCTTTGGAAAAATGAAAGGTATTCAAAAAACTGAATTAAAACAGCAGATAACTCATATTTCTAAAGTAGTAGATCTAGAAAACCAACTTGATAAATTTGTCTCAGGTTACTCAGGAGGTATGAAAAGACGGCTTTCTCTAGCCATCGCCCTACTTGGAAACCCCACAGTTTTAATCCTAGATGAACCTACCGTTGGAATTGATCCATCCTTGAGGAGAAAATCTGGCAAGAGCTATTATATTAAGGATGAAGGACGTTCTATCTTTATTACAACCCACGTTATGGATGAAGCAGAATTAACAAGTAAGGTTGCACTACTATTACGTGGAAACATTATTGCCTTTGATACTCCATTACATTTAAAAAAACAATTTAATGTGAGTACTATTGAGGAAGTTTTCTTAAAAGCTGAAGGAGAA

SEQ ID NO: 18462 - protein, 238 aa, Streptococcus agalactiae; identical to SEQ ID NO: 9320

SEQ ID NO: 18463 - protein, 681 aa, Streptococcus agalactiae; identical to SEQ ID NO: 9321

SEQ ID NO: 18464 - protein, 227 aa, Streptococcus agalactiae; identical to SEQ ID NO: 532

SEQ ID NO: 18465 - protein, 309 aa, Streptococcus agalactiae; identical to SEQ ID NO: 9323

SEQ ID NO: 18466 - protein, 103 aa, Streptococcus agalactiae; identical to SEQ ID NO: 534

SEQ ID NO: 18467 - protein, 702 aa, Streptococcus agalactiae
ATGAAAATAGATAAAAAAGAACTTTTAGCACTTATTGCTAGATTATTTTATTAATTTTTGCTTCTGTTACGTTTTTCTTATTTAAAGATCATGGCACTACTCAAATGGATACTGTAGAAAGCAGTGTTAACCATGTCAGTGATTCTCAATTAACTGAGGCACAAGATATGTTAGATAAATTTGAGAAGAAACCTTCAGAAAAATTATTGAAGGATGTCGAACTTGCTTTAAATAAATTGTCCAATTCTTCTAAAAAAGAAGCTTTGCAAAAACGTTTTAAGAAAGCAAAAGATAAGTATCTTAAAGACGAAGCAGATAAGAAAGCTACCAAAGATGCTACAGATTTAGTAGAAATTTAGAACAAGCCCCTTCAGAAGAAAATGTGTAAAAGCTGAAGCAGCAGTCAATAAGTTAACTGTCAAAGAATCTAAAGAAGCTTTACAAAAACGTATTGATACTGTTAAGACACAATATGGTTTGATTGGGAATCAAACTCCCTCTAGTTCAGTAGCTGAAACTACAGAACAAGGGACAGCTAATCCTGCTAGTCAGGATACTTCTAGTTACGTTAATCAGAATGTAGCACCAACTTATGAGCAACCGCAAGCGAATAATACACCAGTTACTCCAGGGGTTAACAATACTGTTCCGACTCCAGGAACTGGTACTGTACCTGCTACTAATGGGACAGGTGTTGCTCAG

SEQ ID NO: 18468 - protein, 235 aa, Streptococcus agalactiae
  VARIANT 14, 120: Xaa = Any Amino Acid
MKIDKKELLALIAXIILLIFASVTFFLFKDHGTTQMDTVESSVNHVSDSQLTEAQDMLDKFEKKPSEKLLKDVELALNKLSNSSKKEALQKRFKKAKDKYLKDEADKKATKDATDLVEIXEQAPSEENVLKAEAAVNKLTVKESKEALQKRIDTVKTQYGLIGNQTPSSSVAETTEQGTANPASQDTSSYVNQNVAPTYEQPQANNTPVTPGVNNTVPTPGTGTVPATNGTGVAQ

SEQ ID NO: 18469 - protein, 1148 aa, Streptococcus agalactiae
ATGACGAAGTACATCAAGGCTGACCGATTCTTTTATGCTGATCATGTAAAGGAAAACGGTTATTTAGAAATAAAAGATAATCACTTTGGTAAATGGATAGAAAATATTTCTGGACAAGAGGAGATTTTAGATTATTCAGGTTATCAAATAGCACCTGGTTTAGTTGATACACATATTCATGGTTTTGCTGGCGCTGATGTTATGGATTGTGATTCAGAAGGAATTTTGCGAATGAGTGCTGGCTTACTATCTACTGGAGTCACATCTTTCTTGCCGACAACCCTAACTTCAGATACAAAGCGACTAGAAGAGGCGTCTAAATCAGTTGCGGCAGTAGCGGGCAAAGAACAAGGAGCAAAAATTCAAGGCATCTATTTTGAGGGACCATATTTTACTGAGGAATATAAAGGAGCTCAAAATCCGATTTATATGAGAAATCCAAACTTGGAAGAGTTTGCTCAATGGCAGAAGGCTGCAAAAGGCTTGATTACAAAAATTGCTTTGGCACCAGAACGTGAGGGAGTTGAGGAATTTGTCTCAGCAATCACAAAGCAAGGTGTTACGGTAGCTTTAGGTCATTCTAATGGGACATATAAAGAAGCTAAAAAGGCAGTGAAGGCGGGTGCCTCAGTTTGGGTACATGCGTATAATGGTATGCGTGGTTTGACACACCGAGAACCAGGTATGGTTGGTGCGGTTTATAATTTACCTAATACCTATGCCGAACTCATTTGCGATGGTCATCACGTTGATCCTGTTGCTTGTGACATTTTAATGACACAAAAAGGCCATAATCATGTGGCATTAATAACAGATTGTATGGCAGCTGGAGGTGCCCCTGATGGAGATTATATGTTAGGGGAATTGCCCGTGGTTGTGTCTAATGGAACTGCGCGTTTGAAAGATGGAGGTAATTTAGCTGGTTCTATTCTTAAGCTCAAAGATGGATTAAAAAATGTTGTAGAATGGGGAATTGCTACTCCGGAAGAGGCAGTGCGTATGGCGATTATGTTCCGGCAGTGTCTGTAGGCATTGATAATGTCTGTGGACAGATAAAAGAAGGTTATGCAGCGGATTTTATTGTATTAGATAAACATCTAGATTTAGTTGCAACATACATTGATGGGGAAAAACNNNNNTTAATTAAT

SEQ ID NO: 18470 - protein, 383 aa, Streptococcus agalactiae
  VARIANT 336, 379, 380: Xaa = Any Amino Acid
MTKYIKADRFFYADHVKENGYLEIKDNHFGKWIENISGQEEILDYSGYQIAPGLVDTHIHGFAGADVMDCDSEGILRMSAGLLSTGVTSFLPTTLTSDTKRLEEASKSVAAVAGKEQGAKIQGIYFEGPYFTEEYKGAQNPIYMRNPNLEEFAQWQKAAKGLITKIALAPEREGVEEFVSAITKQGVTVALGHSNGTYKEAKKAVKAGASVWVHAYNGMRGLTHREPGMVGAVYNLPNTYAELICDGHHVDPVACDILMTQKGHNHVALITDCMAAGGAPDGDYMLGELPVVVSNGTARLKDGGNLAGSILKLKDGLKNVVEWGIATPEEAVRMAXYVPAVSVGIDNVCGQIKEGYAADFIVLDKHLDLVATYIDGEKXXLIN

SEQ ID NO: 18471 - protein, 120 aa, Streptococcus agalactiae
ATGATTCCATCGCATATGCTAAAAGGATTCCTTGATGGAGCTATCCTAAAAATCATACAGCAAGAGGAGAGTTATGCTTATGAACTCTCAAAAAAATTAAATTCTTACGCCTTTGGAGAA

SEQ ID NO: 18472 - protein, 40 aa, Streptococcus agalactiae
MIPSHMLKGFLDGAILKIIQQEESYAYELSKKLNSYAFGE

SEQ ID NO: 18473 - protein, 507 aa, Streptococcus agalactiae
ATGTTTATTATCCGTTTAGCTTATTTAAAGCTATCTATAGCTAATGAAAAGGCCTTAAGAAAAAATGGTGCTAAATATGGTGTAGGTGTTTCAAAAGCAATCACAGTTCTTCATATTATCATTTATTTTTCATCTGTAACTGAGGCTATTCTAACAAAAGCAAGTTTTAATTTTGTTAGCGTAATCGGGCTTAGCTTGATGATTTTTTCTGTGTTTATGTTACATACAGTAACACGTTTACTTGGTCGTATTTGGACAGTGAAATTAATGGTAGATAAAAATCATCAATTTGTAGATCACTGGTTATTTAGGGTTGTTAAGCATCCTAACTATTTCTTAAATATTGCTCCTGAACTTTTAGGTGTAACTTTATTGTGTCATGCTAAATACACAGCATTATTTGTCTTGCCAATTTATGCTTTTGTTATTTATTTAAGAATTCGTGAAGAAAACTTATTATTAAAAACGATCATTATTCCAAATGGAATCAAAAAGTCTAGGGTATAT

SEQ ID NO: 18474 - protein, 170 aa, Streptococcus agalactiae
  VARIANT 25: Xaa = Any Amino Acid
MFIIRLAYLKLSIANEKALRKNGAXZYGVGVSKAITVLHIIIYFSSVTEAILTKASFNFVSVIGLSLMIFSVFMLHTVTRLLGRIWTVKLMVDKNHQFVDHWLFRVVKHPNYFLNIAPELLGVTLLCHAKYTALFVLPIYAFVIYLRIREENLLLKTIIIPNGIKKSRVY

SEQ ID NO: 18475 - protein, 801 aa, Streptococcus agalactiae
ATGAGCCCTTATACTTTCTTACGTGCTATAGGCCCTGAGCCTTGGAATGCTGCATACGTTGAACCATCACGTCGTCCAGCTGACGGCCGCTATGGCGAAAATCCAAACCGTCTTTACCAACATCATCAATTTCAAGTGGTAATGAAGCCTTCGCCGTCAAATATTCAAGAACTTTATTTGAAGTCTTTGGAATTACTAGGTATCAATCCACTTGAGCATGATATCCGTTTTGTTGAAGATAACTGGGAAAATCCATCTACAGGTTCAGCTGGATTAGGTTGGGAAGTTTGGCTTGATGGAATGGAAATAACACAATTTACTTATTTCCAACAAGTAGGTGGACTTCAAACAGGTCCTGTAACTTCTGAAGTTACTTATGGACTAGAGCGTTTAGCCTCTTATATTCAAGAGGTAGATTCTGTTTATGATATTGAGTGGGCACCAGGTGTTAAATATGGTGAAATCTTTACTCAGCCAGAGTATGAGCATTCAAAATATTCATTTGAGATATCAGACCAAGTAATGTTACTTGAAAACTTTGAGAAATTTGAAAGAGAAGCAAAACGTGCTTTAGAAGAAGGACTTGTTCATCCAGCTTATGACTACGTCCTTAAATGTTCACACACCTTTAATTTATTAGATGCACGTGGAGCAGTATCTGTTACTGAGCGTGCAGGCTATATTGCACGTATCCGGAATTTAGCACGTGTTGTTGCTAAAACCTTTGTTGCCGAACGTAAAAAACTTGGTTTCCCACTTTTGGATGAGGAAACTCGTATCAAATTACTTGCTGAGGAAGAC

SEQ ID NO: 18476 - protein, 267 aa, Streptococcus agalactiae; identical to SEQ ID NO: 542

SEQ ID NO: 18477 - protein, 636 aa, Streptococcus agalactiae
ATGAACACACTCATTGTTAATAGTCATCCTGATTTTTCGAATCCGTACTCATTTACAACTATTCTACAAGAAAAGTTTATTGAACTTTATAATGAGCATTTTCCTAACATCAGTTATCTATTTTAAATTTATATGATTGTGTTTTGCCAGAAATTACGAAAGAAGTACTACTTTCGATTTGGTCTAAACAAAGAAAGGGTTTGGAATTAACAGCCGATGAGATTGTTCAAGCTAAAATCTCTAAAGATTTACTTGAACAGTTTAAGTCACATCACCGTATTGTCTTTGTTTCTCAATGCACAATTACAATGTGACTGCTAGAGCAAAAACTTATATTGTAATATTTTTATTGCAGGTGAGACTTTCAAGTACACTGAAAATGGTTCAGTCGGATTAATGACAGATGACTATCGTCTGCTTATGTTAGAATCTGCGGGTTCTATTTATTCTAAAGGACAGTATAGTCCATATGAATTTCCTGTTCATTATTTAAAAGCTATCTTTAAAGATTTTATGGCTTTTGATGATTTCTGTGTTGTTCGTGCAGAAGGTACCGATATTTTAGATAGGCAAGTTGTTCTTGATAAGATGAATCAGGATTTAAGAGAAGCATTTGAAGCGTTTTACAGTAAGGAG

SEQ ID NO: 18478 - protein, 213 aa, Streptococcus agalactiae
  VARIANT 114: Xaa = Any Amino Acid
MNTLIVNSHPDFSNPYSFTTILQEKFIELYNEHFPNHQLSILNLYDCVLPEITKEVLLSIWSKQRKGLELTADEIVQAKISKDLLEQFKSHHRIVFVSPMHNYNVTARAKTYIXNIFIAGETFKYTENGSVGLMTDDYRLLMLESAGSIYSKGQYSPYEFPVHYLKAIFKDFMAFDDFCVVRAEGTDILDRQVVLDKMNQDLREAFEAFYSKE

SEQ ID NO: 18479 - protein, 2037 aa, Streptococcus agalactiae
ATGACTAAAGATTTATTATTGGAGCTTGGCCTTGAAGAGTTGCCAGCTTATGTTGTGACACCGAGTGAGAAGCAATTGGGCCAAAAAATGGTCAAGTTTTTAGAGGATCATCGTTTATCATTTGAAACTGTTCAAACTTTTTCAACTCCACGTCGTTTGGCTGTTCGTGTGAAAGGATTGGCAGACCAGCAGACAGATTTAACAGAAGATTTCAAGGGTCCTTCTAAGAAAATTGCTTTGGATGCAGAAGGGAATTTTTCTAAAGCAGCCCAAGGTTTTGTTCGCGGAAAAGGTTTAAGTGTTGATGATATCGAATTTCGTGAAGTTAAGGGAGAAGAATATGTTTATGTCACTAAGCATGAAACTGGAAAAAGTGCGATTGATGTTTTAGCGAGTGTGACAGAGGTATTAACAGAATTGACTTTCCCAGTGAACATGCATTGGGCAAATAATAGTTTTGAATATATTCGTCCAGTTCACACTTTAGTGGTATTATTAGATGATCAAGCCTTAGAGCTAGACTTCCTTGATATTCATTCAGGGCGTATTAGTCGAGGACACCGTTTCTTGGGTTCTGACACTGAAATTTCATCTGCCAGTTCGTATGAAGATGACTTGCGACAACAATTTGTTATTGCTGATGCAAAAGAACGCCAGCAAATGATTGTTAATCAAATTCATGCTATCGAAGAAAAGAAAAATATTTCAGTTGAAATTGACGAAGATTTACTAAATGAAGTGCTTAATTTAGTTGAGTATCCGACAGCATTCTTGGGTTCTTTTGACGAGAAATACCTTGATGTACCTGAAGAAGTTTTAGTCACTTCAATGAAAAATCATCAACGCTATTTTGTTGTTCGCGACAGGGATGGAAAATTGTTACCAAACTTTATTTCTGTGCGTAATGGAAATGCTGAGCATATCGAAAATGTTATAAAAGGTAATGAAAAAGTTTTAGTGGCTCGTCTTGAAGATGGTGAATTCTTCTGGCAAGAAGATCAGAAACTTAATATTGCAGATTTAGTTGAGAAATTAAAACAAGTAACTTTCCATGAAAAAATTGGTTCACTTTATGAACATATGGATCGTGTAAAAGTTATTTCACAATATTTGGCTGAGAAGGCAGATCTTTCTGATGAAGAAAAATTAGCTGTGCTTCGAGCTGCAAGTATTTATAAATTTGACCTCTTAACTGGAATGGTTGATGAGTTTGATGAATTACAAGGTATTATGGGTGAGAAATATGCCTTACTTGCAGGGGAACAGCCCGCAGTAGCAGCAGCGATACGTGAACATTATATGCCGACATCTGCAGATGGAGAGCTTCCAGAAACCAGAGTTGGTGCAATTCTAGCTTTAGCTGATAAATTTGACACCTTACTTTCATTCTTCTCAGTTGGTTTGATTCCAAGTGGTTCAAATGATCCATATGCTCTTCGTCGAGCTACTCAGGGGATTGTCCGTATTTTGGAAGCTTTTGGTTGGGATATCCCACTTGATGAATTAGTAACTAACCTTTATGGTCTATCGTTTGCTAGTTTAGATTATGCTAATCAAAAAGAGGTCATGGCCTTTATTTCAGCTCGTATTGAAAAGATGATTGGCTCTAAGGTCCCTAAAGATATTCGAGAAGCCGTTTTAGAATCAGACACTTATATTGTTAGCCTTATTCTAGAAGCTAGTCAAGCATTGGTGCAAAAGAGCAAGGATGCTCAATATAAAGTTTCCGTTGAAAGTTTGTCACGTGCATTTAATTTAGCTGAAAAAGTTACTCATTCTGTATTGGTGGACTCTTCATTGTTTGAAAATAATCAAGAGAAGGCGCTATATCAAGCTATTTTGTCACTTGAACTGACTGAGGATATGCATGACAACTTAGATAAGCTTTTCGCACTTAGTCCAATTATTAATGATTTCTTTGATAATACAATGGTAATGACAGATGATGAAAAAATGAAACAAAATCGTCTGGCTTTACTCAATAGCCTTGTTGCAAAGGCAAGAACAGTCGCTGCTTTTAACTTATTAAACACAAAA

SEQ ID NO: 18480 - protein, 679 aa, Streptococcus agalactiae; identical to SEQ ID NO: 9338

SEQ ID NO: 18481 - protein, 255 aa, Streptococcus agalactiae
ATGGATCCTAAAAAAATTGCTCGTATTAACGAGCTTTCAAAAAAGAAAAAAACAGTTGGATTGACCGGAGAAGAGAAGGTTGAACAAGCAAAGCTCCGTGAAGAGTATATTGAAGGTTTCCGCCGATCAGTCCGTCACCACGTTGAAGGAATTAAATTAGTGGATGATGAGGGCAATGATGTTACCCCGGAAAAACTTCGTCAAGTCCAGAGAGAAAAAGGACTACATGGTCGTAGTTTGGATGATCCAAATTCT

SEQ ID NO: 18482 - protein, 85 aa, Streptococcus agalactiae; identical to SEQ ID NO: 548

SEQ ID NO: 18483 - protein, 318 aa, Streptococcus agalactiae; identical to SEQ ID NO: 9341

SEQ ID NO: 18484 - protein, 106 aa, Streptococcus agalactiae; identical to SEQ ID NO: 550

SEQ ID NO: 18485 - protein, 1506 aa, Streptococcus agalactiae; identical to SEQ ID NO: 9343

SEQ ID NO: 18486 - protein, 502 aa, Streptococcus agalactiae; identical to SEQ ID NO: 552

SEQ ID NO: 18487 - protein, 1827 aa, Streptococcus agalactiae
ATGGAATTTTCACGAGAAACACGACGTTTAGCCTTACAAAGAATGCAAGATCGTACTCTGGATTTACTTATCATAGGTGGGGGTATCACAGGCGCTGGTGTCGCTTTACAAGCAGCAGCTAGTGGATTAGATACTGGACTTATTGAAATGCAAGATTTTGCAGAAGGGACAAGTAGTCGCTCAACAAAATTGGTCCATGGTGGTCTTCGTTACTTGAAGCAATTTGATGTAGAAGTTGTTTCTGATACAGTATCAGAGCGTGCAGTCGTGCAGCAAATTGCACCACACATTCCTAAGCCAGATCCAATGCTTTTACCGGTTTACGATGAGCCGGGTTCTACTTTTAGTATGTTTCGCCTTAAAGTGGCTATGGATTTATATGATTTATTAGCAGGTGTGACAAACACACCCGCAGCCAATAAAGTTTTAAGCGCAGAAGATGTTCTTAAGCGTGAGCCTGATTTACAAAAAGAAGGTTTGCTAGGCGGAGGGGTCTATTTAGATTTCCGTAATAACGATGCACGCCTAGTGATTGAAAATATTAAACGCGCTAATAGGGATGGAGCTTATATTGCCAGTCATGTCAAAGCTGAGGACTTCTTATTTGATGACAACAATCAAATTATAGGAGTACGTGCGCGTGATTTGTTGACTGACCAAGTTATCGATATAAAAGCTAGGCTTGTTATTAATACAACTGGACCTTGGAGTGACACCGTTCGCAACTTCTCCAATGAAGGTAAACAAATTCATCAATTACGTCCAACTAAGGGAGTTCACTTAGTTGTAGATCGCCAAAAATTAAATATTTCTCAACCTGTTTATGTTGATACAGGCCTGAATGATGGTCGCATGATTTTTGTTTTGCCACGTGAAGATAAGACTTATTTTGGAACTACAGATACTGATTACCATGGAGACTTAGAACATCCTACGGTAACTAAAGAAGATGTTGACTACCTCCTTAATATTGTAAACAAACGCTTCCCAGAAGCAGAGCTTACTATTGATGATATTGAGAGTTCATGGGCAGGTTTGCGTCCACTACTATCAGGGAATAGTGCCTCTGACTATAATGGAGGCAATAGTGGAAAACTAAGCGATGAAAGTTTTGAAGAATTAATTGATTCCGTTAAAGATTATATTGCACATAAAAATCATCGTGAGGATGTTGAAAAAGCTATTTCTCATGTAGAATCTAGTACTTCTGAAAAAGAATTGGACCCATCAGCTGTTTCTCGAGGATCAAGTTTTGAGCGTGATGATAATGGCCTATTAACACTTGCTGGTGGTAAAATTACTGATTATCGAAAAATGGCAGAAGGTGCCATGGAAACTATTATTAACATTTTGGATAAAGAATATAATCGCAAGTTTAAACTAATCAATTCTAAAACCTATCCTGTTTCAGGAGGAGAGATTAACCCATCTAATGTTGATTCTGAAATTGAAGCTTATGCTCAATTGGGCACACTAAGTGGTTTAAGTATTGAGGATGCACGTTATATTGCTAACCTTTATGGGTCAAATGCACCAAAATTATTTGCATTGACACGCCAAATTACAGAAGCAGAAGGTCTGAGCTTGGTAGAAACGTTGTCACTTCACTATGCTATGGATTATGAAATGGCGCTTAGCCCAACGGATTTCTTCTTAAGACGTACGAACCATATGCTTTTCATGAGAGATAATTTAGATTCTTTGATTCAGCCTGTTATTGATGAGATGGCTAAACATTATCAATGGTCTGATCAAGACAAAACTTTCTATGAAGAAGAATTACATGAGACTCTAAAAGACAATGACTTGGCAGCTTTGAAGGATAAT

SEQ ID NO: 18488 - protein, 609 aa, Streptococcus agalactiae; identical to SEQ ID NO: 554

SEQ ID NO: 18489 - protein, 696 aa, Streptococcus agalactiae
ATGGATATTTTTGGAGAATTCTTAGGAACAGCTCTCTTAGTCTTACTTGGTAATGGTGTTGTAGCAGGTGTTGTTTTGCCTAAAACGAAGAATCATAATTCTGGATGGATTGTTATCACATTTGGATGGGGACTTGCTGTAGCTATTGCAGCGTTGGTATCTGGCAATATTAGCCCTGCCCACTTGAATCCAGCTGTGTCATTAGCTTTTGCGATCAAAGGTGATTTAGCTTGGGGAACAGCTATTCTTTATATGATTGCACAGATTATTGGTGCAATGCTAGGTTCACTTCTTGTTTATTTGCAATTTAGACCCCATTATGAGGCTGCAGAAAATAGAGCAGACATCCTTGGAACTTTTGCAACTGGTCCGGCTTTGAAGGATAATTTTTCCAATTTTTTAAGTGAAGTATTGGGAACACTTGTTCTTGTACTTACTATTTTTGCCATCGGAAAATACAATATGCCTCCAGGAGTTGGTACGATGAGTGTTGGTATGTTAGTGGTTGGGATTGGTCTATCGCTCGGTGGAACAACAGGTTATGCTATTAATCCTGCACGTGATTTTGGTCCTCGTTTATTGCATGCCTTGTTACCGATGAAGAACAAAGGTGATTCTGATTGGACTTATTCATGGATTCCGATAGTAGGACCTATGGTAGGAGCTATTTTAGCAGCCTTAATATTTGCTATGATG

SEQ ID NO: 18490 - protein, 232 aa, Streptococcus agalactiae; identical to SEQ ID NO: 556

SEQ ID NO: 18491 - protein, 1278 aa, Streptococcus agalactiae; identical to SEQ ID NO: 9349

SEQ ID NO: 18492 - protein, 426 aa, Streptococcus agalactiae; identical to SEQ ID NO: 558

SEQ ID NO: 18493 - protein, 1410 aa, Streptococcus agalactiae
ATGGAAAAAGAAAGGCGTGTTCAATATCGGCTACTTTCTTTTTTAAGAGGCTCTCCTCAGGCAATAGCACTGAAGTTAGCTTTATTAGAAACTGGTTTAAGTCGAGCAACTTTGCTTAAATATATCAATAATCTTAATAGCTACTTTGAACAAGAAAAAGTTAATTGTCGAATCGTTTATTATAAGGATAAGTTATTTTTAGAAGAGGATTATAACTTATCCAATCAAGAAGTGTTGAAAGCTCTGATGAAAGATAGTATTAAATACACTATCTTAATATCTTTATTTAATCAGCGTCAGTTCACAATCGTTGGTCTTTCTCAAGAATTGATGGTTAGTGAGGCTACTTTAAATCGTCATCTTGCTCATCTCAATGAATTGTTAGCGGAATTTGATATTGCTATTTCACAAGGAAAACAGATTGGTGATGAATTGCAATGGCGTTATTTTTATTATGAATTATTCAAGCAACTATGGTCTTATGACAAGTGCCAAAATATGATAAAGAAATTAGACTTAGACTCATTAATTCTATTAATAGAGCGCTTGGCTCAACATACTTTAACTCGAGAAGCTCATCAAAATCTGGGACTTTGGTTTAGTATTTGTCATCATCGTCTCCTTGCTATGGAAAAAATATCTGATAATCTCAAGCCTATTGTGAAACATTATCAATGTAATGCTTTTTATAAACGGTTAGACGCAGCCTTAGTTTTGTATATGAGTCGTTTTGCTCTTGAGTATAGGGAAGGAGAAGTTCTGGCAACTTTTGCTTTTCTACATTCACAAAATATTTTACCAATCAATACAATGGAATACATCATGGGATTTGGAGGCCCGATTATTGATTGTGTAACCGAAACAATCATCTACTTTAAAAAGGAGAGTATTTTAGCTGACGAGACATCAGATCAGGTTATTTACCAACTTGGTCAGTTATATAGCCATTATTATTTCTTTAAAGGTCATATTTTAGTTGAACAACCTGATTTAGAACAAACGTATCGACTTATTGATCATAATATGAGGGATAAGTTGCATCATATTTCAAAGAAGATTATTGCAAATGTTAATCGAATTAGACCTTTAACAGAAGATGGTTGTTCTTTGCTGACTTTACATTTGTTGGAATTGCTTATTTTCTCGAAAAATAGTCAAAAAATGCCCTTTAGGATTGGTCTAGATATGACAGGTAATGCTGTGGAACAGTCATTGTTGGAATATCGCATTCGACAACATTTCTCTGGTAATAATTCTATTCAAGTCGAACCTTATGACGAAGGAAAGGGATTTGATATGGTTATTTATCAGAGTCACTCAAGACCTTATAAAGCCAAACTAACCTATTGCCTTAATAAAGGTGCTTCAGAGCGAGAACTACAGGAAATAGATTCACTTATTTATGACAAT

SEQ ID NO: 18494 - protein, 470 aa, Streptococcus agalactiae; identical to SEQ ID NO: 9352

SEQ ID NO: 18495 - protein, 1869 aa, Streptococcus agalactiae
ATGGCTTATGTGCTTTGGAATAAATTCTTAAATGTAAACCCAAAAACAAGTCGCAATTGGACAAACCGTGACCGTTTTGTGCTATCAGCTGGGCATGGTTCAGCTCTTCTTTATAGCCTACTTCATTTAGCTGGCTATGATTTATCAATTGATGATTTAAAACAATTTCGCCAATGGGGATCAAAAACACCTGGACATCCAGAAGTTAACCATACTGATGGTGTAGAAGCAACAACTGGACCTTTAGGGCAAGGTATTGCTAATGCTGTTGGTATGGCAATGGCTGAAGCTCATTTGGCTGCTAAATTTAATAAACCAGGCTTTGATTTAGTTGATCATTACACTTATACACTTCATGGTGATGGTTGTTTGATGGAGGGTGTTAGCCAAGAAGCTGCCAGTCTTGCTGGACACTTAAAACTTGGTAAATTGGTCCTTCTTTATGATTCAAATGATATCTCACTTGATGGTCCAACATCTCAATCATTTACAGAAGATGTTAAAGGACGTTTTGAATCATATGGTTGGCAACATATCTTAGTTAAAGATGGTAATGATTTAGAAGCGATTGCTGCAGCAATTGAAGCTGCTAAAGCTGAAACTGATAAACCAACCATTATTGAAGTTAAAACTATTATTGGATTTGGCGCAGAGAAACAGGGAACATCTTCAGTTCATGGAGCGCCACTTGGTGCAGAAGGTATTACTTTTGCCAAGAAGGCTTATGGATGGGAATATCCAGACTTTACTGTTCCTGCTGAAGTTGCAGATCGATTTGCCTCAGATCTTCAAGCGCGTGGTGCGAAGGCAGAAGAGGCATGGAATGATCTTTTTGCTAAATATGAAGTTGAGTATCCAGAATTAGCAACTGAATACAAAGAAGCTTTTGCTGGCCAAGCTGAGACAGTTGAACTGAAAGCTCATGACCTAGGTTCATCAGTGGCTAGTCGTGTTTCAAGCCAACAAGCTATTCAACAATTATCGACTCAATTACCGAACCTCTGGGGAGGGTCAGCAGACCTCTCAGCTTCTAATAACACAATGGTAGCAGCAGAAACAGATTTCCAAGCAAGTAACTACGCTGGGCGTAATATTTGGTTTGGTGTACGTGAATTTGCAATGGCTGCTGCAATGAATGGAATTGCGCTTCACGGTGGGACTCGTGTTTATGGGGGTACGTTCTTTGTCTTCTCAAACTACTTGTTACCAGCAGTACGTATGGCTGCACTTCAAAACTTGCCAACTGTCTATGTTATGACACATGATTCTATTGCTGTTGGAGAAGATGGGCCAACTCATGAGCCAATAGAACAATTAGCATCAGTGCGCTCAATGCCTAATTTGAACGTTATCCGTCCCGCAGACGGTAATGAAACAAACGCTGCATGGCAACGAGCTGTATCAGAGACAGATCGACCAACGATGCTTGTTTTAACACGTCAAAACTTACCAGTTCTTGAAGGAACATCAGAATTAGCCCAAGAAGGGGTTAATAAAGGTGCTTATATTTTATCAGAAGCTAAAGGTGAACTTGATGGTATCATCATTGCAACAGGTTCAGAAGTTAAATTAGCTTTAGATACTCAAGACAAACTTGAGTCAGAGGGCATCCATGTTCGCGTCGTATCTATGCCAGCACAAAACATTTTTGATGAACAAGAGGCTTCATATCAAGAGCAAGTGCTTCCATCAGCTGTTACAAAACGTCTTGCTATTGAGGCAGGATCAAGCTTCGGTTGGGGTAAATATGTTGGTTTAAATGGGCTAACACTTACTATTGATACTTGGGGAGCATCAGCACCAGGTAACAGAATTTTCGAAGAGTATGGCTTTACAGTTGAGAATGCTGTATCGCTATATAAAGAACTT

SEQ ID NO: 18496 - protein, 623 aa, Streptococcus agalactiae; identical to SEQ ID NO: 9354

SEQ ID NO: 18497 - protein, 309 aa, Streptococcus agalactiae
TTGTTTATGAAGAAGGAGTGTCGTGATTTTTATCGGCAGATACAGCATACTTACAATGATATATCTGTCCGTGAAGATGCAGTGCTATCATCAATACTATTATCAGCATCGAATGGTTTGATAAAAACTAGCGATGTACCTCGTGTTGCTTATGAGTTAACTCAGCAATTGGAAAATAATGAGATAGAAAAATCTTTCGAGTCATTAGCTACAGTTAAGGAATTGAAAAAATCTGCTAAAAAATTGTCTGAGAGATATGAGCAAAATAAGGTAACAACGGGATTGCTTTCTAAAGTATTTGGAAATCAT

SEQ ID NO: 18498 - protein, 103 aa, Streptococcus agalactiae; identical to SEQ ID NO: 568

SEQ ID NO: 18499 - protein, 732 aa, Streptococcus agalactiae
ATGATTAAGTTTGAACATGTTTCGAAAGTATACGGAGAAAAAGAAGCTCTCAGTGATTTAACCCTCTCTGTTAAAGATGGTGAGATTTTTGGATTAATAGGTCACAATGGAGCAGGAAAAACAACGACAATTAGTATTCTAACATCTATTATTGATGCAACTTATGGCCAAGTCTATATTGATGACCTACTTTTGACAGAACATCGTGACCAAATTAAGAAAAAAATAGGTTATGTACCGGACTCGCCAGATATTTTCTTAAATTTAACCGCAGAGGAATACTGGTACTTTTTAGCTAAAATTTATGACGTTGCCCCAGAAGATATTGAAGCACGTATCACAAAATTGGTAGACATATTTGAACTAGAGGAGCAACGCTATAATCCTATTGAAAGTTTTTCACATGGTATGCGTCAAAAAGTCATTGTTATAGGTGCCCTTCTTCCAAATCCTGACATTTGGATTCTAGATGAGCCGTTAACTGGTTTAGACCCTCAAGCTTCTTTTGATTTGAAAGAAATGATGAAAGAACATGCTAAAAATGGAAAAACAGTTATTTTTTCAACACATGTCTTAGCAGTTGCAGAACAGTTATGCGACAGAATAGGTATTTTGAAACAAGGGAAATTAATCTTTGTCGGTAGCTTAGGTGAGTTAAAAATGAAATATCCAGATAAAGATTTGGAAACTATCTATTTGGAATTAGCAGGACGTCAAGCTAGTAGGGAGGGA

SEQ ID NO: 18500 - protein, 244 aa, Streptococcus agalactiae; identical to SEQ ID NO: 9358

SEQ ID NO: 18501 - protein, 1602 aa, Streptococcus agalactiae
ATGAATTGGTCACGTATCTGGGAACTCGTAAAAATTAATATCCTTTATTCAAACCCTCAGACTCTATCGGCACTAAGAAAAAAGCAAGAAAAACATCCTAAAAAAGAATTTTCAGCTTATAAATCCATGTTTAGAAATCAGTTATTTCAGATTTTGCTCTTTTCAATAATTTATGTATTTCTCTTTGTATCACTTGATTTTAAAGAATATCCGGGCTACTTCACGTTCTACATTGGTATCTTTACACTAGTATCCATTATCTACTCTTTTATTGCGATGTACAGTGTTTTCTATGAGAGTGACGATGTTAAACAATATGCTTATTTGCCTATTAAATCTGAAGAGCTCTATGTTGCTAAAATTTTTGCAACATTTGGGATGTCTGTAACTTTTCTAATGCCAATCCTAACCTTAATGATTGTGGCTTATTGGCGTATAATAGGTGGCCCACTTGCGGTCCTCCTAGCAATCATAAATTTTGCTATTTTATTTTTATCGGTAACGGTGATTTCATTGTATATTAATAGTTTAATAGGCCGTGCCATTATTCGAAGTGCTAATCGGAAACTTATTTCTACTATATTAATTTCACTAGCTACATTTGGAGCAATAGTTCCCTTATTATTTGTGAATATGACGAGTCAAAAGATGGTACAAGGGAAATTACAAGATATCGCTCCAATCCCTTATGTCAGAGGTTATTATGATATTGTTACAGCGCCATTTAGTATGGAGAGTCTCCTCAACTATTATCTCCCGCTCTTAATCATTTTATTCTTGATAGGTGCTATTTATAAATGGGTTATGCCACGCTACTATCAGGAGTTGTTGTATGGACAGGTCAAGCAGAGAAAAGTCCATCGTCAAATCGATTTTAGTAAACGTGAGTCAATTAATAAAACTCTTGTTAAACACCATTTATCAAGTTTACAAAATGCGACATTATTGACAAATACATTTTTAATGCCACTATTATATCTAGCAATGTTCATTGTTCCAATTTTGAATAATGGTAAAGAGATTGGTCGATTTTTTAATGAAAATTATTTTGGGATAGCTTTTCTAGCAGGAATATTAATAGGTAGTTTATGTGTGATGCCAGCTAGCATTGTAGGGGTAGGTATTTCTTTAGAAAAAAGTAATTTCTACTTTATAAAAAGTTTGCCTATATCATTTTCGTATTTCTTGAAGCATAAATTTGTAACTTTGATAACCTTACAACTTGCAGTTCCTACTTTTATTTATTTCTTGGTAGGATTCTTTCTACTTAAACTATCAATCCTCGTTTTATTGAGCTTCATTTTAGGTCTAGTCTTCATGGGACTTATCGAAGGCCAGTTTATTTATAGACGTGACTATAAACATTTGTTCTTGAATTGGCAAGAGGTTACGCAACTATTTAATAGAGGGTTAGGCCAATGGCTGTTAGTTGGTTCATTGTTTGGAATGATGATAATAGGTAGTTTTCTTATTGGAATAAGTATTTTTTGGTCAATGGTATGGAATACTGTAGCTGTCAATATCATAATCCTTATCATTGGGTTGCTCATATTATCAATTTGCCAATACTTACTGCTAAAAAATTTTTGGAAGAAGCTTGTT

SEQ ID NO: 18502 - protein, 534 aa, Streptococcus agalactiae; identical to SEQ ID NO: 574

SEQ ID NO: 18503 - protein, 1383 aa, Streptococcus agalactiae; identical to SEQ ID NO: 9361

SEQ ID NO: 18504 - protein, 461 aa, Streptococcus agalactiae; identical to SEQ ID NO: 576

SEQ ID NO: 18505 - protein, 801 aa, Streptococcus agalactiae; identical to SEQ ID NO: 9363

SEQ ID NO: 18506 - protein, 267 aa, Streptococcus agalactiae; identical to SEQ ID NO: 578

SEQ ID NO: 18507 - protein, 1251 aa, Streptococcus agalactiae; identical to SEQ ID NO: 9365

SEQ ID NO: 18508 - protein, 417 aa, Streptococcus agalactiae; identical to SEQ ID NO: 580

SEQ ID NO: 18509 - protein, 894 aa, Streptococcus agalactiae; identical to SEQ ID NO: 9367

SEQ ID NO: 18510 - protein, 298 aa, Streptococcus agalactiae; identical to SEQ ID NO: 582

SEQ ID NO: 18511 - protein, 324 aa, Streptococcus agalactiae; identical to SEQ ID NO: 9369

SEQ ID NO: 18512 - protein, 108 aa, Streptococcus agalactiae; identical to SEQ ID NO: 584

SEQ ID NO: 18513 - protein, 2256 aa, Streptococcus agalactiae
GTGACTTTTTTTAAAAAGCTAAAAAAAATCTTCCTTGATTATGTGATCCATATAAGAGATAGGCGTTCGCCGCAGAAAAATAGGGAAAGAGTAGGTCAAAATCTGATGATTTTAACCATTTTCCTATTTTTCATTTTTATCATCAACTTTGTCATCATCGTTGGTACAGATAGTAAATTTGGGGTTAATTTATCCAAGGAAGCCAAGAAAGTCTATCAACAAAGTATGACAGTACAGGCGAAGCGTGGGACAATTTACGACCGTAATGGAAATCCTATCGCTGAGGATGCTACGACCTATAGTCTCTACGCTATTATCTCAAAGAACTATACGACAGCTACAGGTCAAAAACTATATGTACAACCTTCTCAGTATGAAAAAGTAGCTAGTATCTTAGAGAATAAATTGGGCATGAAGAAAAATCTTGTCCTAAAACAACTCAATCAAAAGAAATTGTTTCAAGTTTCCTTTGGAAGTTCAGGTTCAGGATTGTCTTATACCAAGATGGCTGACATCAAGAAAACGATGGAAAAGTCAGATATCAAAGGAATTGGTTTTTCTACCAGTCCGGGGCGTATTTATCCAAATGGGATATTTGCTTCACAATTTATAGGATTTACTCTTCCTCAGGATGATGGAGATGGAAAAAAATTAGTTGGTAATACAGGCCTTGAAGCGGCACTTAACAAGGTATTATCAGGTACTGATGGTAAAGTAACATACGAAAAAGACCGTAGTGGGAATGTTCTTTTAGGTACTGCAACAACAGAACGTAGGGCGGTTAATGGTAAGGATATCTACACAACTTTATCAGAGCCTATTCAGACTGTTTTAGAGACTCAGATGGATGTTTTCGCAGAAAAAACCAAAGGAAAATTTGCGAGTGCTACAGTTGTCAACGCTAAAACGGGTGAAATTCTAGCAACGAGTCAGCGTCCTACTTATAATCCTTCTACCCTTAAAGGTTACGATAAGAAAAATTTGGGTACCTATAACACACTACTATATGATAACTTTTTTGAACCTGGTTCAACAATGAAGGTAATGACTCTAGCCTCTGCAATTGATTCTAAGCATTTTAACTCTACTGAAGTGTATAACAGTGCACAATATAAAATTGCAGATGCGATTATTCGAGATTGGGATGTCAATGAAGGGTTATCATCTGGTAGTTATATGACTTTTCCACAAGGGTTTGCACATTCCAGTAACGTTGGTATGGTAACCTTGGAACAAAAAATGGGACGAGATAAATGGTTAAACTATCTTTCTAAGTTTAAATTTGGTTACCCAACACGTTTTGGGATGCTTCATGAAAGTGGAGGTTTGTTCCCATCTGACAATGAAGTAACTATCGCTATGAGCTCATTTGGTCAAGGTATTGGTGTAACGCAAGTTCAAATGTTGCGCGCATTTACGTCTATCTCGAATGATGGTGTTATGTTACAACCACAGTTTATTAGCAGTATTTATGATCCAAATACAGGGACTTCTCGTACAGCACGAAAAGAAGTCGTTGGAAAACCAGTTTCCAAAGAAGCAGCTAGTAAAACACGTGATTATATGGTTACTGTTGGGACAGATCCTTATTATGGTACATTATACGCAGCAGGTGCCCCAGTTATTCAGGTGGGGAATCAATCAGTTGCAGTAAAATCTGGTACTGCCCAAATCGCCCAGGAAGGTGGTGGTGGTTATCTGCAAGGAAAAAATGATACTATTAACTCAGTTGTGGCTATGGTGCCATCGGAAAATCCTGACTTCATCATGTATGTTACCATCCAACAACCCGAAAAATTTAGTATCACATTCTGGAAAGATGTTGTTAATCCTGTTTTAGAACAAGCAACAGCAATGAAAGAAACGATATTAAAACCGGGATTGAATGACTCAGAACATCAGACAAAATATAAACTATCAAAAATAGTTGGTGAAAATCCAGGTCATGTAGCGGAAGAATTACGTCGTAATCTGGTTCAGCCAATTATTTTAGGAAATGGTAGTAAAGTTTCTAAAGTATCTAAAAGACCAGGAGCTAATCTTGCTGAGAATGAACAGCTACTAGTATTAACAAATAAACTGACTGAATTACCTGATATGTATGGTTGGTCTAAAGCAAACGTTGAACAGTTTGCTAAATGGACAGGTATAAAAGTGACCTATAAAGGTTCAACCTCAGGTAAAGTAAGAAAACAAAGTATTGATGTTGGAAAATCCATCAATAAAATTAAAAAAATCAAAATTACAATAGGAGAT

SEQ ID NO: 18514 - protein, 752 aa, Streptococcus agalactiae; identical to SEQ ID NO: 586

SEQ ID NO: 18515 - protein, 1008 aa, Streptococcus agalactiae
ATGTTTTTAAGTATAATGGCAGGTGTCATAGCATTTGTCCTGACAGTTATTGCCATTCCGCGCTTCATTAAGTTTTACCAATTGAAGAAAATTGGCGGGCAACAAATGCATGAAGATGTCAAACAACATCTAGCCAAAGCAGGTACGCCGACAATGGGAGGAACGGTATTTTTGATTGTTGCTCTTCTTGTCTCACTTATTTTTAGTATTATTTTATCTAAAGAAAATAGTGGTAATTTAGGTGCAACTTTTGGTATTTTATCTGTTGTTCTCATCTATGGAATTATTGGTTTTTTAGATGATTTTTTGAAAATTTTTAAACAAATCAATGAGGGCTTGACTCCAAAGCAAAAAATGTCGCTCCAACTAATTGCGGGTCTAATTTTTTATTTTGTCCATGTGTTACCAAGTGGCACATCTGCGATAAATATTTTTGGTTTTTACCTTGAAGTAGGATACTTATACGCTTTTTTTGTTCTTTTCTGGGTTGTTGGTTTTTCAAATGCTGTGAACCTAACAGATGGAATTGATGGTCTAGCTTCTATTTCGGTTGTTATCAGTTTGATTACTTATGGAATCATTGCTTATAATCAAACGCAATTTGATATTTTATTGATTATCGTTATCATGATTGGTGCTTTACTTGGCTTTTTTGTCTTTAATCATAAACCAGCTAAAGTCTTTATGGGAGATGTTGGTTCACTTGTATTGGGTGCTATGTTAGCAGCCATTTCAATTGCCTTACGTCAGGAATGGACCTTGCTTTTTATCGGCTTTGTCTATGTTTTTGAGACGTCTTCAGTGATGTTGCAAGTAGCATACTTTAAGTATACTAAGAAGAAAACTGGTGTTGGGAAACGTATCTTCCGCATGACACCATTTCATCACCATTTAGAATTAGGTGGTGTGTCTGGCAAAGGTAATAAATGGAGCGAATGGAAAGTAGATGCTTTTTTATGGGCTATTGGTATTTTCATGAGCGCTATTACACTTGCTATTTTATATCTT

SEQ ID NO: 18516 - protein, 336 aa, Streptococcus agalactiae
MFLSIMAGVIAFVLTVIAIPRFIKFYQLKKIGGQQMHEDVKQHLAKAGTPTMGGTVFLIVALLVSLIFSIILSKENSGNLGATFGILSVVLIYGIIGFLDDFLKIFKQINEGLTPKQKMSLQLIAGLIFYFVHVLPSGTSAINIFGFYLEVGYLYAFFVLFWVVGFSNAVNLTDGIDGLASISVVISLITYGIIAYNQTQFDILLIIVIMIGALLGFFVFNHKPAKVFMGDVGSLVLGAMLAAISIALRQEWTLLFIGFVYVFETSSVMLQVAYFKYTKKKTGVGKRIFRMTPFHHHLELGGVSGKGNKWSEWKVDAFLWAIGIFMSAITLAILYL

SEQ ID NO: 18517 - protein, 1341 aa, Streptococcus agalactiae
ATGTCATTTAAAGATTTTAATTTTAAACCATACATTCAGAGGGCTCTCGATGAGTTAAAATTCGTCGATCCAACTGATGTTCAAGCTAAATTGATTCCAGTTGTTCGTTCAGGCCGCGATCTTGTGGGGGAATCGAAAACTGGTTCTGGTAAAACCCACACCTTTTTACTTCCTATTTTTGAGAAGCTAGATGAAAGTAGTGATGATGTTCAAGTTGTTATTACTGCACCAAGTAGAGAGTTGGGAACACAAATTTATCAGGCAACTAAACAAATTGCTGAGCATTCAGAGCAAGAAATACGGGTGGTTAACTATGTTGGTGGTACTGACAAATTACGTCAAATTGAAAAGTTGAAAGTAAGCCAACCTCATATTGTCATTGGAACCCCAGGACGAATTTATGATTTGGTGAAGTCAGGTGATTTAGCTATTCATAAGGCGCATACTTTTGTTGTTGATGAAGCAGATATGACTCTAGATATGGGATTTCTTGATACCGTTGATAAGATTGCAGGGTCTTTACCCAAGGATGTCCAAATTTTAGTCTTTTCAGCAACGATTCCACAAAAATTACAGCCATTTTTAAAGAAATATTTGACCAATCCTGTAATGGAAAAAATCAAAACAGCAACAGTTATCGCTGATACCATCGATAACTGGCTTTTGTCCACTAAAGGACGTGATAAAAATGCACAAATTTTGGAACTCTCTAAACTAATGCAGCCCTATCTTGCAATGATATTTGTTAATACGAAAGAGCGTGCAGACGAATTACATTCGTACCTTTCTAGTAATGGCTTAAAAGTAGCTAAAATTCATGGTGGGATTGCACCTCGTGAACGTAAACGTATTATGAATCAGGTTAAAAACCTCGAATTTGAATATATCGTTGCAACAGATTTAGCAGCGCGTGGTATTGATATTGAAGGTGTTAGCCATGTTATCAATGATGCCATACCTCAAGACCTATCTTTCTTTGTCCACCGTGTCGGTCGCACAGGCCGTAATGGCTTATCTGGTACTGCTATAACTTTATATCAGCCAAGTGACGATTCTGATATTCGTGAACTTGAAAAACTAGGTATTAATTTTATTCCTAAAGTCATTAAAAACGGTGAATTTCAAGATACATACGACCGTGATCGTCGTAATAACCGTGAAAAGTCCTATCAAAAATTAGATACAGAAATGATTGGACTTGTGAAAAAGAAAAAGAAAAAAATAAAACCAGGTTACAAGAAAAAAATTCAATGGAAAGTTGATGAAAAGCGTCGCAAAGAGCGTAGAGCAAGTAATCGTGCTAAGGGGCGTGCGGAGCGCAAAGCTAAAAAACAAAGTTTT

SEQ ID NO: 18518 - protein, 447 aa, Streptococcus agalactiae; identical to SEQ ID NO: 9376

SEQ ID NO: 18519 - protein, 809 aa, Streptococcus agalactiae
ATGTTTAAAAAAATAATATTATCTATTGCAACTATAGCCGCAACCGCCAGCCTAGCAGTATCAGTTCAGGCGTCAGAGAAAGTAGAACTTAAAGTAGCTACAGATTCTGACACGGCACCATTTACTTATCAAAAAGACGGGAAATTCAAAGGTTATGATGTTGATGTTGTCAAAGCTGTTTTTAAAGGTAGTAAGTACAAAGTAACCTTCAAGACAGTTCCTTTTGATACTATTTCAACAGGTATTGATGCAGGGAAATTTGATTTATCAGCTAATGATTTTTCATACAATAAAGAAAGAGCAGAAAATATCTCTTCTCAGATCCTATATCCCGTTCAAATTATGCCGTAGTAGGGAAGAAGGGGAGCCATTACAAATCATTAAGTGACCTCTCTGGAAAATCAACCGAAGTTTTATCTGGCGTTAACTATGCACAGGTTCTAGAAAATTGGAATAAAAATCATCCTAATAAAAAACCAATAAAAATCAAATATGTTTCTGGGACAACTGGTGTTACTAGCAGATTAAAAAATATTGAGAGTGGGAAAATTGACTTTATCCTATATGATGCCATTTCATCCGACTATATTGTAAAAGACCAATCATTAAACTTAAGCGTTTCTCCTTTGAAAGGTAAAATTGGTAATAATAAGGATGGACTAGAATACCTCCTTTTACCAAAAGATAAAAAAGGTAAAACTCTACAGAAATTTATAAATAAGCGTATTAAAGTTTTGAAAGAAAATGGTACTTTGGCACGTTTAAGTAAACAATATTTCGGTGGAGATTACGTTTCAAACATTGATAAA

SEQ ID NO: 18520 - protein, 270 aa, Streptococcus agalactiae
  VARIANT 103: Xaa = Any Amino Acid
MFKKIILSIATIAATASLAVSVQASEKVELKVATDSDTAPFTYQKDGKFKGYDVDVVKAVFKGSKYKVTFKTVPFDTISTGIDAGKFDLSANDFSYNKERAEXYLFSDPISRSNYAVVGKKGSHYKSLSDLSGKSTEVLSGVNYAQVLENWNKNHPNKKPIKIKYVSGTTGVTSRLKNIESGKIDFILYDAISSDYIVKDQSLNLSVSPLKGKIGNNKDGLEYLLLPKDKKGKTLQKFINKRIKVLKENGTLARLSKQYFGGDYVSNIDK

SEQ ID NO: 18521 - protein, 801 aa, Streptococcus agalactiae
ATGAATCAATTTATCTTGACGGGTGGATGGTCTTGGTATAATAATTTGGTTAGTCAGGTTCCAGCGGGGAAATTATTTAGTTGGAAGGCTGTTTTAGATGCAATACCCTCAATTTTAGAGCGATTACCCATAACACTATTATTGACAGTAGCAGGAGCCTTATTTGGACTCATTTTAGCTTTGATTTTTGCAGTAGTGAAAATTAACCGTGTCAAAATTTTATATCCGATTCAAGCTTTATTTGTTAGTTTTTTACGTGGGACTCCAATACTTGTTCAATTAATGCTGAGTTATTATGGAATTCCACTTTTCTTGAAATTTTTAAACCAAAAATATGGTTTTGATTGGAACATTAATGCTATACCGGCTTCTGTATTTGCTATTACTGCATTTGCTTTTAATGAAGCGGCTTATACAAGTGAAACTATACGAGCGGCGATTTTGTCGGTTGATCAAGGTGAAATTGAGGCAGCACGTAGTTTAGGGATGACCTCAGCGCAAGTTTATCGTCGTGTTATTATTCCAAACGCAGCAGTAGTCGCAACACCTACTTTGATAAACACGTTAATTGGTCTAACTAAGGGAACCTCTTTAGCTTTTAATGCTGGTATTGTTGAAATGTTTGCCCAAGCACAAATTATGGGTGGTAGCGATTATCGCTATTTTGAACGTTATATCTCTGTGGCACTTGTTTACTGGGCGGTTAGTTTCTTAATTGAACAATTGGGAAATGCTATTGAACGAAAAATGGCAATTAAGGCTCCACGCCATTTAACTGATGAGATTCCAGGAGGAGTACGC

SEQ ID NO: 18522 - protein, 267 aa, Streptococcus agalactiae; identical to SEQ ID NO: 596

SEQ ID NO: 18523 - protein, 741 aa, Streptococcus agalactiae; identical to SEQ ID NO: 4951

SEQ ID NO: 18524 - protein, 247 aa, Streptococcus agalactiae; identical to SEQ ID NO: 598

SEQ ID NO: 18525 - protein, 246 aa, Streptococcus agalactiae; identical to SEQ ID NO: 4953

SEQ ID NO: 18526 - protein, 82 aa, Streptococcus agalactiae; identical to SEQ ID NO: 600

SEQ ID NO: 18527 - protein, 912 aa, Streptococcus agalactiae; identical to SEQ ID NO: 9385

SEQ ID NO: 18528 - protein, 304 aa, Streptococcus agalactiae; identical to SEQ ID NO: 602

SEQ ID NO: 18529 - protein, 1458 aa, Streptococcus agalactiae; identical to SEQ ID NO: 9387

SEQ ID NO: 18530 - protein, 486 aa, Streptococcus agalactiae; identical to SEQ ID NO: 604

SEQ ID NO: 18531 - protein, 819 aa, Streptococcus agalactiae; identical to SEQ ID NO: 9389

SEQ ID NO: 18532 - protein, 273 aa, Streptococcus agalactiae; identical to SEQ ID NO: 606

SEQ ID NO: 18533 - protein, 1332 aa, Streptococcus agalactiae
ATGTCAAAATTAACTCAAACATTTACAGATAAGTTATTTGCTGATTACCAAGCAAATACAAAATTTAGCGCTATTGAAAATGCAGTAACTCACAATGGTTTATTGAAGTCTCTAGAGACTCGTCAAAGTGAGATTGAGAACGACTATGTCTTTTCAATTGATTTGACCAAAGATGAAGTTTCTAATCAGAAACAATCAGGACGTTGCTGGATGTTTGCTGCACTGAATACATTTCGTCATAAACTGATTTCAGATTTTAAACTTGAGAATTTTGAATTATCTCAGGCACATACATTTTTCTGGGATAAGTATGAAAAATCAAATTGGTTTATGGAACAAATTATTGCGACTGCAAATCAGGAATTGAGTAGTCGTAAGGTGAAATTCCTATTAGATGTACCTCAACAAGATGGAGGACAATGGGACATGGTGGTTGCTCTGTTTGAGAAATATGGTGTCGTTCCTAAAACAGTTTATCCTGAATCTGTTTCATCAAGTGCTAGTCGTGAACTAAATCAATATTTGAATAAACTCTTACGCCAAGATGCACAGATTCTACGAGAATTAATAGCACAGGGAGCAGATGGGGCAACTGTTCAAAATAAAAAGGAAGAATTGCTTCAAGAAATTTTTAACTTTTTAGCAATGAACCTTGGCTTGCCACCGCAATCTTTTGATTTTGCTTATCGTGATAAAGACAATCATTATCAGTCTGATAAAAATATTACACCGAAAGCATTTTATCAAAAATATGTTAATCTTGACCTATCAGATTATGTTTCTATTATCAATGCTCCAACTGTAGATAAGCCTTATGGACAATCCTATACAGTTGAGATGCTTGGAAATGTTGTCGGAGGGCCAGCTGTTAAATATTTAAACCTTGATATGAAACGGTTTAAAGAGTTAGCGATTGCGCAAATGAAATCAGGAGAAACTGTGTGGTTTGGTTCAGACGTAGGTCAAGTATCAAATCGTCAAAAGGGTATCCTAGCAACTACGACTTATGATTTTAATTCATCTATGGATATTAAACTTAGCCAAGACAAAGCGGGCCGCCTAGATTATAGTGAAAGTTTAATGACACATGCTATGGTCTTAACGGGAGTAGACCTTGATGAATCTGGACAACCTTTAAAATGGAAAGTTGAGAACTCTTGGGGAGAGAAAGTTGGTAAGGATGGTTATTTTGTAGCTTCAGATGCTTGGATGGATGAATATACTTACCAAATAGTCGTTCGTAAAGAATTGCTTACTAAAGAAGAATTAGAGGCTTACAACGCAGAGCCAATTACTTTAGCGCCGTGGGATCCGATGGGAGCATTAGCTAAT

SEQ ID NO: 18534 - protein, 444 aa, Streptococcus agalactiae; identical to SEQ ID NO: 608

SEQ ID NO: 18535 - protein, 1710 aa, Streptococcus agalactiae
ATGGGAAATGGGAATTATGGTATGAGAACAACAGCTAAATCATACTTTGGTAAAGACCTAAAGGAATTATCTATTGCACAACTTGCTTTGCTCGCTGGTATTCCTCAAGCACCTACACAATATGACCCTTATAAAAACCCAGAATCTGCTCAAACAAGACGTAATACCGTTCTTCAGCAGATGTATCAAGATAAAAACATTTCTAAAAAGGAATACGACCAAGCTGTTGCAACTCCAGTAACTGATGGCTTAAAAGAATTAAAGCAAAAATCTACTTATCCAAAATATATGGATAACTACTTAAAACAAGTTATTAGTGAAGTTAAACAAAAAACTGGTAAAGATATCTTTACTGCTGGGCTAAAAGTGTATACTAATATCAACACTGATGCACAAAAACAACTATATGACATCTACAACAGTGACACTTACATCGCTTATCCAAACAATGAATTACAAATAGCATCTACCATCATGGATGCGACTAATGGTAAAGTCATTGCACAATTAGGCGGGCGTCATCAGAATGAAAATATTTCATTTGGGACAAATCAATCTGTCTTAACAGACCGCGATTGGGGTTCTACAATGAAACCTATCTCAGCTTATGCACCTGCTATTGATAGTGGTGTCTATAATTCAACAGGTCAATCATTAAACGACTCAGTTTACTACTGGCCTGGTACTTCTACTCAACTATATGACTGGGATCGTCAATATATGGGTTGGATGAGTATGCAGACCGCTATTCAACAATCACGTAACGTCCCTGCTGTCAGAGCACTTGAAGCCGCTGGATTAGACGAAGCAAAATCTTTCCTTGAAAAATTAGGCATATACTATCCAGAAATGAACTATTCAAATGCTATTTCAAGTAACAACAGTAGCAGTGATGCAAAATATGGTGCAAGTAGTGAGAAAATGGCAGCGGCTTACTCGGCTTTTGCAAACGGCGGAACTTACTATAAACCGCAATATGTTAATAAAATTGAATTTAGCGATGGAACCAATGATACTTATGCAGCGTCTGGTAGCCGTGCGATGAAAGAGACTACTGCCTACATGATGACGGATATGCTGAAAACAGTACTAACATTTGGTACTGGTACTAAAGCAGCTATCCCTGGTGTTGCACAAGCTGGTAAGACTGGTACTTCCAACTATACGGAAGATGAGTTAGCTAAAATTGAAGCAACTACTGGTATCTACAATAGCACCGTTGGTACAATGGCTCCTGATGAAAACTTTGTCGGCTATACTTCTAAGTACACAATGGCAATTTGGACTGGTTATAAAAATCGCCTTACACCACTTTATGGTAGCCAACTGGATATTGCTACTGAGGTTTATCGTGCAATGATGTCCTACCTAACTGGCGGATACAGTGCAGATTGGACAATGCCAGAAGGGCTCTATCGAAGCGGAAGCTACTTGTATATCAATGGGACAACTACAACCGGCACTTACTCTTCTTCTGTCTATAAGAATATCTATCAAAATTCTGGACAGTCAAGTCAAAGCAGTAGTTCAACATCCTCTGAGAAACAAAAAGAGGATAAGAATACAGCAAATGATGCCAATTCATCATCCCCACAAGTCGAAACACCTAATAATGGTAATGCTACTACCCCTAATAATTCCAATCAAACTGTGCCAGGAACTGGACATGGTAATGGTAATGGTAACAACAATACAGTACCTAACGGTAAT

SEQ ID NO: 18536 - protein, 570 aa, Streptococcus agalactiae
MGNGNYGMRTTAKSYFGKDLKELSIAQLALLAGIPQAPTQYDPYKNPESAQTRRNTVLQQMYQDKNISKKEYDQAVATPVTDGLKELKQKSTYPKYMDNYLKQVISEVKQKTGKDIFTAGLKVYTNINTDAQKQLYDIYNSDTYIAYPNNELQIASTIMDATNGKVIAQLGGRHQNENISFGTNQSVLTDRDWGSTMKPISAYAPAIDSGVYNSTGQSLNDSVYYWPGTSTQLYDWDRQYMGWMSMQTAIQQSRNVPAVRALEAAGLDEAKSFLEKLGIYYPEMNYSNAISSNNSSSDAKYGASSEKMAAAYSAFANGGTYYKPQYVNKIEFSDGTNDTYAASGSRAMKETTAYMMTDMLKTVLTFGTGTKAAIPGVAQAGKTGTSNYTEDELAKIEATTGIYNSTVGTMAPDENFVGYTSKYTMAIWTGYKNRLTPLYGSQLDIATEVYRAMMSYLTGGYSADWTMPEGLYRSGSYLYINGTTTTGTYSSSVYKNIYQNSGQSSQSSSSTSSEKQKEDKNTANDANSSSPQVETPNNGNATTPNNSNQTVPGTGHGNGNGNNNTVPNGN

SEQ ID NO: 18537 - protein, 283 aa, Streptococcus agalactiae
GTGATTACATTAAAAGGAATCTGTTATCAAACTATTGAAGTATGCTTTTGGCATTATAATGGGATTTATTATCTTAGCTATTGTAATAGGTGGGCTCCTATTTGCATACTACGTTAGTCGTTCTCCGAAATTAACCGATCAAGCTTTAAAATCCGTTAACTCTAGTTTGGTTTATGATGGTAATAATAAACTTATTGCCGATTTAGGCTCAGAAAAGCGTGAAAGTGTTAGTGCGGATAGCATTCCACTAAATTTGGTTAACGCTATCACTTCTATCGAAGAA

SEQ ID NO: 18538 - protein, 95 aa, Streptococcus agalactiae
  VARIANT 5: Xaa = Any Amino Acid
MITIXKESVIKLLKYAFGIIMGFIILAIVIGGLLFAYYVSRSPKLTDQALKSVNSSLVYDGNNKLIADLGSEKRESVSADSIPLNLVNAITSIEE

SEQ ID NO: 18539 - protein, 595 aa, Streptococcus agalactiae
ATGGTTAACTATCCACATCAGCTTATTCGGAAAACAACAGTTACAAAATCAAAGAAAAAGAAAATCGATTTTGCCAACCGTGGTATGTCATTTGAAGCTGCTATCAATGCAACCAATGACTACTATTTGTCTCACGAATTAGCTGTCATTCATAAGAAACCAACGCCAGTACAAATCGTCAAGGTAGATTATCCTAAACGTAGTCGTGCTAAGATTGTAGAAGCTTATTTTAGACAAGCTTCTACTACTGATTATTCTGGTGTTTACAAAGGTTACTATATTGACTTTGAAGCCAAAGAAACCCGGCAGAAAACTGCTATGCCTATGAAAAATTTTCATGCTCACCAAATAGAGCACATGGCAAATGTATTACAGCAAAAAGGGATTTGCTTTGTCTTGCTTCATTTTTCCACACTTAAGGAAACCTATCTACTCCCTGCTAATGAGTTAATTTCATTTTATCAGATTGATAAAGGCAATAAATCAATGCCTATTGATTATATCAGAAAAAATGGATTTTTCGTAAAGGAGAGTGCCTTTCCTCAAGTCCCTTACTTAGATATTATTGAAGAAAATTATTAGGCGGTGATTACAT

SEQ ID NO: 18540 - protein, 199 aa, Streptococcus agalactiae
  VARIANT 199: Xaa = Any Amino Acid
MVNYPHQLIRKTTVTKSKKKKIDFANRGMSFEAAINATNDYYLSHELAVIHKKPTPVQIVKVDYPKRSRAKIVEAYFRQASTTDYSGVYKGYYIDFEAKETRQKTAMPMKNFHAHQIEHMANVLQQKGICFVLLHFSTLKETYLLPANELISFYQIDKGNKSMPIDYIRKNGFFVKESAFPQVPYLDIIEEKLLGGDYX

SEQ ID NO: 18541 - protein, 516 aa, Streptococcus agalactiae
ATGAAGTCAACTATTCTTGTAACAGGTTACAAAAATTTTGAATTAGGGATTTTCCAGGATAAGGATCCTCGGATTACTATTATAAAAAAGGCTATTGATAAGGATTTTAGACGCTTCTTGGAAAATGGAGCAGACTGGTTTATTTTTATGGGAAATTTAGGGTTTGAGTACTGGGCTTTGGAAGTTGCTCTTGATTTACAAAAAGAATATGATTTTCAAATTGCGACAATTTTTACCTTTGAGAACCATGGCCAAAATTGGAATGAGGCTAATAAAGCTAAGTTGGCACTCTTTAAGCAAGTTGACTTTGTTAAATATACTTTCCCAAGCTATGAAAACCCGGGTCAATTTAAACAATACAATCATTTTCTCATTAACAACACACAAGGTGCATATCTTTTTTATGATTCTGAAAATGAAACTAATTTAAAATTTTTGCTAGAAATGATGGAGAAAAAGGAAGCTTATGATATTTCTTTCCTAACTTTTGATCGCTTAAATGAAATATATGAGGAA

SEQ ID NO: 18542 - protein, 172 aa, Streptococcus agalactiae; identical to SEQ ID NO: 614

SEQ ID NO: 18543 - protein, 120 aa, Streptococcus agalactiae; identical to SEQ ID NO: 4969

SEQ ID NO: 18544 - protein, 40 aa, Streptococcus agalactiae; identical to SEQ ID NO: 4970

SEQ ID NO: 18545 - protein, 330 aa, Streptococcus agalactiae; identical to SEQ ID NO: 9401

SEQ ID NO: 18546 - protein, 110 aa, Streptococcus agalactiae; identical to SEQ ID NO: 616

SEQ ID NO: 18547 - protein, 1147 aa, Streptococcus agalactiae
ATGAAAGAATCATTCAAATTAATAGCAACTGCTGCTGCTGGTTTAGAAGCCATTGTTGGTAGAGAAATCAGAAACCTAGGAATTGACTGCCAAGTTGAGAACGGTAGAGTCCGTTTCCACGGAGATATCAAAACATCATTGAAACGAACCTATGGCTACGAGCTGCCGATCGTATAAAGATTATTGTAGAGAGTTTCCAGCACGTACTTTTGAGGACTTTTTCAGGGTGTATATGGCCTTGACTGGGAAAATTATTTACCGTTAGGGGCAAAATTTCCTATTGCTAAAGCAAAGTGTGTCAAGTCAAAATTGCACAATGAACCTAGTGTACAAGCCATTTCTAAAAAAGCTGTTGCTAAGAAACTTCAAAAAGTCTTTCACCGTCCTGAAGAGTTCCCTTACAAGAAAATGGAGCTGAATTTAAAATAGAAGTTTCTATTTTAAAAGATAAAGCGACTGTCATGATTGATACGACTGGATCAAGTCTCTTCAAACGTGGCTACCGTGCAGAAAAAGGTGGTGCACCAATTAAAGAAAACATGGCAGCAGCTATTATTCAATTATCTAATTGGTTCCCTGATAAGCCATTGATTGATCCAACTTGTGGTTCAGGTACTTTTTGTATTGAAGCTGCTATGATTGGAATGAATATAGCTCCTGGTTTTAATCGTGATTTTGCCTTTGAGGCGTGGCCATGGGTAGATCAAAGTCAAGTACAAAAGGTTCGTGATGAAGCTGAGAGTAAAGCAAACTATGATATTGATTTAGATATTTCAGGTTTTGATTTAGACGGTCGTATGGTAGAAATTGCTAGAAAAAATGCAGAAGAAGCAGGACTTGGAGATGTTATCAAATTGAAACAAATGCGTCTTCAAGATTTAAAAACAGATAAAATTAACGGTGTTATTATCTCCAACCCACCATATGGTGAACGACTCCTGGATGACAAAGCAGTGGACATTTTGTATAATGAGATGGGACAAACATTTGCGCCTTTAAAAACTTGGAGCAAGTTTATCCTAACTAGTGACGAAGGATTTGAAAAAAATACGGCTCACAAGCTGATAAAAAACGTAAGCTTTACAATGGTACTTTAAAAGTTGATTTGTACCAATATTACGGTGAACGTGTGAGACGTCAAGTAAAA

SEQ ID NO: 18548 - protein, 384 aa, Streptococcus agalactiae
  VARIANT 64, 132: Xaa = Any Amino Acid
MKESFKLIATAAAGLEAIVGREIRNLGIDCQVENGRVRFHGDIKTIIETNLWLRAADRIKIIVXEFPARTFEELFQGVYGLDWENYLPLGAKFPIAKAKCVKSKLHNEPSVQAISKKAVAKKLQKVFHRPEXVPLQENGAEFKIEVSILKDKATVMIDTTGSSLFKRGYRAEKGGAPIKENMAAAIIQLSNWFPDKPLIDPTCGSGTFCIEAAMIGMNIAPGFNRDFAFEAWPWVDQSQVQKVRDEAESKANYDIDLDISGFDLDGRMVEIARKNAEEAGLGDVIKLKQMRLQDLKTDKINGVIISNPPYGERLLDDKAVDILYNEMGQTFAPLKTWSKFILTSDEGFEKKYGSQADKKRKLYNGTLKVDLYQYYGERVRRQVK

SEQ ID NO: 18549 - protein, 1461 aa, Streptococcus agalactiae; identical to SEQ ID NO: 9405

SEQ ID NO: 18550 - protein, 487 aa, Streptococcus agalactiae; identical to SEQ ID NO: 9406

SEQ ID NO: 18551 - protein, 480 aa, Streptococcus agalactiae; identical to SEQ ID NO: 9407

SEQ ID NO: 18552 - protein, 160 aa, Streptococcus agalactiae; identical to SEQ ID NO: 624

SEQ ID NO: 18553 - protein, 1605 aa, Streptococcus agalactiae; identical to SEQ ID NO: 9409

SEQ ID NO: 18554 - protein, 535 aa, Streptococcus agalactiae; identical to SEQ ID NO: 626

SEQ ID NO: 18555 - protein, 99 aa, Streptococcus agalactiae; identical to SEQ ID NO: 9411

SEQ ID NO: 18556 - protein, 33 aa, Streptococcus agalactiae; identical to SEQ ID NO: 9412

SEQ ID NO: 18557 - protein, 894 aa, Streptococcus agalactiae; identical to SEQ ID NO: 9413

SEQ ID NO: 18558 - protein, 298 aa, Streptococcus agalactiae; identical to SEQ ID NO: 628

SEQ ID NO: 18559 - protein, 738 aa, Streptococcus agalactiae
ATGAGAATCTTTAAAGCATTATTGAAAATGGAATTTCTTTTGACAAAACGTCAACTTGCCAATCTCATTATGGCTATAGGTATGCCAGTGGCTTTTTTTCTATTTTTTTCAGGATTTATGGGCGAAGGACTCACTAAAGCCATCGAAGCTATCTACGTTCGTAATTATATGATAACGATGGCAGGATTCTCAAGTCTTAGCTTTGCTTTTTTTACTTTTCCATTTTCTATGAAAGATGATCAACTCTCAAACCGAATGCAATTATTAAGACACTCACCAGTACCAATGTGGCAATATTATCTAGCAAAAATTATTCGTATTTTATTTTACTATTGCCTAGCAATAACTGTTGTTTTCCTAACTGGGCATATTTTAAGGCAAGTTAGTATGCCAATAGAACAATGGATGCAGAGCTTTTTATTGCTATTAGGAGGAGCAACATGTTTTATTCCTTTTGGATTGCTCGTCTCCTACTTTAAAAATACTGAACTAATGTCAATGGTAGCCAATATTTGTTATATGTCATTAGCTGTTCTTGGTGGCATGTGGATGCCAATTACAATGTTCCCAAAATGGTTGCAAGCTTTATCAAAGTTAACCCCTACTTACCATTTGACTCAAGTTATCCTTAGTCCGTTTGCTAATAGTTTTGCTGGTTTTTCTCTTATTATTCTGATAGGCTATGGTATTATAATGTTAGTTATCGCTTATCTACTATCTCAGAAGAGGCATTCAATT

SEQ ID NO: 18560 - protein, 246 aa, Streptococcus agalactiae; identical to SEQ ID NO: 630

SEQ ID NO: 18561 - protein, 1053 aa, Streptococcus agalactiae
ATGTATTTTATTCCGTTAGTATTTTTGATTTACCCCATAGGAGGGATTCTCTATTATCACTACCCTTTTTGGACTTTATTTTTTACGCTAGCTTTTGTAGGAGCATATTTATACTCTGTTATTATCAGGGGCGAATCAAAGTATCACATGACTGCCTGGTCTACAATGTTGACATATATTTTCTACATGACAATTTTTATAAATAGTGGTTTCATCTGGTATATTTACTTTCTGAGTAATTTACTCGTCTATCGCTTTAGAGATAAATTGAAGTCTTTTAGATTCATTAGTTTTGCTTGTACTCTAGCCACAGTGGTATTTTTATGCTTCTTTAAGGCATCAGACTTTGGTGATAGAATCATGTTTCTAATTGTTCCTATTTTTTGTATCGGTTACATGTGGATTGCTATTGAAAATAGAAATAGCGAAGAACAAAGAGAAAAAATTGCAGAGCAAAATCAGTATATCAATATTTTGTCAGCTGAAAATGAACGTAACCGTATAGGGCGTGATTTGCATGATAGTTTAGGACATACATTTGCTATGATGACACTAAAGACAGAACTAGCGTTAAAGTTGTTAGAAAAAAGGAACTATGATAAGGTACAAAAAGAACTATCAGAATTAAATCATATTAGTCATCAATCGATGAGTGAGGTCCGTCAAATTGTTTCTAACCTCAAGTATCGTACAGTAGTGGAAGAAATTGATGAGTTGTACCGCTTGTTTCAATTATCTAACATTAAGTTAACAGTTGTTAATAAGTTAGAGACGTCACAACTAAGTCCAGTAACACAATCTACAATCACAATGATATTAAAGGAATTATCCAATAATATTGTTAAGCATGCTGAAGCTGATAGCGTGGAGTTGAGTTTAGTAAGGCAAGGTGCTACTATAAATATTGAGATGATTGATAATGGTTGTGGTTTTACAAACCTTGACGGAGATGAGTTGCATAGTATTCAAGAGAGATTAACTATCGTTGAAGGGACACTAACGATTTTGTCCCGAAGTAAACCAACTCATATTCAGGTGGTATTGAAAGAGGTA

SEQ ID NO: 18562 - protein, 351 aa, Streptococcus agalactiae
MYFIPLVFLIYPIGGILYYHYPFWTLFFTLAFVGAYLYSVIIRGESKYHMTAWSTMLTYIFYMTIFINSGFIWYIYFLSNLLVYRFRDKLKSFRFISFACTLATVVFLCFFKASDFGDRIMFLIVPIFCIGYMWIAIENRNSEEQREKIAEQNQYINILSAENERNRIGRDLHDSLGHTFAMMTLKTELALKLLEKRNYDKVQKELSELNHISHQSMSEVRQIVSNLKYRTVVEEIDELYRLFQLSNIKLTVVNKLETSQLSPVTQSTITMILKELSNNIVKHAEADSVELSLVRQGATINIEMIDNGCGFTNLDGDELHSIQERLTIVEGTLTILSRSKPTHIQVVLKEV

SEQ ID NO: 18563 - protein, 588 aa, Streptococcus agalactiae
ATGAAATTACTTGTTGCTGAGGATCAGTCCATGCTACGAGATGCTATGTGCCAATTACTTTTGATGGAAGAAAGTGTTTCTACTATTGATCAAGCTGGAAATGGTGGAGAAGCTATTGCCATTTTATCCAATAAAGCCATAGATGTTGCAATATTGGATGTTGAGATGCCGATATTATCAGGTTTAGATGTCTTAGAGTGGGTTAGAAAATACCAGAATGTTAAGGTCATAATTGTAACAACCTTTAAGCGGTCAGGTTATTTCCAAAGGGCTATTCGTTCAAATGTAGATGCTTATGTTTTGAAAGACCGCTCAGTAGCTGATTTGATGAAAACGATTCAAAAAGTTTTATCTGGGGGTAAAGAATATTCGCCTGAATTAATGGAAAACGTTATATCTAATCCTTTGAGTGAGCAAGAAATAAAAATTCTTTCCCTAATTGCTCAAGGGAAGACCAGCAAAGAAATTGCATGCACTTTATTTTTATCGAATGGTACAGTTCGTAATTACACGTCAAATATTTTTGATAAATTAGGAGTTAATAATCGTTTGGAGGCACTTAAAATAGCACGAGAAAAGGATTGGCTG

SEQ ID NO: 18564 - protein, 196 aa, Streptococcus agalactiae
MKLLVAEDQSMLRDAMCQLLLMEESVSTIDQAGNGGEAIAILSNKAIDVAILDVEMPILSGLDVLEWVRKYQNVKVIIVTTFKRSGYFQRAIRSNVDAYVLKDRSVADLMKTIQKVLSGGKEYSPELMENVISNPLSEQEIKILSLIAQGKTSKEIACTLFLSNGTVRNYTSNIFDKLGVNNRLEALKIAREKDWL

SEQ ID NO: 18565 - protein, 702 aa, Streptococcus agalactiae; identical to SEQ ID NO: 9421

SEQ ID NO: 18566 - protein, 234 aa, Streptococcus agalactiae; identical to SEQ ID NO: 636

SEQ ID NO: 18567 - protein, 626 aa, Streptococcus agalactiae
ATGTCTGAACGTGGTTTGCTAATTGTTTTCTCAGGACCATCTGGTGTTGGTAAGGGGACAGTTAGGCAAGAAATTTTTTCAACCCCTGACCATAAATTTGATTATTCCGTTTCAATGACTACTCGTCCACAACGCCCAGGCGAAGTTGATGGAGTTGATTATTTCTTCCGTACACGTGAAGAGTTTGAAGCGTTGATTAAAGAAGGTCAAATGCTTGAGTATGCGGAGTATGTTGGTAACTACTATGGAACTCCTTTAAGTTATGTCAACGAGACTTTAGACAAAGGGATTGATGTTTTTCTTGAAATAGAAGTTCAGGGAGCGCTTCAAGTTAAATCGAAGGTTCCGGACGGTGTTTTCATTTTCTTAACACCACCAGATTTAGAGGAATTAGAAGAGCGTTTAGTAGGACGTGGGACAGATAGTCCAGAAGTGATTGCCCAACGTATTGAACGTGCCAAAGAAGAAATTGCTTTGATGAGGGAGTATGACTATGCTGTGTCAATGATCAAGTGTCATTAGCAGCAGAACGTGTTAAACGTGTCATTGAAGCAGAACATTATCGTGTGGATCGTGTTATTGGGCGTTATACCAACATGGTCAAAGAAACTGATAAAAAATTAAGT

SEQ ID NO: 18568 - protein, 209 aa, Streptococcus agalactiae [sequence omitted]

SEQ ID NO: 18569 - protein, 273 aa, Streptococcus agalactiae
ATGATGTTAAAACCTTCTATCGACACTTTGTTGGATAAAGTTCCTTCAAAATATTCTTTAGTTATTTTACAAGCTAAGCGTGCTCATGAATTGGAAGCTGGTGAGAAAGCCACTCAAGATTTTAAATCTGTGAAATCAACACTTCGCGCTTTAGAAGAAATCGAGTCAGGTAATGTTGTAATTCACCCAGATCCATCAGCAAAACGTGCCTCAGTTCGCGCTCGTATCGAAGCTGAACGCCTTGCTAAAGAAAAAGAAGACGGCGAAAAAATT

SEQ ID NO: 18570 - protein, 91 aa, Streptococcus agalactiae
MMLKPSIDTLLDKVPSKYSLVILQAKRAHELEAGEKATQDFKSVKSTLRALEEIESGNVVIHPDPSAKRASVRARIEAERLAKEKEDGEKI

SEQ ID NO: 18571 - protein, 2388 aa, Streptococcus agalactiae; identical to SEQ ID NO: 9427

SEQ ID NO: 18572 - protein, 796 aa, Streptococcus agalactiae; identical to SEQ ID NO: 642

SEQ ID NO: 18573 - protein, 933 aa, Streptococcus agalactiae; identical to SEQ ID NO: 9429

SEQ ID NO: 18574 - protein, 311 aa, Streptococcus agalactiae; identical to SEQ ID NO: 644

SEQ ID NO: 18575 - protein, 1320 aa, Streptococcus agalactiae
TTGGCGAATGATTGGAAAAAGAGTGCGCGTGGTTTAGCTTTAATGACTTTAGAGGAAGTTTTTGATAAAGGAGCTTATTCTAATATCGCACTTAATAAGAGTTTAAAAAAATCTAGACTATCAGATAAAGATCGTGCCTTAGTAACAGAAATTGTCTATGGAACTGTGGCTAGAAAAATAACGCTAGAATGGTATCTATCACACTTTATAGTTGATCGTGATAAGCTTGAATTATGGGTATATCATCTCTTGCTACTGAGCCTTTATCAACTACTCTATCTGGACAACATCCCAGATCACGCTATTGTTAATGATGCTGTCACTATTGCTAAGAATCGAGGCAATAAAAAGGGTGCTGAAAAGTTAATTAATGCCGTTTTACGAAGAGTAAGTTCGGAGACGCTCCCTGAAATTGCATCAATAAAACGCCAAAACAAACGTTACTCTGTTGCTTATTCCATGCCAGTGTGGCTCGTAAAAAAATTAATTGACCAATATGGTGAGACAAGAGCTTTAGCTATTATGGAGAGTTTATTTGAGCGAAATAAAGCCAGTCTTCGTGTGACTGACTTATCGCAAAAACAAACTATCAAAGAAACTTTAAATGTTAGAGATTCACATATTGCAGAGACAGCTTTAGTTGCAGACTCAGGAAATTTTGCATCGACATCATTTTTCCAAGATGGCCTCATTACTATCCAAGATGAATCTAGTCAATTAGTTGCTCCAACACTCAAAGTCTCAGGTAATGACCAAGTATTGGATGCATGTAGTGCACCAGGAGGAAAAACAAGTCATATCGCCTCATATTTGACTACAGGGGCAGTAACTGCTTTAGATTTGTATGATCATAAATTGGAATTGGTTATGGAAAATGCAAAACGCCTAGGTCTGTCAGATAAGATAAAAACTAAAAAGTTAGATGCAAGTAAAGCTCATGAGTATTTTCTTGAGGATACTTTTGACAAAATTTTAGTAGACGCACCTTGTTCAGGTATCGGGCTAATTCGCCGTAAACCAGATATTAAGTACAATAAAGCTAATCAAGACTTTGAAGCACTCCAAGAGATTCAATTGTCTATCCTATCTAGCGTTTGTCAAACGCTACGTAAAGGTGGTATAATAACCTATAGCACTTGTACCATTTTTGAGGAAGAAAATTTTCAAGTTATTGAAAAATTCTTAGAAAACCACCCCAATTTTGAGCAAGTAGAACTGAGTCATACACAAGAGGATATTGTAAAGAGAGGCTGTATTAGTATAAGCCCTGAACAATATCATACAGATGGCTTTTTTATTGGACAAGTCAAACGTATCTTG

SEQ ID NO: 18576 - protein, 440 aa, Streptococcus agalactiae
MANDWKKSARGLALMTLEEVFDKGAYSNIALNKSLKKSRLSDKDRALVTEIVYGTVARKITLEWYLSHFIVDRDKLELWVYHLLLLSLYQLLYLDNIPDHAIVNDAVTIAKNRGNKKGAEKLINAVLRRVSSETLPEIASIKRQNKRYSVAYSMPVWLVKKLIDQYGETRALAIMESLFERNKASLRVTDLSQKQTIKETLNVRDSHIAETALVADSGNFASTSFFQDGLITIQDESSQLVAPTLKVSGNDQVLDACSAPGGKTSHIASYLTTGAVTALDLYDHKLELVMENAKRLGLSDKIKTKKLDASKAHEYFLEDTFDKILVDAPCSGIGLIRRKPDIKYNKANQDFEALQEIQLSILSSVCQTLRKGGIITYSTCTIFEEENFQVIEKFLENHPNFEQVELSHTQEDIVKRGCISISPEQYHTDGFFIGQVKRIL

SEQ ID NO: 18577 - protein, 735 aa, Streptococcus agalactiae; identical to SEQ ID NO: 9433

SEQ ID NO: 18578 - protein, 245 aa, Streptococcus agalactiae; identical to SEQ ID NO: 648

SEQ ID NO: 18579 - protein, 1886 aa, Streptococcus agalactiae
ATGGCGGATGTTTATCTAGCTCGAGATCTAATTTTAGATAATGAAGAGGTCGCAATAAAAGTATTGCGAACCAATTATCAAACAGATCAGATTGCGGTTGCTCGCTTCCAGAGAGAAGCACGAGCAATGGCTGAGCTGACACATCCTAATATTGTCGCTATTCGTGATATAGGTGAAGAAGACGGACAGCAGTTCTTAGTAATGGAATATGTTGATGGATTCGATTTAAAAAAGTATATTCAAGACAATGCACCCCTATCAAATAATGAAGTTGTTCGAATCATGAATGAAGTCCTTTCAGCCATGTCACTGGCACATCAGAAAGGTATCGTACACCGTGATTTAAAACCTCAAAATATTTTATTAACTAAAAAAGGGACTGTAAAAGTTACAGATTTCGGTATTGCGGTAGCGTTTGCTGAAACTAGTTTAACGCAAACGAATTCTATGTTAGGTAGTGTTCATTATTTATCGCCAGAGCAGGCGCGTGGTTCAAAAGCGACTGTTCAGAGTGATATTTATGCCATGGGAATCATGCTTTTTGAAATGTTAACTGGCCATATTCCTTATGATGGGGATAGTGCAGTTACTATTGCCCTACAGCACTTCCAAAAACCACTACCATCAATCCTTGCAGAAAATAAAAGCGTTCCACAAGCTTTGGAAAACATTGTCATTAAAGCAACAGCTAAAAAGCTAACAGATCGCTATAAGACAACTTATGAGATGGGACGTGATTTATCAACTGCTCTAAGCTCGACACGTCACCGTGAACCAAAACTTGTTTTTAATGATACTGAGAGTACTAAGACACTACCCAAAGTAACATCTACAGTATCATCTCTAACGACAGAACAACTGTTGCGTAATCAAAAACAGGCCAAAACAACAGAAAAAATAACTCCTGATTCTGCGAGTAACGATAAAACGAAGTCTAAAAAGAAGGCTTCTCATCGACTTCTTGGTACAATCATGAAATTATTCTTTGCACTCTGTGTTGTAGGAATAATTGTATTTGCTTATAAAATTTTAGTAAGTCCTACGACTATTCGTGTTCCAGATGTTAGCAACAAAACAGTAGCTCAAGCAAAAATGACATTGGAAAATTCTGGATTGAAAGTAGGAGCTATTCGTAATATTGAGAGTGATAGTGTTTCAGAAGGACTTGTCGTAAAAACAGACCCTGCTGCAGGACGTTCTCGCAGAGAAGGGGCTAAAGTTAATCTTTATATTGCCACTCCAAACAAGAGTTTCACTCTAGGTAATTATAAGGAACATAATTACAAAGATATCCTCAAAGATCTTCAAGGCAAAGGTGTTAAAAAATCTTTAATCAAGGTTAAGCGTAAAATTAATATGATTATACTACTGGTACAATCTTAGCACAGTCGCTTCCAGAAGGAACATCTTTTAATCCTGATGGTAATAAGAAATTAACACTTACGGTTGCTGTTAATGATCCAATGATTATGCCTGATGTAACAGGTATGACTGTTGGAGAAGTAATAGAAACCTTGACAGACCTCGGATTAGATGCAGATAATCTTGTCTTCTATCAAATGCAAAATGGCGTTTATCAAACAGTAGTAACACCTCCATCTTCAAGTAAGATAGCAAGTCAGGATCCTTATTACGGAGGAGAAGTTGGATTAAGGAGAGGAGATAAAGTTAAGCTGTATCTTCTTGGTTCTAAAACAACGAATAACTCATCATCTACGCCAATAGATTCTTCGGCTTCAAGCTCAACAGGAACAACTACCTCGGATTCTGTAAGCTCATCAACGGATGCTAGCACTTCTGATAGTAGTAGCACTTCTACAAGTAGTTCAACACTACCAAGTGATAGTACAACTAATACAGGAACAGCTAACAATCCATTAACTCAA

SEQ ID NO: 18580 - protein, 629 aa, Streptococcus agalactiae; identical to SEQ ID NO: 650

SEQ ID NO: 18581 - protein, 693 aa, Streptococcus agalactiae; identical to SEQ ID NO: 9437

SEQ ID NO: 18582 - protein, 231 aa, Streptococcus agalactiae; identical to SEQ ID NO: 652

SEQ ID NO: 18583 - protein, 1017 aa, Streptococcus agalactiae; identical to SEQ ID NO: 9439

SEQ ID NO: 18584 - protein, 339 aa, Streptococcus agalactiae; identical to SEQ ID NO: 654

SEQ ID NO: 18585 - protein, 639 aa, Streptococcus agalactiae; identical to SEQ ID NO: 9441

SEQ ID NO: 18586 - protein, 213 aa, Streptococcus agalactiae; identical to SEQ ID NO: 656

SEQ ID NO: 18587 - protein, 1398 aa, Streptococcus agalactiae; identical to SEQ ID NO: 9443

SEQ ID NO: 18588 - protein, 466 aa, Streptococcus agalactiae; identical to SEQ ID NO: 658

SEQ ID NO: 18589 - protein, 372 aa, Streptococcus agalactiae; identical to SEQ ID NO: 9445

SEQ ID NO: 18590 - protein, 124 aa, Streptococcus agalactiae; identical to SEQ ID NO: 660

SEQ ID NO: 18591 - protein, 774 aa, Streptococcus agalactiae; identical to SEQ ID NO: 9447

SEQ ID NO: 18592 - protein, 258 aa, Streptococcus agalactiae; identical to SEQ ID NO: 662

SEQ ID NO: 18593 - protein, 753 aa, Streptococcus agalactiae; identical to SEQ ID NO: 9449

SEQ ID NO: 18594 - protein, 251 aa, Streptococcus agalactiae; identical to SEQ ID NO: 664

SEQ ID NO: 18595 - protein, 981 aa, Streptococcus agalactiae
ATGAAATTAGAGCGTCAAAAATTGTTAGCTAAAGTAGCTTACCTTTACTATATGGAAGGGAAAAGCCAATCTGAGATTGCCAATGAATTAGGAATTTATCGTACAACAATAAGTCGTATGTTAGCCAAAGCGAGAGAAGAAGGTCTTGTTAGAATCGAAATTTCAGATTTTAATCCAGAAATTTTTCAGTTAGAATCCTATTTTAAAAGTAAATATCACCTTAAAGATATTGAGATTGTTTCTTCGCGAAAAGATAGCGATACTTCAGAGATAGAGAAGGATTTAGCACATGTAGCTGCAGCTATGATTCGAAAAAAAATTAAAGAGAATGACAAGGTGGGGATTGCTTGGGGGAGGACACTTAGTAAAGTAGTTGAAGCAATGCGTCCTCATCCGGTTTCTCAAGTTTCTTTTGTTCCTTTGGCCGGAGGTCCAAGTCATATTAATGCACGCTATCACGTTAATACTCTGGTTTACGAAATGTCAAGGCGTTTCCAAGGAAGTTGTACTTTCATTAATGCAACTCTAGTTCAAGAAAACGCTAATTTAGCGAAAGGAATATTAACTTCAAAATATTTTGAGGGGCTAATGGATAATTGGGAAAAACTTGATGTGGCAATTGTGGGCGTTGGTGGTAAACCTAAAAGCAATGAACAACAGTGGCTTGACCTTTTAAATCAAGATGATTTTCAATGCTTGGATGAAGAAGCAGCTGTAGGTGAAATTACTTGTCGTTTTTTTAATCATTCAGGTGATCCTGTGAATCAACATTTAGCTAAAAGGACAATAGGAATTACCTTAGAACAACTACAGAAAGTTCCTAATAGAATAGCGGTTGCTCATGGCAATTATAAGGCTGCGGCACTCTTAGCCGTTTTAAAAAAGGGGTATATTAATCATTTAGTTACTGATTTTTCCACAGCCTTAAATATTTTAAGATTAGATAAAGACACCTTTGTGGATACTATATATCAAAAGAGC

SEQ ID NO: 18596 - protein, 327 aa, Streptococcus agalactiae; identical to SEQ ID NO: 666

SEQ ID NO: 18597 - protein, 321 aa, Streptococcus agalactiae; identical to SEQ ID NO: 9453

SEQ ID NO: 18598 - protein, 107 aa, Streptococcus agalactiae; identical to SEQ ID NO: 668

SEQ ID NO: 18599 - protein, 318 aa, Streptococcus agalactiae; identical to SEQ ID NO: 5023

SEQ ID NO: 18600 - protein, 106 aa, Streptococcus agalactiae; identical to SEQ ID NO: 670

SEQ ID NO: 18601 - protein, 1298 aa, Streptococcus agalactiae
ATGTCAAAGTTTGATAGTCAGAAAATAATTACTCCGATTATGAAGTTTGTCAATATGCGAGGGATTATTGCACTCAAAGATGGCATGCTAGCAATTCTACCACTAACAGTTGTTGGGAGTCTCTTTTTAATATTAGGGCAGCTTCCATTTAAAGGTCTTAATCAAGCCATAGCTAATGTTTTTGGACCAGAATGGACAGAACCATTTATGCAAGTTTATTCAGGAACTTTTGCGATTATGGGCTTGATTTCCTGTTTTGCAATTGCTTATGCTTATGCTAAAAATAGTAGTGTAGAACCGTTACCTGCTGGCGTTTTATCACTTTCGTCTTTCTTTATTTTAATGAAATCATCTTATATTCCTGTAAAAGGAGAAGCAATAGCGGATGCTATTTCTAAGGTTTGGTTTGGCGGTCAGGGGATTATTGGAGCAATTATTATTGGCTTAGTAGTTGGTGCTATCTATACATGGTTTATCCAACATCATATTGTTATAAAAATGCCAGAGCAAGTACCACAGGCAATAGCAAAACAATTTGAAGCTATGATTCCAGCTTTTGTTATCTTTCTTTTATCGATGATTGTTTATTTGATTGCTAAGGTAACAACTGGAGGTACCTTTATTGAGATGATTTATGATATCATTCAAGTACCGTTGCAAGGCTTAACAGGCTCACTTTATGGAGCAATTGGGATTGCTTTCTTTATTTCATTCTTATGGGGTTTGGTGTCCATGGCCAATCTGTGGTGAATGGTATTGTGACTGCTTTGTTACTATCCAATTTAGATGCCAATAAGTCTTTATTAGCAGCAAATCGCTTAACATTAGATAATGGCGCTCACATTGTAACACAGCAGTTTTTGGATAGTTTCTTGATTTTATCGGGCTCAGGAATAACTTTTGGACTAGTTATTGCGATGCTTTTTGCAGCAAAATCAAAACAATACAAGGCACTTGGGAAAGTGGCCGCTTTTCCCGCAATTTTCAATGTTAACGAGCCAATCGTCTTTGGCTTTCCAATCGTAATGAATCCTGTGATGTTTCTGCCTTTTATTTTAGTACCAGTTTTGGCAGCTTTAATTGTTTATGGAGCTATTGCGGTTGGTTTTATGCAACCATTCTCAGGTGTTACTTTACCATGGAGTACTCCAGCAATTATTTCTGGATTCATGGTAGGTGGTTGGCAAGGTGCACTCGTCCAAATAGTCATTTTAGCTATCTCAACTGCTGTTTACTTCCCATTCTTTAAAATCCAAGATAATATTACTTACAAAAATGAATGTGAAATGGAAAGGGGA

SEQ ID NO: 18602 - protein, 433 aa, Streptococcus agalactiae
  VARIANT 241: Xaa = Any Amino Acid
MSKFDSQKIITPIMKFVNMRGIIALKDGMLAILPLTVVGSLFLILGQLPFKGLNQAIANVFGPEWTEPFMQVYSGTFAIMGLISCFAIAYAYAKNSSVEPLPAGVLSLSSFFILMKSSYIPVKGEAIADAISKVWFGGQGIIGAIIIGLVVGAIYTWFIQHHIVIKMPEQVPQAIAKQFEAMIPAFVIFLLSMIVYLIAKVTTGGTFIEMIYDIIQVPLQGLTGSLYGAIGIAFFISFLWXFGVHGQSVVNGIVTALLLSNLDANKSLLAANRLTLDNGAHIVTQQFLDSFLILSGSGITFGLVIAMLFAAKSKQYKALGKVAAFPAIFNVNEPIVFGFPIVMNPVMFLPFILVPVLAALIVYGAIAVGFMQPFSGVTLPWSTPAIISGFMVGGWQGALVQIVILAISTAVYFPFFKIQDNITYKNECEMERG

SEQ ID NO: 18603 - protein, 2453 aa, Streptococcus agalactiae
ATGACCAAACAATTACTCACTCAAAAATATACAAATGATGTTCAACAAAATTCTCAAAAGCATTTTGGCTATTTGACAGAGCGCATGTATTCTTATCGCGATAAGGTTCTTGATAAGAAACCATTCATAGATGCAGAACGTGCTATCTTGGTAACTGAAGCCTATCAAAAGCATCAGGAAAAACCTAATGTTTTAAAGAGAGCTTACATGTTGCAAAATATTTTGGAAAAAATGACAATCTATATTGACGATGAGACAATGATTGTCGGTAACCAAGCTTCATCTGATAAAGATGCTCCTATTTTTCCAGAATACACTCTAGAATTTGTTGTAAATGAACTAGACCTTTTTGAAAAACGAGATGGTGATGTCTTTTACATTACAGAAGAAACCAAAGAACAAATTAGAAATATTGCACCTTTCTGGGAAAATAATAATTTACGGGCTCGTGCGGGCGTTATGCTTCCAGAAGAAGTTCAAGTTTATATGGAGACAGGCTTCTTTGGGATGGAAGGTAAGATGAATTCTGGGGATGCTCACTTAGCTGTCAACTATCAGAAGTTACTAGAAGAAGGGCTTATTGGCTTTGAAAAAAAAGCAAGAAAAGCTAAAGCTGACTTAGATTTAACAAAGCCTGAGAGTATTGACAAATATCATTTCTATGATTCTATTTTAATTACAATAGAAGCTGTTAAAACCTATGCAGAGCGTTTTGCTATCCTAGCAAAAAAACAAGCTAAAACAGCAAATGCTAAGAGACGTCAGGAATTGTTAGATATCGCTAGTATTTGTGAACGAGTGCCCTATTACCCAGCTGAAACGTTTGCAGAAGCCGTTCAATCGGTTTGGTTTATTCAGTGTATTCTTCAAATAGAATCAAACGGTCATTCTCTATCTTATGGACGCTTTGATCAATACATGTATCCATATGTTAAATCTGACTTAGAAGCTGGACGTGAGACTGAGGATTCGATCGTTGAGCGCCTAACTAACCTATGGATTAAAACAATAACTATTAATAAGGTTCGTAGCCAAGCTCATACGTTTTCGTCTGCTGGTAGTCCTCTTTACCAAAATGTAACGATTGGAGGACAAACACGACATAAGGAAGATGCTGTTAATCCTTTATCATTTCTAGTACTAAAATCAGTCGCTCAGACACACTTACCACAGCCTAATCTAACGGTTCGTTATCATGCTAACCTAGACAAGTCATTCATGAATGAAGCTATTGAAGTTATGAAATTAGGCTTTGGTATGCCAGCTTTTAATAATGATGAAATTATTATTCCATCATTTATTAAAAAAGGAGTTTCCAAGAAGATGCCTATGATTATTCAGCGATTGGTTGTGTCGAAACAGCAGTTCCTGGGAAATGGGGTTATCGTTGTACCGGCATGAGCTATATCAACTTCCCTAAAGTGTTATTAATTACAATGAATGACGGTATTGACCCGGCTTCTGGGAAGAGATTTGCGCCTTCTTATGGGCATTTCACCCAGATGACCTCATATAAAGAACTTAAAGAAGCTTGGGACAAAACACTTCGTTACTTAACTCGAATGAGCGTTATTGTTGAAAATGCTATTGATATTAGTCTCGAAAGAGAAGTACCTGATATTCTTTGTTCAGCTTTAACTGATGATTGTATTGGACGAGGTAAGCACTTAAAAGAAGGTGGTGCAGTATATGACTACATATCTGGTCTACAAGTTGGAATCGCTAATCTTTCAGACTCACTTGCTGCGCTTAAAAAATTAGTATTTGAAGAAAAACGCCTAACCACATTAGAAGTATGGCAAGCATTGCAGAGTGATTACGCAGGTCCGCGTGGTGAAGAAATTCGTCAAATGTTGATCAATGAAGCACCAAAATATGGAAATGATGATGACTACGCGGATAGTTTAGTACGTGAGTGTTATGATGTTTATGTTGAAGAAATTGCTAAATATCCCAACACACGCTATGGACGTGGACCAATCGGTGGTATTCGCTATTCAGGAACGTCCTCTATTTCAGCAAATGTAGGCCAAGGACGAGGTACTTTAGCAACTCCAGATGGTAGGCATGCAGGAACTCCATTAGCTGAAGGTTGTTCACCATCTCATAATATGGACAAAAAGGGACCTACCTCTGTTTTGAAATCAGTTTCGAAGTTACCAACTGATGAGATTGTCGGCGGTGTACTCCTTAACCAAAAAGTCAACCCTCAAACCTTGGCAAAAGAAGAAGATAAACAAAAATTAATTGCCTTACTTAGAACATTCTTCAATCGCCTTCATGGTTACCATATCCAGTATAATGTTGTCTCACGTGAGACTTTGATTGATGCTCAGAAGCACCCTGAAAAACACCGCGATTTGATTGTGCGTGTAGCAGGTTATTCTGCATTCTTTAATGTCCTATCTAAGGCAACTCAAGATGATATTATTGCACGTACAGAACATGCTCTT

SEQ ID NO: 18604 - protein, 818 aa, Streptococcus agalactiae; identical to SEQ ID NO: 9460

SEQ ID NO: 18605 - protein, 666 aa, Streptococcus agalactiae; identical to SEQ ID NO: 9461

SEQ ID NO: 18606 - protein, 222 aa, Streptococcus agalactiae; identical to SEQ ID NO: 676

SEQ ID NO: 18607 - protein, 691 aa, Streptococcus agalactiae
ATGAAAGTTTTCGCAAGTCCATCGCGCTATATACAAGGAAAGGATGCTTTATTCCAAAGTATTGAACATATCAAATCTTTAGGTCAGACTCCACTTATCCTTTGTGATGATGTTGTTTATAATATCGTTGGAGAAAGGTTTTTATCTTATCTACAAGACGATTTGTTACCACATCGTGTTTCCTTTAACGGAGAAGCATCTGATAATGAAATCAATCGTGTCGTTGCTGTTGCGAAAGAAAAGAATAGTGACCTTATTATTGGACTTGGTGGTGGAAAAACTATTGACTCTGCAAAGGCAATTGCAGATAAAGTTAATTTACCAGTGGTCATTGCACCAACAGTAGCTTCAACAGATGCCCCAACATCAGCGTTATCAGTAATCTATACAGATGAAGGAGCTTTTGAAAAATATATTTTTTATTCAAAGAATCCAGACTTAGTTTTAGTTGATACTCAAGTAATTGCCCAAGCGCCAAAACGTTTACTAGCTTCTGGGATAGCAGATGGCTTAGCTACTTGGGTTGAAGCGAGAGCAGTCTTACAAAAAAATGGGATAGCGATGGCTGGCGGTAGACAGACTTTAGCGGGCGTGGCAATTGCCCAAGCATGTGAGCGTACTTTATTTAATGATAGTTTACAAGCTTTAGCGGCTTGTGATGCCAAGTGTTACAAAGCTTTAGAAATGTTAT

SEQ ID NO: 18608 - protein, 232 aa, Streptococcus agalactiae
  VARIANT 222: Xaa = Any Amino Acid
MKVFASPSRYIQGKDALFQSIEHIKSLGQTPLILCDDVVYNIVGERFLSYLQDDLLPHRVSFNGEASDNEINRVVAVAKEKNSDLIIGLGGGKTIDSAKAIADKVNLPVVIAPTVASTDAPTSALSVIYTDEGAFEKYIFYSKNPDLVLVDTQVIAQAPKRLLASGIADGLATWVEARAVLQKNGIAMAGGRQTLAGVAIAQACERTLFNDSLQALAACDAXVVTKSFRKCY

SEQ ID NO: 18609 - protein, 252 aa, Streptococcus agalactiae
GTGGACTCTTCATTGTTTGAAAATAATCAAGAGAAGGCGCTATATCAAGCTATTTTGTCACTTGAACTGACTGAGGATATGCATGACAACTTAGATAAGCTTTTCGCACTTAGTCCAATTATTAATGATTTCTTTGATAATACAATGGTAATGACAGATGATGAAAAAATGAAACAAAATCGTCTGGCTTTACTCAATAGCCTTGTTGCAAAGGCAAGAACAGTCGCTGCTTTTAACTTATTAAACACAAAA

SEQ ID NO: 18610 - protein, 84 aa, Streptococcus agalactiae
MDSSLFENNQEKALYQAILSLELTEDMHDNLDKLFALSPIINDFFDNTMVMTDDEKMKQNRLALLNSLVAKARTVAAFNLLNTK

SEQ ID NO: 18611 - protein, 255 aa, Streptococcus agalactiae; identical to SEQ ID NO: 18481

SEQ ID NO: 18612 - protein, 85 aa, Streptococcus agalactiae; identical to SEQ ID NO: 548

SEQ ID NO: 18613 - protein, 174 aa, Streptococcus agalactiae
ATGCATGACAACTTAGATAAGCTTTTCGCACTTAGTCCAATTATTAATGATTTCTTTGATAATACAATGGTAATGACAGATGATGAAAAAATGAAACAAAATCGTCTGGCTTTACTCAATAGCCTTGTTGCAAAGGCAAGAACAGTCGCTGCTTTTAACTTATTAAACACAAAA

SEQ ID NO: 18614 - protein, 58 aa, Streptococcus agalactiae
MHDNLDKLFALSPIINDFFDNTMVMTDDEKMKQNRLALLNSLVAKARTVAAFNLLNTK

SEQ ID NO: 18615 - protein, 255 aa, Streptococcus agalactiae; identical to SEQ ID NO: 18481

SEQ ID NO: 18616 - protein, 85 aa, Streptococcus agalactiae; identical to SEQ ID NO: 548

SEQ ID NO: 18617 - protein, 231 aa, Streptococcus agalactiae
TTGGGTGGGGCAAAAGATAATCTTTGTCTCGCCTTTTTTATTAGGAAGGAAAAAATAATGATTGAATTACTATTAGCATTACTGTTATGGAATATTTTAGTATTTGCAACCTATGCTATTGATAAAAGGCGTGCAATTAGAGGGGCATGGCGTATTAGTGAGAAAACATTGATGATAGAGAGTTTATTATTGGGGATTTGGTGCATTCCTAGGTGGAGAAGTTTTTCGTCA

SEQ ID NO: 18618 - protein, 78 aa, Streptococcus agalactiae
MGGAKDNLCLAFFIRKEKIMIELLLALLLWNILVFATYAIDKRRAIRGAWRISEKTLMIESLLLGGFGAFLGGRSFSS

SEQ ID NO: 18619 - protein, 360 aa, Streptococcus agalactiae
TTGTCACGCATCGCAGAGCTTAGTCAAGAAGAAGCTAAAGATATCATTTTAGCTGATACCGAAAAAGATTTAGCTCATGATATTGCGACACGTATTAAAGAAGCAGAACGTGAAGTAAAAGATCGATCAAACAAGATAGCAAAAGACTTGCTAGCCCAAGCTATGCAACGTTTAGCTGGTGAATATGTTACTGAACAAACAATTACAACTGTTCATCTCCCTGATGATAATATGAAGGGACGTATCATTGGTCGTGAAGGACGTAATATTCGTACTCTGGAAAGTTTGACAGGTATTGATGTTATCATAGATGATACGCCAGAAGTCGTTGTCTTATCAGGTTTTCGACCCCATTCGTCG

SEQ ID NO: 18620 - protein, 120 aa, Streptococcus agalactiae
MSRIAELSQEEAKDIILADTEKDLAHDIATRIKEAEREVKDRSNKIAKDLLAQAMQRLAGEYVTEQTITTVHLPDDNMKGRIIGREGRNIRTLESLTGIDVIIDDTPEVVVLSGFRPHSS

SEQ ID NO: 18621 - protein, 342 aa, Streptococcus agalactiae
TTGGCGAATGATTGGAAAAAGAGTGCGCGTGGTTTAGCTTTAATGACTTTAGAGGAAGTTTTTGATAAAGGAGCTTATTCTAATATCGCACTTAATAAGAGTTTAAAAAAATCTAGACTATCAGATAAAGATCGTGCCTTAGTAACAGAAATTGTCTATGGAACTGTGGCTAGAAAAATAACGCTAGAATGGTATCTATCACACTTTATAGTTGATCGTGATAAGCTTGAATTATGGGTATATCATCTCTTGCTACTGAGCCTTTATCAACTACTCTATCTGGACAACATCCCAGATCACGCTATTGTTAATGATGCTGTCACTATTGCTAANNNNNTTAAT

SEQ ID NO: 18622 - protein, 114 aa, Streptococcus agalactiae
  VARIANT 111, 112, 113: Xaa = Any Amino Acid
MANDWKKSARGLALMTLEEVFDKGAYSNIALNKSLKKSRLSDKDRALVTEIVYGTVARKITLEWYLSHFIVDRDKLELWVYHLLLLSLYQLLYLDNIPDHAIVNDAVTIAXXXN

SEQ ID NO: 18623 - protein, 306 aa, Streptococcus agalactiae
ATGGAGCCTTTTGTTTCTCTTGAGGATGGTAGGACTGGACTTATCCATATTTCTGAAATTAAAACAGGTTACATTGATAATATTTATGATGTTCTTAGTGTAGGTGATGAAGTCTATGTTCAGGTTATAGATGTAGATGAATTTACACAAAAAGCAAGTTTATCGCTTCGGACCCTTGAAGAAGAGAGACATCATATTCAGCATCGTCATCGATTTTCTAACAATCGTCTTAAGATAGGTTTCAAACCACTTGAGGAAAATTTACCTAGTTGGGTTGAGGAAGGTCTAGCCTACTTGAATAATAAA

SEQ ID NO: 18624 - protein, 102 aa, Streptococcus agalactiae
MEPFVSLEDGRTGLIHISEIKTGYIDNIYDVLSVGDEVYVQVIDVDEFTQKASLSLRTLEEERHHIQHRHRFSNNRLKIGFKPLEENLPSWVEEGLAYLNNK

SEQ ID NO: 18625 - protein, 252 aa, Streptococcus agalactiae
TTGTCGTTTTTTAATCATTCAGGTGATCCTGTGAATCAACATTTAGCTAAAAGGACAATAGGAATTACCTTAGAACAACTACAGAAAGTTCCTAATAGAATAGCGGTTGCTCATGGCAATTATAAGGCTGCGGCACTCTTAGCCGTTTTAAAAAAGGGGTATATTAATCATTTAGTTACTGATTTTTCCACAGCCTTAAATATTTTAAGATTAGATAAAGACACCTTTGTGGATACTATATATCAAAAGAGC

SEQ ID NO: 18626 - protein, 84 aa, Streptococcus agalactiae
MSFFNHSGDPVNQHLAKRTIGITLEQLQKVPNRIAVAHGNYKAAALLAVLKKGYINHLVTDFSTALNILRLDKDTFVDTIYQKS

SEQ ID NO: 18627 - protein, 102 aa, Streptococcus agalactiae
ATGGGGCTCCATTTTGAAAATGCTGGGGAAATGCTAAACAAACATATCTATCAAGCCTTAAAACTTGCAAAAGAAGGAAATTTTGCAGAAAGTAAGATGAAA

SEQ ID NO: 18628 - protein, 34 aa, Streptococcus agalactiae
MGLHFENAGEMLNKHIYQALKLAKEGNFAESKMK

SEQ ID NO: 18629 - protein, 666 aa, Streptococcus agalactiae; identical to SEQ ID NO: 9461

SEQ ID NO: 18630 - protein, 222 aa, Streptococcus agalactiae; identical to SEQ ID NO: 676

SEQ ID NO: 18631 - protein, 340 aa, Streptococcus agalactiae
ATGAAAGTTTTCGCAAGTCCATCGCGCTATATACAAGGAAAGGATGCTTTATTCCAAAGTATTGAACATATCAAATCTTTAGGTCAGACTCCACTTATCCTTTGTGATGATGTTGTTTATAATATCGTTGGAGAAAGGTTTTTATCTTATCTACAAGACGATTTGTTACCACATCGTGTTTCCTTTAACGGAGAAGCATCTGATAATGAAATCAATCGTGTCGTTGCTGTTGCGAAAGAAAAGAATAGTGACCTTATTATTGGACTTGGTGGTGGAAAAACTATTGACTCTCAGGCAATTGCAGATAAAGTTAATTTACCAGTGGTCATTGCACCAACAG

SEQ ID NO: 18632 - protein, 114 aa, Streptococcus agalactiae
MKVFASPSRYIQGKDALFQSIEHIKSLGQTPLILCDDVVYNIVGERFLSYLQDDLLPHRVSFNGEASDNEINRVVAVAKEKNSDLIIGLGGGKTIDSARQLQIKLIYQWSLHQQ

SEQ ID NO: 18633 - protein, 525 aa, Streptococcus agalactiae
ATGGCTGGCGGTAGACAGACTTTAGCGGGCGTGGCAATTGCCCAAGCATGTGAGCGTACTTTATTTAATGATAGTTTACAAGCTTTAGCGGCTTGTGATGCCAAAGTGGTTACAAAAGCTTTAGAAAATGTTATTGAAGCTAATACCTTACTTAGTGGTTTAGGTTTTGAAAGTGCAGGATTAGCTGCAGCTCATGCTATTCATAATGGTTTTACTGCCTTGAGTGGAGATATTCATCACTTAACCCATGGTGAAAAAGTTGCCTATGGAACGTTGACGCAACTTTTCCTCGAAAATAGACCAAAGGAAGAAATTGATCGCTACATTAATCTTTACCAAGCGATTGGAATGCCAACTACACTTGCAGAACTCCATTTGGGTGATGCAACATATGAAGAACTTTTAAAAGTTGGTCAGCAAGCAACAATTGAAGGTGAAACAATACATGAAATGCCATTCAAAATTAGTGCAGAGGATGTCGCTGCAGCCCTGTTAACGGTTGACCGTTATGTTTCAAATCATCAA

SEQ ID NO: 18634 - protein, 175 aa, Streptococcus agalactiae
MAGGRQTLAGVAIAQACERTLFNDSLQALAACDAKVVTKALENVIEANTLLSGLGFESAGLAAAHAIHNGFTALSGDIHHLTHGEKVAYGTLTQLFLENRPKEEIDRYINLYQAIGMPTTLAELHLGDATYEELLKVGQQATIEGETIHEMPFKISAEDVAAALLTVDRYVSNHQ

SEQ ID NO: 18635 - protein, 924 aa, Streptococcus agalactiae; identical to SEQ ID NO: 9465

SEQ ID NO: 18636 - protein, 308 aa, Streptococcus agalactiae; identical to SEQ ID NO: 680

SEQ ID NO: 18637 - protein, 642 aa, Streptococcus agalactiae; identical to SEQ ID NO: 9467

SEQ ID NO: 18638 - protein, 214 aa, Streptococcus agalactiae; identical to SEQ ID NO: 682

SEQ ID NO: 18639 - protein, 1287 aa, Streptococcus agalactiae
ATGGAAAATTATTTAGGTAGGCTTTGGACAAAAGCACAATTATCTGAGCAACTTAGAAAAATTGCAATTAGCTTGCCATCTTTTATAAAGAAAGGAAGCGACTATATTTGTACCCGATGCTCTAGTTCTGTTGCTAAAAATTGCCAATTACCAACTGGAAATTATTATTGTAGAGAATGTATAGTTTTTGGAAGAGTTACTAGTAATGAAAATTTATATTATTTCCCACAAAAAACATTTTCTAAAACGAATTCTTTAAAATGGAAAGGGGAACTGACACCTTATCAAAATGAGGTTTCAGAAGAGTTGTTGAAAGGTATTTCAAGTAAGGAAAATCTTCTTGTTCATGCTGTGACAGGGGCTGGTAAAACAGAAATGATATACCACTCTGTCGCCAAAGTAATTGATACTGGAGGAAGCGTTTGTATTGCCAGTCCTAGAATTGATGTTTGTTTAGAATTGTATAAGCGACTTTCAAACGATTTTAGATGTGCCATAACATTAATGCATGGAGAATCTCCTTCTTATCAGAGATCCCCTTTAACTATTGCCACAACACATCAATTGTTAAAATTTTATCATGCTTTTGATTTGCTAATTGTTGATGAAGTTGATGCTTTTCCGTATGTCGACAACCCGATACTATACCAGGGTGTAAAACAGGCCTTAAAGGAAAACGGAACAAGTATTTTTCTGACTGCAACTTCAACGACTGAGTTAGAAAGAAAAGTTGCAAGAAAAGAACTAAAAAAATTGCATCTAGCTAGGAGATTTCATGCCAATCCGTTAGTGATACCCGAGATGGTTTGGGTAAGTGGTATCCAGAAAAGCTTGCAGACACAAAAACTACCTCCCAAATTATATCAGTTGATAAATAAACAGCGACAAACGAGATATCCTTTGTTATTATTTTTCCCCCATATTTCAGAAGGTCAGGTATTCACCGAAATTTTAAGACAAGCCTTTCCTATGGAAAAAATTGGTTTTGTTTCAAGTAAGAGCACATCTAGGTTAAAGTTAGTGCAAGATTTTCGAGATAACAAATTGTCTATCCTAGTGTCAACTACCATTCTAGAGAGAGGAGTAACTTTCCCTAGCGTCGACGTTTTTGTTATACAAGCAAATCATCATTTGTTTACGAAAAGTTCCTTGGTACAAATTTCAGGAAGAGTTGGAAGAGCATTAGAAAGGCCCGAAGGGCTCCTTTACTTCCTTCATGATGGGAAAAGTAAATCGATGCACCAAGCTATAAAGGAGATTAAAAACATGAATCATATAGGAGGATTT

SEQ ID NO: 18640 - protein, 429 aa, Streptococcus agalactiae; identical to SEQ ID NO: 9470

SEQ ID NO: 18641 - protein, 663 aa, Streptococcus agalactiae; identical to SEQ ID NO: 9471

SEQ ID NO: 18642 - protein, 221 aa, Streptococcus agalactiae; identical to SEQ ID NO: 686

SEQ ID NO: 18643 - protein, 552 aa, Streptococcus agalactiae; identical to SEQ ID NO: 9473

SEQ ID NO: 18644 - protein, 184 aa, Streptococcus agalactiae; identical to SEQ ID NO: 688

SEQ ID NO: 18645 - protein, 336 aa, Streptococcus agalactiae
GTGGGAACTGGTGGGACAATTACTGGTGTCTCTCGTGCATTAAAAAAAGTCAATCCTGATGTCGCTATTTATGCTGTAGAAGCTGATGAATCTGCAATCCTTTCTGGTGAGCAACCTGGGCCTCATAAAATACAAGGGATTTCTGCAGGTTTCATTCCAGAAACATTGGCTACAGATTCTTATGATCATATCATTCGCGTTACATCTGACGATGCTATTGAAACAAGACGTATCATCGGCGGACTAGAAAGTTTCCTCGCAGGAATTTCTGCTTCAGCTGCTATTTATGCTGCTATTGAAGTGGCCAAACAACTAGGAAAAAGGGANNNNNTTAAT

SEQ ID NO: 18646 - protein, 112 aa, Streptococcus agalactiae
  VARIANT 109, 110, 111: Xaa = Any Amino Acid
MGTGGTITGVSRALKKVNPDVAIYAVEADESAILSGEQPGPHKIQGISAGFIPETLATDSYDHIIRVTSDDAIETRRIIGGLESFLAGISASAAIYAAIEVAKQLGKRXXXN

SEQ ID NO: 18647 - protein, 1350 aa, Streptococcus agalactiae; identical to SEQ ID NO: 9275

SEQ ID NO: 18648 - protein, 450 aa, Streptococcus agalactiae; identical to SEQ ID NO: 690

SEQ ID NO: 18649 - protein, 648 aa, Streptococcus agalactiae
ATGTGTAAATATAAAGCAATAATATTTGATATGGATGGTGTTCTATTTGACACTGAATTATTTTATTATAAAAGGCGAGAGCGTTTTTTAAAACAACATGGAATTACAATTGACCATTTACCAATGAATTTTTTTATTGGAGGAAATATGAAGCAGGTTTGGAAATCTGTTTTAGGTGATCAATATGATACCTGGGATATTGATAAGCTCCAACAAGATTATAGTCGCTATAAAGAGGATAATCCCTTGCCATACAAAGATTTAATTTTTCAGGATTGTAAAAGAGTCATTGAAAAGCTTCATCACAAAGGCTATCTTTTGGGTCTAGCTTCAAGTTCTACTAGACATGATATCATGTTAGCATTAGAAAGTTTTAATCTGGATACATATTTTAAGGTAATTCTGTCTGGTGAGGAATTTTCAGAAAGTAAACCTAATCCAGCTATTTATAATAGAGCAGCAGAACTTTTAGATATTCCTAAACAGCAAATTCTTATTGTAGAAGACAGTGAGAAGGGGATTACAGCTGGTATTGCAGCCGGTATTGATGTGTGGGCTATTGAAGATAAATACTTTGGAATGAATCAGTCGCAGGCTAATGTATTAGTGAGCGATCTGAGTCAATTTTTTGTGAAATTAGATAACTAT

SEQ ID NO: 18650 - protein, 216 aa, Streptococcus agalactiae; identical to SEQ ID NO: 692

SEQ ID NO: 18651 - protein, 729 aa, Streptococcus agalactiae
GTGGCCACTATTATGCTTAATCGACCAGATATTTCAAATGGTTTTAACATCCCAATGTGTCAAGAAATTATTGATGCAATAAGGCTTGTGTCTGAAAATAAAGATGTCATGTTTTTAGTGATTGAAGCACAAGGACCAATCTTTTCAATCGGAGGAGATTTAAAAGTGATGAAAGCTGCTGTTGAGAGCGATGATATTAGCTCATTAACTAAAATTGCTGAGTTAGTTAATCAGATATCGTATGATTTACTACAGCTAGAGAAACCTGTTGTTATGTGTGTAGATGGGGCTGTAGCTGGTGCCGCAGCTAATATTGCATTAGCAGCTGATTTTGTTATCGCAAGCAAGAAGAGTAAATTTATCCAGGCTTTTGTGGGTGTCGGTTTAGCTCCAGATGCAGGAGGTTTATTGTTACTTAGTAAATCAATCGGTATAACTCGTGCAGTGCAACTAGCTTTAACTGGAGAAAGCTTATCTGCTGAAAAAGCTGAAGCTTTGGGAATTGTTTATAAACTTTGTGAATCAGATAAAATAGGTAAAATTAAGGATCAACTATTAAAGCGTTTAAGTAGACATTCTATAAACTCATATCAAGCCATAAAATCATTAGCTTGGGAAGCTGCTTTTAAAGATTGGGAACAATATAAAAAGCTTGAATTACAACTGCAAGAATCATTAGCCTTTAAGCAAGATTTTAAAGAAGGTGTTCGGGCACACGCNNNNNTTAAT

SEQ ID NO: 18652 - protein, 243 aa, Streptococcus agalactiae
  VARIANT 241, 242: Xaa = Any Amino Acid
MATIMLNRPDISNGFNIPMCQEIIDAIRLVSENKDVMFLVIEAQGPIFSIGGDLKVMKAAVESDDISSLTKIAELVNQISYDLLQLEKPVVMCVDGAVAGAAANIALAADFVIASKKSKFIQAFVGVGLAPDAGGLLLLSKSIGITRAVQLALTGESLSAEKAEALGIVYKLCESDKIGKIKDQLLKRLSRHSINSYQAIKSLAWEAAFKDWEQYKKLELQLQESLAFKQDFKEGVRAHAXXN

SEQ ID NO: 18653 - protein, 177 aa, Streptococcus agalactiae
ATGTGTCAAGAAATTATTGATGCAATAAGGCTTGTGTCTGAAAATAAAGATGTCATGTTTTTAGTGATTGAAGCACAAGGACCAATCTTTTCAATCGGAGGAGATTTAAAAGTGATGAAAGCTGCTGTTGAGAGCGATGATATTAGCTCATTAACTAAAATTGCTGCNNNNNTTAAT

SEQ ID NO: 18654 - protein, 59 aa, Streptococcus agalactiae
  VARIANT 57, 58: Xaa = Any Amino Acid
MCQEIIDAIRLVSENKDVMFLVIEAQGPIFSIGGDLKVMKAAVESDDISSLTKIAAXXN

SEQ ID NO: 18655 - protein, 320 aa, Streptococcus agalactiae
TGCATACTATTGAAATTATTGGGAAACATTCTGAGGTAACTCCTAGCGATGTCGCTCGAGAATTAATGTTAACTTTGGGAACTGTAACAACCAGCCTTAATAAGTTAGAAAAAAAAGGCTACATTGAGCGTAAACGGTCAAGTATTGATCGTCGAGTTGTTCACTTGAGTCTTACTAAGAGAGGTAGGTTATTAGATCGATTGCATAGTAAATTTCATAAATCTATGGTATCTCATATTATTGAAGACCTAGGTGAAGAAGACATAAAAATGTTGACGAGCGCTTTAGGGAATCTTCATAAATTTTTGGAGGACTTAGTC

SEQ ID NO: 18656 - protein, 107 aa, Streptococcus agalactiae
MHTIEIIGKHSEVTPSDVARELMLTLGTVTTSLNKLEKKGYIERKRSSIDRRVVHLSLTKRGRLLDRLHSKFHKSMVSHIIEDLGEEDIKMLTSALGNLHKFLEDLV

SEQ ID NO: 18657 - protein, 969 aa, Streptococcus agalactiae; identical to SEQ ID NO: 9283

SEQ ID NO: 18658 - protein, 323 aa, Streptococcus agalactiae; identical to SEQ ID NO: 698

SEQ ID NO: 18659 - protein, 270 aa, Streptococcus agalactiae; identical to SEQ ID NO: 5055

SEQ ID NO: 18660 - protein, 90 aa, Streptococcus agalactiae; identical to SEQ ID NO: 700

SEQ ID NO: 18661 - protein, 957 aa, Streptococcus agalactiae; identical to SEQ ID NO: 9287

SEQ ID NO: 18662 - protein, 319 aa, Streptococcus agalactiae; identical to SEQ ID NO: 702

SEQ ID NO: 18663 - protein, 924 aa, Streptococcus agalactiae; identical to SEQ ID NO: 9289

SEQ ID NO: 18664 - protein, 308 aa, Streptococcus agalactiae; identical to SEQ ID NO: 9290

SEQ ID NO: 18665 - protein, 732 aa, Streptococcus agalactiae; identical to SEQ ID NO: 5061

SEQ ID NO: 18666 - protein, 244 aa, Streptococcus agalactiae; identical to SEQ ID NO: 706

SEQ ID NO: 18667 - protein, 1229 aa, Streptococcus agalactiae
ATGACATTACAGCGAGTAGTAGTAACAGGTTACGGTGTAACCTCACCTATTGGAAACACACCAGAAGAATTTTGGAATAGTCTTAAAGAAGGAAATGTTGGTATTGGACCTATCACTAAATTTGATTCAAGTGATTTCATGGTCAAAAATGCTGCTGAAATTCATGATTTTCCATTTGATAAATATTTTGTCAAAAAAGATCTGAACAGATTTGATATGTATTCCCTTTATGCCTTATATGCTTCAAGTGAAGCTATTCAACATGCTAATTTAAATTTAGATGAAATTGATGCAGATCGATTTGGTGTCATCGTTGCATCAGGTATTGGAGGGATTCAAGAGATTGAAGAACAAGTGATTCGTCTTCATGAAAAAGGGCCAAAACGCGTAAAACCAATGACGCTTCCAAAAGCTCTACCAAATATGGCAGCTGGAAATGTTGCGATGAGGTTAGGCGCTCATGGTGTATGTAAATCAATTAATACAGCTTGTGCTTCTTCTAATGATGCTATTGGAGATGCTTTCCGTAATATAAAATTTGGTATTCAAGATATTATGGTAGTCGGTGGTGCAGAAGCTGCTATTACAAAATTTGCCATTGCTGGATTCCAAAGTCTTACAGCATTATCAACAACTGAAGATCCATCAAGAGCATCTATTCCATTTGATAAAGATCGCAATGGATTTATCATGGGAGAAGGTTCTGGAATGTTGGTCTTAGAAAGTTTAGAACACGCTGAAAAACGAGGAGCTACTATTCTTGCAGAAGTTGTTGGTTATGGTAACACTTGTGACGCATATCATATGACTTCACCACATCCAGAAGGTTTAGGAGCCACTAAAGCTATTCAACTTGCACTGGTTGAAGCTAATATTAAACCTGAAGAAGTTAACTATGTAAATGCTCATGGAACTTCAACACCTGCTAACGAAAAAGGAGAGAGTCAAGCTATTGTTGCTGCACTTGGGACAGACGTTCCAGTTTCTTCGACTAAATCTTTTACTGGTCATCTTTTGGGTGCCGCGGGAGCTGTTGAGGCAATTGCAACTATTGAAGCGATACGTCATAGTTATGTTCCAATGACTGCTGGAACGACAGAATTATCAGAAGATATTACAGCGAATGTTATTTTTGGTCAAGGGCAAGACGCTGATATTCGTTATGCCATTTCAAATACATTTGGTTTTGGAGGACACAATGCAGTTCTGGCCTTCAAACGCTGGGAGGA

SEQ ID NO: 18668 - protein, 410 aa, Streptococcus agalactiae; identical to SEQ ID NO: 708

SEQ ID NO: 18669 - protein, 532 aa, Streptococcus agalactiae
ATGCAGTTCTGGCCTTCAAACGCTGGGAGGATAAATTGGATATTCAAGAGATTAAGGATTTAATGACTCAATTTGATGAGTCAAGTCTGAGAGAATTTCATTCAAAACAAGTGACGGTGAGCTGTCTTTTAGTAAAAATGAGGGAAAAGCTCCACTTGTCCCAACTATGTCTCCTATGAGTCATCAACCTGAAGCGACTCCAACTATAGCAACTCCTGTCTCTAATGAAGCAGGTGAGCAAACGAAACAAGCTACTGAAGTAGTTTCAGAAATCCCAGAGTCGACTGTGACTGTTGCAGAAGGTGACGTTGTCGAAAGTCCTTTAGTTGGGGTTGCTTATTTAGCTTCTGGACCAGATAAACCTAACTTTGTTTCAGTAGGTGATAGCGTGAAGAAGGGACAAACTTTGATGATTATTGAGGCAATGAAGGTGATGAATGAAGTGCCTGCCCCCCATGATGGTGTAGTTACTGAAATTCTTGTAGCCAATGAAGAAGTTATTGAATTTGGTAAAGGATTGGTACGAATCAAA

SEQ ID NO: 18670 - protein, 178 aa, Streptococcus agalactiae; identical to SEQ ID NO: 710

SEQ ID NO: 18671 - protein, 420 aa, Streptococcus agalactiae; identical to SEQ ID NO: 9297

SEQ ID NO: 18672 - protein, 140 aa, Streptococcus agalactiae; identical to SEQ ID NO: 9298

SEQ ID NO: 18673 - protein, 1368 aa, Streptococcus agalactiae
ATGTTTAAGAAAATATTGATTGCTAATCGCGGAGAAATTGCAGTACGTATCATTCGTGCAGCCCGTGAAATGGGAATTTCGACAGTTGCTATCTATTCGGAGGCTGACAAGGAATCATTGCACACAATTTTAGCAGATGAAGCTATTTGTGTTGGACCAGCCAAATCAGCAGAATCTTATTTAAACGTTAATGCTATATTATCTGCTGCTATTGTGACTGGAGCGGAAGCTGTTCATCCAGGTTTTGGGTTTTTGAGTGAAAATTCTAAATTTGCTACTATGTGTGAAGAGATGAACTTAAAATTCATTGGTCCATCTGGAGAAGTTATGGATAAAATGGGTGATAAAATCAATGCTCGTACAGAGATGATAAAAGCTGATGTTCCGGTTATCCCAGGATCAGATGGTCAAGTTACAAGTGTAGAAGAAGCTGTATCAATTGCTGAGGAAATCGGCTATCCATTGATGTTAAAAGCCTCAGCCGGTGGCGGTGGAAAAGGAATTAGGAAGGTCAAATCAGCAGATGAATTGAAGCCTGCTTTTGAGTCTGCTTCACAGGAGGCTTTGGCTGCGTTCGGTAATGGTGCTATGTATATTGAAAAAGTTATATACCCAGCTAGACATATTGAAGTACAAATACTTGGAGATAGCTTTGGTAAGATAGTTCACCTAGGAGAACGTGATTGTTCTCTGCAGCGTAACAATCAGAAGGTATTGGAAGAAAGTCCGTCTGTGGCAATAGGTAACACTCTGCGTCAACAAATTGGTGAAGCAGCTGTTCGTGCAGCTGAGGCTGTATCTTATGAAAATGCAGGAACAATTGAGTTTTTGTTAGATGAGAATAGCGGACAGTTCTATTTCATGGAAATGAATACTCGTGTTCAAGTAGAACACCCTGTTACAGAATTTGTAACGGGTGTTGACATCGTTAAAGAGCAGATTCGTATCGCTGCTGGAATTCCTTTATCAGTTTCTCAAAATGATATTAAGTTAACTGGTCATGCGATTGAATGTCGTATTAACGCAGAGAATCCACAATTTAATTTTGCGCCATGTCCAGGTACCATTAATGGGTTACATCTACCTGCTGGCGGTATGGGCTTACGTGTCGATTCAGCGGTTTACACAGGCTACACTATTCCTCCTTATTACGATAGTATGATTGCGAAAGTAATTGTTCACGGAGAAAATCGTTTTGATGCACTTATGAAAATGCAACGTGCCTTATATGAGCTTGAAATTGATGGTATTGTAACAAATACAGAATTTCAAATGGATCTCATTTCTGATAAAAAAGTCTTGGCTGGGGATTATGATACTTCATTCCTGATGGAAGACTTTTTACCAAGGTATTATGGTAACAATCAA

SEQ ID NO: 18674 - protein, 456 aa, Streptococcus agalactiae; identical to SEQ ID NO: 714

SEQ ID NO: 18675 - protein, 873 aa, Streptococcus agalactiae; identical to SEQ ID NO: 9301

SEQ ID NO: 18676 - protein, 291 aa, Streptococcus agalactiae; identical to SEQ ID NO: 716

SEQ ID NO: 18677 - protein, 771 aa, Streptococcus agalactiae; identical to SEQ ID NO: 9303

SEQ ID NO: 18678 - protein, 257 aa, Streptococcus agalactiae; identical to SEQ ID NO: 718

SEQ ID NO: 18679 - protein, 630 aa, Streptococcus agalactiae; identical to SEQ ID NO: 9305

SEQ ID NO: 18680 - protein, 210 aa, Streptococcus agalactiae; identical to SEQ ID NO: 720

SEQ ID NO: 18681 - protein, 1275 aa, Streptococcus agalactiae; identical to SEQ ID NO: 9307

SEQ ID NO: 18682 - protein, 425 aa, Streptococcus agalactiae; identical to SEQ ID NO: 734

SEQ ID NO: 18683 - protein, 990 aa, Streptococcus agalactiae; identical to SEQ ID NO: 9309

SEQ ID NO: 18684 - protein, 330 aa, Streptococcus agalactiae; identical to SEQ ID NO: 736

SEQ ID NO: 18685 - protein, 299 aa, Streptococcus agalactiae
ATGGGGAATAAAGTTGGAAATTTTTAGTTGGTGACCAGGCATTAGAATTCTATAACGATAAAAATGTCAACGACTATATTCAAATTCCATGGACATCAATCAATCAAATTGGAGCTAATGTTAGTCGAAAAAAAATTAGTCGTCACTTTGAGGTCTTTACAGACCAAGGAAAATTTTTATTCGCCTCTAAAGACTCTGGAACGATATTAAAGCATGCGAGACGACATATTGGAGACGATAAAGTTGTTAAGCTTCCTACCCTCATCCAGACCATTTTAAAAATATTCAAGTTTAAAAAA

SEQ ID NO: 18686 - protein, 100 aa, Streptococcus agalactiae; identical to SEQ ID NO: 738

SEQ ID NO: 18687 - protein, 800 aa, Streptococcus agalactiae
ATGGGGTGGGCCTATGCTCTTATCCCAGCATTGAAAAAACTTTACACTACTAAGAAATCGTGCTGCTGCGCTTGAGCGCCATATGGAATTCTTTAACACCATCCATACTTGCTGCTCCAATTATCGGTGTAACCCTTGCTCTTGAGGAAAAAACAGCGGTACACCTGTCGAAACAAAGCAATTCAAGGGGTAAAATCGGTATGATGGGACCTCTTGCTGGTATTGGTGATCCAGTATTCTGGTTTACTGTACGTCCTATCTTAGGTGCTCTTGGTGCTTCACTTGCCTCTGCTGGTAATATCCTCGGACCAATCATCTTCTTTGTTGGTTGGAACCTCATTCGTATGTCATTCTTATGGTACACACAAGAGTTAGGTTACAAATCAGGTAAAGAAATTACTAAAGATATGTCTGGTGGTATCCTCCAAGATATTACTAAAGGTGCTTCAATCCTTGGTATGTTCATCCTTGCTGTCCTTGTTAAGCGTTGGGTAGCAATTAACTTTACTGTAGACCTTCCTAAAAAGACATTGTCAGAAGGGGCATACATCAATTTCCCTAAAGACCATGTTAGTGGACAACAATTGCATGATATCCTAGGACAAGTTCAGAGTGGCTTAAGCCTTGATAAAATGCAACCACAAACACTTCAAGGACAACTTGACTCACTTATTCCTGGTTTAGCTGGATTACTTCTTACATTCTTCTGTATGTGGTTACTTAAGAAGAAAGTATCACCAATTACAATTATCATCGGTTTGTTTATCGTTGGTATTCTAGCTCGCCTTGCAGGTGTGATG

SEQ ID NO: 18688 - protein, 270 aa, Streptococcus agalactiae
  VARIANT 18, 38, 52, 53, 54, 61, 67: Xaa = Any Amino Acid
MGWAYALIPALKKLYTTXEBRAAALERHMEFFNTHPYXAAPIIGVTLALEEXXXSGTPVEXKAIQGXKIGMMGPLAGIGDPVFWFTVRPILGALGASLASAGNILGPIIFFVGWNLIRMSFLWYTQELGYKSGKEITKDMSGGILQDITKGASILGMFILAVLVKRWVAINFTVDLPKKTLSEGAYINFPKDHVSGQQLHDILGQVQSGLSLDKMQPQTLQGQLDSLIPGLAGLLLTFFCMWLLKKKVSPITIIIGLFIVGILARLAGVM

SEQ ID NO: 18689 - protein, 90 aa, Streptococcus agalactiae
ATGGAAGAAGTTATTTGGAATTTGGTAAAGGAATTTGGGTACGAAAATCCAAAAAATGGATTTGGAATTATTAAAAAAAGAAAAATTCGT

SEQ ID NO: 18690 - protein, 30 aa, Streptococcus agalactiae
MEEVIWNLVKEFGYENPKNGFGIIKKRKIR

SEQ ID NO: 18691 - protein, 96 aa, Streptococcus agalactiae
TTGGGTACGAAAATCCAAAAAATGGATTTGGAATTATTAAAAAAAGAAAAATTCGTTGAAGGGGCTTTACCCTTCCACCGCCCTATCCAATGTTAT

SEQ ID NO: 18692 - protein, 32 aa, Streptococcus agalactiae
MGTKIQKMDLELLKKEKFVEGALPFHRPIQCY

SEQ ID NO: 18693 - protein, 99 aa, Streptococcus agalactiae
TTGAAGGGGCTTTACCCTTCCACCGCCCTATCCAATGTTATTAGTGGATCGTGGTTTTTAGAGGTATCAGAAGATGGAGATAGTCGCTATCAAAAATGT

SEQ ID NO: 18694 - protein, 33 aa, Streptococcus agalactiae
MKGLYPSTALSNVISGSWFLEVSEDGDSRYQKC

SEQ ID NO: 18695 - protein, 260 aa, Streptococcus agalactiae
ATGCCAGGCGTTTTAATTATGGAAGCTTTGGCTCAAACTGCAGGTGTTTTAGAATTATCTAAAGAAGAAAACAAAGGAAAGCTTGTTTTTTATGCAGGTATGGATAAAGTGAAATTTAAAAAGCAAGTTGTTCCAGGAGATCAATTAGTTATGACTGCTAAGTTTGTCAAACGTAGAGGAACTATAGCCGTTGTTGAAGCAATAGCAGAAGTTGATGGGAAATTAGCTGCCAGTGGAACGTTAACATTTGCAATAGCAAT

SEQ ID NO: 18696 - protein, 87 aa, Streptococcus agalactiae
  VARIANT 86: Xaa = Any Amino Acid
MPGVLIMEALAQTAGVLELSKEENKGKLVFYAGMDKVKFKKQVVPGDQLVMTAKFVKRRGTIAVVEAIAEVDGKLAASGTLTFAIXN

SEQ ID NO: 18697 - protein, 655 aa, Streptococcus agalactiae
ATGTTTAAGAAAATATTGATTGCTAATCGCGGAGAAATTGCAGTACGTATCATTCGTGCAGCCCGTGAAATGGGAATTTCGACAGTTGCTATCTATTCGGAGGCTGACAAGGAATCATTGCACACAATTTTAGCAGATGAAGCTATTTGTGTTGGACCAGCCAAATCAGCAGAATCTTATTTAAACGTTAATGCTATATTATCTGCTGCTATTGTGACTGGAGCGGAAGCTGTTCATCCAGGTTTTGGGTTTTTGAGTGAAAATTCTAAATTTGCTACTATGTGTGAAGAGATGAACTTAAAATTCATTGGTCCATCTGGAGAAGTTATGGATAAAATGGGTGATAAAATCAATGCTCGTACAGAGATGATAAAAGCTGATGTTCCGGTTATCCCAGGATCAGATGGTCAAGTTACAAGTGTAGAAGAAGCTGTATCAATTGCTGAGGAAATCGGCTATCCATTGATGTTAAAAGCCTCAGCCGGTGGCGGTGGAAAAGGAATTAGGAAGGTCAAATCAGCAGATGAATTGAAGCCTGCTTTTGAGTCTGCTTCACAGGAGGCTTTGGCTGCGTTCGGTAATGGTGCTATGTATATTGAAAAGTATATACCCAGCTAGACATATTGAAGTACAAATACTTGGAGATAGCTTTGGT

SEQ ID NO: 18698 - protein, 219 aa, Streptococcus agalactiae
MFKKILIANRGEIAVRIIRAAREMGISTVAIYSEADKESLHTILADEAICVGPAKSAESYLNVNAILSAAIVTGAEAVHPGFGFLSENSKFATMCEEMNLKFIGPSGEVMDKMGDKINARTEMIKADVPVIPGSDGQVTSVEEAVSIAEEIGYPLMLKASAGGGGKGIRKVKSADELKPAFESASQEALAAFGNGAMYIEKVIYPARHIEVQILGDSFG

SEQ ID NO: 18699 - protein, 726 aa, Streptococcus agalactiae
ATGATTTATCAGAAAGATTTAGGATTAGCAAAGATTTGTCCAGCTTGTTCTTACAACTTTAGAATTTCAGCGCAAGAACGTCTGTTGCTAACAGTTGACGAAGATAGTTTTGAGGAATTATTTACAGGAATTGAAACTAAGGATCCTTTGAATTTTCCAAACTACCGTGAAAAACTGGCTGCTACACGTCAAAAGACTAACTTAGATGAAGCGGTGGTGACAGGTTTAGCTAAAATAAAAGGACAAACTACGGCCTTAGCTATTATGGATTCTCATTTTATAATGGCGTCTATGGGAACGGTCGTAGGCGAAAAGTTGACAAGATTATTTGAGCTAGCAACTGAAAAGAAATTACCTATTGTTATTTTTACAGCGTCAGGGGGCGCCAGAATGCAAGAAGGTATTATGAGTTTGATGCAAATGGCAAAAGTATCGGCAGCAGTTAAACGCCATTCTAACCAGGGATTGTTTTATTTAACAATTTTAACAGACCCAACAACCGGCGGCGTTACTGCGAGTTTTGCTATGGAAGGTGATATTATTCTGGCTGAGCCACAAGCGTTGGTTGGTTTTGCTGGTCGTCGTGTTATCGAAAACACAGTGAGAGAAGATTTACCTGAAGGCTTTCAAAAGGCAGAGTTTTTGTTAGAACATGGTTTTGTCGATGCTATTATAATCGAACAGAATACGCGACTGCATTGGCTCACTAATTGCTTTCCATGGAAA

SEQ ID NO: 18700 - protein, 242 aa, Streptococcus agalactiae
MIYQKDLGLAKICPACSYNFRISAQERLLLTVDEDSFEELFTGIETKDPLNFPNYREKLAATRQKTNLDEAVVTGLAKIKGQTTALAIMDSHFIMASMGTVVGEKLTRLFELATEKKLPIVIFTASGGARMQEGIMSLMQMAKVSAAVKRHSNQGLFYLTILTDPTTGGVTASFAMEGDIILAEPQALVGFAGRRVIENTVREDLPEGFQKAEFLLEHGFVDAIIIEQNTRLHWLTNCFPWK

SEQ ID NO: 18701 - protein, 324 aa, Streptococcus agalactiae
ATGGCAAAAGTATCGGCAGCATTTAAACGCCATTCTAACCAGGGATTGTTTTATTTAACAATTTTAACAGACCCAACAACCGGCGGCGTTACTGCGAGTTTTGCTATGGAAGGTGATATTATTCTGGCTGAGCCACAAGCGTTGGTTGGTTTTGCTGGTCGTCGTGTTATCGAAACAACAGTGAGAGAAGATTTACCTGAAGGCTTTCAAAAGGCAGAGTTTTTGTTAGAACATGGTTTTGTCGATGCTATTATAAATCGAACAGAATTACGCGACTGCATTGCTCAACTAATTGCTTTCCATGGAAATGAGGTTGGTCATGAA

SEQ ID NO: 18702 - protein, 108 aa, Streptococcus agalactiae
MAKVSAAFKRHSNQGLFYLTILTDPTTGGVTASFAMEGDIILAEPQALVGFAGRRVIETTVREDLPEGFQKAEFLLEHGFVDAIINRTELRDCIAQLIAFHGNEVGHE

SEQ ID NO: 18703 - protein, 351 aa, Streptococcus agalactiae
ATGAATAATGATGTGACAAGAATTTTAAAAGATGCGCGTGATCAAGGGAGGCTAACTGCTCTTGACTACGCTGAATTGATTTTTGATAATTTTATGGAACTTCATGGTGATCGCCAGTTCGCAGATGACAAATCAATTATAGGAGGTTTGGGGTACTTGGCAGGGCGTCCTGTGACGATTGTCGGTATTCAAAAAGGTAAGAACCTTCAAGATAATTTAGACCGTCATTTTGGTCAACCACATCCTGAAGGTTATCGTAAGGCTTTACGTTTAATGAAACAAGCTGAGAAGTTTGGAAGACCTGTTATAACCTTCATCAATACTGCTGGAGCATATCCCTGGGGTAAGTGC

SEQ ID NO: 18704 - protein, 117 aa, Streptococcus agalactiae
MNNDVTRILKDARDQGRLTALDYAELIFDNFMELHGDRQFADDKSIIGGLGYLAGRPVTIVGIQKGKNLQDNLDRHFGQPHPEGYRKALRLMKQAEKFGRPVITFINTAGAYPWGKC

SEQ ID NO: 18705 - protein, 771 aa, Streptococcus agalactiae
ATGGCGGATATTTCAATTATCTCAATGATTTTGGTCGTTATCGTTGCCTTCTTTGCTGGTCTTGAAGGTATCCTCGACCAATTCCAAATCCATCAACCTCTTGTTGCTTGTACTTTAATCGGTCTTGTAACTGGTCACCTCGAAGCGGGTATTATTCTTGGTGGTAGTCTCCAAATGATTGCTCTTGCTTGGGCAAATATCGGAGCTGCCGTAGCACCAGACGCTGCACTTGCCTCTGTTGCTGCTGCTATTATTTTGGTTAAAAGTGGTGACTTCACTCAAAAAGGTATCAACTTTGCCTTCTCTACTGCTGTACCTCTAGCTATTGCTGGACTTTTCCTTACAATGATTGTTCGTACAATCTCAACTGCACTTGTTCACGCTGGTGACAAAGCTGCTTCTGAAGGAAACTTCGCAGCAATTGAACGTTTTCACTTTATCGCCCTCCTTCTCCAGGATTACGTATTGCATTCCCAGCTGCGCTTCTTTTAGCTATTCCATCTTCTTCAGTACAAAGTATTCTTAGCAATGCCTGATTGGTTAAATGGTGGTATGCAAGTTGGTGGTGCCATGGTTGTTGCCGTTGGTTACGCTATGGTTATCAATATGATGGCTACTCGCGAAGTTTGGCCTTTCTTTGCTCTTGGATTTGCTCTAGCAGCTTTGAACCAGTTAACTCTTATTTGCATGGGTACTATTTGGTGTGCTATCGCCCTCATCTACATCAGTTTATCAAAAATGGGTGGAAGCAAAGGTANNNNNTTAATTAAT

SEQ ID NO: 18706 - protein, 258 aa, Streptococcus agalactiae
  VARIANT 254, 255: Xaa = Any Amino Acid
MADISIISMILVVIVAFFAGLEGILDQFQIHQPLVACTLIGLVTGHLEAGIILGGSLQMIALAWANIGAAVAPDAALASVAAAIILVKSGDFTQKGINFAFSTAVPLAIAGLFLTMIVRTISTALVHAGDKAASEGNFAAIERFHFIALLLQGLRIAFPAALLLAIPSSSVQSILEAMPDWLNGGMQVGGAMVVAVGYAMVINMMATREVWPFFALGFALAALNQLTLICMGTIWCAIALIYISLSKMGGSKGXXLIN

SEQ ID NO: 18707 - protein, 756 aa, Streptococcus agalactiae
ATGCCAAATGAAGGACCAGATGATTTGTATGGACACTTCAACAATGCTATCGCACAATTTGATGCTGATGATGAGGTGCTTGTGTTAGCTGACCTTTGGAGTGGGTCACCATTTAACCAAGCAAGCCGTGTTATGGGAGAAAATCCTGAACGTAAAATGGCTATCATCACTGGTCTCAATTTGCCAATGCTTATCCAAGCCTATACTGAGCGTATGATGGACGCTAATGCAGGTGTTGAACAAGTTGCCGCAAATATTATTAAAGAGTCTAAGGAAGGTATCAAAGCCCTTCCAGAAGAACTTAATCCTGTTGTAGAAGCTACTCCTGTAGCAGGTGTTCCTGCAGATGTTCCTGCGGAAGTTAAACAAAGTGGATCTATCCCTGAAGGAACTGTTATTGGAGATGGCAAGCTTAAAATTAATCTTGCTCGTATTGACACACGTCTTTTACATGGTCAAGTTGCAACTGCATGGACTCCAGCATCAAAAGCAAACCGTATTATCGTTGCTTCTGATGAAGTTTCTAAAGATGAACTTCGTAAACAATTGATTAAGCAAGCTGCTCCTGGAGGAGTCAAAGCAAACGTTGTCCCAATTAGTAAATTAATTGAAGTAGCTAAAGACCCACGTTTCGGAAACACACGTGCCTTGATCTTATTTGAAACTGTACAAGATGCACTCCGTGCAATTGAAGGTGGTGTGGAAATCCCTGAATTGAACGTTGGTTCAATGGCTCACTCAACTGGTAAAACAATG

SEQ ID NO: 18708 - protein, 252 aa, Streptococcus agalactiae
MPNEGPDDLYGHFNNAIAQFDADDEVLVLADLWSGSPFNQASRVMGENPERKMAIITGLNLPMLIQAYTERMMDANAGVEQVAANIIKESKEGIKALPEELNPVVEATPVAGVPADVPAEVKQSGSIPEGTVIGDGKLKINLARIDTRLLHGQVATAWTPASKANRIIVASDEVSKDELRKQLIKQAAPGGVKANVVPISKLIEVAKDPRFGNTRALILFETVQDALRAIEGGVEIPELNVGSMAHSTGKTM

SEQ ID NO: 18709 - protein, 99 aa, Streptococcus agalactiae
ATGGGTATCGGTATTATTATTGCCAGCCATGGTAAATTTGCTGAAGGTATTCATCAATCAGGTTCAAAGATCTTTGGTGAACAAGAAAANNNNNTTAAT

SEQ ID NO: 18710 - protein, 33 aa, Streptococcus agalactiae
  VARIANT 30, 31, 32: Xaa = Any Amino Acid
MGIGIIIASHGKFAEGIHQSGSKIFGEQEXXXN

SEQ ID NO: 18711 - protein, 810 aa, Streptococcus agalactiae; identical to SEQ ID NO: 9507

SEQ ID NO: 18712 - protein, 270 aa, Streptococcus agalactiae; identical to SEQ ID NO: 9508

SEQ ID NO: 18713 - protein, 579 aa, Streptococcus agalactiae
ATGAAAAGTTAATTTGGAGTCATCTTTTGCATAGTCAGTATTTTAGGGATATGGTATTATCATGTAAAAATTGATCATTTGATGGTAATTCTATTGGCATCAGTCTTGTCGTTAGAGATGGGATTCATTGCTTATTATAGTCGTAATATTTTTATTCGTCTTTTAGCAAGTTTAGGTCTTTTATTTTTTTACCCACAGAGTTTAGGGATTTTTCTTAGTTTGGTGAGCTTAGAGTGGTCAACAAAAGACATTTGGCAGTCTAATCACTTTATGCAATATATGGCATACCTTCTTGCAATTCTTTTTATTATCTCTTCAGCTTTACTAAGCTTGAAGCTATTGGTAAATGCATATGATATTAGTAAAAGGTATCAATTAGCAACTGTTATACCTGTAATGCTTTTTAGTAGTTTTGCCTTTTGCTTAGAAAAATCAGGATCATTAGGTTTAGAAGGAATCATTTTAAATCCGTCAGCATTTTTTAATGGAATACAGACTAATATGGCTAACCTTGATTTTAAAGCCTTGTCTTGCCTTTTTTTAGTACAATTATTACTTTGGGGAATATTAATGGAAGAC

SEQ ID NO: 18714 - protein, 194 aa, Streptococcus agalactiae; identical to SEQ ID NO: 746

SEQ ID NO: 18715 - protein, 609 aa, Streptococcus agalactiae
ATGAAAGTAAAACTATTTGCGATACATCTATTTTTTATTGTTATTTCTTTTGGGATTAAATATTATCATTTGCAGGGACCAAATTTGATTTGGAATATGACTCTAGCCCTAATAGCGTTAGATTTTGCATACCTTACTAGTTTATTTAAGAAAAAAATTCTTATCGGTCTTTTTGCACTTGCTTGGTTTTTTTTCTATCCTAATACCTTTTATATGTTGACGGATATCATTCATATGCATTTTGTCGGAGACGTTCTTTATAATAAGACAAATTTAATACTTTATATCTTGTATGTATCTAGTATCTTGTTTGGTTTTTTATCAGGTATCGAAAGTTTTTCTGTGATTATGCGTAAATTTAGAATTAGCAATATATTTTTAAGATGGGGAATTATTGGAATTGTATCATTTGTTTCAAGTTTTGGTATTCATATTGGTCGTTATGCCCGTCTAAATTCATGGGATATCTTAACGAAGCCACAAGTGGTAATTAACGAACTTTTAGCGGTTCCGAGTAGGGATTCATTCCACTTTATTTTAGGATTTACATTTTTACAGGTATTGTGTCTTATTTTTATGGATTATTCTGCAGGGAAAAAGCTTGAAAAG

SEQ ID NO: 18716 - protein, 203 aa, Streptococcus agalactiae; identical to SEQ ID NO: 748

SEQ ID NO: 18717 - protein, 1419 aa, Streptococcus agalactiae
ATGGAAAAGTTTTTTAAGCTAAAGGAACACGGGACGACAATTCGGACTGAAATCACTGCTGGTCTAACGACTTTCTTTGCAATGTCGTACATTTTGTTTGTAAATCCAGCTATTTTATCTCAGACTGGGATGCCAGCACAAGGAGTTTTCTTAGCGACGATTATTGGTGCCGTTGTAGCTACATCTGTTATGGCTTTCTATGCTAACCTTCCCTATGCACAAGCTCCTGGGATGGGATTAAATGCTTTCTTTACATATACAGTTGTCTTTGCATTGGGATATACATGGCAAGAAGCCTTAGCTATGGTATTTATTTGTGGTTTGATTTCTCTGATTATTACTTTAACGAAAGTTAGAAAGATGATTATTGAGTCTATCCCAACAACTTTAAAATCAGCCATTACAGCAGGAATCGGAACTTTTTTAGCATACGTTGGGATTAAAAATGCTGGTTTTTTGAAATTTTCAATTGATCCTGGGACGTATGATGTTGTTGGAAAGGGTGCTGCGAAAGGATTGGCTACTATTACAGCAAATTCTTCAGCAACGCCAGGGCTAGTGTCGTTTGATAATCCAGCCATTTTATTATCTTTGATTGGTTTAAGCATTACCATCTTCTTTATTGTAAAGGGTATCCGTGGAGGGATTATTCTATCGATATTAACAACGACCCTCTTAGGTATTTTAATGGGAGTGGTTAAGTTAGATGCTATTAATTGGGAAGCAACTAACCTCTCGGCCTCTTTTAGAGATTTGAAGCAAGTATTTGGAGTTGCATTAGGAGAGAAAGGATTAATTTCTTTATTTTCTAATCCTTCACGTCTACCAAGTGTATTAATGGCCATTCTTGCTTTTTCACTGACTGATATTTTTGATACCATTGGAACGCTCATTGGTACCGGAGAAAAAGTTGGTATCTTAGCAACGACTGGTGATAATCATGAATCTAAGAGTTTAGACAAAGCACTCTATTCAGACTTAATTGGGACAACTTTTGGTGCTATTTGTGGAACATCTAACGTTACAACCTATGTTGAGTCAGCAGCAGGAATCGGAGCTGGTGGTCGTACAGGATTGACAGCCTTAGTAGTTGCTGGTTTGTTTGCTATATCTAGTTTTTTTAGTCCACTAGTATCTATCGTTCCGAGTCAAGCTACTGCACCAATATTGGTTATTGTTGGTATTATGATGCTTTCAAATTTAAAAGATATCAAATGGGATGATATGTCAGAAGCTATCCCAGCTTTCTTTACTTCTCTTTTTATGGGGTTTACTTATAGCATTACTTATGGTATTGCAGCTGGTTTCTTGACCTATACACTAGCTAAAGTCATCAAAGGACAAGCAAAAGATATTCATGTGGTACTGTGGATTTTAGATATATTATTTATTCTAAACTTTATCAGCTTGGCTATTTTG

SEQ ID NO: 18718 - protein, 473 aa, Streptococcus agalactiae; identical to SEQ ID NO: 750

SEQ ID NO: 18719 - protein, 507 aa, Streptococcus agalactiae
ATGCTATGGGGCTGTCAGAATCAGCAAACTGTTGGAAGACAGAGATATTTCTGGTATAATATCTCTATGTTTTATACTCAAAATGAAGAAGAGCTTATTGCCCTAGGGCAAAAACTGGGTACTGTTTTAAAGTCAGGAGATATCGTATTATTGACTGGTAATTTAGGTGCAGGCAAAACAACTCTTACAAAAGGTATTGCAAAGGGATTAGACATAAAACAAATGATTAAGAGCCCAACTTACACTATTGTTAGAGAATATGAAGGGCGTGTACCACTTTACCATTTGGATGTTTATCGTATTGGAGATGATCCTGATTCTATTGACTTAGATGACTTCTTGTTTGGTCAAGGAGTAACAGTTATTGAATGGGGAGAGTTGCTTAGTGATAACCTTATCAATAACTACTTAGAAATTGTTATTACGAGGAGCAATCAAGGACGTCAGGTTCAGTTAGAAGCTTATGGGCATCGCGCAAGAGAAATTATTGAGGCGATTCAAGATGTC

SEQ ID NO: 18720 - protein, 169 aa, Streptococcus agalactiae; identical to SEQ ID NO: 752

SEQ ID NO: 18721 - protein, 558 aa, Streptococcus agalactiae
ATGGGCATCGCGCAAGAGAAATTATTGAGGCGATTCAAGATGTCTAAACAATTTGCTGTTGATTTTATAGAAGCTTCGAGAGAGGAAGCATCTGCGATCCTTGAATTTTTAAATACTGTTACTGAGGAAACAGATTTTATTTTGCATACGGTGAGCAATCAACTATCTTTGTCAGAAATGGAAACGTTTATTGAAAATACCTTAATGACGAAAAATTGCATTTGTTTGATTGCTAAATTAAAAAATAAAGTGATCGGCTTGATAACAATCATTAGTCAGTCTGATATTGAAATTGAACACGTTGGGGATCTTTTTATTGCCGTTCAGAAGGATTATTGGGGATATGGTATTGGTCATATTCTCATGGAAGAAGCAATAGAATGGGCGTCAGATAACGATATTACACGCCGCTTAGAACTATCAGTCCAAGGACGTAATGAACGTGCTATTCACCTCTACCAAAAATTCGGTTTTGAAATAGATGGGCTTCAAACAAGAGGTATTAAAAGAGAAAATGGAGAATTTCTAGACATTTACAGAATGAGTAAGTTGATAGAT

SEQ ID NO: 18722 - protein, 186 aa, Streptococcus agalactiae; identical to SEQ ID NO: 754

SEQ ID NO: 18723 - protein, 1305 aa, Streptococcus agalactiae
ATGAAAATTTGGAAAAAAATAACCTTAATGTTTTCTGCAATTATTTTAACAACAGTAATTGCATTGGGAGTCTATGTTGCCTCAGCTTATAATTTTTCGACTAATGAATTGTCTAAGACTTTTAAAGATTTTAAGCTAGCTAAATCAAAAAGTCATGCTATTGAAGAAACAAAGCCGTTTTCAATACTATTAATGGGGGTGGACACAGGTTCAGAGCATCGAAAATCTAAGTGGTCAGGAAATAGCGATTCTATGATCTTAGTCACTATAAATCCTAAAACTAATAAAACAACGATGACAAGCTTAGAACGTGACGTATTGATTAAATTGAGTGGTCCCAAAAATAATGGACAGACTGGAGTAGAAGCAAAGCTAAATGCAGCCTATGCTTCTGGTGGTGCGGAAATGGCATTGATGACTGTTCAAGACTTATTAGATATTAATGTTGATTACTTTATGCAAATTAATATGCAAGGATTAGTTGATTTAGTCAATGCTGTTGGTGGTATAACAGTAACTAATAAATTTGACTTTCCAATATCAATTGCTGCCAATGAACCAGAGTACAAGGCTGTTGTTGAACCAGGGACACATAAAATAAATGGAGAACAAGCACTTGTTTATTCTCGTATGCGCTATGATGATCCAGAGGGAGATTATGGGCGTCAAAAAAGACAACGTGAAGTAATTCAAAAAGTCCTTAAAAAAATATTGGCGTTAAATAGTATTAGTTCATACAAAAAAATTCTTTCCGCAGTAAGTAATAACATGCAAACTAATATTGAGATATCATCAAAAACGATTCCTAATTTGTTAGCTTATAAAGATTCATTGGAACATATTAAATCTTATCAGTTGAAGGGTGAAGACGCTACTTTATCAGATGGTGGCTCTTATCAAATTTTAACTAAGAAACATCTACTTGCAGTTCAAAATAGAATTAAGAAAGAACTGGATAAAAAGCGTAGTAAAACTCTGAAGACAAGCGCGATTCTATATGAAGATTACTATGGTACTACTGCTAGTAATGATTCTTCTACTTATTCATCAACACAAGAGAATAATTATAATACAACACCTTATTCAGAAGCACCACCAAGTTACAGTGGTAATACTACTTATAGTTCTGAGACTAATCAAACAACTCATCAAAATTACTATAATAGTAGCACTCCTGCTAGTAACTATAGCAGTAACACTAACACAGGTCAGGCTGATTCAAGTGGAAGTGTCAATAATCATAACGGGGCTGCAACGCCTAATCCAAACACAGGAACGCAACCAGTACCAGGTCAAACTAATCCA

SEQ ID NO: 18724 - protein, 435 aa, Streptococcus agalactiae; identical to SEQ ID NO: 756

SEQ ID NO: 18725 - protein, 294 aa, Streptococcus agalactiae; identical to SEQ ID NO: 5129

SEQ ID NO: 18726 - protein, 98 aa, Streptococcus agalactiae; identical to SEQ ID NO: 758

SEQ ID NO: 18727 - protein, 417 aa, Streptococcus agalactiae; identical to SEQ ID NO: 9523

SEQ ID NO: 18728 - protein, 139 aa, Streptococcus agalactiae; identical to SEQ ID NO: 760

SEQ ID NO: 18729 - protein, 499 aa, Streptococcus agalactiae
TTGAAATTAAATAAAATAATATTATCTACTGCAGCTCTTACTGCTCTCTTTTTAGGATATAATAGCGTTACTGCGGATACATATAATAACTATCAGCCACATAGATCAAATAATATGGATTTACTGAGGAATATAACTATAATAACAGATAGAACTTCAGGAGCGTATAAAAAAACTAAATATACCTTTTAAAGAAAAACTTGCCTTACTTAGAAAGGTTAAATCAAGACAAGATTCTTATGTATTAGACACATTAAGAAAAGAAGTTGAAAATAAAAACAGTGAGTATTCAGAACTAGAGCAAGAATATCAAAGAATTTCAGCTCTTATTGATGCTAAGTTTCCGCAAGGGAAATCTAGTTTAGCAGAAAAATTACATAAAGAACTAATTTGGGACTTGGATGGTGTTAAATATGATGAGGGTATTTCTAAGAGAACTGCTCTAAAAAAATTAGAAGGTAAAATCAACGAATATACTAAAAAATACAGTTATTTATTC

SEQ ID NO: 18730 - protein, 167 aa, Streptococcus agalactiae; identical to SEQ ID NO: 762

SEQ ID NO: 18731 - protein, 255 aa, Streptococcus agalactiae; identical to SEQ ID NO: 9527

SEQ ID NO: 18732 - protein, 85 aa, Streptococcus agalactiae; identical to SEQ ID NO: 9528

SEQ ID NO: 18733 - protein, 723 aa, Streptococcus agalactiae; identical to SEQ ID NO: 9529

SEQ ID NO: 18734 - protein, 241 aa, Streptococcus agalactiae; identical to SEQ ID NO: 764

SEQ ID NO: 18735 - protein, 1032 aa, Streptococcus agalactiae
ATGAAAAAGTTATTTAATAAACGTCGAAGTCTCTTTTTAACTCAAAATAGTAAATATTTGAGATACGTCTTTAACGATCATTTTGTATTAGTATTAATGTTTTTGTCAGGTTTTTTGTTATATCAGTATAGCCAGTTACTAAAAGACTTTCCAAAAACACATTGGCCAATTATCGTGATTGTGTCAATCATTATCTTAATGTTACTAGCGATGGGGGGAATAGCCAGCTATTTAGAACCGGCTGATAAACAATTTTTACTTATAAAAGAAGAAGCAATAAAGGAAATTATAAATTCTGCTAAAAAACGGACTTATATCTTTTGGTTGGTTATTCAAACCTTATTTTTAGTATTAATATCACCAATTTTGATAAAGTTAGGCTTGTCAGTTTTTATGATTACATTGTTAATTTTTGGTCTAGGAATAATCAAATGGTTGGTAATAACTTACAAGGTAAAGGTCTTTTATAACAATCAAAATTTGAACTGGGATGCAGCTATAAATCATGAGCAGGAAAGAAAACAGAGTATATTAAAATTTTTCTCTTTGTTTACAAATGTTAAAGGAATTTCGACAAGTGTAAAACGTCGTTCATTTTTAGATGGTATTTTAAAACTTATTTCTAAAACGCCATCGCGTTTATGGACTAACTTATTTGTGAGGGCATTTCTAAGAAGCTCAGATTATCTTGGTTTAACAATAAGGTTGGTAACTTTAAATATCTTATCAGTCATCTTTGTTAACGAAACCTACCTCGCCCTTGCTCTGGCATTTGTATTTAACTACTTATTATTGTTCCAACTATTAGCTTTAGGTCACCATTTTGATTATCAATACATGAATCAGCTCTATCCAGTTAGATTAAATGCTAAAGCAAGTCAGCTAAAAGGTTTTCTCAGAGTATTATCATATGCTGTGACAGTAATTGATAGCATACTTATAAGAGAATTGAAACCTGTTATATTATTGATAGTTTTGATGTTAATTGTGACGGAATATTACATCCCTTACAAAATAAAGAAGATGATTGAC

SEQ ID NO: 18736 - protein, 344 aa, Streptococcus agalactiae; identical to SEQ ID NO: 766

SEQ ID NO: 18737 - protein, 798 aa, Streptococcus agalactiae
GTGACAATATCAAATCAAGAATTGACGCTTACTCCCTTAAGAGGAAAAAGTGGCAAAGCCTATATTGGTACTTATCCAAATGGTGAACGTGTCTTTGTCAAATATAATACGACACCTATTTTGCCAGCCTTAGCTAAGGAACAGATTGCGCCACAACTACTGTGGGCACGCCGTACAAGTAATGGCGATATGATGAGTGCTCAAGAATGGTTAGATGGTCGAACATTGACTAAAGAAGATATGGGTAGTAAACAGATTATTCATATTTTATTGCGCCTGCACAAGTCTCGTCCCTTAGTAAATCAGCTGTTACAATTAGGGTATAAAATTGAAAACCCTTATGATTTGTTGATGGATTGGGAAAAACAAACTCCTATTCAAATCCGGGAAAACACTTATTTGCAATCTATTGTGACTGAGTTAAAGCGTAGTTTACCTGAGTTTCGAACAGAGGTTGCAACAATCGTTCACGGAGATATCAAACATAGCAACTGGGTTATTACAACAAGTGGTTTAATTTATTTGGTTGATTGGGATTCTGTTCGTTTAACAGATCGCATGTATGACGTTGCATATATTTTAAGTCATTATATTCCACAAAAACACTGGAAAGATTGGCTGTCTTACTACGGTTATAAAGATAATGAGAAAGTCTGGAGCAAAATTATCTGGTATGGGCAATTTTCATATTTATCACAGATAATCAAATGTTTTGATAAACGAGATATGGAGCATGTCAATCAAGAAATTTATGAATTACGAAAGTTTAGAGAGTTAATTAAAAAGCATAATGCGAGT

SEQ ID NO: 18738 - protein, 266 aa, Streptococcus agalactiae; identical to SEQ ID NO: 768

SEQ ID NO: 18739 - protein, 633 aa, Streptococcus agalactiae
ATGCGAGTTAGAAAACGTAAGGGTGCAGAGGAACACTTAGAAAATAATCCTCACTATGTTATTTCAAATCCAGAAGAAGCCAAAGGGCGTTGGCATGAGATTTTTGGAAATAATAACCCCATTCACATAGAAGTTGGTTCCGGAAAAGGGGCTTTTATCACTGGTATGGCAGAGCAAAATCCAGATATCAATTATATTGGAATTGATATTCAATTGTCAGTGCTTTCCTATGCTTTGGATAAAGTTCTAGATAGCGGTGCTAAGAATATCAAATTACTATTAGTTGATGGTTCTAGTCTATCAAACTACTTTGATACTGGCGAAGTTGATTTGATGTATCTTAACTTTAGTGATCCATGGCCTAAGAAAAAGCATGAGAAACGTCGATTGACCTATAAGACTTTCTTGGATACCTATAAAGACATACTGCCTGAGCAGGGGGAAATTCATTTTAAAACAGATAATAGAGGTTTATTTGAATATAGCCTTGCTAGCTTTTCTCAATACGGTATGACTTTAAAACAAGTTTGGTTAGATTTACATGCAAGTGATTACCAGCAAAATATCATGACTGAGTACGAACGCAAATTTTCAAATAAAGGACAGGTTATCTATCGTGTAGAAGCACGATTT

SEQ ID NO: 18740 - protein, 211 aa, Streptococcus agalactiae; identical to SEQ ID NO: 770

SEQ ID NO: 18741 - protein, 381 aa, Streptococcus agalactiae
ATGGGTGGCGACTATGTGCTCAGTATTTTAATTGATAAACCCGGAGGCATTACGGTTGAAGATACAGCACAATTGACAGACGTTGTAAGTCCCTTACTTGACACAATTCAACCAGATCCATTTCCAGAACAGTATATGCTTGAAGTCTCAAGTCCTGGGTTGGAAAGACCACTTAAAACAGCAGAAGCATTATCAAATGCTGTTGGGTCTTATATCAATGTAAGTCTGTATAAATCCATTGATAAAGTTAAAATATTTGAAGGTGACTTATTATCATTTGATGGTGAAACCTTGACAATTGATTATATGGACAAAACACGTCATAAAACTGTAGATATTCCCTATCAGACGGTTGCAAAAGCCCGTCTTGCGGTTAAACTT

SEQ ID NO: 18742 - protein, 127 aa, Streptococcus agalactiae; identical to SEQ ID NO: 772

SEQ ID NO: 18743 - protein, 1137 aa, Streptococcus agalactiae
ATGCTAGAAGCCTTCCGTATTTTGGAAGAAGAAAAACACATTAATAAAGAAGATATTATTGATGCAGTTACTGAGTCACTAAAATCTGCCTATAAGCGTCGTTATGGTCAATCAGAATCATGCGTTATTGAATTTAACGAGAAGAAAGCAGACTTTACCGTCTATACTGTTCGTGAAGTTGTTGATGAAGTTTTTGATAGCCGTTTGGAAATTAGCCTAAAAGATGCCCTTGCTATTAGCTCAGCGTATGAACTTGGTGATAAGATTCGCTTTGAGGAATCTGTTACAGAATTTGGACGCGTGGCAGCTCAGTCAGCAAAACAAACTATTATGGAAAAAATGCGTCGTCAAATGCGTGAAGTAACCTTCAATGAATACAAACAACACGAAGGTGAAATTATGACTGGTACTGTTGAACGATTTGACCAACGTTTTATTTATGTCAATCTCGGTTCACTTGAGGCGCAATTATCGCATCAAGATCAGATTCCTGGAGAGAGCTTTAAATCTCATGATATGATTGATGTTTATGTCTATAAAGTGGAGAATAATCCTAAAGGAGTCAACGTTTTTGTTAGCCGTAGTCATCCAGAGTTTATCAAACGCATTATGGAGCGAGAAATTCCAGAAGTATTTGATGGAACTGTTGAGATTATGAGCGTCTCTCGTGAGGCTGGAGATCGTACTAAAGTTGCTGTACGCAGTCATAATTCAAACGTTGATGCGATTGGAACAATTGTTGGACGCGGTGGAAGTAACATTAAAAAAGTTATCAGTAATTTCCATCCTAAACGCGTTGATGCTAAAACAGGATTGGAGATCCCGGTTGAAGAAAACATTGATGTTATTCAATGGGTTGAAGATCCAGCGGAATTCATTTACAATGCTATTGCACCAGCCGAAGTTGATATGGTACTTTTTGATGATGAAGATACAAAACGTGCTACTGTAGTTGTTCCAGATAGCAAGTTATCGCTAGCTATTGGTCGCCGAGGACAAAATGTGCGTTTAGCAGCTCATTTGACTGGCTATCGTATTGATATTAAATCTGCAAGTGAATACGAAAAAATGGAAGCGCAAGAACTTCAAACTGAGGAAGTAGCTCAAGAATCTGAAGTTATTTCAGATAAGGCAGAA

SEQ ID NO: 18744 - protein, 379 aa, Streptococcus agalactiae; identical to SEQ ID NO: 774

SEQ ID NO: 18745 - protein, 294 aa, Streptococcus agalactiae; identical to SEQ ID NO: 9541

SEQ ID NO: 18746 - protein, 98 aa, Streptococcus agalactiae; identical to SEQ ID NO: 776

SEQ ID NO: 18747 - protein, 300 aa, Streptococcus agalactiae; identical to SEQ ID NO: 9543

SEQ ID NO: 18748 - protein, 100 aa, Streptococcus agalactiae; identical to SEQ ID NO: 778

SEQ ID NO: 18749 - protein, 2721 aa, Streptococcus agalactiae
GTGGTTGAGCAAGCTCAATCGCTTGGCTTACCTGTAAAAAGTCATGCTTCTAGCGTTGAAGAAAATGATGCTACACGTATTGTTGAGAGTTTTAGCTCTTCTAAAACTAAAGCTCCAACAAATTCTGTTCAAACTAATCAAGGTGTGAAAACAGAATCTAAAACTGTTGAAACCAAACAAGGCTTGTCCGATGATAAACCTTCAACTCAACCTGTAGCTAAACCGAAACCACAAAGTCGTAACTTTAAGGCGGAGCGCGAGGCTCGTGCTAAAGCTGAAGCGGAGAAGCGTCAACATAATGGGGATCACCGTAAGAATAATCGCCATAATGATACACGCTCTGACGACAGACGCCATCAAGGTCAAAAGCGTTCAAATGGTAATCGTAATGATAACCGACAAGGTCAGCAAAATAACCGTAATAAAAATGATGGGCGTTATGCTGATCATAAACAGAAACCCCAAACGCGTCCTCAGCAACCTGCAGGCAATCGCATTGACTTTAAAGCTCGAGCAGCAGCTTTGAAAGCTGAGCAAAATGCTGAATACTCACGTCATAGTGAGCAGCGTTTCCGTGAAGAGCAAGAAGCCAAACGTCAAGCAGCTAAGGAGCAAGAACTAGCTAAAGCAGCAGCGTTAAAAGCGCAAGAAGAAGCTCAAAAAGCTAAGGAAAAACTTGCTTCTAAACCTGTTGCTAAGGTAAAAGAAATTGTCAATAAAGTAGCCGCTACGCCATCACAGACAGCAGATAGTCGTCGTAAAAAACAAACTCGTTCTGATAAGTCTCGTCAATTTTCAAATGAAAATGAAGATGGACAAAAGCAAACAAAAAATAAGAAAAACTGGAATAATCAAAACCAAGTGAGAAATCAAAGAAATAGTAACTGGAATCATAATAAGAAAAATAAAAAAGGTAAGACTAATGGAGCTCCAAAACCAGTAACAGAGCGTAAATTCCATGAATTACCAAAAGAATTTGAATATACTGAGGGCATGACCGTTGCGGAAATTGCAAAACGTATTAAACGCGAACCAGTGGAAATTGTTAAAAAACTCTTTATGATGGGAGTTATGGCAACGCAGAATCAATCATTAGATGGAGACACTATTGAGCTATTGATGGTTGACTACGGGATTGAAGCACATGCTAAGGTTGAAGTTGATGAAGCTGATATTGAACGCTTCTTTGCAGATGAGGATTACCTTAATCCTGATAACTTAACGGAACGTCCGCCTGTTGTTACTATCATGGGACACGTTGATCATGGTAAAACAACTCTTCTTGATACTCTACGTAATTCACGTGTCGCTACTGGCGAAGCTGGTGGAATTACTCAACATATTGGTGCTTATCAGATTGAAGAAGCTGGCAAGAAAATTACTTTCTTGGATACACCAGGGCATGCGGCCTTTACTTCTATGCGTGCGCGTGGTGCATCAGTAACTGATATTACTATCCTTATCGTTGCCGCTGATGATGGTGTTATGCCGCAGACAGTTGAGGCAATTAATCACTCTAAAGCTGCGGGTGTCCCAATTATTGTTGCTATCAACAAAATTGATAAACCTGGTGCAAATCCAGAACGCGTTATCAGTGAATTAGCTGAGCATGGTGTCATCTCTACTGCATGGGGTGGTGAGTCTGAATTTGTTGAAATTTCAGCTAAGTTTGGTAAAAATATTCAAGAATTACTTGAGACAGTTCTTTTAGTTGCTGAAATGGAAGAATTAAAAGCAGATGCAGATGTTCGTGCTATTGGTACTGTTATTGAAGCCCGTCTTGATAAAGGTAAGGGAGCCGTTGCAACGCTTCTTGTCCAACAAGGTACTTTAAATGTACAAGATCCAATCGTTGTTGGTAATACATTTGGACGTGTTCGTGCGATGACTAATGATCTTGGGCGTCGTGTCAAAGTTGCGGGTCCATCTACACCAGTTTCTATTACTGGTTTGAACGAAGCTCCAATGGCTGGTGATCATTTTGCTGTTTATGCAGATGAGAAAGCTGCGCGTGCTGCAGGTGAAGAACGTGCAAAACGTGCTCTCTTAAAACAACGCCAAAACACGCAACGTGTTAGCCTCGAGAACTTATTTGATACCCTTAAAGCTGGTGAAGTTAAGTCAGTTAATGTTATTATCAAAGCTGATGTGCAAGGTTCTGTAGAAGCACTTGCAGCTTCTCTCCTTAAGATTGATGTTGAAGGAGTAAAAGTTAACGTTGTTCACTCAGCAGTTGGTGCTATTAATGAGTCTGATGTAACACTTGCTGAAGCATCAAATGCTGTTATTATAGGATTTAACGTACGCCCTACTCCACAAGCTCGTCAACAAGCAGATGCTGATGATGTCGAAATTCGTCAACATAGCATTATCTATAAAGTTATCGAAGAAGTTGAAGAAGCGATGAAAGGTAAACTTGATCCTGAATACCAAGAAAAAATCCTTGGTGAAGCCATTATTCGTGAGACCTTTAAAGTTTCAAAAGTGGGAACTATTGGTGGATTTATGGTTATCAATGGTAAAGTTACTCGTGATTCAAGTGTTCGTGTTATCCGTGATGGTGTTGTCATTTTTGATGGTAAATTAGCAGTCTTAACACTATAAAGATGATGTTAAAGAAGTCGGCAATGCTCAAGAAGGTGGTCTATGATTGAGAATTATAACGATCTCAAAGAAGATGACACTATTGAAGCATACATTATGGAAGAAATTAAACGTAAA

SEQ ID NO: 18750 - protein, 908 aa, Streptococcus agalactiae
MVEQAQSLGLPVKSHASSVEENDATRIVESFSSSKTKAPTNSVQTNQGVKTESKTVETKQGLSDDKPSTQPVAKPKPQSRNFKAEREARAKAEAEKRQHNGDHRKNNRHNDTRSDDRRHQGQKRSNGNRNDNRQGQQNNRNKNDGRYADHKQKPQTRPQQPAGNRIDFKARAAALKAEQNAEYSRHSEQRFREEQEAKRQAAKEQELAKAAALKAQEEAQKAKEKLASKPVAKVKEIVNKVAATPSQTADSRRKKQTRSDKSRQFSNENEDGQKQTKNKKNWNNQNQVRNQRNSNWNHNKKNKKGKTNGAPKPVTERKFHELPKEFEYTEGMTVAEIAKRIKREPVEIVKKLFMMGVMATQNQSLDGDTIELLMVDYGIEAHAKVEVDEADIERFFADEDYLNPDNLTERPPVVTIMGHVDHGKTTLLDTLRNSRVATGEAGGITQHIGAYQIEEAGKKITFLDTPGHAAFTSMRARGASVTDITILIVAADDGVMPQTVEAINHSKAAGVPIIVAINKIDKPGANPERVISELAEHGVISTAWGGESEFVEISAKFGKNIQELLETVLLVAEMEELKADADVRAIGTVIEARLDKGKGAVATLLVQQGTLNVQDPIVVGNTFGRVRAMTNDLGRRVKVAGPSTPVSITGLNEAPMAGDHFAVYADEKAARAAGEERAKRALLKQRQNTQRVSLENLFDTLKAGEVKSVNVIIKADVQGSVEALAASLLKIDVEGVKVNVVHSAVGAINESDVTLAEASNAVIIGFNVRPTPQARQQADADDVEIRQHSIIYKVIEEVEEAMKGKLDPEYQEKILGEAIIRETFKVSKVGTIGGFMVINGKVTRDSSVRVIRDGVVIFDGKLASLKHYKDDVKEVGNAQEGGLMIENYNDLKEDDTIEAYIMEEIKRK

SEQ ID NO: 18751 - protein, 219 aa, Streptococcus agalactiae
ATGGTTATCAATGGTAAAGTTACTCGTGATTCAAGTGTTCGTGTTATCCGTGATGGTGTTGTCATTTTTGATGGTAAATTAGCAAGTCTTAAACACTATAAAGATGATGTTAAAGAAGTCGGCAATGCTCAAGAAGGTGGTCTAATGATTGAGAATTATAACGATCTCAAAGAAGATGACACTATTGAAGCATACATTATGGAAGAAATTAAACGTAAA

SEQ ID NO: 18752 - protein, 73 aa, Streptococcus agalactiae
MVINGKVTRDSSVRVIRDGVVIFDGKLASLKHYKDDVKEVGNAQEGGLMIENYNDLKEDDTIEAYIMEEIKRK

SEQ ID NO: 18753 - protein, 348 aa, Streptococcus agalactiae; identical to SEQ ID NO: 9547

SEQ ID NO: 18754 - protein, 116 aa, Streptococcus agalactiae; identical to SEQ ID NO: 786

SEQ ID NO: 18755 - protein, 1002 aa, Streptococcus agalactiae; identical to SEQ ID NO: 9549

SEQ ID NO: 18756 - protein, 334 aa, Streptococcus agalactiae; identical to SEQ ID NO: 788

SEQ ID NO: 18757 - protein, 414 aa, Streptococcus agalactiae
ATGACTATTTCAAGCGCAGAATGGGAAATTATGAGAGTGGTTTGGGCACAGCAGAATACAACCAGTAATGAGATACTAGCAGTTTTACTAGAGAAGTATGATTGGACTCCTTCAACTGTCAAAACCTTATTAAGAAGGCTCTTAGATAAAGGCTACGTGAGCAGAGAAAAAATGGGAAAAGGATTTAGCTATTCTCCTTTAATTGATGAAGATTTAGCTATGATGTCAGAGGTAGATAGTGTATTTCAAAAAGTTTGCCAGACCAAACATGTTGCTATTGTTAGACACTTATTGGAAAGTATACCAATGACAGAGAAGGATCGATTAAATTTGCAATCATCACTAGAAGCTAAGAAAGGCAAAACACTTGAACGTGTAGCTTGTAATTGCATTCCTGGTCAGTGTCAATGCCAT

SEQ ID NO: 18758 - protein, 138 aa, Streptococcus agalactiae; identical to SEQ ID NO: 9552

SEQ ID NO: 18759 - protein, 2231 aa, Streptococcus agalactiae
ATGGCTAATAGAAAAGAAACATTTTTGATTGATGGGATGACTTGTGCATCTTGTGCTTTAACGATAGAAAAAGCTGTCAACAAGTTAGACCATGTGGATAGTGCAGTAGTAAATTTAGCAACAGAGAAAATGACAGTTACGTTTGATGATACAACCTTATCGCCAAATGTGATTGAAGAGTGTGTTTCTGAGAGTGGATACGAAGCATCGCTTTTCAAAGAGGAAACTTCTAAAAGCCAATCTGAACGGCACCAATTAGCCATTGAAAAGATGTGGCATCGCTTTTGGATGTCAGCAGTTGCAACTATACCTCTTCTCTATATTTCCATGGGACCAATGATTAACTTATGGTTACCATCATTTTTGATGCCAGATAAGGGACCTCTAAACTATGGTATGATACAATTATTGTTAACACTACCGGTGATGTATTTTGGGCGTATCTTTTACCAAAATGGTTTTAAAGCACTTTTTAAAAGGCATCCCAATATGGATTCATTAGTTGCTATAGCCACAACAGCGGCTTTCATTTATAGCTTATATGGATTGTACGAAATATTACAGGGTGACATACACTACGCTCACCAGCTTTATTTCGAATCTGTTGCAGTTATTTTAACACTTATTACTCTAGGAAAATATTTTGAAATATTATCCAAAGGGCGTACTTCGGCCTCGATTGAAAAATTATTAACTTTATCAGCAAAAGAAGCAAGAGTTATCAAAGATGGTGAAGACTATATGGTTCCTTTGGATAAAGTTAAAATAGGTGAAACAATTCTTGTCAAACCTGGAGAAAAAATTCCTCTTGATGGCCATGTTGTAGCAGGAGAATCAAGTATTGATGAATCCATGTTAACAGGTGAAAGTATTCCAGTTGAAAAAAAGGTTGGTAGTAAGGTTTACGGTGCCAGCATTAATGGGCAAGGTAGCTTAACGATTTTCGTTGAAAAAGAAGCTGGCGGTTCCCTTCTATCACAAATTATTAACTTAGTAGAAGCTGCACAGACAAGTAAGGCTCCAATTGCTAACTTAGCAGACAAAGTATCAGGAGTCTTTGTCCCTTTTGTTATTGTCATTGCAATTTTATCAGGCTTGAGTTGGTACTTAATTCTGGGGCAAAGTTTTGCCTTCTCTCTGAAGATTATGATTGCAGTCTTAGTGATTGCTTGTCCATGTGCTTTAGGGTTGGCAACTCCTACAGCTATTATGGTGGCTAGTGGTAAAGCAGCTGAGAATGGTATTTTATTTAAAGGTGGTGAAGTGTTGGAAAAGGCTCACCACATTGATACAATAGTTTTTGATAAAACAGGAACCTTGACCAAAGGGAAACCAGAAGTAGTTGCTATCAAAACATATGGGGGAGATAAAGAGGAGTTTTTAGGTCAGGTAGCATCAGTAGAAAAACTTTCAAATCATCCACTTAGCCAAACAATTGTTAATAAAGCAAAAGAGAAAGAACTTCCCTTAAGGGAAGTCATGGCTTTTAAAAATATTTTGGGTTACGGTTTGAGTGCAACTATTAATGGTAAAACTATGCTTGTAGGTAATGCTAACTTAATGACTAAGAACGATGTTAATTTAGATTTAGCAAAGGCTGATATAGAAATAGCTCAAGAAGAAGCACAAACTGTGGTTTACGTTTCCGAAAATGGAGTGTTGAGCGGTTTAATAACTTTAACGGACCAGCTAAAGACAGATAGCCAAGAAACAGTTAAGCAGTTACAAAGATTAGGATTTAATTTAGTTTTACTTACTGGTGATAATAAGGCTAGTGCAGATGCCATAGCACAAAAATTGGGTATCACGACAGTTGTTTCAGAAGTTTTACCTGATCAGAAAGCAAACGTTATTTTAGAACTTAAGAAAAAGGCGGACAGATTGCGATGGTTGGTGATGGCATCAATGATGCTCCTGCGCTAGCTAGCAGTGATGTAGGTATCTCTATGAGTTCTGGAACAGATATTGCTATTGAATCAGCAGATATCGTGTTGATGAAACCTGAGTTAACAGATCTCTTAAAAGCAATGACTATCAGTAAACAAACGATTCAAATTATTAAGGAAAATTTATTTTGGGCTTTCTTTTATAACGTTTTAGCGATTCCAGTGGCAATGGGTGTTTTACATCTTTTTGGTGGTCCCTTACTCAATCCTATGTTGGCAGGCTTAGCTATGGCGTTTAGTTCAGTTTCAGTAGTTTTAAACGCACTTCGCTTAAAAGTCTTAAAA

SEQ ID NO: 18760 - protein, 744 aa, Streptococcus agalactiae; identical to SEQ ID NO: 792

SEQ ID NO: 18761 - protein, 204 aa, Streptococcus agalactiae
ATGAAACATACCTATCGAGTTAGTGGCATGAAATGTGATGGTTGTGCCAAAACAGTTTCTGATAAGTTATCAAGTGTGATTGGTGTTGACGAGGTTAATGTTGATTTGACTAAAAATCAAGTTGTCGTAAGTGGAAAAACATTCAAATGGCTTTTAAAACGTTCTTTAAAAGACACAAAGTATTCACTAGAAGAGGAAATAAAT

SEQ ID NO: 18762 - protein, 68 aa, Streptococcus agalactiae; identical to SEQ ID NO: 794

SEQ ID NO: 18763 - protein, 612 aa, Streptococcus agalactiae
ATGTCAATTGATATTTGGAACATTTTAAGTTTGGTTGGAACCGTAGCTTTTGCAAGTTCGGGAGCTATTGTGGCGATTGAGGAAGAATTTGATATTCTAGGGCTTTTTATCTTAGGTTTTGTAACGGCATTTGGTGGTGGAGCTATTAGAAATGTACTAATTGGCTTGCCTATTGAAACACTTTGGAGTCAAGGAATTGCTTTTTATGCAGCAGCAGCAGCTATTTTATTTATTATGATTTTCCCTAATTTGTTGAGTGGTAAGGGACGGGATGCCGAAGTTGTATCAGATGCTATTGGGTTAGCAGCGTTTAGTGTTCAAGGAGCACTATATGCGACTCAATCTCATCAACCTCTTAGTGCTGTCATTGTCGCAGCAGTACTAACTGGTGCAGGTGGTGGTATTGTCAGAGATGTTCTGGCTGGCCGAAAACCTGGAGTACTAAGAAGTGAAATATATGCAGGTTGGTCAATATTAGTGGGGATCATTTTATATTTTAAAATTGCTAAAACAACAACTGACTATTATTTGTTAGTGTTAGTTGTAACTAGCCTAAGGATGTTGGGTTATAAGAAACAATGGCACTTGCCAGTTGTCAGACCACGTAAGAAA

SEQ ID NO: 18764 - protein, 204 aa, Streptococcus agalactiae; identical to SEQ ID NO: 796

SEQ ID NO: 18765 - protein, 810 aa, Streptococcus agalactiae
ATGATAAAATTAATTGCTATTGATATGGATGGAACGCTTTTAAATGATGAAAAGAAAATTCCAAAGGAAAATATCCAAGCTATTAAAGAAGCAACTCAAGCAGGTATTAAAATTGTACTGTGTACTGGGCGACCGATGTCAGGTATACTTCCTTATTTTAATGAACTAGGTTTAACAAAAGAGGAGTATATTATCATGAATAATGGTTGTAGCACTTATAGCACGAAAGATTGGCAATTGATTGATTCTGCAACTTTAACACATGATGAACTCATCTTTCTTGAGGAGGTTGTTAAAGAATTTCCCAACGTTTGTTTAACATTAACAGCTGAAAATACATTTTACGCTGTTGGAGAGGAAGTTCCTGAAATTGTTGCTTATGATGCTGATTTAGTTTTTACAAAAGCAAAGTCAACAAGTTTAGATGCTCTTCGCAATCAAGAAGAAATTGTCTTTCAAGCAATGTACATGGGATTAGATGCAGATGTAACTGCTTTTCAAGAAGCTGTTGAAGAAGCCTTAATCTCGAAATTTAGTGGAGTTCGAAGCCAAGACTATATTTATGAGATTATGCCTCAAGGAGTAACAAAAGCAAGAGGCTTAAAATCCTTGATAGCAAAATTAGGACTGGATATTAATCAAGTTATGGCCATCGGTGATGCTCCTAACGATATTGAATTATTAGATTTAGTTCCCAATAGCGTTGCTATGGGGAATGCATCAGATGAGATTAAATCTAGATGTAAATATATAACGGTGGATAATAACAAAGCAGGGGTTGCTAAAGCTATTTATGACTATGCTTTACGT

SEQ ID NO: 18766 - protein, 270 aa, Streptococcus agalactiae; identical to SEQ ID NO: 798

SEQ ID NO: 18767 - protein, 2640 aa, Streptococcus agalactiae; identical to SEQ ID NO: 9561

SEQ ID NO: 18768 - protein, 880 aa, Streptococcus agalactiae; identical to SEQ ID NO: 9562

SEQ ID NO: 18769 - protein, 438 aa, Streptococcus agalactiae; identical to SEQ ID NO: 9563

SEQ ID NO: 18770 - protein, 146 aa, Streptococcus agalactiae; identical to SEQ ID NO: 9564

SEQ ID NO: 18771 - protein, 477 aa, Streptococcus agalactiae; identical to SEQ ID NO: 5181

SEQ ID NO: 18772 - protein, 159 aa, Streptococcus agalactiae; identical to SEQ ID NO: 804

SEQ ID NO: 18773 - protein, 1563 aa, Streptococcus agalactiae; identical to SEQ ID NO: 9567

SEQ ID NO: 18774 - protein, 521 aa, Streptococcus agalactiae; identical to SEQ ID NO: 9568

SEQ ID NO: 18775 - protein, 684 aa, Streptococcus agalactiae; identical to SEQ ID NO: 9569

SEQ ID NO: 18776 - protein, 228 aa, Streptococcus agalactiae; identical to SEQ ID NO: 808

SEQ ID NO: 18777 - protein, 1035 aa, Streptococcus agalactiae
ATGAAATTAAAATATTATATTGTTATTGGTTACCTTATTTCTATGTTAATAACTGTAGCAGGTGTTTTCTTTGGGCTTAATCATATGCTGATTGAGACTCGAGGTGTTTACTACATCCTTTCAGTTACAATTATTGCCTGTATTGTAGGTGGTATAGTTAATTTGTTCTTATTATCAAGTGTATTTACATCTTTGAAAAAGTTAAAACAAAAAATGAAGGATATTTCTCAAAGATGTTTTGATACAAAAGCACAAATTTGTTCACCACAAGAATTCAAGGATTTAGAGACAGCCTTTAACCAAATGTCTTCGGAGTTAGAGTCAACGTTTAAATCTCTAAACGAGAGTGAACGCGAAAAAACAATGATGATTGCACAACTTTCACATGATATCAAGACTCCAATTACTTCTATACAATCAACAGTAGAAGGTATTTTAGATGGTATTATATCTGAAGAAGAAGTTAACTATTATCTCAATACCATTTCTCGTCAAACAAACCGTCTTAACCATCTGGTTGAAGAATTAAGTTTTATTACATTAGAGACTATGTCAGACACGGCTGAACCTCATAAAGAAGAAACAATTTATCTGGATAAACTACTGATTGATATTTTATCTGAATTTCAATTGGTGTTTGAAAAAGAAAATCGCCAAGTAATGATTGATGTTGCGCCAGATGTTTCGAAATTATCTAGTCAATATGATAAATTATCACGAATTTTATTGAATTTGATTAGCAATGCAGTCAAATATTCTGATCCTGGAAGTCCCTTGACTATCAAGGCCTATTCAAATCGTCAAGATATCGTTATCGATATTATTGACCAAGGCTATGGGATAAAAGATGAAGATCTTGCTTCTATTTTTAATCGTCTTTATCGTGTAGAATCTTCACGAAATATGAAGACAGGAGGACATGGTCTAGGTCTTTATATTGCGCGACAACTTGCACATCAACTGAATGGGGATATTTTGGTCGAAAGTCAGTATCAAAAAGGCAGTAAGTTCTCTTTAGTACTTAAATTACAAAAA

SEQ ID NO: 18778 - protein, 345 aa, Streptococcus agalactiae; identical to SEQ ID NO: 810

SEQ ID NO: 18779 - protein, 738 aa, Streptococcus agalactiae
ATGACGAATTCAGAAATTAAAAATGAGGCAAAAACTATATTAAGCAATCTTCAAGGTAAGAATCAACTTTTTTTACTCCCGATTCTCCTTAGTATTATTACGTTATATATATCATTTTATTATCAATATAATAATATGACACTACTTGATTTTTTTGTACCTCTTCCAGTTTATTTCTTTTACACACTTTTTATTATTTCAGTCAGTTTTGTAATGTTAGATGTCGTCAAAAATCAGAAACTAAACGTTAGATTCTCGGACAATACTTATGTATTTTCAAGCCATATTTTCTGGAAATTACTCTCAGTACTTGTTCTAAAAGGACTAATTTTATCTTTCTTTTATCTACTAAGTACTTTTGGTCTACTAATCATCATTTCAAGTTTTAGGCTACTTTTGAGTGGTAACCTTATCCTTGCCCCTGTTTTAATAGTTGTTAGTAGCCTAATTACTACTAAGGCAGTTATAAAACTCGTTCAACAATATTACTCCTATAGTATCTCAACTTTAGTATTTTACACTCAATTAGAAAGTGGAAACTATGAGGGACCGTCTAAAGTACTGGTTGCTAGTCGAGAACTAATGAATGGTAATAAACTTAGACTCTTCCTTTTAGACTTAAGTTTTATTGGTTGGCAGTTCCTTACAATCTTCAGTTTCGGATTAGTCTATATCTATCTCCTTCCTTACCAAACTACTGCGCGCTTAATCTTTTATAGAAACATTACAAAAAATAGC

SEQ ID NO: 18780 - protein, 246 aa, Streptococcus agalactiae; identical to SEQ ID NO: 812

SEQ ID NO: 18781 - protein, 1160 aa, Streptococcus agalactiae
ATGACTGATCATCCAATAAAATATCGATTAATTAAACAGGAAAAACACACAGGAGCCAGACTTGGTGAAATAATCACACCACATGGTACATTTCCGACACCAATGTTTATGCCTGTTGGGACACAAGCAACTGTTAAGACACAATCTCCTGAAGAACTAAAAGAAATGGGTTCAGGAATTATTCTATCAAATACCTACCATTTATGGTTACGTCCAGGTGATGAATTGATTGCTAAAGCTGGAGGTTTACATAAATTCATGAACTGGGATCAGGCTATTCTAACAGACAGTGGAGGCTTTCAGGTTTATTCTTTGGCTGATAGTCGAAACATCACTGAAGAAGGAGTAACCTTTAAAAACCATTTAAATGGTGCGAAAATGTTTTTATCACCAGAAAAAGCTATTTCAATTCAAAATAACCTTGGTTCTGATATTATGATGAGTTTTGATGAGTGTCCACAATTTTACCAGCCTTATGATTATGTAAAAAAATCAATTGAGCGAACAAGCCGTTGGGCAGAACGTGGATTAAATGCCCACCGCCGTCCTCATGATCAAGGACTATTTGGTATTGTTCAAGGGGCAGGGTTTGAGGATTTACGTCGTCAATCAGCACGAGATTTAGTATCGATGGATTTTCCAGGTTATTCAATTGGAGGGCTTGCGGTCGGAGAAACACATGATGAGATGAATGCAGTTCTTGATTTTACTGTTCCAATGCTTCCGAATGATAAGCCTCGTTATTTGATGGGAGTTGGTGCACCAGATAGTTTAATAGACGCCGTTATCCGAGGAGTAGATATGTTTGATTGCGTCTTACCTACTCGTATTGCTCGAAATGGGACATGTATGACAAGTCAAGGTCGCTTAGTTGTTAAGAATGCTAAATTTGCAGAAGATTTTACGCCTCTTGATCCAAATTGCGATTGCTATACTTGTAAAAATTATACACGCGCTTATATTCGTCACTTATGAAAGCAGATGAAACTTTTGGTATTCGTTTGACTAGTTACCATAATCTTTATTTCCTTGTCAATCTTATGAAAGATGTCAGACAAGCTATTATGGATGATAATCTTCTAGAATTCCGTCAAGATTTTATGGAGCGCTATGGCTATGGCATGAATAACCGAAATTTTAAAAAAGNNNNNTTAATTAAT

SEQ ID NO: 18782 - protein, 387 aa, Streptococcus agalactiae
  VARIANT 325, 383, 384: Xaa = Any Amino Acid
MTDHPIKYRLIKQEKHTGARLGEIITPHGTFPTPMFMPVGTQATVKTQSPEELKEMGSGIILSNTYHLWLRPGDELIAKAGGLHKFMNWDQAILTDSGGFQVYSLADSRNITEEGVTFKNHLNGAKMFLSPEKAISIQNNLGSDIMMSFDECPQFYQPYDYVKKSIERTSRWAERGLNAHRRPHDQGLFGIVQGAGFEDLRRQSARDLVSMDFPGYSIGGLAVGETHDEMNAVLDFTVPMLPNDKPRYLMGVGAPDSLIDAVIRGVDMFDCVLPTRIARNGTCMTSQGRLVVKNAKFAEDFTPLDPNCDCYTCKNYTRAYIRHLXKADETFGIRLTSYHNLYFLVNLMKDVRQAIMDDNLLEFRQDFMERYGYGMNNRNFKKXXLIN

SEQ ID NO: 18783 - protein, 93 aa, Streptococcus agalactiae
ATGGCTAATAGAAAAGAGACATTTTTGATTGATGGGATGACTTGTGCATCTTGTGCTTTAACGATAGAACAAGCTGTCCACAANNNNNTTAAT

SEQ ID NO: 18784 - protein, 31 aa, Streptococcus agalactiae
  VARIANT 28, 29, 30: Xaa = Any Amino Acid
MANRKETFLIDGMTCASCALTIEQAVHXXXN

SEQ ID NO: 18785 - protein, 308 aa, Streptococcus agalactiae
ATGATGCAAGAGTACTTTGGTATTGGTCTTGATAGTAGCAGCCGCTGTTACCACTATCATATAAATTGGATATTGTCGCTTTAAAATGTGCTGTTTGTCAAAAATATTATGCTTGTTATAAATGTCATGATGCACTCGAGGAGCATTGTTTTGCAGCAACAAAATCTGATGAAACGTTTCCTGTCTTATGCGGTTCTTGTCGTCAGATGTTGACATTAAAAGAGTATAAAACTGGTTTTTGTCCTTATTGTCGTATGCTTTTTAATCCAAATTGTCAACGCCATGATTCTATTTATTTTTCGAAGGAG

SEQ ID NO: 18786 - protein, 103 aa, Streptococcus agalactiae
  VARIANT 21: Xaa = Any Amino Acid
MMQEYFGIGLDSSSRCYHYHXKLDIVALKCAVCQKYYACYKCHDALEEHCFAATKSDETFPVLCGSCRQMLTLKEYKTGFCPYCRMLFNPNCQRHDSIYFSKE

SEQ ID NO: 18787 - protein, 532 aa, Streptococcus agalactiae
ATGTTTCACACAAAAAGCCTAATCCAGATGGCTATGATGGCTACTTTATTGGTGGTACTTGGTTTCATTCCTGCTCTACCACTTGGTTTCATTCCGGTCCCTATCGTCTTACAAAACCTAGGGGTTATGATGGCTGGTGTTATTTTGGGCGGAAGAAAAGGGAGTTTATCTATTTTGCTCTTCTTTCTTGTCGGTTTAGTTATTCCTGTATTCTCAGGTTTACGTTCGACTATACCTGTATTGACAGGACCACAGCTGGTATGTTATTGCTTGGTTGTTGTTCCTTGCTTATCTCATATGGGTAAAATTAGTAAATAAAAAGAATTTTATAGCTATTTTCCTTATTGTATGGCTAGCAGGGGTCCTTTTTGTAGATGTAGCAGGAGCAGTTTGGCTGGCATCTTATACGAACATCCCATTAGATAAATCACTTCTTCAAAACTTAGTATTTATCCCAGGAGATACAATAAAAGCCATTATAGCTGCTGTTGTTGCTGTTAAATATAAAGATAGTTTTTTCTTGACTGAAAAA

SEQ ID NO: 18788 - protein, 179 aa, Streptococcus agalactiae
  VARIANT 94: Xaa = Any Amino Acid
MFHTKSLIQMAMMATLLVVLGFIPALPLGFIPVPIVLQNLGVMMAGVILGGRKGSLSILLFFLVGLVIPVFSGLRSTIPVLTGPTAGYVIAWLXVPLLISYGVKLVNKKNFIAIFLIVWLAGVLFVDVAGAVWLASYTNIPLDKSLLQNLVFIPGDTIKAIIAAVVAVKYKDSFFLTEK

SEQ ID NO: 18789 - protein, 213 aa, Streptococcus agalactiae
ATGAAATTAACAACGTTAGGTTGTTGGGGTGGTTATCCTTATAAAGATGGAGGAACCACAAGTTTTCTATTAACTGGAGAAAATAATTTTCACTTATTAATAGATGCGGGAAGTCGTTCAATCAATGAGCTAGAAAAAGAAATAAGCCCGTTGGATTTGGATGCAGTTATCATCAGTCATTATCATCCAGATCATGTAGNNNNNTTAATTAAT

SEQ ID NO: 18790 - protein, 71 aa, Streptococcus agalactiae
  VARIANT 67, 68: Xaa = Any Amino Acid
MKLTTLGCWGGYPYKDGGTTSFLLTGENNFHLLIDAGSRSINELEKEISPLDLDAVIISHYHPDHVXXLIN

SEQ ID NO: 18791 - protein, 198 aa, Streptococcus agalactiae
TTGACTAGTAAAGAAGCAGGTGAGATTGCTTATAACGCTAAAGTTAAGAAATTAGTTTTAACACATGTTCCGCAGTTTCCGGGAGAAGGAATAAACCCCGAAAATCATTGAAGAACTTCGACTACAGTCTGAAAAGTATGCAGGTGGCATCTCTGTGATTTTTCTCAGCCACATAAATCTTGGGACTTAGGAAAACTA

SEQ ID NO: 18792 - protein, 67 aa, Streptococcus agalactiae
  VARIANT 37, 53: Xaa = Any Amino Acid
MTSKEAGEIAYNAKVKKLVLTHVPQFPGEGINPENHXZELRLQSEKYAGGISXDFSQPHKSWDLGKL

SEQ ID NO: 18793 - protein, 503 aa, Streptococcus agalactiae
ATGCAGAAATTTACCCAAGAAGAAAAAGAATGGTTTATGAAGAAGCTCTAAAGGAGGCAAAATCCTCCTTAGAGAAAGAAGAAATTCCTATAGGTTGTGTCATTGTAAAAGATGGTCATATTATTGGAAGAGGACATAATGCTCGTGAAGAGTTTAATAAAGCTATTTTACATGCTGAAATCATGGCTATTAACAATGCAAATGAGAAGGTAGGGAATTGGCGCTTATTAGATACTACTTTATTTGTTACTGTAGAACCTTGTGTAATGTGTAGTGGAGCTATTGGCTTAGCTAGAATTCCCCACGTTATATATGGCGCTAAGAATACGAAATTTGGAGCAGCGGGAAGTCTCTATGATATTTTAAGTGATAGCCGACTTAATCATAGAGTTGAGGTTGAAACCGGCATTTTAGAAGATCAATGCGCTAAAATAATGCAGGATTTCTTTCGAAAAGGACGACAACGCAAGAAAGAAGCTAAACTAAGTGAAAAAACTAAGATT

SEQ ID NO: 18794 - protein, 168 aa, Streptococcus agalactiae
  VARIANT 14: Xaa = Any Amino Acid
MQKFTQEEKEWFMXEALKEAKSSLEKEEIPIGCVIVKDGHIIGRGHNAREEFNKAILHAEIMAINNANEKVGNWRLLDTTLFVTVEPCVMCSGAIGLARIPHVIYGAKNTKFGAAGSLYDILSDSRLNHRVEVETGILEDQCAKIMQDFFRKGRQRKKEAKLSEKTKI

SEQ ID NO: 18795 - protein, 132 aa, Streptococcus agalactiae; identical to SEQ ID NO: 9587

SEQ ID NO: 18796 - protein, 44 aa, Streptococcus agalactiae; identical to SEQ ID NO: 9588

SEQ ID NO: 18797 - protein, 1347 aa, Streptococcus agalactiae; identical to SEQ ID NO: 9589

SEQ ID NO: 18798 - protein, 449 aa, Streptococcus agalactiae; identical to SEQ ID NO: 824

SEQ ID NO: 18799 - protein, 525 aa, Streptococcus agalactiae
ATGGAAAAGAAATTATTAAGAAAAGAAGTTTTGATAACCTTAAAATCTCAACCTCAAGCTTACAAATCAGAAGTTGACTGTAAACTTTTAGAGGCTTTTATAAAAACTAAAGCTTATCAAAATAGTTGTGTAATTGCTACTTACCTATCTTTTGACTACGAATACAATACACAACTTCTTATTAAACAAGCTTTATGTGATGGCAAACGTGTCCTTGTTCCCAAAACTTATCCAAAAGGTAAAATGATTTTTGTGGACTATCAAAAAGATAACTTGAGGGCAACACCGTTTGGCTTATTAGAACCTGTTAATGATAGAGCTGTTGAAAAAGCTAGTATAGACTTAATTCATGTGCCCGGACTTATCTTTAACAATAAAGGTTTTCGTATAGGTTATGGTGCAGGTTATTTTGATCGCTATTTGAGTGATTTTGAAGGTGATACTATTAGTACTATTTATAGGTGTCAGAGACAGGATTTTGTAGAAGAGAAGCATGATGTAGCGGTTAAGGAGGTATTATGTCTA

SEQ ID NO: 18800 - protein, 175 aa, Streptococcus agalactiae
MEKKLLRKEVLITLKSQPQAYKSEVDCKLLEAFIKTKAYQNSCVIATYLSFDYEYNTQLLIKQALCDGKRVLVPKTYPKGKMIFVDYQKDNLRATPFGLLEPVNDRAVEKASIDLIHVPGLIFNNKGFRIGYGAGYFDRYLSDFEGDTISTIYRCQRQDFVEEKHDVAVKEVLCL

SEQ ID NO: 18801 - protein, 675 aa, Streptococcus agalactiae
ATGTCTATGAAGAAGTTCGCTAAAGAGTATCCGACGACAGTACTCTTGGTCAGTCTGACAACCCTTGTTTTTTTATTGATGCAACTAACTTATGGAAGTCAAGCGGAGTCTAGCCAAGTTATTTTTCAATTTGGTGGAATACAAGGTGATTATCTAAAAGCATATCCAACAAATCTATGGAGACTAATAAGTCCTATCTTTGTTCATATTGGTTGGGAACATTTTTTATTAAATGGTTTAGCTCTGTATTTTGTAGGACAAATGGGGGAAAGTATTTGGGGAAGTTTGAGATTTCTAATTCTCTATATTTTATCTGGCTTAATGGGTAATATTTTTACGCTATTTTTTACTCCACACGTGGTGGCAGCAGGAGCCTCAACGTCTTTATTTGGTGTTTTTTCTGCTATAGCAATCACAGGTTATTTTGGAAAAAATCCTTATTTAAAACAAGTTGGAAAATCATATCAAGTGATGATCTTGTTAAATTTATTTTTTAATATCTTCACACCCGGGGTGAGTTTAGCAGGTCATGTTGGCGGTTTAGTTGGTGGAGTATTGGTGGCTATTTTTTTGACAAAACAAAATGGTTCTTTATTATTTAAAACTTGGCAAAGTATTTTAGCTTTAATGATATTCATTATTGTATCGATCAGCTTAATAGGTCTATCGTTGGTA

SEQ ID NO: 18802 - protein, 225 aa, Streptococcus agalactiae
MSMKKFAKEYPTTVLLVSLTTLVFLLMQLTYGSQAESSQVIFQFGGIQGDYLKAYPTNLWRLISPIFVHIGWEHFLLNGLALYFVGQMGESIWGSLRFLILYILSGLMGNIFTLFFTPHVVAAGASTSLFGVFSAIAITGYFGKNPYLKQVGKSYQVMILLNLFFNIFTPGVSLAGHVGGLVGGVLVAIFLTKQNGSLLFKTWQSILALMIFIIVSISLIGLSLV

SEQ ID NO: 18803 - protein, 1040 aa, Streptococcus agalactiae
GTGAACAGAAAAATTATTGGCTTAACTCTACTATCTTTATCTGTACTAACATTAACAGCATGTGGTAATCGTTCAGATAAGTCTGCAAATAAATCAGATATCAAAGTTGCGATGGTAACTAATCAAGGTGGAGTAGACGATAAATCGTTTAATCAATCAGCTTGGGAAGGGCTACAAAAGTGGGGGAAAAAGAAGGGGTTGACAAAAGGTAATGGCTTTGACTATTTCCAGTCATCTAATGAATCAGATCATGCTAATAACCTTGATACGGCAGCCTCTAGTGGCTATAATTTAATTTTTGGTATTGGATTTGGTCTTCATGATACTATGAAAAAGTATCAGAAAATAATAAAGATGTTAAATACGTTATTGTAGATGATATCATTAAAGGTAAAGAAAATGTAGCTAGTGTTACTTTTGCAGACAATGAAGCTGCTTACTTAGCTGGAGTTGCTGCAGCTAAGACAACTAAGACAAAAACAGTTGGTTTTATCGGAGGGATGGAAGGCGTCGTTGTTAAGCGATTTGAAGCAGGATTTAAGGCTGGAGTAAAATCAATTGATCCGGCTATTAAAGTTGCGGTATCTTATGCAGGCTCATTTACAGATGCAGCTAAAGGTAAAACGATTGCTGCCACACAGTATGCAACAGGTGTTGATGTTATTTACCAGGCTGCTGGTGGTACAGGAGCAGGAATTTTTAGTGAGGCTAAAACTGAAAATGAGACCCGCAAGGAATCTAACAAAGTCTGGGTAATTGGTGTTGATAGAGATCAAAGTCAAGAAGGCAATTATGTTTCAAAGGATGGTAAGAAAGCAAACTTTGTTCTGGCATCTACTATAAAAGAGGTGGGGAAATCTCTCCAATCTGTAGCAGAATTAACAGAGAAAAAACAATATCCAGGAGGGAAAGTAACAGTTTTTGGTCTAAAGGATAGTGGTGTAGATATTAAAGAGCATCAATTGTCTAGTGAGGGATCTGTCGCTGTCAAAAAAGCTAAAGAGGATATTGTTTCAGGGAAAATACAAGTTCCTATGAAA

SEQ ID NO: 18804 - protein, 347 aa, Streptococcus agalactiae; identical to SEQ ID NO: 9596

SEQ ID NO: 18805 - protein, 897 aa, Streptococcus agalactiae
ATGAAAGTCAGAAAAGCAGTTATCCCTGCCGCTGGTTTAGGAACACGTTTTTTACCTGCTACTAAAGCTTTAGCTAAAGAAATGCTTCCAATCGTTGATAAACCAACTATTCAATTTATTGTTGAAGAAGCACTAAAATCTGGAATTGAAGATATTTTAGTTGTAACTGGTAAATCAAAACGTTCTATAGAAGACCACTTTGATTCAAATTTTGAATTAGAATATAACCTAAAAGAGAAAGGGAAAAACGAACTTCTCAAACTTGTTGATGAAACAACTGGCATTCGACTCCATTTTATTCGACAAAGTCATCCTCGTGGGCTTGGAGATGCTGTGCTACAAGCAAAAGCCTTCGTTGGTAATGAACCTTTTGTTGTTATGCTAGGTGATGATCTAATGGATATTACCAATAATAAAGTTATTCCTCTCACCAAACAATTAATTAATGACTTTGAAGCTACTCATGCATCAACAATTGCTGTTATGGAAGTTCCACATGAAGATGTTTCTGCTTACGGTGTTATCGCTCCACAAGGAGAAGGAGTTAATGGTCTATATAGCGTTAACACTTTCGTTGAAAAACCTTCTCCCGAAGAGGCTCCAAGTAATTTGGCAATCATTGGTCGCTACTTGTTAACTCCAGAAATTTTTAATATTTTAGAAACTCAAAAACCTGGTGCAGGAAATGAAATTCAACTAACCGATGCTATCGATACTTTAAATAAAACGCAACGTGTTTTTGCTAGAAAATTTACAGGAGACCGTTATGACGTTGGTGATAAGTTTGGTTTTATGAAAACATCTATTGATTATGCTCTTCAACACCCACAAGTTAAAGATGACTTGAAGAAATATATCATTGATTTAGGAAAATCTCTAGAAAAAACATCTAAGAAG

SEQ ID NO: 18806 - protein, 299 aa, Streptococcus agalactiae; identical to SEQ ID NO: 5216

SEQ ID NO: 18807 - protein, 780 aa, Streptococcus agalactiae
ATGAAAGTCAGAAAAGCAGTTATCCCTGCCGCTGGTTTAGGAACACGTTTTTTACCTGCTACTAAAGCTTTAGCTAAAGAAATGCTTCCAATCGTTGATAAACCAACTATTCAATTTATTGTTGAAGAAGCACTAAAATCTGGAATTGAAGATATTTTAGTTGTAACTGGTAAATCAAAACGTTCTATAGAAGACCACTTTGATTCAAATTTTGAATTAGAATATAACCTAAAAGAGAAAGGGAAAAACGAACTTCTCAAACTTGTTGATGAAACAACTGGCATTCGACTCCATTTTATTCGACAAAGTCATCCTCGTGGGCTTGGAGATGCTGTGCTACAAGCAAAAGCCTTCGTTGGTAATGAACCTTTTGTTGTTATGCTAGGTGATGATCTAATGGATATTACCAATAATAAAGTTATTCCTCTCACCAAACAATTAATTAATGACTTTGAAGCTACTCATGCATCAACAATTGCTGTTATGGAAGTTCCACATGAAGATGTTTCTGCTTACGGTGTTATCGCTCCACAAGGAGAAGGAGTTAATGGTCTATATAGCGTTAACACTTTCGTTGAAAAACCTTCTCCCGAAGAGGCTCCAAGTAATTTGGCAATCATTGGTCGCTACTTGTTAACTCCAGAAATTTTTAATATTTTAGAAACTCAAAAACCTGGTGCAGGAAATGAAATTCAACTAACCGATGCTATCGATACTTTAAATAAAACGCAACGTGTTTTTGCTAGAAAATTTACAGGAGACCGTTATGACGTTNNNNNT

SEQ ID NO: 18808 - protein, 260 aa, Streptococcus agalactiae
  VARIANT 259, 260: Xaa = Any Amino Acid
MKVRKAVIPAAGLGTRFLPATKALAKEMLPIVDKPTIQFIVEEALKSGIEDILVVTGKSKRSIEDHFDSNFELEYNLKEKGKNELLKLVDETTGIRLHFIRQSHPRGLGDAVLQAKAFVGNEPFVVMLGDDLMDITNNKVIPLTKQLINDFEATHASTIAVMEVPHEDVSAYGVIAPQGEGVNGLYSVNTFVEKPSPEEAPSNLAIIGRYLLTPEIFNILETQKPGAGNEIQLTDAIDTLNKTQRVFARKFTGDRYDVXX

SEQ ID NO: 18809 - protein, 1014 aa, Streptococcus agalactiae
ATGACAAAACAAAAAATTGCCGTTCTTGGACCTGGTTCATGGGGGACTGCTCTTGCACAAGTATTAAATGACAATGGACATGAGGTACGCTTATGGGGAAACGTGGTTGAACAAATAGAAGAGATTAATACTAACCATACTAATCAACGTTACTTCAAAGATATTACCTTAGATTCCAAGATAAAAGCCTACACTAATCTTGAGGAAGCGATTAATAATGTTGACAGCATTCTATTCGTCGTCCCAACTAAAGTTACAAGACTTGTTGCTAAACAAGTGGCTAATCTTTTAAAGCATAAAGTTGTTATTATGCATGCTTCTAAGGGACTAGAACCTGGCACTCATGAACGACTTTCTACAATTTTAGAAGAAGAAATCTCTGAACAATATCGTAGTGATATCGTTGTTGTTTCAGGTCCCAGTCACGCTGAAGAAGCCATCGTTCGTGATATTACTTTGATTACTGCTGCTTCAAAAGATATTGAAGCAGCTAAGTATGTCCAAAAATTGTTTAGTAATCACTATTTTAGACTTTATACTAACACTGATGTCGTAGGAGTGGAAACAGCTGGTGCTCTAAAAAATATTATTGCTGTTGGTGCTGGAGCACTACACGGTCTTGGTTATGGTGATAATGCTAAAGCAGCTATTATTACGCGTGGTTTAGCTGAGATAACACGCCTTGGTGTACAATTAGGAGCCGACCCTCTCACTTTCAGTGGTTTATCCGGAGTTGGAGATTTAATTGTGACTGGTACATCTGTTCATTCTCGCAACTGGAGAGCGGGAGATGCTTTAGGACGTGGTGAGAAACTTGAAGATATTGAAAAAAATATGGGGATGGTTATTGAAGGTATCTCGACAACTAAGGTTGCTTACGAAATCGCCCAAAACTTAAATGTTTACATGCCCATTACAGAAGCTATTTATAAATCAATATATGAAGGGGCTAATATCAAAGATAGCATTTTAGATATGATGTCCAATGAATTTCGTTCAGAGAATGAATGGCAC

SEQ ID NO: 18810 - protein, 338 aa, Streptococcus agalactiae
MTKQKIAVLGPGSWGTALAQVLNDNGHEVRLWGNVVEQIEEINTNHTNQRYFKDITLDSKIKAYTNLEEAINNVDSILFVVPTKVTRLVAKQVANLLKHKVVIMHASKGLEPGTHERLSTILEEEISEQYRSDIVVVSGPSHAEEAIVRDITLITAASKDIEAAKYVQKLFSNHYFRLYTNTDVVGVETAGALKNIIAVGAGALHGLGYGDNAKAAIITRGLAEITRLGVQLGADPLTFSGLSGVGDLIVTGTSVHSRNWRAGDALGRGEKLEDIEKNMGMVIEGISTTKVAYEIAQNLNVYMPITEAIYKSIYEGANIKDSILDMMSNEFRSENEWH

SEQ ID NO: 18811 - protein, 327 aa, Streptococcus agalactiae
TTGAAAAAAACCTATCGGGTAAAAAGTGATAAGGATTTTCAAATGATTTTCAGCAGAGGTAAAAATGTTGCTAATCGAAAATTTGTTATCTACTATTTAGAAAAAGAACAAAAACACTTTCGTGTGGGAATCTCTGTTAGTAAGAAATTAGGAAATGCTGTTGTTCGTAACGCTATTAAAAGAAAAATTAGGCATGTTTTACTCTCTCAGAAAACAGCCCTGCAAGATTATGATTTTGTCGTGATTGCGCGTAAAGGTGTAGAGGAATTGGACTATCAAGCATTAGAAAAAAATCTTATACACGTTTTAAAAATAGCAGGACTCATC

SEQ ID NO: 18812 - protein, 109 aa, Streptococcus agalactiae; identical to SEQ ID NO: 832

SEQ ID NO: 18813 - protein, 813 aa, Streptococcus agalactiae
TTGAAGAAAAAACTTAAAACATTTAGCTTAATATTGCTGACAGGTTCTTTATTGGTTGCTTGCGGACGAGGAGAAGTATCTAGTCATTCAGCTACATTATGGGAGCAAATAGTTTATGCATTTGCTAAATCAATACAATGGCTCTCCTTTAACCATTCAATTGGTTTGGGAATAATCTTATTCACTCTAATAATCAGAGCGATTATGATGCCGCTTTATAATATGCAAATGAAATCCAGCCAAAAGATGCAGGAAATTCAGCCAAGGCTCAAGGAATTACAAAAAAAATATCCAGGGAAAGATCCTGATAGCCGTTTAAAGCTAAATGATGAAATGCAATCTATGTATAAAGCTGAGGGAGTTAACCCATATGCAAGTGTATTACCTCTTCTAATTCAGTTACCTGTCCTATGGGCTCTTTTCCAAGCTTTGACTAGGGTTTCTTTCTTAAAAGTAGGAACATTTTTGAGCCTAGAATTATCACAGCCGGACCCATATTATATTTTACCTGTACTGGCGGCCTTATTTACCTTTTTATCAACTTGGTTAACTAACAAAGCAGCTGTTGAAAAAAATATTGCTTTAACTCTTATGACTTATGTTATGCCGCTTATCATATTGGTAACAAGTTTTAACTTTGCTAGTGGTGTTGTTTTATACTGGACGGTGTCTAATGCTTTTCAAGTATTTCAAATTCTATTATTGAACAACCCATACAAGATTATAAAGGTTCGAGAAGAAGCAGTAAGAGTGGCACACGAAAAAGAACAAAGAGTTAAACGTGCTAAGAGAAAAGCAAGTAAGAAAAGAAAG

SEQ ID NO: 18814 - protein, 271 aa, Streptococcus agalactiae
MKKKLKTFSLILLTGSLLVACGRGEVSSHSATLWEQIVYAFAKSIQWLSFNHSIGLGIILFTLIIRAIMMPLYNMQMKSSQKMQEIQPRLKELQKKYPGKDPDSRLKLNDEMQSMYKAEGVNPYASVLPLLIQLPVLWALFQALTRVSFLKVGTFLSLELSQPDPYYILPVLAALFTFLSTWLTNKAAVEKNIALTLMTYVMPLIILVTSFNFASGVVLYWTVSNAFQVFQILLLNNPYKIIKVREEAVRVAHEKEQRVKRAKRKASKKRK

SEQ ID NO: 18815 - protein, 819 aa, Streptococcus agalactiae
ATGGTATTATTTACAGGAGCGACTGTAGAAGAAGCTATTGAAAAAGGACTACAAGAGTTAAACATTTCACGATTGAGGGCACATATAAAAGTTGTATCACGTGAGAAAAAAGGTTTTTTGGGCTTTGGTAAAAAGCCAGCAAAAGTTGAAATAGAAGGTATCACCGACGAAGTAACTGATATTAATGAATCGGTAGCGTTAAAAAATATTAAGAATGTACCGTCTAGCGTAGATGTGGTGGAAGAATATATAGAGGAGGTTGATGAAACACTTGAAAAAGAAGACGTATCACAACCAGAACTTCCAAAAATTGATGATAAAAACGTTGTAATTACAAGTGAAGCTATTGAAAAAATTGACCTACTTCCTAATATTGAAGTAGCAGCAGCTCAGGTGACTAAATACGTTGAAAATATCATCTATGAGATGGATTTAGATGCTACAATAGAAACTACGACAAGTAAGCGACAAATAAATCTCCAAATAGAAACGCCAGAAGCTGGACGCATCATTGGTTATCATGGGAAAGTATTAAAATCGTTGCAGTTGTTAGCACAAAATTATCTTCATGACCGCTTTTCTAAGAGTTTTTCAGTATCCATTAATGTCCATGACTACGTTGAGCATCGTACAGAAACTTTAATTGATTTTTCTAAAAAAATAGCTAGACGTGTTTTAGAGACTAATGAACCTTACCATATGGATCCTATGAGTAACAGTGAGCGAAAAACTGTTCATAAAACAATTGCAACTATAGAGGGTGTTGAAAGTTATTCTGAAGGTAACGATCCTAATAGATTTGTAGTAGTTACTAAGAAG

SEQ ID NO: 18816 - protein, 273 aa, Streptococcus agalactiae
MVLFTGATVEEAIEKGLQELNISRLRAHIKVVSREKKGFLGFGKKPAKVEIEGITDEVTDINESVALKNIKNVPSSVDVVEEYIEEVDETLEKEDVSQPELPKIDDKNVVITSEAIEKIDLLPNIEVAAAQVTKYVENIIYEMDLDATIETTTSKRQINLQIETPEAGRIIGYHGKVLKSLQLLAQNYLHDRFSKSFSVSINVHDYVEHRTETLIDFSKKIARRVLETNEPYHMDPMSNSERKTVHKTIATIEGVESYSEGNDPNRFVVVTKK

SEQ ID NO: 18817 - protein, 531 aa, Streptococcus agalactiae
ATGAGATTACCTAAAGAAGGCGACTTTATTACAATTCAAAGTTACAAACATGATGGTAGTTTACACCGGACTTGGCGTGACACCATGGTATTAAAAACAACCGAAAATGCCCTCATTGGTGTTAATGATCATACTTTAGTAACAGAAAATGATGGTCGACGCTGGGTGACACGAGAGCCTGCAATAGTATACTTTCATAAAAAATACTGGTTTAACATTATCGCTATGATACGTGAAACTGGTGTCTCCTACTATTGTAATCTAGCAAGTCCGTATATCTTGGATCCTGAAGCACTCAAGTACATCGACTACGACCTTGATGTCAAAGTATTTGCAGATGGTGAAAAAAGACTACTAGATGTGGACGAATATGAACAGCATAAAGCTCAGATGAACTATCCTACCGATATTGATTATATATTAAAGGAAAATGTAAAAATATTGGTAGAATGGATAAATGAGAATAAAGGCCCCTTTTCATCATCATATATCAATATCTGGTATAAACGGTACCTTGAATTGAAAAAGCGC

SEQ ID NO: 18818 - protein, 177 aa, Streptococcus agalactiae; identical to SEQ ID NO: 838

SEQ ID NO: 18819 - protein, 773 aa, Streptococcus agalactiae
ATGAAAATAACCAAAATCGAAAAGAAAAAAAGACTTTACACTCTAGAGCTAGACAATACCGAAAATTTATATATAACAGAAGATACTATCGTTCATTTTATGTTAAGTAAAGGGATGATAGTTAATGCCGAGAAACTTGAAAATATTAAAAAATTTGCCCAATATCATATGGTAAAAATCTAGGTCTTTATTATATTTCTTTCAAGCAGAGAACCGAGAAAGAACTTATTAAATATCTTCAACAACATGATATTGATTCTAAAATTATTCCACAAATTATTGATAATCTAAAAAGTGAGAATTGGATAAACGATAAAAACTACGTGCAATCTTTCATACAGCAAAATCTAAATACTGGCGATAAGGGGCCATACGTGATAAAACAAAAATTATTGCAAAAAGGTATCAAAAGTAAAATAATTGAATCTGAACTTCAAGCTATAAATTTTCAAGACTTAGCATCCAAAATAAGCCAAAAACTCTATAAAAAATATCAAAACAAACTTCCACTAAAAGCATTAAAAGATAAATTGATGCAGAGCTTAACTACAAAAGGATTTGATTATCAGATAGCGCATACCGTAATTCAAAACCTTGAAATTGAAAAAGATCAAGAACTTGAAGAAGACCTCATTTATAAAGAATTAGATAAACAATACCAAAAATTCTCAAAAAAATATGACCAGTATGAATTAAAGCAACGTATAATCAATGCCTTAATGCGTAAAGGATACCAGTACGAAGATATCAAAAGTGCTTTAAGAGAATATTTA

SEQ ID NO: 18820 - protein, 258 aa, Streptococcus agalactiae
MKITKIEKKKRLYTLELDNTENLYITEDTIVHFMLSKGMIVNAEKLENIKKFAQLSYGKNLGLYYISFKQRTEKELIKYLQQHDIDSKIIPQIIDNLKSENWINDKNYVQSFIQQNLNTGDKGPYVIKQKLLQKGIKSKIIESELQAINFQDLASKISQKLYKKYQNKLPLKALKDKLMQSLTTKGFDYQIAHTVIQNLEIEKDQELEEDLIYKELDKQYQKFSKKYDQYELKQRIINALMRKGYQYEDIKSALREYL

SEQ ID NO: 18821 - protein, 1353 aa, Streptococcus agalactiae
ATGAATGTGGTTTTAAAACAGCGAATTCCTTTAAAAATTAAACGAATGGGAATTAATGGTGAAGGAATAGGTTTTTATAAAAAAACACTAATCTTTGTTCCAGGGGCCCTCAAGGGAGAAGAGGTGTTTTGTCAGATTTCTTCTGTTAGACGTAATTTTGCAGAAGCTAAACTGTTAAAGATAAATAAAAAGTCTAAAAATAGGGTAGATCCCGCTTGTTCTATTTATAAAGAATGTGGGGGATGCCAAATAATGCACCTTCAATATGATAAGCAGCTAGAGTTTAAAACGGATGTTATTCGACAGGCTCTAATGAAATTTAAACCAGAGGGATATGAGAATTATGAAATCCGTAAAACGATAGGTATGCCAGAACCTGAACACTATCGTGCTAAATTACAATTTCAAGTGCGTTCGTTTGGAGGGAATGTAAAGGCAGGTTTATATGCACAAGGGACACATCGATTGATTGATATCAAAGATTGTTTAGTGCAAGATAGCCTTACTCAGGAGATGATAAATCGAGTTGCAGAACTTTTAGGAAAATATAAATTGCCTATTTATAATGAACGTAAAATAGCTGGTGTCCGTACTGTTATGATTCGACGAGCACAAGCGAGTGGAGAGGTTCAACTGATTTTTATCACAAGTAAAAGACTTGATTTTGATGATGTTGTTATTGAATTAGTTCGAGAGTTTCCTGAGTTAAAGACAGTTGCTGTAAATATCAACGCTAGTAAAACAAGTGATATCTATGGTCAAATAACAGAAGTTATTTGGGGTCAAGAATCCATCAATGAAGAAGTATTAGATTATGGTTTTTCGTTATCACCACGTGCTTTTTATCAACTTAATCCTAAACAAACACAAATTTTATATAGTGAGGCAGTTAAGGCCTTAGATGTGAAGGATGATGATGATTTAATTGACGCTTATTGTGGAGTAGGAACGATTGGACTTGCTTTTGCTGGAAAAGTTAAAAGTGTTCGTGGAATGGATATTATCCCTGAGGCTATTCAGGATGCTAAAGAGAACGCACTTCATATGGGTTTTACTAATACACATTACGAAGCTGGAAAGGCAGAGGATATTATCCCTAGGTGGTATAGTGAGGGATTTCGCGCTAATGCGTTAATCGTGGATCCTCCTCGCACAGGTTTAGATGATAAATTGCTAAATACTATACTAAAAATGCCTCCAGAAAAAATGGTTTACGTTTCTTGTAATACATCTACGCTTGCTAGAGACTTAGTAACATTAACAAAAGTATACCATGTTCACTACATCCAATCTGTTGACATGTTTCCACATACAGCAAGGACCGAGGCTGTAGTGAAACTACAACGTAAGGTA

SEQ ID NO: 18822 - protein, 451 aa, Streptococcus agalactiae
MNVVLKQRIPLKIKRMGINGEGIGFYKKTLIFVPGALKGEEVFCQISSVRRNFAEAKLLKINKKSKNRVDPACSIYKECGGCQIMHLQYDKQLEFKTDVIRQALMKFKPEGYENYEIRKTIGMPEPEHYRAKLQFQVRSFGGNVKAGLYAQGTHRLIDIKDCLVQDSLTQEMINRVAELLGKYKLPIYNERKIAGVRTVMIRRAQASGEVQLIFITSKRLDFDDVVIELVREFPELKTVAVNINASKTSDIYGQITEVIWGQESINEEVLDYGFSLSPRAFYQLNPKQTQILYSEAVKALDVKDDDDLIDAYCGVGTIGLAFAGKVKSVRGMDIIPEAIQDAKENALHMGFTNTHYEAGKAEDIIPRWYSEGFRANALIVDPPRTGLDDKLLNTILKMPPEKMVYVSCNTSTLARDLVTLTKVYHVHYIQSVDMFPHTARTEAVVKLQRKV

SEQ ID NO: 18823 - protein, 762 aa, Streptococcus agalactiae
ATGATAATAAATTCATTCGATAATAGTAGAAAAGCGATTATTAATCCTGAAGATATTAATTCACCAATAAAAGGTTTTCCAAAGACTGTTATTACCTGTTTTGCGCGGGAGACTTTCAATCGTATTTTAGAAGAATTGCCTCATCGTGAAATTGCTAGAACTAGTGTAGCAAACTTAGAAATTCCCATTTATGAATTAGAATTTAAAGGACAAAAGATTGGCTTTTTCAATGCTTATGTTGGTGCTTCAGCTTGCGTAGCAATCTTGGAAGATATTATAGTGTTTGGAATGGAAAATTTAATTGTTTTTGGAACATGTGGCGTCCTTGATTCGTCAATTGAGGAGACATCCATTATTATTCCAAGAAGTGCTATTAGGGATGAAGGGACATCATTTCATTATTCGGAAGCAAGTTCTGAAATCGCAGTAAACACAAAATTTCATGAAGAGTTTAAATCTTTTTTAGATCGTCAAGCTGTTTCTTACACTGAAGGAAAAGTTTGGACAACGGATGGTATTTACCGTGAGACAGTTGATAAAATGTTGGAACATAAACGGAATGGAGCAATCTGTGTGGATATGGAGTGTTCAGCAATTGCAGCTTTATCTAAGTTTCGAAATATTAATCATTTTCAATTTTTTTACTCTGCGGATAATTTAGATGCAGAAGTATGGGAAGCAAGATCTTTAGGAAATAGTGAGGATTTAGAAAAGAAAGATAAAATTGCTTATATTGCCATGGAGTTTGCTATAGAGACTTTT

SEQ ID NO: 18824 - protein, 254 aa, Streptococcus agalactiae; identical to SEQ ID NO: 4858

SEQ ID NO: 18825 - protein, 426 aa, Streptococcus agalactiae
ATGTGGAATGTAAAAACTTTTGATAATTTAACTACACATGAGTTGTTTCAAATATATAAATTAAGAGTATCTGTATTTGTGGTTGAACAAGATTGTCCTTATCAAGAGGTTGATGATAAAGATTTGATTTGTTTGCATGGGATGAATTGGGTAGATGGTCAATTGGCAGCTTATTATAGATTGATACCAGAAGATGATAAGGTGCATTTGGGACGTGTGATTGTTAATCCAGACTTTAGAAAAAAGGGATTAGGAAATCAATTAGTGGAACATGCGATTAAATTTAGCGAGGCAAATTACCCTAATAAACCTATTTATGCTCAGGCCCAAGCTTATTTACAAGATTTTTATCAATCTTTCGGATTTCAACCTGTCTCAGAAATCTATCTAGAAGATAATATTCCTCATCTTGATATGGTTTTATCA

SEQ ID NO: 18826 - protein, 142 aa, Streptococcus agalactiae
MWNVKTFDNLTTHELFQIYKLRVSVFVVEQDCPYQEVDDKDLICLHGMNWVDGQLAAYYRLIPEDDKVHLGRVIVNPDFRKKGLGNQLVEHAIKFSEANYPNKPIYAQAQAYLQDFYQSFGFQPVSEIYLEDNIPHLDMVLS

SEQ ID NO: 18827 - protein, 3698 aa, Streptococcus agalactiae
GTGGATAAACATCACTCAAAAAAGGCTATTTTAAAGTTAACACTTATAACAACTAGTATTTTATTAATGCATAGCAATCAAGTGAATGCAGAGGAGCAAGAATTAAAAAACCAAGAGCAATCACCTGTAATTGCTAATGTTGCTCAACAGCCATCGCCATCGGTAACTACTAATACTGTTGAAAAAACATCTGTAACATCTGCTTCTGCTAGTAATACAGCGAAAGAAATGGGTGATACATCTGTAAAAAATGACAAAACAGAAGATGAATTATTAGAAGAGTTATCTAAAAACCTTGATACGTCTAATTTGGGGGCTGATCTTGAAGAAGAATATCCCTCTAAACCAGAGACAACCAACAATAAAGAAAGCAATGTAGTAACAAATGCTTCAACTGCAATAGCACAGAAGGTTCCCTCAGCATATGAAGAGGTGAAGCCAGAAAGCAAGTCATCACTTGCTGTTCTTGATACATCTAAAATAACAAAATTGCAAGCCATAACCCAAAGAGGAAAGGGAAATGTAGTAGCTATTATTGATACTGGCTTTGATATTAACCATGATATTTTTCGTTTAGATAGCCCAAAAGATGATAAGCACAGCTTTAAAACTAAGGCAGAATTTGAGGAATTAAAAGCAAAACATAATATCACTTATGGGAAATGGGTTAACGATAAGATTGTTTTTGCACATAACTACGCCAACAATACAGAAACGGTGGCTGATATTGCAGCAGCTATGAAAGATGGTTATGGGTCAGAAGCAAAGAATATTTCGCATGGTACACACGTTGCTGGTATTTTTGTAGGTAATAGTAAACGTCCAGCAATCAATGGTCTTCTTTTAGAAGGTGCAGCGCCAAATGCTCAAGTCTTATTAATGCGTATTCCAGATAAAATTGATTCGGACAAATTTGGTGAAGCATATGCTAAAGCAATCACAGACGCTGTTAATCTAGGAGCAAAAACGATTAATATGAGCCTTGGAAAAACAGCAGATTCTTTAATTGCTCTCAATGATAAAGTTAAATTAGCACTTAAATTAGCTTCTGAGAAGGGCGTTGCAGTTGTTGTGGCTGCCGGAAATGAAGGTGCATTTGGTATGGATTATAGCAAACCATTATCAACTAATCCTGACTACGGTACGGTTAATAGTCCAGCTATTTCTGAAGATACTTTGAGTGTTGCTAGCTATGAATCACTTAAAACTATCAGTGAGGTCGTTGAAACAACTATTGAAGGTAAGTTAGTTAAGTTGCCGATTGTGACTTCTAAACCTTTTGACAAAGGTAAGGCCTACGATGTGGTTTATGCCAATTATGGTGCAAAAAAAGACTTTGAAGGTAAGGACTTTAAAGGTAAGATTGCATTAATTGAGCGTGGTGGTGGACTTGATTTTATGACTAAAATCACTCATGCTACAAATGCAGGTGTTGTTGGTATCGTTATTTTTAACGATCAAGAAAAACGTGGAAATTTTCTAATTCCTTACCGTGAATTACCTGTGGGGGTTATTAGTAAAGTAGATGGCGAGCGTATAAAAAATACTTCAAGTCAGTTAACATTTAACCAGAGTTTTGAAGTAGTTGATAGCCAAGGTGGCAATCGTATGCTGGAACAATCAAGTTGGGGCGTGACAGCTGAAGGAGCAATCAAGCCTGATGTAACAGCTTCTGGCTTTGAAATTTATTCTTCAACCTATAATAATCAATACCAAACAATGTCTGGTACAAGTATGGCTTCACCACATGTTGCAGGATTAATGACAATGCTTCAAAGTCATTTGGCTGAGAAATATAAAGGGATGAATTTAGATTCTAAAAAATTGCTAGAATTGTCTAAAAACATCCTCATGAGCTCAGCAACAGCATTATATAGTGAAGAGGATAAGGCGTTTTATTCACCACGTCAGCAAGGTGCAGGTGTAGTTGATGCTGAAAAAGCTATCCAAGCTCAATATTATGTTACTGGAAACGATGGCAAAGCTAAAATTAATCTCAAACGAGTGGGAGATAAATTTGATATCACAGTTACAATTCATAAACTTGTAGAAGGTGTCAAAGAATTGTATTATCAAGCTAATGTAGCAACAGAACAAGTAAATAAAGGTAAATTTGCCCTTAAACCACAAGCCTTGCTAGATACTAATTGGCAGAAAGTAATTCTTCGTGATAAAGAAACACAAGTTCGATTTACTATTGATTCTAGTCAATTTAGTCAGAAATTAAAAGAACAGATGGCAAATGGTTATTTCTTAGAAGGTTTTGTACGTTTTAAAGAAGCCAAGGATAGTAATCAGGAGTTAATGAGTATTCCTTTTGTAGGATTTAATGGTGATTTTGCGAACTTACAAGCACTTGAAACACCGATTTATAAGACGCTTTCTAAAGGTAGTTTCTACTATAAACCAAATGATACAACTCATAAAGACCAATTGGAGTACAATGAATCAGCTCCTTTTGAAAGCAACAACTATACTGCCTTGTTAACACAATCAGCGTCTTGGGGCTATGTTGATTATGTCAAAAATGGTGGGGAGTTAGAATTAGCACCGGAGAGTCCAAAAAGAATTATTTTAGGAACTTTTGAGAATAAGGTTGAGGATAAAACAATTCATCTTTTGGAAAGAGATGCAGCGAATAATCCATATTTTGCCATTTCTCCAAATAAAGATGGAAATAGGGATGAAATCACTCCCCAGGCAACTTTCTTAAGAAATGTTAAGGATATTTCTGCTCAAGTTCTAGATCAAAATGGAAATGTTATTTGGCAAAGTAAGGTTTTACCATCTTATCGTAAAAATTTCCATAATAATCCAAAGCAAAGTGATGGTCATTATCGTATGGATGCCCTTCAGTGGAGTGGTTTAGATAAGGATGGCAAAGTTGTAGCAGATGGTTTTTATACTTATCGTTTACGTTACACACCAGTAGCAGAAGGAGCAAATAGTCAGGAGTCAGACTTTAAAGTTCAAGTAAGTACTAAGTCACCAAATCTTCCTTCACGAGCTCAGTTTGATGAAACTAATCGAACATTAAGCTTAGCCATGCCTAAGGAAAGTAGTTATGTTCCTACATATCGTCTACAATTAGTTTTATCTCATGTTGTAAAAGATGAAGAATATGGAGATGAGACTTCTTACCATTATTTCCATATAGATCAAGAAGGTAAAGTGACACTTCCTAAAACAGTTAAGATAGGAGAGAGTGAGGTTGCAGTAGACCCTAAGACCTTGACACTTGTTGTGGAAGATAAAGCTGGTAATTTCGCAACGGTAAAATTGTCTGACCTCTTGAATAAGGCAGTAGTATCAGAGAAAGAAAACGCTATAGTAATTTCTAACAATTTCAAATATTTTGATAACTGAAAAAAGAACCTATGTTTATTTCTAAAGAAGGAAAAGTAGTAAACAAGAATCTAGAAGAAATAGCATTAGTTAAGCCGCAAACTACAGTTACTACTCAATCATTGTCTAAAGAAATAACTCAATCAGGAAATGAGAAAGTCCTCACTTCTACAAACAATAATAGTAGCAGAGTAGCTAAGATCATATCACCTAAACATAACGGGGATTCTGTTAACCATACCTTACCTAGTACATCAGATAGAGCAACGAATGGTCTATTTGTTGGTACTTTGGCATTGTTATCTAGTTTACTTCTTTACTTGAAACCCAAAAAGACTAAAAATAATAGTAAA

SEQ ID NO: 18828 - protein, 1233 aa, Streptococcus agalactiae
MDKHHSKKAILKLTLITTSILLMHSNQVNAEEQELKNQEQSPVIANVAQQPSPSVTTNTVEKTSVTSASASNTAKEMGDTSVKNDKTEDELLEELSKNLDTSNLGADLEEEYPSKPETTNNKESNVVTNASTAIAQKVPSAYEEVKPESKSSLAVLDTSKITKLQAITQRGKGNVVAIIDTGFDINHDIFRLDSPKDDKHSFKTKAEFEELKAKHNITYGKWVNDKIVFAHNYANNTETVADIAAAMKDGYGSEAKNISHGTHVAGIFVGNSKRPAINGLLLEGAAPNAQVLLMRIPDKIDSDKFGEAYAKAITDAVNLGAKTINMSLGKTADSLIALNDKVKLALKLASEKGVAVVVAAGNEGAFGMDYSKPLSTNPDYGTVNSPAISEDTLSVASYESLKTISEVVETTIEGKLVKLPIVTSKPFDKGKAYDVVYANYGAKKDFEGKDFKGKIALIERGGGLDFMTKITHATNAGVVGIVIFNDQEKRGNFLIPYRELPVGVISKVDGERIKNTSSQLTFNQSFEVVDSQGGNRMLEQSSWGVTAEGAIKPDVTASGFEIYSSTYNNQYQTMSGTSMASPHVAGLMTMLQSHLAEKYKGMNLDSKKLLELSKNILMSSATALYSEEDKAFYSPRQQGAGVVDAEKAIQAQYYVTGNDGKAKINLKRVGDKFDITVTIHKLVEGVKELYYQANVATEQVNKGKFALKPQALLDTNWQKVILRDKETQVRFTIDSSQFSQKLKEQMANGYFLEGFVRFKEAKDSNQELMSIPFVGFNGDFANLQALETPIYKTLSKGSFYYKPNDTTHKDQLEYNESAPFESNNYTALLTQSASWGYVDYVKNGGELELAPESPKRIILGTFENKVEDKTIHLLERDAANNPYFAISPNKDGNRDEITPQATFLRNVKDISAQVLDQNGNVIWQSKVLPSYRKNFHNNPKQSDGHYRMDALQWSGLDKDGKVVADGFYTYRLRYTPVAEGANSQESDFKVQVSTKSPNLPSRAQFDETNRTLSLAMPKESSYVPTYRLQLVLSHVVKDEEYGDETSYHYFHIDQEGKVTLPKTVKIGESEVAVDPKTLTLVVEDKAGNFATVKLSDLLNKAVVSEKENAIVISNNFKYFDNLKKEPMFISKEGKVVNKNLEEIALVKPQTTVTTQSLSKEITQSGNEKVLTSTNNNSSRVAKIISPKHNGDSVNHTLPSTSDRATNGLFVGTLALLSSLLLYLKPKKTKNNSK

SEQ ID NO: 18829 - protein, 906 aa, Streptococcus agalactiae
ATGAAAACGATAAAAGATTGGCAAATAAATATTTGCTTAGCGACCTATAATGGTCAAAAATACCTTCGCCAGCAATTAGATAGCATAATACAACAAGGTTATACTGACTGGATTTGTTTAATAAGGGACGATGGATCTACTGATGATACAGTAGCTATTATTAAAGAATATGTTAATAGAGATTCACGTTTTATATTTATTAATTCTAACGATGACAGAAAGTTAGGAAGTCACCGCAGTTTTTACGAGTTGGTTAACTATAAAAAAGCAGATTTTTATGTTTTCTCAGACCAGGATGATGTTTGGAAAGAAAATCGTTTAGAACGTTACCTTGAAGAAGCAGAGAAATTTAACCAAGAATTACCATTGCTTGTTTATTCGAACTGGACTTCTGTAGATGAAAAATTAACAGTATTGAAAGAACATAATCCAGCAACAGTTATTCAAGAACAAATTGCCTTTAACCAAATAAATGGTATGGTTATCATGATGAATCATGAGTTAGCAAAGCTTTGGGAATATCGTCAAATTGGCGCCCATGATTCTTATGTTGGAACTCTGGCTTACGCCGTTGGAAATGTGGCTTATATTTCTGACAGTACAGTCCTTTGGCGTAGACAAGTAGGGGCAGAGTCGCTAAACAATTACGGGAGACAATATGGGGTGGCTACGTTTTGGCAGATGATAAATACTTCTTTTGATCGTGCTTCGCTTATTTTTGCTCAAGTATCCGATAAAATGTCCCTGGAGCGTAAACTCTTCTTTAGTCGTTTTATAGAATTAAAAAATGCCAATCTAATAAGAAGGATTTATCTTTTATCAAAATTAAAACTTCGTCGGAAATCATTGAAAGAAACAGTTGCTATGACTATCCTACTTTTAACAGGTTACGGTAAACCAAAAGCA

SEQ ID NO: 18830 - protein, 302 aa, Streptococcus agalactiae; identical to SEQ ID NO: 14120

SEQ ID NO: 18831 - protein, 1008 aa, Streptococcus agalactiae
ATGCAATCATACTATGATCGTTCTCAATCGCCACTTGACTATGCCTTGTCAGAAAAAGCTTTTCCTATGCGTTCTGTTAATTGGAATAAGCTAAACGATGACAAAGACTTAGAGGTATGGAACAGAGTAACTCAAAATTTCTGGTTACCTGAAAAGATCCCAGTTTCTAATGACCTTAATTCTTGGAGAACATTGGATGCTGATTGGCAGCAACTAATTACTCGGACTTTTACTGGTCTAACCCTATTAGATTCTGTGCAGGCTACAGTTGGTGATATTGCTCAGATTAAGCATTCTCAGACAGATCATGAACAAGTTATTTATGCTAACTTTGCCTTTATGGTAGCTATTCATGCGCGATCGTATGGAACGATTTTTTCAACCTTATGCACTAGCCAACAAATTGAGGAAGCACATGAATGGGTAGTGGATACTGAAAGTCTACAAGCTCGATCACGTATACTTATTCCTTTTTATACTGGTGACGATCCTTTGAAATCTAAAGTTGCTGCAGCCATGATGCCAGGATTTTTGTTATATGGTGGCTTTTACCTTCCTTTTTACCTTTCAGCCAGAGGAAAATTACCAAATACGTCTGATATTATTCGTTTAATTTTACGAGATAAGGTAATTCATAACTATTACAGTGGCTATAAGTATCAACAGAAAGTTGCTAAATTATCTGTAGAAAAGCAAGCCGAAATGAAGACATTTGTCTTTGACCTCCTCTATCAGTTGATTGATTTAGAAAAAGCCTATCTTTACGAACTATATGATGGTTTTGATTTGGCTGAAGATGCAATCAGGTTTAGCATTTACAATGCTGGTAAATTTTTACAAAATTTAGGATATGATTCTCCATTTACAGAAGAAGAGACTCGTATATCTCCTGAGGTTTTTGCACAACTTTCGGCGCGTGCAGATGAAAATCATGATTTCTTCTCAGGAAACGGCTCTTCATATATTATGGGGATTACAGAAGAAACATTGGATGAAGATTGGGAGTTT

SEQ ID NO: 18832 - protein, 336 aa, Streptococcus agalactiae; identical to SEQ ID NO: 854

SEQ ID NO: 18833 - protein, 411 aa, Streptococcus agalactiae
ATGGATAGTACAGTGAAGGTGGTCTATTTTTCATCGAAATCTAACAATACCCATCGTTTTGTTCAAAAGTTGGGTTGTTCTAACCAGCGTATTCCATCAGATGGTAGCAGTATATTGGTTACTGAGGATTATATTTTGATTGTGCCTACTTACGCTGGAGGAGGAGATGATACCAAAGGCGCAGTTCCAAAACAGGTTGTACAGTTTTTAAATGTTCGACAAAATCGGGAACATTGCCAAGGGGTTATTTCTTCTGGAAATACCAATTTTGGTGACACTTATGCCATTGCTGGACCTATTATTGCTCGAAAATTAAATGTTCCTTTGCTTCATCAATTTGAATTACTGGGAACACAAGAAGATGTTACAAGGGTAAAGGAGTTACTTTGCCAATTCACTAGAAAGGATAAA

SEQ ID NO: 18834 - protein, 137 aa, Streptococcus agalactiae
MDSTVKVVYFSSKSNNTHRFVQKLGCSNQRIPSDGSSILVTEDYILIVPTYAGGGDDTKGAVPKQVVQFLNVRQNREHCQGVISSGNTNFGDTYAIAGPIIARKLNVPLLHQFELLGTQEDVTRVKELLCQFTRKDK

SEQ ID NO: 18835 - protein, 2166 aa, Streptococcus agalactiae
ATGACACAATCAGATGCATATCTCTCGTTGAACGCGAAGACACGCTTTAGAGATCGCACAGGTAATTATCATTTTGCTTCGGATAAAGAGGCTGTTGAACAATATATGATAGAACATGTTGAACCTAATACGATGGCGTTCACATCACTAATTGAAAAGCTAGATTATTTGGTTTCTAATAACTACTATGAATCGGACCTTCTAAAACAATATAACCTTGAGTTTATTTGCCAAATTTTTGAGCATGCATACGCTAAGAAATTTACTTTTCTAAATTTTATGGGGGCTTTAAAATTTTATAATGCTTATGCTCTTAAAACAGAAGACAATCGTTATTATTTGGAACACTATGAAGATCGTGTTGTAATGAATGCTCTGTTTTTAGCTGCTGGTGATGAAAAAGCTGCCTATGATCTAGTAGATGACATGCTAGCAAATCGCTTTCAACCAGCAACACCTACCTTTTTAAATGCAGGGAAAAAACGTCGTGGTGAATATATATCTTGCTATTTGTTGCGCATTGAAGACAATATGGAATCTATTTCTCGTGCTATTAGTACAAGCCTTCAGTTATCAAAACGAGGTGGTGGGGTAGCACTTTGCTTAACCAACTTACGGGAATTTGGTGCTCCAATAAAAGGTATTAAAAATCAAGCTACTGGTATTGTACCTGTCATGAAATTACTAGAAGATTCGTTTTCTTACGCCAATCAATTAGGACAAAGACAAGGAGCTGGTGCAGTTTACTTACATGCTCATCACCCTGAAGTGTTAACATTTTTAGATACTAAACGTGAGAATGCCGATGAGAAAATTCGAATTAAATCTCTCTCCCTAGGACTTGTTATTCCTGATATTACTTTTGAATTGGCTAAAGCAAATAAAGATATGGCCTTGTTTTCACCGTATGACATTGAGCGAGTATATGGTAAACCAATGTCTGATATCTCTATCACAGAAGAATATGAAACTTTATTGGCCAATGCGGATATTCGTAAAACCTTTATTAGTGCACGAAAACTATTTCAAACGATAGCAGAGCTTCATTTTGAATCTGGTTATCCTTATATCTTATTTGAAGATACTGTAAATGCTAAAAACCCTCACAAAAAAGAGGGACGAATTGTTATGTCTAATTTATGTTCTGAGATTGCACAAGTTAATACAGCCAGTCAATTTTCAGAAGACCTGACTTTCACTAAGGTTGGACATGATGTTTGTTGTAATTTAGGTTCTATTAATATTGCGCGTGCTATGGATCAAGCGGCGGATTTTGAAAAATTAATTGCTAATAGCATTAGAGCCCTTGATCGTGTATCTCGAACTTCTGATTTAGATAGTGCTCCATCTATTAAAAAAGGTAATGCAGCTAATCATGCTGTTGGTTTAGGTGCTATGAATTTGCATGGATTTTTGGCGACTAACCATATTTATTACGATTCTCAAGAAGCTATTGATTTTACAGATTGCTTCTTTTACGCTATGGCTTATTATGCCTTTAAAGCTTCTAACCATTTAGCAAAAGAAAAAGGAACCTTTGAAGGCTTCTCGGAATCAAGTTATGCTGATGGCAGTTATTTCTATCAATATACCGAACAAAACTTTGAGCCAAAAACACAGCGTGTTAAAAATCTACTAGCTGAGTATGGCCTGACTCTACCAAGCCAAGAGGATTGGAGAAAGCTTGTGCAAAGTATTAAAGAGATAGGATTAGCTAATGCGCATTTATTAGCTGTTGCTCCGACAGGGTCAATCAGTTATCTTTCTTCTTGTACTCCGAGCCTCCAACCAGTTGTATCACCTGTCGAAGTACGCAAGGAAGGAGCACTGGGGAGGGTTTATGTACCTGCTTATAAGATTGATGCAGATAATTATGTCTACTACAAAAAAGGAGCTTATGAAGTGGGACCTGAGGCGATTATCAATATTGCAGCTGCCGCTCAAAAACACGTTGATCAAGCTATTTCGCTAACGCTTTTCATGACAGATCAAGCAACTACGCGAGATTTAAATAAAGCCTATATTCAAGCATTTAAACAAAAATGTGCCTCTATTTATTATGTACGAGTGAGACAGGACATCCTAGAAGGTAGCGAGAGTTATGATGATGATATGCTGGATGATTTCACTTCATCAGACTTAGAAGACTGTCAGTCCTGCATGATT

SEQ ID NO: 18836 - protein, 722 aa, Streptococcus agalactiae
MTQSDAYLSLNAKTRFRDRTGNYHFASDKEAVEQYMIEHVEPNTMAFTSLIEKLDYLVSNNYYESDLLKQYNLEFICQIFEHAYAKKFTFLNFMGALKFYNAYALKTEDNRYYLEHYEDRVVMNALFLAAGDEKAAYDLVDDMLANRFQPATPTFLNAGKKRRGEYISCYLLRIEDNMESISRAISTSLQLSKRGGGVALCLTNLREFGAPIKGIKNQATGIVPVMKLLEDSFSYANQLGQRQGAGAVYLHAHHPEVLTFLDTKRENADEKIRIKSLSLGLVIPDITFELAKANKDMALFSPYDIERVYGKPMSDISITEEYETLLANADIRKTFISARKLFQTIAELHFESGYPYILFEDTVNAKNPHKKEGRIVMSNLCSEIAQVNTASQFSEDLTFTKVGHDVCCNLGSINIARAMDQAADFEKLIANSIRALDRVSRTSDLDSAPSIKKGNAANHAVGLGAMNLHGFLATNHIYYDSQEAIDFTDCFFYAMAYYAFKASNHLAKEKGTFEGFSESSYADGSYFYQYTEQNFEPKTQRVKNLLAEYGLTLPSQEDWRKLVQSIKEIGLANAHLLAVAPTGSISYLSSCTPSLQPVVSPVEVRKEGALGRVYVPAYKIDADNYVYYKKGAYEVGPEAIINIAAAAQKHVDQAISLTLFMTDQATTRDLNKAYIQAFKQKCASIYYVRVRQDILEGSESYDDDMLDDFTSSDLEDCQSCMI

SEQ ID NO: 18837 - protein, 3165 aa, Streptococcus agalactiae
ATGACAAAAAAACATCTTAAAACGCTTGCCTTGGCACTTACTACAGTATCAGTAGTGACATACAGCCAGGAGGTATATGGATTAGAAAGAGAGGAATCGGTCAAACAAGAACAAACCCAGTCAGCTTCAGAAGATGATTGGTTCGAAGAAGATAATGAGAGGAAAACAAATGTTTCTAAAGAGAATTCTACTGTTGATGAAACAGTTAGTGATTTATTTTCTGATGGAAATAATAATAGCTCTAGTTCTAAAACCGAGTCAGTGGTAAGTGACCATAAACAAGTCCCCAAAGCAAAACCAGGGGTTACACAGGAAGCAAGCAATTCTAGTAATGATGCTAGCAAAGTAGAAGTACCAAAACAGGATACAGCTTCAAAAAAGGAAACCATAGAAACATCAACTTGGGAGGCAAAAGATTTCGTAACTAGAGGGGATACTTTAGTAGGTTTTTCAAAATCTGGAATTAATAAGTTATCTCAAACATCACACTTAGTTTTACCAAGTCATGCAGCAGATGGAACTCAATTGACACAAGTAGCTAGCTTTGCTTTTACTCCAGATAAAAAGACGGCCATTGCAGAATATACAAGTAGGCTAGGAGAAAATGGGAAACCGAGTCGTTTAGATATTGATCAGAAGGAAATTATTGATGAGGGAGAAATATTTAATGCTTACCAGTTGACTAAGCTTACTATTCCAAATGGTTATAAGTCTATTGGTCAAGATGCTTTTGTGGACAATAAGAATATTGCTGAGGTTAACCTTCCTGAGAGTCTCGAGACTATTTCAGACTATGCTTTTGCTCACATGTCTTTAAAACAAGTAAAATTACCAGATAACCTAAAGGTCATTGGAGAATTAGCTTTTTTTGATAACCAGATTGGTGGTAAGCTTTACTTGCCACGTCACTTGATAAAATTAGCAGAACGTGCTTTCAAATCTAATCGTATTCAAACAGTTGAATTTTTGGGAAGTAAGCTTAAGGTTATAGGAGAAGCAAGTTTTCAAGATAATAATCTGAGTAATGTTATGCTTCCGGATGGACTTGAAAAAATAGAATCAGAAGCTTTTACAGGAAATCCAGGAGATGAACATTACAACAATCAGGTCGTATTGCGCACACGGACAGGCCAAAATCCACATCAACTTGCGACTGAGAATACTTACGTCAATCCGGACAAATCATTGTGGCGTGCAACGCCTGATATGGATTATACCAAATGGTTAGAGGAAGATTTTACCTATCAAAAAAATAGTGTTACAGGTTTTTCAAATAAAGGCTTACAAAAGGTAAGACGTAATAAAAACTTAGAAATTCCAAAACAACACAATGGTATTACTATTACTGAAATTGGTGATAACGCTTTTCGCAATGTTGATTTTCAAAGTAAAACTTTACGTAAATATGATTTGGAAGAAGTAAAGCTCCCCTCAACTATTCGGAAAATAGGTGCTTTTGCTTTTCAATCTAATAACTTGAAATCCTTCGAAGCAAGTGAAGATTTAGAAGAGATTAAAGAGGGAGCCTTTATGAATAATCGTATTGGAACTCTAGACTTGAAAGACAAACTTATCAAAATAGGTGATGCTGCTTTCCATATTAATCATATTTATGCCATTGTTCTTCCAGAATCTGTACAAGAAATAGGACGTTCAGCTTTTCGACAAAATGGTGCACATCACCTTATGTTTATCGGAAATAAGGTTAAAACAATTGGTGAAATGGCTTTTTTATCCAATAAACTGGAAAGTGTAAATCTCTCTGAGCAAAAACAATTAAAGACAATTGAAGTCCAAGCTTTTTCGGATAATGCCCTTAGTGAAGTAGTCTTACCGCCAGATTTACAGACTATTCGTGAAGAGGCTTTCAAAAGAAATCATTTGAAAGAAGTGAAGGGTTCATCTACATTATCTCAGATCGCTTTTAATGCTTTTGATCAAAATGATGGGGACAAACGCTTTGGTAAGAAAGTGGTTGTTAGGACACATAATAATTCTCATATGTTAGCAGATGGTGAGCGTTTTATCATTGATCCAGATAAGCTATCTTCTACAATGGTAGACCTTGAAAAGGTTTTAAAAATAATAGAAGGTTTAGATTACTCTACATTACGTCAGACTACTCAAACTCAGTTTAGAGAAATGACTACTGCAGGTAAAGCGTTGTTATCAAAATCTAACCTCCGACAAGGAGAAAAACAAAAATTCCTTCAAGAAGCACAATTTTTCCTTGGTCGCGTTGATTTGGATAAAGCCATAGCTAAAGCTGAGAAGGCTTTAGTGACCAAGAAGGCAACAAAGAATGGTCATTTGCTTGAGAGGAGTATTAACAAAGCGGTATTAGCTTATAATAATAGCGCTATTAAAAAAGCTAATGTTAAGCGCTTGGAAAAAGAGTTAGACTTGCTGACAGACTTAGTCGAGGGAAAAGGACCATTAGCGCAAGCTACAATGGTACAAGGAGTTTATTTATTAAAGACGCCTTTACCATTGCCAGAATATTATATCGGATTGAACGTTTATTTTGACAAGTCTGGAAAATTGATTTATGCACTTGATATGAGTGATACTATTGGCGAGGGACAAAAAGATGCATATGGTAATCCTGTATTAAATGTTGACGAGGATAATGAAGGTTATCATGCCTTGGCAGTTGCCACTTTAGCTGATTATGAAGGTCTTTATATTAAAGATATTTTAAATAGTTCCCTTGATAAGATTAAAGCAATACGTCAGATTCCTTTGGCAAAATATCATAGATTAGGAATTTTTCAAGCTATCCGAAATGCAGCGGCAGAAGCAGACCGATTGATTCCTAAGACACCTAAGGGGTACCTAAATACAGTCCCAAATTATCGTAAAAAACAAGTGGAGAAAAATTCAAAACCAGTTGATTATAAAACGCCGATTTTTGATAAGGTTTTACCTAATGAAAAGGTAGACGGCGATAGAGTGTCTAAAGGTCATAATATAAAGGCGGAGACTAATAATTCTGTAGCTGTAACACCAACAAGGTCCGAGCAGCAATTACATAAGTCACAGTCTGATGTAAATTTACCTCAAACAAGTTCTAAAAATAATTTTATATACGAGATTCTAGGATACGTTAGTTTATGTTTGCTTTTCCTAGTAACTGCTGGAAAAAAAGGAAAACGAGCAAGAAAA

SEQ ID NO: 18838 - protein, 1055 aa, Streptococcus agalactiae
MTKKHLKTLALALTTVSVVTYSQEVYGLEREESVKQEQTQSASEDDWFEEDNERKTNVSKENSTVDETVSDLFSDGNNNSSSSKTESVVSDHKQVPKAKPGVTQEASNSSNDASKVEVPKQDTASKKETIETSTWEAKDFVTRGDTLVGFSKSGINKLSQTSHLVLPSHAADGTQLTQVASFAFTPDKKTAIAEYTSRLGENGKPSRLDIDQKEIIDEGEIFNAYQLTKLTIPNGYKSIGQDAFVDNKNIAEVNLPESLETISDYAFAHMSLKQVKLPDNLKVIGELAFFDNQIGGKLYLPRHLIKLAERAFKSNRIQTVEFLGSKLKVIGEASFQDNNLSNVMLPDGLEKIESEAFTGNPGDEHYNNQVVLRTRTGQNPHQLATENTYVNPDKSLWRATPDMDYTKWLEEDFTYQKNSVTGFSNKGLQKVRRNKNLEIPKQHNGITITEIGDNAFRNVDFQSKTLRKYDLEEVKLPSTIRKIGAFAFQSNNLKSFEASEDLEEIKEGAFMNNRIGTLDLKDKLIKIGDAAFHINHIYAIVLPESVQEIGRSAFRQNGAHHLMFIGNKVKTIGEMAFLSNKLESVNLSEQKQLKTIEVQAFSDNALSEVVLPPDLQTIREEAFKRNHLKEVKGSSTLSQIAFNAFDQNDGDKRFGKKVVVRTHNNSHMLADGERFIIDPDKLSSTMVDLEKVLKIIEGLDYSTLRQTTQTQFREMTTAGKALLSKSNLRQGEKQKFLQEAQFFLGRVDLDKAIAKAEKALVTKKATKNGHLLERSINKAVLAYNNSAIKKANVKRLEKELDLLTDLVEGKGPLAQATMVQGVYLLKTPLPLPEYYIGLNVYFDKSGKLIYALDMSDTIGEGQKDAYGNPVLNVDEDNEGYHALAVATLADYEGLYIKDILNSSLDKIKAIRQIPLAKYHRLGIFQAIRNAAAEADRLIPKTPKGYLNTVPNYRKKQVEKNSKPVDYKTPIFDKVLPNEKVDGDRVSKGHNIKAETNNSVAVTPTRSEQQLHKSQSDVNLPQTSSKNNFIYEILGYVSLCLLFLVTAGKKGKRARK

SEQ ID NO: 18839 - protein, 387 aa, Streptococcus agalactiae
ATGATTACACAAGAAATGAAAGAGATTATTAATAGTCAGTTAGCAATGGTCGCGACGGTTGATGCTAAAGGTCAACCCAATATTGGCCCAAAACGTTCTATGCGTCTCTGGGATGATAAAACGTTTATTTATAATGAAAATACAGATGGTCAAACTCGTATTAACATTGAAGATAATGGGAAAATTGAAATTGCCTTTGTTGATCGTGAACGTCTTTTAGGTTACAGGTTTGTGGGAACTGCTGAAATTCAAACAGAAGGTGCTTATTACGAAGCAGCTAAAAAATGGGCAGAAGGACGCATGGGGGTTCCGAAAGCAGTTGGTATTATTCATGTCGAACGTATTTTTAATTTACAATCTGGTGCTAATGCAGGTAAAGAAATCACT

SEQ ID NO: 18840 - protein, 129 aa, Streptococcus agalactiae; identical to SEQ ID NO: 5238

SEQ ID NO: 18841 - protein, 487 aa, Streptococcus agalactiae
ATGCTATCATTTCAAATTGTTGAAAAGCCAGCAATGATACTTGCTGGAGTAACTTTAGAAAATGTAAAGTCAAATCAAGAATGTCCTAAACTTGGGAAAAATTACATAAACAATATAATCCATCAAAACTAAAAGAAAAAGGTATCCAGCAAGCCATTGGCATTTGTAAAACACAACCTGATTTTCGTTTCGATTACAGCGCCACTTATCGAGTAGAGACAAGTGTCCAAGCCCCAAAAGGGTTAGAAATTATTAGGATCCCAAGCGCTACCTATGCAGTCATTTCTGTTAAGGTCCAATGCCATCGAGTCTTCAAGAAACATGGCGAAAAATAATACAAGGATTTTTTCAAGAGAATAATCTAAAACCAGCTAACTCGCCAAACTTAGAAATTTATTCATCTCAACATCCACAAGATACTGATTATCAAATGGAAATTTGGCTTGCTATCGCAGATATTACTAATAAATCGAAAACAAACTTAATC

SEQ ID NO: 18842 - protein, 163 aa, Streptococcus agalactiae
MLSFQIVEKPAMILAGVTLENVKSNQECPKLWEKLHKQYNPSKLKEKGIQQAIGICKTQPDFRFDYSATYRVETSVQAPKGLEIIRIPSATYAVISVKGPMPSSLQETWRKIIQGFFQENNLKPANSPNLEIYSSQHPQDTDYQMEIWLAIADITNKSKTNLI

SEQ ID NO: 18843 - protein, 120 aa, Streptococcus agalactiae
ATGCTGAGAGATTATCTAGAAGATATGTTGAAAAAAGAGGGTAAAGAAGTTTATCCATTTTCTAGATTAGCATCTCATTCAGCAAATCGTTGGTACCTTTATGAAACACCATGGCGTTAT

SEQ ID NO: 18844 - protein, 40 aa, Streptococcus agalactiae
MLRDYLEDMLKKEGKEVYPFSRLASHSANRWYLYETPWRY

SEQ ID NO: 18845 - protein, 159 aa, Streptococcus agalactiae
ATGCTTACTATTCAAGAAATGAAAGATACAACCTTTGAATTACAAGAAAATTTTAGAAGGTTAAATTATCCTATTAAACAAGTTGCTAAAGACTTGCAACTTAATATCAGTGAAGTTGAATCTCTTTTAAGTCTTGATGTTACTTATCCTGGAGATGTT

SEQ ID NO: 18846 - protein, 53 aa, Streptococcus agalactiae
MLTIQEMKDTTFELQENFRRLNYPIKQVAKDLQLNISEVESLLSLDVTYPGDV

SEQ ID NO: 18847 - protein, 315 aa, Streptococcus agalactiae
ATGAAAGAAAAACAAACAGCCGGACGTCGTCAATTAGAAGAGTTTGCACCTGAATTTGCCAGATATAATGATGATATTTTATTTGGTGAGGTTTGGGCAAAAGAGGATCATTTAACAGATAAAACACGTTCTATTATTACTATATCTGCCTTAATTAGCGGAGGAAATCTTGAACAGTTAGAGCATCATCTTCAATTTGCCAAACAAAACGGAGTTACTAAAGAAGAAATTGCTGACATTATCACTCACCTTGCTTTTTATGTTGGATGGCCAAAAGCTTGGTCAGCCTTTAATAAAGCTAAGGAAATTTGGATA

SEQ ID NO: 18848 - protein, 105 aa, Streptococcus agalactiae; identical to SEQ ID NO: 868

SEQ ID NO: 18849 - protein, 393 aa, Streptococcus agalactiae
ATGCAAGAAACAACTAAGTCTATCTTTCCTAAGGGTGAAAAAAATCCATATGGTGAATTCTTTATTGGGCAATCCTATCTCGCAGCATTAGCAAAATCTCCAGATGGGAATGTTTCAGTTGGAAATGTAACCTTTGAAGCAGGCTGTCGTAATAATTGGCATGTTCATTTAGACGGTTATCAAATCCTTCTCGTTACAGAAGGTTCAGGTTGGTACCAAGAAGAAGGAAAAGAGGCAGTGTCATTAAAACCAGGCGACGTTATCGTTACAGATAAAGGTGTTAGACATTGGCATGGTGCTAAAAAAGATTCTGAATTTGCACATATTGCGATTACAGCTGGTAAGAGTGAGTTTTATGAAGCTGTTAGTGATGAAGAATATTCAAGACTAGGT

SEQ ID NO: 18850 - protein, 131 aa, Streptococcus agalactiae; identical to SEQ ID NO: 870

SEQ ID NO: 18851 - protein, 387 aa, Streptococcus agalactiae; identical to SEQ ID NO: 5247

SEQ ID NO: 18852 - protein, 129 aa, Streptococcus agalactiae; identical to SEQ ID NO: 872

SEQ ID NO: 18853 - protein, 579 aa, Streptococcus agalactiae
ATGGCAACTGGTTATCATGCTGCAGTAACTGCAGAAGTTAAAGAAGGTGATACGGTAGTTGTCATGGGAGATGGTGCTGTTGGACTCTGTGGTGTTATCGCTGCTAAAATGTTAGGTGCTAACTGTATCATTGCAATGAGTCGTCACAAAGATAGGCAAGAACTAGCATTGACTTTTGGTGCAACGGATATTGTTGAAGAACGGGGTGACGAAGCCGTTAAACGTGTTTTAGATTTAACCAATCAAGCAGGTGCCGATGCTATTTTAGAATGTGTTGGTACAGAGCAGTCTGTTGATACAGCTACCCAAATTGCTAGGCCTGGTGCTGTCATAGGACGTGTTGGTATCCCACAAAATCCAGACATGAATACCAATAATTTATTCTGGAAAAATATCGGCCTTAGAGGTGGCATTGCTTCTGTAACAACATTTGATAAATCTGTCCTTTTAGATGCTGTTCTAACTCATAAAATTAACCCAGGCTTAGTTTTTACAAAATCCTTTGTATTAGATGATATTCAAAAGGCTTATGAAGCAATGGATAAACGTGACGCTATCAAATCCTTAGTGATTGTTGAC

SEQ ID NO: 18854 - protein, 193 aa, Streptococcus agalactiae
MATGYHAAVTAEVKEGDTVVVMGDGAVGLCGVIAAKMLGANCIIAMSRHKDRQELALTFGATDIVEERGDEAVKRVLDLTNQAGADAILECVGTEQSVDTATQIARPGAVIGRVGIPQNPDMNTNNLFWKNIGLRGGIASVTTFDKSVLLDAVLTHKINPGLVFTKSFVLDDIQKAYEAMDKRDAIKSLVIVD

SEQ ID NO: 18855 - protein, 453 aa, Streptococcus agalactiae
ATGAAAGTTGCTACATTTATTGAACCTGGCAAAATGGTTATAACTGATACACCAAAACCAGTCATTGAACAAGAGACAGATGCTGTTATCAAAATTGTTAGAGCCTGTGTTTGTGGTTCAGACTTGTGGTGGTATCGTGGTATTTCAAAACGTGAAAGTGGCTCTTTTGCAGGTCATGAGGCTATTGGTATCGTTGAGGAAGTTGGTACTAAAGTAACTGACGTGTCAAAAGGTGATTTTGTTATTGTTCCCTTTACACATGGCTGTGGCCAATGTCCGTCTTGTAAGGCTGGATTTGATGGAAATTTTACAAATCATCAAGCTGCAAAAAATGTAGATACCAAGGTCAATATCTACGTTATACTAATGCAAACTGGGCATTGGTTAAGATCCCAGGACAACCTTCTGATTATGATAATGAGACTCTTAACTCTCTGCTCACCTTATCAGATG

SEQ ID NO: 18856 - protein, 151 aa, Streptococcus agalactiae
MKVATFIEPGKMVITDTPKPVIEQETDAVIKIVRACVCGSDLWWYRGISKRESGSFAGHEAIGIVEEVGTKVTDVSKGDFVIVPFTHGCGQCPSCKAGFDGNFTNHQAAKNVDTKVNIYVILMQTGHWLRSQDNLLIMIMRLLTLCSPYQM

SEQ ID NO: 18857 - protein, 840 aa, Streptococcus agalactiae
ATGACAGATACAATGATATTAAATGACAATCATAAAATACCAACTTTAGGTTTAGGTACGTGGATGATAGATAATGATAGGGTAGCTCAAGTTGTTAAAGATGCTATCGAATTAGGTTACCGCCACATTAATACTGCACAAGCATACAACAATGAGAAAGGTGTCGGTGTAGGGATTAAAGAATCTGGTATTACACGTGAATCTTTATTTGTTACGACTAAAATTGCCGCTGAACATAAAGATTATGAAAGTGCTACAAAATCAATTGATCAATCACTAGAAGCTTTAGGGCTTGATTGTATTGATTTAATGATTATTCATAGTCCACAGCCTTGGAAGGAATGGCGTGAAACAGATAAACATTTTGACCAAGGAAATTTAGAAGCTTGGAGAGCTTTAGAGGATGCTCAAAAATCTGGTAAGGTAAAATCCATCGGTGTCTCAAACTTTTTAGAAAAAGACTTAAAAAATGGTCATGTTAAACCTGCTGTCAATCAAATCTTAGCTCACATCGGAAATACACCTTTCGACTTGATTGATTACTGTCAAAGTAAAGGTATTCAAGTTGAAGCTTATTCACCAATTGCACATGGACAAGCATTGAAATCTGATGGTATTCAAAAAATGGCTGAAAAATATGGGGTTAGTGTTGCTCAATTATGTATTCAATATTTACTACAATTAAACCTGATCGTTTTACCAAAGGCTTCTAGTAAAGAACATTTACAGTCTAATCTAGACTTTGACTTTGTAATTAGTGACGAAGATATGTCGATATTAAAATCACTTATGTTTGACGATTATGGGGAATTTTCTAACTTCCCTGTTTTTAGTGAAAAA

SEQ ID NO: 18858 - protein, 280 aa, Streptococcus agalactiae
MTDTMILNDNHKIPTLGLGTWMIDNDRVAQVVKDAIELGYRHINTAQAYNNEKGVGVGIKESGITRESLFVTTKIAAEHKDYESATKSIDQSLEALGLDCIDLMIIHSPQPWKEWRETDKHFDQGNLEAWRALEDAQKSGKVKSIGVSNFLEKDLKNGHVKPAVNQILAHIGNTPFDLIDYCQSKGIQVEAYSPIAHGQALKSDGIQKMAEKYGVSVAQLCIQYLLQLNLIVLPKASSKEHLQSNLDFDFVISDEDMSILKSLMFDDYGEFSNFPVFSEK

SEQ ID NO: 18859 - protein, 861 aa, Streptococcus agalactiae
ATGACATCAAACAAAAAAGTGGCTATCGCTTTTATATTAAATATCAGCTTTTCCGTCCTTGAATTCATCTTTGGAAGTCTATTCTTCTCAGGTGCTATCTTAGCCGATGCTGTTCATGATTTTGGTGATGCAATAGCTATTGGCATCTCAGCTACTTTAGAAAAAAAATCTAAGAAAGATGAAGATACGATATTTTCATTAGGTTATAAACGTTTTAGCCTTTTAGGAGCTCTTATCACAAGTCTAATTCTTATAAGTGGATCTATCTTAGTCATGATAGAAAATATTCCAAAATTGTGGCATCCTACTCCTGTTAATTATCACGGCATGTTTATTCTAGCTGTCATCGCTATTATCATTAATGGTCTAGCTAGTTTTATTCTCCATTCTGGTCAAAGTAAACATGAGGAAATATTAAGCCTTCATTTTTTGGAAGATATTCTAGGGTGGTTAGCTATTATTGTTATATCTCTTATCTTAAATTGGAAACCGTTGTATATCCTTGATCCATTATTATCAGTTGCCATATCTACTTTCATCTTATCTAAAGCACTTCCTAAATTACTATCAACCCTGAAACTTTTTTTAGATGGTGTTCCAGATTCCATAGATTACGCTGCATTACATGATGAACTTAAGGGACTTTCGCAAGTAAGATCTATCAATCAACTCAATATCTGGTCAATGGATGGTATTGATAATCGAGCAATCATTCACTGTTGCTTAAATCAATTGATATCTGAAAAAGATTGTAAAAGAGCTATTCGAACGATTTGCCAACATTATAAGATAAACGATGTTACTGTTGAAATCGATTATTCTTTAAGAGAACATCAAAATCATTGCAAACCATTAAAAAAC

SEQ ID NO: 18860 - protein, 287 aa, Streptococcus agalactiae; identical to SEQ ID NO: 14152

SEQ ID NO: 18861 - protein, 522 aa, Streptococcus agalactiae; identical to SEQ ID NO: 5259

SEQ ID NO: 18862 - protein, 174 aa, Streptococcus agalactiae; identical to SEQ ID NO: 886

SEQ ID NO: 18863 - protein, 1191 aa, Streptococcus agalactiae
ATGATTGATTTTCTACTGTTGAAATCATTACACAGTCTTCTAGGTCTAACTATTACTGTTTGTGATCAAAATTTTTCTGTTATCAGAGAGTATAAATCCGAGAAAACTATTTCACTTTTTTACAATCATTACCTTATTTTAAGTAACTTTAGTAAAACTCAACATGATTTTTTATTTCATTATGGCTCTTTAGGAGAACTTTTTCTTGTCCACCATATTCAACAATATTATATTATCATCGGTCCCTGGCGTAGCAATGTTATTGACCCTTTACTTCTTAAGAAAAAGCTGACTGAAACACAAATCAATGCTAGTGAACAAAACTACTTTATTGATAGACTATCCCAATTACCTTTCTTCTCACTTAGTCAAATCCGAGAATTACTAATAGTAACCAATTATTGTCTAACTGGGGTTGTGAAAGATAAATTATCAGAGCCCTTACATTACTACACGAAAGGGTGGAGCAACTCCTTTGATCTAGATAAAATTAAGCAATTTTCTAAACAGAATATGAGTTCTTACAAATATCAGTATCATTTTGAAAATAATATTCTCAAAGCTGTTAAATCAGGTAGTGAATTTCTTTTGAAAGAAACAGTGGAACAATTTAGCAATTCTATCGTACCTATAATCAGTGGAGATGAATTGCGATCTGAAAAAAACTACTCCATCATGATTTATGATCGTCTCTCACAGGCTACCATCCAAGCAGGACTTGATATCGAAACAGCTTATCGAGCACGAGATCGTTTTATAAAAGAAAACGAGTCAACTATAAGTCTAAATGAAGTTTTAAAATTACGTGATACTGCTATCTTATTCTATACTCAACAAGTTCATTCTTTAAAAAAACATCTCGAAACCCCTCATTCTCAAACTATTGTCGCAGTGATTCGATATCTTGAAAATAATCTAAATCGCTTTATTAAAACAGAAGAAATAGCTAAAGAATGTCACATGAGTGAATCGAAGTTACGAAAACTATTTAAGCAAGAAAAACACATCACTATTCAACAATATTTTCTAAACTTAAAAATCGAAGCTGCTAAGCAATTACTAGATGAAAATAAGAAAGTAGAAGAAGTTTCCAATTTACTTGGATTTTCCACTTCTTCTAATTTTTCAAGGACATTTAAAAAAATAGTGGGAATTAGCCCACTAGAATATAAGCAAAAGCCTAAGACAATA

SEQ ID NO: 18864 - protein, 397 aa, Streptococcus agalactiae; identical to SEQ ID NO: 5262

SEQ ID NO: 18865 - protein, 1339 aa, Streptococcus agalactiae
ATGTTTAGAAGGTCTAAAAATAACAGTTATGATACTTCACAGACGAAACAACGGTTTTCAATTAAGAAGTTCAAGTTTGGTGCAGCTTCTGTACTAATTGGTCTTAGTTTTTTGGGTGGGGTTACACAAGGTAATCTTAATATTTTTGAAGAGTCAATAGTTGCTGCATCTACAATTCCAGGGAGTGCAGCGACCTTAAATACAAGCATCACTAAAAATATACAAAACGGAAATGCTTACATAGATTTATATGATGTAAAATTAGGTAAAATAGATCCATTACAATTAATTGTTTTAGAACAAGGTTTTACAGCAAAGTATGTTTTTAGACAAGGTACTAAATACTATGGGGATGTTTCTCAGTTGCAGAGTACAGGAAGGGCTAGTCTTACCTATAATATATTTGGTGAAGATGGACTACCACATGTAAAGACTGATGGACAAATTGATATAGTTAGTGTTGCTTTAACTATTTATGATTCAACAACCTTGAGGGATAAGATTGAAGAAGTTAGAACGAATGCAAACGATCCTAAGTGGACGGAAGAAAGTCGTACTGAGGTTTTAACAGGATTAGATACAATTAAGACAGATATTGATAATAATCCTAAGACGCAAACAGATATTGATAGTAAAATTGTTGAGGTTAATGAATTAGAGAAATTGTTAGTATTGTCAGTACCGGATAAAGATAAATATGATCCAACAGGAGGGGAAACAACAGTACCCCAAGGGACACCAGTTTCAGATAAAGAAATCACAGACTTAGTTAAGATTCCAGATGGCTCAAAAGGGGTTCCGACAGTTGTTGGTGATCGTCCAGATACTAACGTTCCTGGAGATCATAAAGTAACGGTAGAAGTAACGTATCCAGATGGAACAAAGGATACAGTAGAAGTAACGGTTCATGTGACACCAAAACCAGTACCGGATAAAGATAAATATGATCCAACAGGAGGGGAAACAACAGTACCCCAAGGGACACCAGTTTCAGATAAAGAAATCACAGACTTAGTTAAGATTCCAGATGGCTCAAAAGGGGTTCCGACAGTTGTTGGTGATCGTCCAGATACTAACGTTCCTGGAGATCATAAAGTAACGGTAGAAGTAACGTATCCAGATGGAACAAAGGATACAGTAGAAGTAACGGTTCATGTGACACCAAAACCAGTACCGGATAAAGATAAATATGATCCAACAGGAGGGGAAACAACAGTACCCCAAGGGACACCAGTTTCAGATAAAGAAATCACAGACTTAGTTAAGATTAGATGGCTCAAAGGGGTTCCGACAGTTGTTGGTGATCGTCCAGATACTAACGTTCCTGGAGATCATAAAG

SEQ ID NO: 18866 - protein, 447 aa, Streptococcus agalactiae
MFRRSKNNSYDTSQTKQRFSIKKFKFGAASVLIGLSFLGGVTQGNLNIFEESIVAASTIPGSAATLNTSITKNIQNGNAYIDLYDVKLGKIDPLQLIVLEQGFTAKYVFRQGTKYYGDVSQLQSTGRASLTYNIFGEDGLPHVKTDGQIDIVSVALTIYDSTTLRDKIEEVRTNANDPKWTEESRTEVLTGLDTIKTDIDNNPKTQTDIDSKIVEVNELEKLLVLSVPDKDKYDPTGGETTVPQGTPVSDKEITDLVKIPDGSKGVPTVVGDRPDTNVPGDHKVTVEVTYPDGTKDTVEVTVHVTPKPVPDKDKYDPTGGETTVPQGTPVSDKEITDLVKIPDGSKGVPTVVGDRPDTNVPGDHKVTVEVTYPDGTKDTVEVTVHVTPKPVPDKDKYDPTGGETTVPQGTPVSDKEITDLVKIQMAQKGFRQLLVIVQILTFLEIIK

SEQ ID NO: 18867 - protein, 591 aa, Streptococcus agalactiae
ATGAGCCTTGGAAAAACAGCAGATTCTTTAATTGCTCTCAATGATAAAGTTAAATTAGCACTTAAATTAGCTTCTGAGAAGGGCGTTGCAGTTGTTGTGGCTGCCGGAAATGAAGGTGCATTTGGTATGGATTATAGCAAACCATTATCAACTAATCCTGACTACGGTACGGTTAATAGTCCAGCTATTTCTGAAGATACTTTGAGTGTTGCTAGCTATGAATCACTTAAAACTATCAGTGAGGTCGTTGAAACAACTATTGAAGGTAAGTTAGTTAAGTTGCCGATTGTGACTTCTAAACCTTTTGACAAAGGTAAGGCCTACGATGTGGTTTATGCCAATTATGGTGCAAAAAAAGACTTTGAAGGTAAGGACTTTAAAGGTAAGATTGCATTAATTGAGCGTGGTGGTGGACTTGATTTTATGACTAAAATCACTCATGCTACAAATGCAGGTGTTGTTGGTATCGTTATTTTTAACGATCAAGAAAAACGTGGAAATTTTCTAATTCCTTACCGTGAATTACCTGTGGGGGTTATTAGTAAAGTAGATGGCGAGCGTATAAAAAAATACTTCAAGTCAGTTAACATT

SEQ ID NO: 18868 - protein, 197 aa, Streptococcus agalactiae
MSLGKTADSLIALNDKVKLALKLASEKGVAVVVAAGNEGAFGMDYSKPLSTNPDYGTVNSPAISEDTLSVASYESLKTISEVVETTIEGKLVKLPIVTSKPFDKGKAYDVVYANYGAKKDFEGKDFKGKIALIERGGGLDFMTKITHATNAGVVGIVIFNDQEKRGNFLIPYRELPVGVISKVDGERIKKYFKSVNI

SEQ ID NO: 18869 - protein, 144 aa, Streptococcus agalactiae
ATGCTGGAACAATCAAGTTGGGGCGTGACAGCTGAAGGAGCAAATCAGCCTGATGTACAGCTTCTGGCTTTGAAATTTATTCTCACCCTATATATCATACCCAACATGTCTGGTACAGTATGGCTTCACACTGGTGCAGGATTA

SEQ ID NO: 18870 - protein, 48 aa, Streptococcus agalactiae
MLEQSSWGVTAEGANQPDVQLLALKFILTLYIIPNMSGTVWLHTGAGL

SEQ ID NO: 18871 - protein, 411 aa, Streptococcus agalactiae
ATGGTTATCATGATGAATCATGAGTTAGCAAAGCTTTGGGAATATCGTCAAATTGGCGCCCATGATTCTTATGTTGGAACTCTGGCTTACGCCGTTGGAAATGTGGCTTATATTTCTGACAGTACAGTCCTTTGGCGTAGACAAGTAGGGGCAGAGTCGCTAAACAATTACGGGAGACAATATGGGGTGGCTACGTTTTGGCAGATGATAAATACTTCTTTTGATCGTGCTTCGCTTATTTTTGCTCAAGTATCCGATAAAATGTCCCTGGAGCGTAAACTCTTCTTTAGTCGTTTTATAGAATTAAAAAATGCCAATCTAATAAGAAGGATTTATCTTTTATCAAAATTAAAACTTCGTCGGAAATCATTGAAAGAAACAGTTGCTATGACTATCCTACTTTTAACAGGT

SEQ ID NO: 18872 - protein, 137 aa, Streptococcus agalactiae
MVIMMNHELAKLWEYRQIGAHDSYVGTLAYAVGNVAYISDSTVLWRRQVGAESLNNYGRQYGVATFWQMINTSFDRASLIFAQVSDKMSLERKLFFSRFIELKNANLIRRIYLLSKLKLRRKSLKETVAMTILLLTG

SEQ ID NO: 18873 - protein, 102 aa, Streptococcus agalactiae
TTGAAGGAAATCCAAGTTTTGGAAGGTTTGGTAAGTTTTAAAAAAAATATTAGGGAAAAAATTATTTTATTTTTTTTCCAAAAAAAAGTTGTTGGGGACACT

SEQ ID NO: 18874 - protein, 34 aa, Streptococcus agalactiae
MKEIQVLEGLVSFKKNIREKIILFFFQKKVVGDT

SEQ ID NO: 18875 - protein, 669 aa, Streptococcus agalactiae
GTGACACCAAAACCAGTACCGGATAAAGATAAATATGATCCAACAGGAGGGGAAACAACAGTACCCCAAGGGACACCAGTTTCAGATAAAGAAATCACAGACTTAGTTAAGATTCCAGATGGCTCAAAAGGGGTTCCGACAGTTGTTGGTGATCGTCCAGATACTAACGTTCCTGGAGATCATAAAGTAACGGTAGAAGTAACGTATCCAGATGGAACAAAGGATACAGTAGAAGTAACGGTTCATGTGACACCAAAACCAGTACCGGATAAAGATAAATATGATCCAACAGGAGGGGAAACAACAGTACCCCAAGGGACACCAGTTTCAGATAAAGAAATCACAGACTTAGTTAAGATTCCAGATGGCTCAAAAGGGGTTCCGACAGTTGTTGGTGATCGTCCAGATACTAACGTTCCTGGAGATCATAAAGTAACGGTAGAAGTAACGTATCCAGATGGAACAAAGGATACAGTAGAAGTAACGGTTCATGTGACACCAAAACCAGATAAGGATAAATATGATCCAACAGGTAAAGCTCAGCAAGTCAACGGTAAAGGAAATAAACTACCAGCAACAGGTGAGAATGCAACTCCATTCTTTAATGTTGCAGCTTTGACAATTATATCATCAGTTGGTTTATTATCTGTTTCTAAGAAAAAAGAGGAT

SEQ ID NO: 18876 - protein, 223 aa, Streptococcus agalactiae
MTPKPVPDKDKYDPTGGETTVPQGTPVSDKEITDLVKIPDGSKGVPTVVGDRPDTNVPGDHKVTVEVTYPDGTKDTVEVTVHVTPKPVPDKDKYDPTGGETTVPQGTPVSDKEITDLVKIPDGSKGVPTVVGDRPDTNVPGDHKVTVEVTYPDGTKDTVEVTVHVTPKPDKDKYDPTGKAQQVNGKGNKLPATGENATPFFNVAALTIISSVGLLSVSKKKED

SEQ ID NO: 18877 - protein, 324 aa, Streptococcus agalactiae
ATGTTACAAACTGGTTTTAGGTTTGGTGAAGCAATGGCAATAACTTGGGATGATATTGATTTTGAAAGAAATAGTATTTATACATATCGAAGATATTCTTCAATAAAAAAGGACTTTACAAAGCCTAAAACAAGGACTTCAATAAGGAGAGTTCCAGTAAGTCATGATTTAAAAGAGTTATTGCTTGAACTAAAATTTCAACAAGAAAGAATGCTGAAAGCTTTGCATATAAAAAATACAGATCAATTGATTTTTTATGACTATAGGTTTGGTATGATATCAAATAATGCTGTTAACAAATTCTTGGCAAGCTCATTGGAAAAT

SEQ ID NO: 18878 - protein, 108 aa, Streptococcus agalactiae
MLQTGFRFGEAMAITWDDIDFERNSIYTYRRYSSIKKDFTKPKTRTSIRRVPVSHDLKELLLELKFQQERMLKALHIKNTDQLIFYDYRFGMISNNAVNKFLASSLEN

SEQ ID NO: 18879 - protein, 135 aa, Streptococcus agalactiae; identical to SEQ ID NO: 5273

SEQ ID NO: 18880 - protein, 45 aa, Streptococcus agalactiae; identical to SEQ ID NO: 5274

SEQ ID NO: 18881 - protein, 303 aa, Streptococcus agalactiae
ATGTTTCCAAATTTACTATCACTTATTTCTTATCACGAGCAACAAATCGCTAGTCGTCGATTAAGTCATCACCTAGGTCTGGAACAAAGTATCGTTTTGTACGCTATGGCTAAAGAAGAGACTATCAGCAATGAACGATGTCCTCATCCAAAATTAATAAATGTTTTGGAAGGAAAACTTGAAATTATCCTTGGTGATCAGAAACATATCCTTGAAAAAGATAGCCTTATTAGCCTCTCCCCACAAGAAATACACCATTTAAGAGCTATTGAAAATAGTAAATTTCTCCAAATAGAATTAGAC

SEQ ID NO: 18882 - protein, 101 aa, Streptococcus agalactiae
MFPNLLSLISYHEQQIASRRLSHHLGLEQSIVLYAMAKEETISNERCPHPKLINVLEGKLEIILGDQKHILEKDSLISLSPQEIHHLRAIENSKFLQIELD

SEQ ID NO: 18883 - protein, 336 aa, Streptococcus agalactiae
ATGTCTTATATCGAAAAAATTGAAGCCAATAAAGTTCTTGATTTAAAACAAATCGTACCTATTGAAGAAGAGCAAATGCTTAGTAAAACTTTAGTTCAACGGAAAGATTTAGGAATGACGGTCTTTTCATTAGACAAGGGGCAAGAAATTGGACGCCACTCATCTCCCGGAGACGCTATGGTAAATATCCTTAGTGGACTTGCGCAGATCACGATTGATCAAGACAAATTTGACGTAGCAGCTGGTGAATGTATTGTAATGCCTGCTAACATTCCTCACAGTCTCTATGCTAAAGAAGCCTTTCAAATGCTTCTTGTCGTTGTGAAGCCTGAGGTG

SEQ ID NO: 18884 - protein, 112 aa, Streptococcus agalactiae
MSYIEKIEANKVLDLKQIVPIEEEQMLSKTLVQRKDLGMTVFSLDKGQEIGRHSSPGDAMVNILSGLAQITIDQDKFDVAAGECIVMPANIPHSLYAKEAFQMLLVVVKPEV

SEQ ID NO: 18885 - protein, 762 aa, Streptococcus agalactiae
GTGATCTTATTGTCACATAAAGAAATTGGACATCAATTCTTAGCACGACTAGGAAAAAAACGCTTAAGACCAGGAGGTGTCCAAGCGACGAATTGGCTTATCAAAAAAGGACACTTTAGTGCTGACAGTCGTGTTCTAGAAGTAGCTTGTAATCAATGTACCAGTTCCATCGATATCGCTAAGGCATTTTCCTGTCACATTACAGCGCTTGATCTAGATAGTAAAGTAATAGAAAAAGCCAAAGAAAATGTCAAAAAGGCTCAATTAGAAGAATTTATTGAAGTTATTCAGGGAAATGCACTCAAACTGCCCTTTCCTGATAATAGTTTTGATATCGTTATCAACGAAGCAATGCTAACGATGCTTAGTAATTCAGCTAAGGAGAAAGCCATAAAAGAGTACTTACGTGTCCTAAAACCTGGTGGACGTTTACTCACACATGATGTTTCTTATCAAGATGAAGACACTGCCAAGCTGATCGATCAACTTAGACATACTATAAATGTTAACGTTGCTCCTCTAAAAATAGATGATTGGCAAAATTTATTCTTACAAAATGGTTTTTCAAGTTCAGAATATCAATTTGGAAAAATGAGTCTTATGTCCCCATTAGGAATGATTAAAGATGAAGGTTTATTCAATACCATTAAAATCATCAGCCGAGGACTGAAAAAGGAAAACCGTTCCCAATTTTTAAAAATGAAACATTTCTTTACTAAAACTGGTAAAAATCTCTGCTATATTGCTGTCGCTAGTACAAAA

SEQ ID NO: 18886 - protein, 254 aa, Streptococcus agalactiae
MILLSHKEIGHQFLARLGKKRLRPGGVQATNWLIKKGHFSADSRVLEVACNQCTSSIDIAKAFSCHITALDLDSKVIEKAKENVKKAQLEEFIEVIQGNALKLPFPDNSFDIVINEAMLTMLSNSAKEKAIKEYLRVLKPGGRLLTHDVSYQDEDTAKLIDQLRHTINVNVAPLKIDDWQNLFLQNGFSSSEYQFGKMSLMSPLGMIKDEGLFNTIKIISRGLKKENRSQFLKMKHFFTKTGKNLCYIAVASTK

SEQ ID NO: 18887 - protein, 2051 aa, Streptococcus agalactiae
ATGAATAAGAGAACGTTTTTGTTATTACAACAACTAGCACAATCAAGGCTAGCAACTTTAGAGCAATTAGCAACTCAATTTAAAACTTCAACACGTACGATTCGAAAAGATATTGATATGATTAACGATTTGATTAAAGCAGGAGCTGATTTAATTTATTTTGGTAATGAGGGTGAAGTTTGCTCTGACAAAGCCAAAAATCATTTGAACGATATTCCTAAAATGATTTCTCTCACAGACTATAGGTTATCTAGGGAAGAAAGGTTAATTTTAGAATCTTATTTTCTATTAGTTAGCTTGACTCCTATAACCATCAAGGGCTTAAGTCGAAAAATGTATTTGAGTCGTAATACTGTGGTTAATGATTTACCTTCATTACGCTCTTTTTTGACGCAAAACGAATTAATTTTGAAATCAGATAAACAAGGTTTAATCATTGAAGGTTCTGAATCGCAGAAGCGTTTATTGTTGATGCATCATTATATTTCACTAAGTGATAACGATTTTCTCAGAGAATATCTATTTCCTAGTGAAGATGACCCATCGTTATTAATTTCAGTAGTTCGTAAAGCTGAGAAACAGAATCAGGTTGTTTTTCGCGATTACTCATTTCAATATGTTCAAACTTATTTGAATGTTTTATGTTCTCGTTCTGCTAACAACTTGATGATTGAAACGGAAGGAATGTTTCATTTTTCTGCATTTTCCTTGATTATTAGTCAATCAATATTAGAGGATTTATCTCAAAAAGTTAGATTTCCCTTATCGCTTAAGGAGGTTGAGTTTTTAGCTTTTCTAATTGGAAATTTGACTTTTGTGAAGAAATCTTCTCCGATTGATGATAGTTTTAAAATCCAATTTTTAACTAGACAATTTATCAAGCAAATATCAGGAGATATTGCATATGATTTGACTCAGGACATTAGTTTGCTAGAAAATTTGTCTAAGCATATGGAGACGATTTTTTATAACCAACCTTTACAAGCTCCTGATTCGTCATTGCTAACCGATATCATTGAATCCAATAAAAGCATTGTCACAGCCATTAAAAAGCATTTGTCTATCTTCCATATTCTCAAATCTAAGGTATTTGAACCCAATGATATCTATTACATTGCTATTCATATTTGTGGTGCTGTGGAGCGTCAGCGTTTGGAAATAGCACATTTTAAAGTTTTACTGGCTTGTCATGCGGGTATAGGACATCAATGTTATTGAAACAACGTTTAAAAGAGCACTTTAACTTTGATATTATAGATGTTGTTACCATTCATGAAGCAGAGGAAGAGCAGCATCGAGCTGATTTTATTATAACGACGGTTCCACTCCAAAAGACATATGAAACGATTGTTGTCTCTGCTTCTTTAACAGAAACAGATATTATCAGAATCAATACATTAATGAGAAAAATCAGTAAGGAAGGCAACGTAGAAGAAAATCCGGAAACCAGTCAGGCTTTATTTAAAGATTTGTTGCCAATACTAAAAAAAATAGGTTGTGAGCAAAAAGATTTGGTTATGATTCGGCAAGTTATAAATCGTCACTGCCAGAAATCTATGAGCCCATTTGAGGAGTCAATGGCTCATCAGGTTATTCAATTATCAGATTTATTAACACCTAATTATATTGACTTGCAAGGGAAAGCGTCCTCGTGGGAGGAGTCTATAAGGCAGTCGGCTAGGCTCCTACGGGAAGAGTCATTAATTGAGGAATCATATGTAGAAGCTATGATTGCAAATGTACTTTCTTATGGTCCATATATATTGGTTGCAAAGGGAGTAGCTGTTGCTCATGCAGGCATTGATGACGGTGTTAATGGTTTGGGAATGTCGCTTGATCGCTTAGATAAGGGAGTAAATTTTGGCAATCCAGAATTGGATCCCATCCGTTATATCATTTGTTTATGTGTAACAGATTACGGTAAGCATGTGACTGCTTTTAATACTCTGCTTAATTTATTTCAGGATAGTAGTATGAGAGAAAAGTTGGATAGGGTTGATACTGCTAAAGATTGTTATTGTCTGATTAAAAAATACGAAGAAAAGGAAAAT

SEQ ID NO: 18888 - protein, 686 aa, Streptococcus agalactiae
  VARIANT 44, 402, 449: Xaa = Any Amino Acid
MNKRTFLLLQQLAQSRLATLEQLATQFKTSTRTIRKDIDMINDXLIKAGADLIYFGNEGEVCSDKAKNHLNDIPKMISLTDYRLSREERLILESYFLLVSLTPITIKGLSRKMYLSRNTVVNDLPSLRSFLTQNELILKSDKQGLIIEGSESQKRLLLMHHYISLSDNDFLREYLFPSEDDPSLLISVVRKAEKQNQVVFRDYSFQYVQTYLNVLCSRSANNLMIETEGMFHFSAFSLIISQSILEDLSQKVRFPLSLKEVEFLAFLIGNLTFVKKSSPIDDSFKIQFLTRQFIKQISGDIAYDLTQDISLLENLSKHMETIFYNQPLQAPDSSLLTDIIESNKSIVTAIKKHLSIFHILKSKVFEPNDIYYIAIHICGAVERQRLEIAHFKVLLACHAGIXTSMLLKQRLKEHFNFDIIDVVTIHEAEEEQHRADFIITTVPLQKTNXETIVVSASLTETDIIRINTLMRKISKEGNVEENPETSQALFKDLLPILKKIGCEQKDLVMIRQVINRHCQKSMSPFEESMAHQVIQLSDLLTPNYIDLQGKASSWEESIRQSARLLREESLIEESYVEAMIANVLSYGPYILVAKGVAVAHAGIDDGVNGLGMSLDRLDKGVNFGNPELDPIRYIICLCVTDYGKHVTAFNTLLNLFQDSSMREKLDRVDTAKDCYCLIKKYEEKEN

SEQ ID NO: 18889 - protein, 447 aa, Streptococcus agalactiae
ATGATTGAAAAGTTAATCTACAATGATTTAATTTCTTTAAATCACCGTTATCGAGATCAAACAAATTTACTAGAAGTTTTGTCTCAATACTTATTGCAAAAAGGCTATGTTAAAACAGAGTTTTCAAAAGCTATTTTACAGCGAGAAAAAGATTATCCAACAGGACTACAGTTAGAAAATATGGCTGTTGCTATTCCTCACACCTATTCAGAGTATGTCCTTAAGCCCTTTATTTATATCAATAAATTAAAAGAACCTATTAGTTTCATACAAATGGGAACAGAGGACGAAATAGTGATGGCACGTTACGTCATCGTTTTAGGGATTTCAAATCCTAAAGATCAAGCAGGTTTACTAGCTGAATTAATGACACTCTTTTCTAATCCTAAAATAGTTCAACAACTCGAAATGGCACAAACCAAAGAAGCCTTAAAAAATATTTTTAAC

SEQ ID NO: 18890 - protein, 149 aa, Streptococcus agalactiae
MIEKLIYNDLISLNHRYRDQTNLLEVLSQYLLQKGYVKTEFSKAILQREKDYPTGLQLENMAVAIPHTYSEYVLKPFIYINKLKEPISFIQMGTEDEIVMARYVIVLGISNPKDQAGLLAELMTLFSNPKIVQQLEMAQTKEALKNIFN

SEQ ID NO: 18891 - protein, 276 aa, Streptococcus agalactiae
ATGAAAAAATTAATTGTAGCTTGTGGTTCGGGAGTTGCGACCTCACAAACTGTTGCATCTAAAGTAGACCGTTTGTTAAAAGAAGCAGGAATTAGTTGCGACATTGAGGCAGTAGATATGAAATCTTTAGAGCAACATTTAAAAACAGCTGATGCTTATATTTCGATTGTTAAAGCCAAAAAAGATTATGGTGTTCCTGTCTTTAACGGCGTTGCTTTCTTAACAGGAATGGGTCAAAAGCAAGAATTGGAAAAAATTATTTCATTCGTTAAAGGT

SEQ ID NO: 18892 - protein, 92 aa, Streptococcus agalactiae
MKKLIVACGSGVATSQTVASKVDRLLKEAGISCDIEAVDMKSLEQHLKTADAYISIVKAKKDYGVPVFNGVAFLTGMGQKQELEKIISFVKG

SEQ ID NO: 18893 - protein, 1143 aa, Streptococcus agalactiae
ATGGATGTTCTACAAACTGTTATTAATTATATTTTAGATTTAGGTGCTGCTGTTTTTGTTCCTTTTTTAATGCTTATTATCGGTTTATGCATGAAAATGAAATTCCGTGATGCTTTCACATCTGCACTTATTCTCGGAATAGCTTTTACAGGGATGGGAATCCTGGTTAATTACATTATGACTAGTATGGGTGCCGCAGCGAATGATTTAACGAAACATACCGGTTTAAGTTTACCAGCAGTTGATATTGGATGGCCTGGAGCAGCCTCTATCAGTTGGGCTTGGCCTTATGCTTTTCTTGTTTTCCCATTGCAGCTGGCTATTAATTTTGTCATGTTACTCTTGAATCAGACCAAAACACTTAATGTGGATTTATGGAACGTTTGGAATAAGATTTTTACTGCTGTAATTGTAACTTATTTTACCAATAATGTTATCTTTGGTTTTATTGCAGCAGCTATTATCATTATTTTAGAATTAAAATTAGGAGATGTCTTTGCTCCAGAAGTTGAGCGCTTAACAGGTGTTCCAGGTGTCACAGTCCCACATTTTATTTGTTTAATTGCTGTAATTTTGCATCCTATTGATGAACTATTGAAAAAAATTCCTGTTTTAAATAAAGATTTTGATGCAGATACACTAAAGGAAAAAATAGGAGTGTTTGGAGAAAATTCAGTTATGGGAGCGATTATAGGGTTTGTCTTAGGGATTGCTTCTGGTAATGGGATAAAATTTGCGTTGACCTTAGCTGTTCAAGCTGCAACAGCCTTGACTTTATTTCCTATGGTTTCAAAATTATTTTCTCAAGCGCTTTCCCCAATTTCTGAGGCAGTGTCAGATTTTATGAGAGAAAAATTTGAAGATCGGGAAGTTTATATTGGTTTGGATTGGCCAATACTAGGTGGGCGAAATGAACTTTGGGTGGCTGTTATTTTTACCATTCCATTCTTATTAATAGGTTCAATTATTCTACCAGGGAATATTGTTTTACCATTTGCAGGGATTATCAATCTTTCATTTGTTGTAGGAGCTCTATTGCTCACAAATGGCAATGTAATCCGAATGATTATCCATGGACTTATTTCGACTCCTTTATTCTTATATGGAGCAACTTATTTCACACCATATATGACNNNNNTTAAT

SEQ ID NO: 18894 - protein, 381 aa, Streptococcus agalactiae
  VARIANT 379, 380: Xaa = Any Amino Acid
MDVLQTVINYILDLGAAVFVPFLMLIIGLCMKMKFRDAFTSALILGIAFTGMGILVNYIMTSMGAAANDLTKHTGLSLPAVDIGWPGAASISWAWPYAFLVFPLQLAINFVMLLLNQTKTLNVDLWNVWNKIFTAVIVTYFTNNVIFGFIAAAIIIILELKLGDVFAPEVERLTGVPGVTVPHFICLIAVILHPIDELLKKIPVLNKDFDADTLKEKIGVFGENSVMGAIIGFVLGIASGNGIKFALTLAVQAATALTLFPMVSKLFSQALSPISEAVSDFMREKFEDREVYIGLDWPILGGRNELWVAVIFTIPFLLIGSIILPGNIVLPFAGIINLSFVVGALLLTNGNVIRMIIHGLISTPLFLYGATYFTPYMTXXN

SEQ ID NO: 18895 - protein, 117 aa, Streptococcus agalactiae
TTGGCTACTGTTTTTCAAGGTAAAGTATTATCTGTTATTTTACTTATCATTTGGTTGGCATTGTATGTTTGGCTATTGAAAGAACGCAAAAAATATAACACGAATTTGATTGTGGAA

SEQ ID NO: 18896 - protein, 39 aa, Streptococcus agalactiae
MATVFQGKVLSVILLIIWLALYVWLLKERKKYNTNLIVE

SEQ ID NO: 18897 - protein, 828 aa, Streptococcus agalactiae
ATGACATATCCAGACTATATTAATGAACTTTTGGAAGTCACGTATGATATGTGGCAACATGGTTGGGACGAATATAATGGCGGTAATGTGAGTTACCGATTAACCAAAGAAGAAATTGGTACTTTAAGACATGATTTAGAAGATACCTTATTTACTTATAATGACAGTCAAGAAGAAGTAGATGTTCTATCTGTACCAGATAATATGCAAGAGGAGTACCTTCTTATCACTGCTTCTGGTAGTCATTTTAGAACATTGAAAAATCAACCAGAGATTGATACAGGCATCATAAGGATAACTTCTACTGGCTATCAAGTTATAGCAGGCTTTAATAGTGGAAAGAAACCAACAAGCGAAATTTTTATGCATATACTAGCGCATTCTGCGAGGGTAAGTCAAAACCCTAACCACCGTGTTGTTATTCATAATCACGCTACTAATATTGTCATTTATTCCCTATTAGAAGAAATAACTAGTCGACGTTTAACGATAGATCTTTGGTCAGTTCTAACAGAATCAATAGTTGTTTTTCCTGATGGCATAGCAGTTTTACCATGGGAAGTTCCAGGAACTTATCAAATAGGGTTAGATACAGCACACGAATTAAAGAAACATCGGTTAGTCGTTTGGGCAAAGCACGGTGTCCTTTCAACAGGAGTTAGTTATCAAGATTGTTTTGGGTTGATTGAAACAGCAGACAAGGCAGCTAATATTGCACTTAAACTTAGAAGTACCAGCGGTAAGTCAATTCAAGATAATAATATATTGACCACAGATGATTTGGAAAAAGTATGCCAAAAGTTGCAAGTAAAAGGGCGTTACTTATTA

SEQ ID NO: 18898 - protein, 276 aa, Streptococcus agalactiae
MTYPDYINELLEVTYDMWQHGWDEYNGGNVSYRLTKEEIGTLRHDLEDTLFTYNDSQEEVDVLSVPDNMQEEYLLITASGSHFRTLKNQPEIDTGIIRITSTGYQVIAGFNSGKKPTSEIFMHILAHSARVSQNPNHRVVIHNHATNIVIYSLLEEITSRRLTIDLWSVLTESIVVFPDGIAVLPWEVPGTYQIGLDTAHELKKHRLVVWAKHGVLSTGVSYQDCFGLIETADKAANIALKLRSTSGKSIQDNNILTTDDLEKVCQKLQVKGRYLL

SEQ ID NO: 18899 - protein, 462 aa, Streptococcus agalactiae
ATGCTCGAAGATAAAGTCATTGTATTTCAAAAATCACATTTAGATTCTTCAGAAGAAGCATTGGATTATGTATCCCATTTATTGCTACAATCTGGTGCTGTTAAAGAAAGTTACCCCAACGCTATTCAGGAGCGTGAAAAAGCATTTCCCACCGGTCTAATGTTCTCAGACTATGGTGTTGCGATTCCTCATACTGATATTGAGCATGTTAATTATTCACAGATGGCAATAGTTAGTCTTAAAAATCCTGTAGTTTTTCAGCAAATGGGTAATGGAGAAGATGTTGAAGTTAATATTATCTTTATGTTAGCTTTAAAGGAGGCTCATCAACAGGTTGATTTATTGTCGCAGTTAATTGAACTTTTTCAAAATAAAGTATTACTTAAGACATTATTAGCTCTAGGTAATGAAAGAAGTGCTATTGACCAGGCTCTTGGTCTTTTAAAAGCTCAAGGAATTGAG

SEQ ID NO: 18900 - protein, 154 aa, Streptococcus agalactiae
MLEDKVIVFQKSHLDSSEEALDYVSHLLLQSGAVKESYPNAIQEREKAFPTGLMFSDYGVAIPHTDIEHVNYSQMAIVSLKNPVVFQQMGNGEDVEVNIIFMLALKEAHQQVDLLSQLIELFQNKVLLKTLLALGNERSAIDQALGLLKAQGIE

SEQ ID NO: 18901 - protein, 1329 aa, Streptococcus agalactiae
ATGTTGGATATTTTGCAGAAATTCGTTAATTTAGGAGCAATAGTCGTTTTGCCAATACTGATATTTATCTTTGGTATTTTACTGGGAACGAAACCTAGAAAAGCATTTATTTCTGGGGTGACTGTTGGTATTGGTTTTGTAGGATTAAATATGGTTGTTGATTTACTAGGTAATAGTTTAGGTCCCGCAGCACAAGCTATGGTTAAACGATTTGGCCTACATTTAACAACGATTGATGTCGGATGGCCAGCAGCCTCAGCAATTTCTTATGGAACCCTTTTAGGAAGCTTAGCCATTCCGATTGGTGTTGGTATTAACCTTTTACTCCTATTTTTAGGAATGACTAAAACATTAATGGTAGATATGTGGAATTTTTGGCATGCAGCTTTTGTCGCCTCGCTTGTTTACGCAGTAACTCATAATTTTGCTCTAGGTTTATATGCCACAGTTGTTTATATGGTTATGATTTATCTTCTAGGTGATATTATTGCGCCTATGATCAAAACATTTTATGGCTTCCCTAACATTACTTTTCCGCATGGAACCTCGGCTCCAGGGGTAATATTTGCTATTCCTTTGAACTGGTTGTTTGACCGCATCCCAGGTTTCAATAAAATAGATGCCAAACCTGAGACTATTCAGAAGCGGTTTGGAGTTTTTGGTGATACAACAGTAATGGGGTTAATCATTGGTATTGTTATGGGACTTCTGGCTAATTATAATGTCACTAATACTCTTCAGCTAGGTATTAAGACAGCAGCAGTCATGGTTTTAATGCCACGAATGGTTGCCCTTTTAATGGAAGGATTAACGCCTATTTCAGAGTCAGCAAATACTTTTGTTCAAAAACGTTTTCCTGGTCGTGAGGTCAATATTGGAATGGATTCAGCGTTATCAGTTGGACATCCTGCTGTTTTATCTAGTTCTTTAATTTTGATTCCGATAACTATTTTATTATCAGTCATTTTACCTGGTAATACGACCATTCCTTTTGGCGATTTAGCAACCATCCCATTTGCTGTTTGTTTGATGGCAGCAGTATTTGGTGGAAATATTATACGTACGGTCGTAGGAGGTACTATCTACATGGCAGTGATTATGTATATCACTTCATGGGTTGCTCCTTTAGTGACATTATCTGCAAAAGCAGCTAATTTTGATCTTAGTGGTCATTCACGAATCACAGCTCTAGTAGAAGGTGGTTTATGGCCAACGTGGTTATTTGTATTTGCAGCCAAGACACTACCGTGGCTGATACTAACTCTTATTTTGATCATTAGTTTATCTGTTATGTATTATCTCAATAAGGTTAAAAAAGAAGGAGAAATT

SEQ ID NO: 18902 - protein, 443 aa, Streptococcus agalactiae
MLDILQKFVNLGAIVVLPILIFIFGILLGTKPRKAFISGVTVGIGFVGLNMVVDLLGNSLGPAAQAMVKRFGLHLTTIDVGWPAASAISYGTLLGSLAIPIGVGINLLLLFLGMTKTLMVDMWNFWHAAFVASLVYAVTHNFALGLYATVVYMVMIYLLGDIIAPMIKTFYGFPNITFPHGTSAPGVIFAIPLNWLFDRIPGFNKIDAKPETIQKRFGVFGDTTVMGLIIGIVMGLLANYNVTNTLQLGIKTAAVMVLMPRMVALLMEGLTPISESANTFVQKRFPGREVNIGMDSALSVGHPAVLSSSLILIPITILLSVILPGNTTIPFGDLATIPFAVCLMAAVFGGNIIRTVVGGTIYMAVIMYITSWVAPLVTLSAKAANFDLSGHSRITALVEGGLWPTWLFVFAAKTLPWLILTLILIISLSVMYYLNKVKKEGEI

SEQ ID NO: 18903 - protein, 282 aa, Streptococcus agalactiae
ATGAAAAAATTATTGATTATGTGTGGCTCAGGGATTGCAACGTCAACAGTTGTGGTTGGAAAAGTAAAAACATGGCTCGAAGAAAATCACTATCAGGATCAAGTGCGTATTTACCAATCAAAAATCGCTGAAGAAATCAACCATATTGATGATTATGATATCGTTATCAGTACGACAGTTGTTCCAGATAATGTCCAAGATAAAGTTATTATGGGTTTACCGCTATTAACTGGTATGGGGGTCGATGCTGTTTGGTCAGAACTTGAAGCACAAATTAAGGAT

SEQ ID NO: 18904 - protein, 94 aa, Streptococcus agalactiae
MKKLLIMCGSGIATSTVVVGKVKTWLEENHYQDQVRIYQSKIAEEINHIDDYDIVISTTVVPDNVQDKVIMGLPLLTGMGVDAVWSELEAQIKD

SEQ ID NO: 18905 - protein, 828 aa, Streptococcus agalactiae
ATGAATCACAAAGAGCTCCATTTATTCAATAATCTCTCTTATATTGATTTATATCCTATTCAATTTGGGAAAGAGGCATGTGCTCCTCTCCATTCTTTTGGACCCTCATTAAAAGAGCATTATCTTTTCCACTATATCGTATCAGGTCGAGGTACCTTTTATAATACCGAAGAAGAAACCGCTCACAAATTGGAGGCGGGGCAAGGTTTTCTCATTCCTCCTCACTTAGTTTGTAGTTACGAGGCTGACAAGGCTGACCCCTGGACCTATATCTGGATTGAATTTGATGGTCTAAAAAGTGATTATTTTCTAAAGCAAGCTGGTTTAGACCATAAACACTTGATCTTCTCGCAAGAAAAGAATTCTTTTGATAGTCCAGTCTACACAGAAGCTATTAATATCTTAGCAAGTCATAACCAGCGAAGTGCAAAAGTCATTGCGCATCTCTATCTTTTTATAGATGCCCTAATTAGTCAGTCTATTAACCATAAAGTTATTCCTCATAATGAAACAAAGGATTTCTATATCCGTGAAGCCATTAACTTCATTGAACGTAATTTTCAATTTCCTATTACTGTTGAGGAAATAGCCAAATCCTGTAATTTAAATAGGCATTACTTTTGTCGTCTCTTCCGAGAACAAACCAATAGCTCGCCTCAACAATTTTTAATTCAGTATCGCTTGAGTAAGGCATGCGCTTTGCTAAAAAACCGTAATCTGAACCTCAGTGATATAGCCGAACAGATCGGCTACTCTAACCAATTTAATTTCTCTGCTGCTTTCAAACGTCAGTATGGAATATCTCCTAGACAGTGGCGTAAAACTCTT

SEQ ID NO: 18906 - protein, 276 aa, Streptococcus agalactiae
MNHKELHLFNNLSYIDLYPIQFGKEACAPLHSFGPSLKEHYLFHYIVSGRGTFYNTEEETAHKLEAGQGFLIPPHLVCSYEADKADPWTYIWIEFDGLKSDYFLKQAGLDHKHLIFSQEKNSFDSPVYTEAINILASHNQRSAKVIAHLYLFIDALISQSINHKVIPHNETKDFYIREAINFIERNFQFPITVEEIAKSCNLNRHYFCRLFREQTNSSPQQFLIQYRLSKACALLKNRNLNLSDIAEQIGYSNQFNFSAAFKRQYGISPRQWRKTL

SEQ ID NO: 18907 - protein, 1274 aa, Streptococcus agalactiae
ATGAAAAAAATGGGTTACTATATGGGATTAGCAGCGGCTTGCCTTGCACTATTAGCTGGATGTTCTAATAACAGTAATAAAGAATCAAAGCGTCTGATAATAAATCAGGAACAACAGAGATATCATATGCTATTTGGGATTCTGCTCAAGAGCCTGGAATTAGAAAGATAGCTGATAAATTTGAAGAAAAAAATCCTAAAATTAAGGTGAAAATTCAAGTGGTTTCTTGGGATGCTTATTGGACAATGCTTGAGGCAGGAGCAACAGGTGGATCATTGCCAGATACTTTCTGGATGCACTCTAATGAAATTTATCGTTATGGTGCAAATAAGATGCTTTTGTCACTTGATGATTACATTAAAAAGAGTAAAGAAGTTAAGCTCAGCAATTATCCAAAAGGGTTAACTAAAATCTATAATATCAAAGGTGAGCAATACGCAATACCAAAAGATTACGATACCATTGGTTTGTGGTATAACAAAAAAATGTTTGATGCAGCGGGGGTTTCATATCCAGATGAGACATGGGATTGGAACAAATTAAAAGAAGCTGCTAAAAAACTAACTAAGCCTGATGGTAGTCAATACGGCTTTTTAGCACCGCTTCACAATCAAGAAGGCTACTATAATTTTGTTTATCAAAATGGTGGTACCATTATTACAAAGGACAAAAAATCAGGATACGATGACCCTAAAACAGTCGAAGCCTTGAAATACTATTTAAGTTTTGTTAAAGAGAATTTATCACCAAAGGTGACAGAGGATAAAAAACGTGCTGAAGTGATGCAAAATGGACAAGCAGCCATGGGCTACTTCGGCTCATGGAACCTCAATTCTTTTGCTTCAAATGATTATATGAAAGAAAACTTCGATGTTGCAGTTCTACCAAAAGCAAATGATGGTAAACGTTCAACGATTTTCAATGGTTTGGGTAATGCTATTTCTGCCAAAACAAAACATCCACAAGCCGCTTGGAAATGGGTTGAATACTTAAGTTCAAAAGAAGCCCAAGATATGCAAGCCAAACTTGGTGTGGCAATCTCTGCTTATAAGGGTTCAGACAAGGTTTGGGTGGATTCTAATAAGACTTTTGCTATAAAACATTTCGTTGAAATGATTGATTATGCACAAATTCGACCATATTCAAATGCTACAACTAAGTGGGAAGATAAAGTCTATGAAGAATTAAAACCTGCATACTTAGGCAAAGAATCACTAGAAAAAGCCGTTAAGAAAATTACTAAAACAATGAATCGAGCGCTTGAGCGGGAAAAA

SEQ ID NO: 18908 - protein, 425 aa, Streptococcus agalactiae
MKKMGYYMGLAAACLALLAGCSNNSNKESKASDNKSGTTEISYAIWDSAQEPGIRKIADKFEEKNPKIKVKIQVVSWDAYWTMLEAGATGGSLPDTFWMHSNEIYRYGANKMLLSLDDYIKKSKEVKLSNYPKGLTKIYNIKGEQYAIPKDYDTIGLWYNKKMFDAAGVSYPDETWDWNKLKEAAKKLTKPDGSQYGFLAPLHNQEGYYNFVYQNGGTIITKDKKSGYDDPKTVEALKYYLSFVKENLSPKVTEDKKRAEVMQNGQAAMGYFGSWNLNSFASNDYMKENFDVAVLPKANDGKRSTIFNGLGNAISAKTKHPQAAWKWVEYLSSKEAQDMQAKLGVAISAYKGSDKVWVDSNKTFAIKHFVEMIDYAQIRPYSNATTKWEDKVYEELKPAYLGKESLEKAVKKITKTMNRALEREK

SEQ ID NO: 18909 - protein, 888 aa, Streptococcus agalactiae
ATGAAAAATAAGAAAAAATGGAATGAGTATTTGTGGGGGTGGGCATTGGTTGCTCCTACGATTATTGGTTTAATGGTCTTAAACATTATTCCTATTTTTCAAACGTTAAAGATGAGTTTTTTTAAGAGTGGTGATTTTGGACAGAATGATATTTTTGTAGGACTTGATAATTATAAGAGGTTAATTGAGGATGAACAAGTTTGGCAAGCCACATGGAATACTTTTAAATATACTCTCTTAGTAGTTCCCTTAACTGTTATTTTGGCGCTAGTTTTAGCAACGCTTCTCAACTCAAAGATTAAAGGTAAACATGTTTATCGTACAATCTTTTTCCTACCTATGGTTGCTGCTCCAGCAGCGGTCACTATGGTTTGGAAATGGCTTTATAATACAGATTTTGGCTTAATAAACTTTCTTTTACGTAAAATAGGATTAAATGGTTTGAATTGGATTGAGGACCCTAATATTGCCCTATACTCCATCGCTTTAATTGGTATTTGGAGCACTGTAGGTTATAGTATGATTTTGATCTTAGCTGGCTTACAAGAAATTCCAAAAGATTTTTACGAATCCGCTACGATTGATGGTGCCAGCGCTGTTAAACAATTTTTCTCTATAACGCTACCTTTAATCTCCCCTACTCTATTCTTTGTGGTAGTTACTAGTATTATTCAAGCAATGCAAGTTTTTGATGCTATTTACCTAATGGAGTCTGTTACAAGTCCGGCCTATAATAAGACTGTTTCGTTGGTCTACCTCTTTTACAACAATTCTTTTAAATATGCCGACCAAGGTTACGGATCCACTATCGTAATGTTATTACTTGTTATTATTTTGATTATTACCTTAATCCAAATGAAGGTACAGAAAAAATGGGTATATTATAGT

SEQ ID NO: 18910 - protein, 296 aa, Streptococcus agalactiae
MKNKKKWNEYLWGWALVAPTIIGLMVLNIIPIFQTLKMSFFKSGDFGQNDIFVGLDNYKRLIEDEQVWQATWNTFKYTLLVVPLTVILALVLATLLNSKIKGKHVYRTIFFLPMVAAPAAVTMVWKWLYNTDFGLINFLLRKIGLNGLNWIEDPNIALYSIALIGIWSTVGYSMILILAGLQEIPKDFYESATIDGASAVKQFFSITLPLISPTLFFVVVTSIIQAMQVFDAIYLMESVTSPAYNKTVSLVYLFYNNSFKYADQGYGSTIVMLLLVIILIITLIQMKVQKKWVYYS

SEQ ID NO: 18911 - protein, 831 aa, Streptococcus agalactiae
ATGTACAAAACAAAAAAGAAGTTTCCTTATTTGTGGGCACATGTGTTTTTGATTTTTGTAGCTCTAGGAATGATCATTCCTTTTATTTGGATGGTCCTAACTTCCTTTAAGACCATTACAGAATCAACACAACTAAATCCATTTCATTTTTTTCCAAGTAAATGGCAAGTGTCCAATTACACTGAAGTAATCAGAACAAACAATTTTCCCATTCTTTATTTCAATACTATTATGATGATGTTATGGCGTATCGTTAGTTCAGTATTATTTAGTGCTATGGCAGCATATGCATTTGCTCGTCTTAAATTTCCCGGAAGAAACCTTTTATTTGGATTAGTCCTATTTCAAATGATGGTTCCTCCACAATTATTTGTTATCCCACAATATCTAATGGTTAATCAACTAAATATGCGAAATACGATTTTCGCGTTGGTGTTTCCGGGGTTGGTTAGTGCCTTTGGTACCTTCTTACTTCGTCAGTTCTTTATCGGGCTACCAGATGAGTTAGAAGAGGCTGCTAAACTAGATGGTTGTAATATCGGGCAGACTTTCTTTAAAATTATGCTTCCTCTAGCAAAACCAGGTTTAATCGCTTTAGGAATTTTCACAGCTCTATTTGCCTTTAAAGACCTTTTGTGGCCTTTAATTATCAATTCTGAATCAGATGCAGCTACTCTTTCAAGTGCATTATCAAAAATACAAGGAGCTTATGCTGTTAATTATCCACAACTAATGGCAGCAAGTGTACTTGCTATATGGCCAATGGTAGTTCTTTATATTATATTTCAGAAACAGTTTATCCAAGGAATTTCAACTTCCGGTGGGAAGTTA

SEQ ID NO: 18912 - protein, 277 aa, Streptococcus agalactiae
MYKTKKKFPYLWAHVFLIFVALGMIIPFIWMVLTSFKTITESTQLNPFHFFPSKWQVSNYTEVIRTNNFPILYFNTIMMMLWRIVSSVLFSAMAAYAFARLKFPGRNLLFGLVLFQMMVPPQLFVIPQYLMVNQLNMRNTIFALVFPGLVSAFGTFLLRQFFIGLPDELEEAAKLDGCNIGQTFFKIMLPLAKPGLIALGIFTALFAFKDLLWPLIINSESDAATLSSALSKIQGAYAVNYPQLMAASVLAIWPMVVLYIIFQKQFIQGISTSGGKL

SEQ ID NO: 18913 - protein, 2199 aa, Streptococcus agalactiae
ATGCCAATTAATTTTCGTGAAAAAGAAAAAGAATTTCATCTCTATAATGACAGCCTCAGTTATGTTATTTGTGTCTTGCCAAATGGGCATATTGGAAATCTTTATTATGGGAAACGATTATCAGAAAATATGTCCTATGCTTATTTATTAGAAAATAAATATCGACCACTTACAGCCTATGTCTATGAAGATGATGATTGTTTTTCGTTACAACATACGCGTCAAGAATATGCTTCTTATGGCAGTGGAGATATGATTTTACCAGCTTTTGAAATTAGTCATGAAGATGGTAGTCATTTATCACATTTTGTTTTTTATGATTATGCTATTTCAAAGGGGAAGCCTCAATTATCTGGTTTACCTAATACCTATGTAGAATCTGATGAGGAAGCAACTAGTCTGGAGCTTTATTTAAAGGATCATAATAGTGAAACAGAACTTTGTTTAACTTATACCATCTATGAGAGTAGAGCTGTTATCACAAGAAATGCTAAATTTACCCAAAGAGGCGAAAAAGAGCTTTGTTTAAAAAGAGCCCTTAGCCTTTGCCTAGACTTACCTGATAAGGATTATGAATGGCTTCATTTAGATGGTGCTTGGGGAAGGGAACGTTACCTACAAAGTTCGCTATTACATCAAGGGAGCCAATCAATTTACAGTTTAAAGGGTGCTAGTAGTGCCGAACATAATCCTTTTATAGCTTTAAAAAGACCCGATGCAAATGAGCATGAGGGAGAAGTAATGGGCTTTTCCTTAGTATATAGTGGAAATTTTTTAGCACAGGTTGATGTGACACCATTTCATCAAACTAGAGTTAGTATGGGGATTCATCCGTTAGGATTTGAATGGTATTTAAAGTCAGGAGAAAGTTTCCAAACCCCTGAGGTTGTTATGGTTTACAGTCATTTAGGATTGAATGGCATGAGTCAAATCTATCACGACTTATTTAGCCAACGTTTGGCTAGAGGAGAATGGCGTGATAGAGAACGGCCTATTCTTCTTAATAATTGGGAAGCTATGACATTTAATTTTAATGAAAATTCCATTTTAAGCTTAGCTGAAGTAGCTGCTAAGCTTGGTGTAGAACTTTTTGTTATGGATGATGGCTGGTTTGGTCAAAGGAATAATGAGAAGGCTGGCCTTGGAGATTGGCGTGTGAATCAAAAAAAACTTCCCAATGGTTTACTTGGTATTAGTCAGAGAATCCATCAGTTAGGGATGTTATTTGGTTTGTGGATTGAACCAGAGATGGTCAACAAAGATAGCGATCTCTACCGAGAACATCCTGATTGGATTTTACATCATCCTAAGCATTCACAATCTCAAGGACGCCACCAGTATACACTAGATTTGTCTCGGGAAGAGGTATATCAAAATATTTATCAACAGTTACATGATCTGTTAGCTAATCATGGTATTGACTATATAAAATGGGACATGAATCGTTATATGACGGAGGCTTACAGCTATCATGCGACTAAAGAGCATCAAGGAGCAATCTTTCATCGGTATATCCTAAACCTTTACCGACTATATGAGACGTTAACCAGTGAGTTTCCACATATTCTATTTGAGTCATGCTCTAGTGGTGGAGCAAGGTTTGATCCAGGAATGCTTTATTATGCTCCGCAAACATGGACTAGCGATGATACGGATGCTTATGAACGTCTAAAAATTCAGTATGGTACAAGTCTGGTTTATCCTCTTATAACTATGGGAAATCATGTTTCGGAGGTTCCAAATCAACAACTCTTACGTACCACACCGCTTTCTACAAGAGCTAATGTAGCTTATTTTGGAAGTTTTGGATATGAGATTGACTTAATGCTTCTTGAAGAAGAGGAATTAGAGCTAATCAAAAAAGAGATTGATTTTTACAAAAATTATCGGAGAGTCTTCCAATTTGGTAATTTTACGCGTCTAATTAATCCGTTTGAAACTGATGATGCTGCTTGGCAAGTCATCTCAGAAGATGGACATCATGTTTTTGTAGGTCTCTATTTAGGTTTGCTAAAACTAAATGGTCCTTCTTATCATCGTTTACACTTAAAAGGTTTAGAAGCAGAAGCAAGTTATCGTTTAAATAATCAAGTCTATCTAGGAAGTGCCTTGATGAATGCTGGCTTAGTTATCAACGAAAAAGACTTCACAGAGGGCTATAAAGATTTTGCATCAGCTATATACCATTTAGAAAAGATG

SEQ ID NO: 18914 - protein, 733 aa, Streptococcus agalactiae
MPINFREKEKEFHLYNDSLSYVICVLPNGHIGNLYYGKRLSENMSYAYLLENKYRPLTAYVYEDDDCFSLQHTRQEYASYGSGDMILPAFEISHEDGSHLSHFVFYDYAISKGKPQLSGLPNTYVESDEEATSLELYLKDHNSETELCLTYTIYESRAVITRNAKFTQRGEKELCLKRALSLCLDLPDKDYEWLHLDGAWGRERYLQSSLLHQGSQSIYSLKGASSAEHNPFIALKRPDANEHEGEVMGFSLVYSGNFLAQVDVTPFHQTRVSMGIHPLGFEWYLKSGESFQTPEVVMVYSHLGLNGMSQIYHDLFSQRLARGEWRDRERPILLNNWEAMTFNFNENSILSLAEVAAKLGVELFVMDDGWFGQRNNEKAGLGDWRVNQKKLPNGLLGISQRIHQLGMLFGLWIEPEMVNKDSDLYREHPDWILHHPKHSQSQGRHQYTLDLSREEVYQNIYQQLHDLLANHGIDYIKWDMNRYMTEAYSYHATKEHQGAIFHRYILNLYRLYETLTSEFPHILFESCSSGGARFDPGMLYYAPQTWTSDDTDAYERLKIQYGTSLVYPLITMGNHVSEVPNQQLLRTTPLSTRANVAYFGSFGYEIDLMLLEEEELELIKKEIDFYKNYRRVFQFGNFTRLINPFETDDAAWQVISEDGHHVFVGLYLGLLKLNGPSYHRLHLKGLEAEASYRLNNQVYLGSALMNAGLVINEKDFTEGYKDFASAIYHLEKM

SEQ ID NO: 18915 - protein, 1170 aa, Streptococcus agalactiae
ATGACTGAAAAAGAAATACAGACAGCTTTTGCAAATGTTTTTCATAATGAGGCAGAGAGTTTTTTCTTCTCACCAGGACGTATCAATTTAATTGGAGAACATACTGATTATAATGGAGGGCATGTCTTTCCAGCTGCTATAACATTAGGAACATACGGAGCTGCCAGGAAAAGAAATGATCAATTATTACGCTTTTACTCAAGTAACTTTGAAGACATTGGTGTGATTGAAGTCAATTTGAATAATCTTGTTTACAATAAAGCTGATAATTGGGCTAATTATGCTAAAGGTGTTCTTAAGTTTTTACAAGAAGCAGGACATACTATCGATACCGGGATGGATATTTACGTTTCTGGCAATATCCCTAACGGTTCAGGTTTATCTTCATCTGCTTCGCTTGAATTATTGATTGGCATTATGGCAGAAGAGATTTTTAATCTTAAATTGGATCGTCTTGATTTAGTAAAAATCGGCAAGCAGACAGAAAATAAATTTATTGGTGTTAATTCTGGTATCATGGATCAGTTTGCTATTGGAATGGGAGCTGATAAACAGGCCATCTATCTTGATACCAACAGTTTAGCATACGATTTAGTTCCGCTTGAACTGGGAGACAATATTGTAGTTATCATGAATACCAATAAACGTAGAGAATTAGCAGATTCTAAGTATAATGAGCGCCGAGCAGAATGTGAAAAAGCAGTGGAAGAATTACAGATTGCTCTTGACATTAAAACTTTGGGAGACTTAGATGAAGCGACATTTGATGAGTATTCTTATTTGATAAAAGATGCTAATCGTCTCAAACGAGCCCGGCATGCGGTATCTGAAAATCAACGCACTTTAAAGGCAAAAGAAGCTCTTATATCAGGAGATTTATTACGATTTGGACGACTAATCAATGCTTCTCATGTTTCGTTAGAACATGACTATGAAGTGACTGGAATAGAGTTGGACACACTAGTTCATACTGCGTGGGAGCAAGATGGCGTGCTTGGAGCTCGAATGACTGGAGCAGGTTTTGGCGGTTGTGCTATTGCTATCGTAGCTAAAGATAATGTAAAACAATTTACAGCAAATGTCGGTAAAATCTATAGTGAAATTATTGGTTATTCACCTAGTTTTTATATTGCAGAAATTGCCGGAGGTAGCCATATTCTTACTTGTAAA

SEQ ID NO: 18916 - protein, 390 aa, Streptococcus agalactiae
MTEKEIQTAFANVFHNEAESFFFSPGRINLIGEHTDYNGGHVFPAAITLGTYGAARKRNDQLLRFYSSNFEDIGVIEVNLNNLVYNKADNWANYAKGVLKFLQEAGHTIDTGMDIYVSGNIPNGSGLSSSASLELLIGIMAEEIFNLKLDRLDLVKIGKQTENKFIGVNSGIMDQFAIGMGADKQAIYLDTNSLAYDLVPLELGDNIVVIMNTNKRRELADSKYNERRAECEKAVEELQIALDIKTLGDLDEATFDEYSYLIKDANRLKRARHAVSENQRTLKAKEALISGDLLRFGRLINASHVSLEHDYEVTGIELDTLVHTAWEQDGVLGARMTGAGFGGCAIAIVAKDNVKQFTANVGKIYSEIIGYSPSFYIAEIAGGSHILTCK

SEQ ID NO: 18917 - protein, 1482 aa, Streptococcus agalactiae
ATGATGAAAACATTATTGGATAAATTTGTAGATCAGCTTATTGAAATAGGGACCTTTGAAGAATTGGATAGGATTTACCTGAACAATCGTATTATGGCTTTAGTAGGTGAAGAAGGCTTGGATCAGCAAACAGATGCAGAGAGTTTGATTGACATCAAAGATAAACTTGTAGATATAGCCGTGAAAAATGGTGCTTGTCAGGAACTATTATCTAAGAAAGACATGCTCGGTGCACAGTTGATGGATTTTATAACTCCATTACCAAGTCAAGTTAATGCTGCTTTTTGGAAGACCTATAAAGAAAACCCTAAGCAGGCTATTGCTGATTTTTATCAGTTGAGTAAAGCAAATGATTATATCAAAGTTAAAGCTAATGCTAAAAACATCTATTATCAAGTGACTACAGATTATGGGAATTTAGAAATTACCATCAACCTCTCGAAGCCTGAAAAAGACCCTAAAGCTATTGCAGAAGCTAAGCTTTCTAAAGAATGTCATTACCCAAAGTGTCAACTTTGTTTAGAGAATGAAGGTTATCAAGGTCGTATTGATTATCCTGCACGTACTAACCATCGTGTTATTCGATATGAGATAAATAAAGAAATCTGGGGATTCCAATATTCACCTTACGCTTACTTTAATGAGCACTGTATTTTCTTTTATGGAAAACACCAGCCTATGAAGATTAGTTCTAAGACATTTGAGCGTCTCTTAGATATTGTCGATAGGTTTCCTGGATATTTTGCAGGATCAAATGCTGACCTTCCTATTGTCGGTGGCTCTATTTTAACCCATGAGCATTATCAAGGAGGTCGCCACACATTTCCAATGGAAGTAGCAGAGATAGAGGAAGACCTTACTTTCAAAGGTTTTAAAAAAGTAAGAGCAGGTATTGTAAAGTGGCCAATATCAGTTATACGCTTGCGAAGTGAAAATCAGCAACAATTAATCGCTTTAGCAACAAAGATTCTAGAGAATTGGCAGAATTATTCAGATGAGTCTGTTCATATTTTATCTGAGAGTTCAGGTATTCCACACCATACAATTACACCTATTGCTCGAAAAAAAGGTAATAGTTTCGAGTTAGATTTGGCCTTACGTGATAATCAAACATCAACAGAATTTCCAGATGGTATGTATCATCCACACCCTGATGTTCAACATATTAAGAAAGAAAATATTGGCTTAATAGAAGTCATGGGATTAGCGATTTTGCCGCCGCGTCTCAAGGAAGAACTTGGTTTAGTCGAAAGGTATCTTTTAGGGGAAGTTAACGAGGTTGCCTCCTATCACCAAAAGTGGGCAGATAATTTAAAATTAGTAAGTGAGATTACCTCAGGAAATGTTGAACAGATTGTCAAAGATGCTGTAGGTAAAGTGTTTTCCCGTGTACTTGAGGATGCAGGAGTATTCAAACGAACTCCAGAAGGTAAAGCGGCTTTTAGGAGATTTGTGGAGAGCGTAGGAGTCATAAAGGGAGAA

SEQ ID NO: 18918 - protein, 494 aa, Streptococcus agalactiae
MMKTLLDKFVDQLIEIGTFEELDRIYLNNRIMALVGEEGLDQQTDAESLIDIKDKLVDIAVKNGACQELLSKKDMLGAQLMDFITPLPSQVNAAFWKTYKENPKQAIADFYQLSKANDYIKVKANAKNIYYQVTTDYGNLEITINLSKPEKDPKAIAEAKLSKECHYPKCQLCLENEGYQGRIDYPARTNHRVIRYEINKEIWGFQYSPYAYFNEHCIFFYGKHQPMKISSKTFERLLDIVDRFPGYFAGSNADLPIVGGSILTHEHYQGGRHTFPMEVAEIEEDLTFKGFKKVRAGIVKWPISVIRLRSENQQQLIALATKILENWQNYSDESVHILSESSGIPHHTITPIARKKGNSFELDLALRDNQTSTEFPDGMYHPHPDVQHIKKENIGLIEVMGLAILPPRLKEELGLVERYLLGEVNEVASYHQKWADNLKLVSEITSGNVEQIVKDAVGKVFSRVLEDAGVFKRTPEGKAAFRRFVESVGVIKGE

SEQ ID NO: 18919 - protein, 988 aa, Streptococcus agalactiae
ATGGCAATTTTAGTCTTAGGTGGTGCAGGTTATATCGGGTCTCATATGGTAGATTACTTACTGACAAAGACGGATGAGACAGTTGTTGTTGTAGATAATTTAGTGACCGGACATAGAGAAGCAATACACTTAGAAGCGATTTTCTACAAGGGAGATTTAGCGGATAAGACTTTTATGAGACAGGTATTTGTAGAAAATCCTAGTATTGACACTGTAATTCACTTTGCAGCCTATTCTCTGGTAGCAGAATCTATGGAGCAGCCTTTAAAATATTTTAATAATAATACAGCAGGCATGATTAATCTCTTAGAAGTTATGACTGAATTTGCTATAAAATTTATCGTATTTTCTTCAACTGCAGCAACTTATGGTATTCCAAACGACATACCAATTAAAGAAATAACGCCTCAACGTCCCATTAACCCATATGGTGAAAGTAAGTTGATGATGGAAACTATTATGAAGTGGGCTGATGCTGCTTATGGGGTTAAATTTGTTCCTTTGCGCTATTTTAATGTTGCAGGAGCAAAACCGGATGGTTCAATTGGTGAAGATCATAAACCTGAGACTCACCTTTTACCAATCATTCTTCAAGTAGCACAAGGAAAACGCGAGAAGGTTATGATTTACGGTGATGATTATCAAACATCAGATGGAACCAATATTCGTGACTACGTTCATCCATTTGATATAGCCGCTGCTCACTTACTAGCGGTTGATTATCTTCGTAAAGGCAATCCTTCAACTGCGTTTAATTTAGGTTCCTCTATAGGATTCTCTAATTTCCAATTTTAGAAGTAGCTCGCAGAGTGACTGGTAAAGACATTCCTGTTGAAGTGACAAAACGTCGTATTGGGGATCCAGATATCCTTATAGCCGATTCTAGCAAAGCCCGTGACATTTTGGGTTGGCAGCCAGAGTTTGATGATATGAAAAGATATTCTTCACATGGGCTTGGCATTCGAGTCACCCAGATGGCTATAAATCC

SEQ ID NO: 18920 - protein, 331 aa, Streptococcus agalactiae
MAILVLGGAGYIGSHMVDYLLTKTDETVVVVDNLVTGHREAIHLEAIFYKGDLADKTFMRQVFVENPSIDTVIHFAAYSLVAESMEQPLKYFNNNTAGMINLLEVMTEFAIKFIVFSSTAATYGIPNDIPIKEITPQRPINPYGESKLMMETIMKWADAAYGVKFVPLRYFNVAGAKPDGSIGEDHKPETHLLPIILQVAQGKREKVMIYGDDYQTSDGTNIRDYVHPFDIAAAHLLAVDYLRKGNPSTAFNLGSSIGFSNFQILEVARRVTGKDIPVEVTKRRIGDPDILIADSSKARDILGWQPEFDDIEKIISSAWAWHSSHPDGYKS

SEQ ID NO: 18921 - protein, 689 aa, Streptococcus agalactiae
ATGACTATTATTAAGAAAAACTTCGGAGAGAAGCTGGCATTCCTCTACGAATTAAAAAATAAAAATGGAATGAAGGTCACTTTGACGAATTTTGGTGCACGTATAGTTGATATCTTCATTCCGATTGATGAACACTTGCGTAATATTAGTTTATCGGCTACTTCTGTTGAAGATTATTATCAAAAAGATATTTATGTGGGGGCAACGGTGGCCCCTGTGGCAGGTAGAATTTCTGGAGCTAAAACCCATATCAAAGGAAAATGTTATCATTTTACTGAAAATGAACCTAATAGGACATTACATAGTGGTGTTGATACATCTGTAGAACAGTATTGGTCTACAGAAATAGAAGATAAAGAGAATAAAATTATCTTTTCTCTCTTTCTTCCGGATGGTAAAAATGGCTTTCCTGGGAATGTGACTGTGATAGCTACTTATCAGTTGACAGAAGAAAATGAACTCAAGGTCAACTATCAAGCACAATCTGATTGTGATACCATTTTTAACCCAACAAATCATGTATATTTTAATTTAACAGGGGATTTTCAAAAATCCGTTGCTAGCCATCAGTTAAAGATTTCAAGCCAAGAGTTTGTGCCACTAGGGAAAGACCATTTACCTACTGGTGAAATACTGACTGTGGAAGGTACAGACTTTGTTTAGAGAATTTGCCCTTTTTTCAAAAGGTC

SEQ ID NO: 18922 - protein, 230 aa, Streptococcus agalactiae
MTIIKKNFGEKLAFLYELKNKNGMKVTLTNFGARIVDIFIPIDEHLRNISLSATSVEDYYQKDIYVGATVAPVAGRISGAKTHIKGKCYHFTENEPNRTLHSGVDTSVEQYWSTEIEDKENKIIFSLFLPDGKNGFPGNVTVIATYQLTEENELKVNYQAQSDCDTIFNPTNHVYFNLTGDFQKSVASHQLKISSQEFVPLGKDHLPTGEILTVEGTDFDLENLPFFQKV

SEQ ID NO: 18923 - protein, 192 aa, Streptococcus agalactiae
ATGAAAACCAATCAACCAGCTGTTGTTATTTACACCTATAATCATGGTCCAACAGCACTAGCAGCTTGTCATGGAGCTTTTAGTTTAGAATGCCAATCTCTTCCTAATGCTTGTAATCTAGAAAACTTAGGATCAATTTTGCTCGAAAAAGGGAAGGTATTTGATAGCCACTTTTCTTATCGTTTTGTGTTT

SEQ ID NO: 18924 - protein, 64 aa, Streptococcus agalactiae
MKTNQPAVVIYTYNHGPTALAACHGAFSLECQSLPNACNLENLGSILLEKGKVFDSHFSYRFVF

SEQ ID NO: 18925 - protein, 252 aa, Streptococcus agalactiae
ATGTCATACGAACAAGAATTTTTAAAAGACTTTGAAGAGTGGTTACAATCGCAAATAAGTATCAACCAAATGGCAATGGACAGTGCAAAGAAAGTTCTAGAGGAAGATAGGGATGAGCGAGCAGCAGATGCGTATATTCGTTATGAGAGTAAGTTAGACGCTTATCGCTTTTTGCAAGGGAAATTTAATAACTATCATAACCAAAAATCTTTCCATGATTTGCCTGATGGTCTTTTTGGACAACGTCATTAT

SEQ ID NO: 18926 - protein, 84 aa, Streptococcus agalactiae
MSYEQEFLKDFEEWLQSQISINQMAMDSAKKVLEEDRDERAADAYIRYESKLDAYRFLQGKFNNYHNQKSFHDLPDGLFGQRHY

SEQ ID NO: 18927 - protein, 309 aa, Streptococcus agalactiae
ATGGCAAAGCGTATTAAACCGAATAAAAAAAGAGAGCTTTTGAAAGCTAAAGGGATCAATTGGAAGGATGTTCGACTATCTCAAACTTTACAAGAAGTCGCATCACCGAAAAAAAAGGCTCCTGAAGCGCCAAAGGCAGTCGATCTTTTAGAAGGTTTAACTGCTAATAAACAAGATGTTTTAAAAGAAGCTGGCCTTGTCAGCCTTGAAGCGTTTGCGAAAGTAAGTGAAGCAGATGTTTTAGCACTAAAAGGTATTGGTCCAGCAGCTATTAAACAGTTAGTTGATAATGGTGTTGTTTTTGCAAAA

SEQ ID NO: 18928 - protein, 103 aa, Streptococcus agalactiae
MAKRIKPNKKRELLKAKGINWKDVRLSQTLQEVASPKKKAPEAPKAVDLLEGLTANKQDVLKEAGLVSLEAFAKVSEADVLALKGIGPAAIKQLVDNGVVFAK

SEQ ID NO: 18929 - protein, 576 aa, Streptococcus agalactiae
ATGCAGATTCTAGAAGATTTCGATGGCAAAGCATTACCAAAACTAGAAACGGATCGGCTTATCTTGCGTCAGCGAACGGTGGGGGATGTCCCAGCCATGTTTGATTACGTTTGCTTGGAAGAGGTTGCCTATCCAGCAGGACTCAGCCCAATAGCTTCTTTAGAAGATGAGTACGATTATTTTGAAAATCGCTACTATCAAAATCTGGAAAAGGCAAAATTACCATCTGGTTATGGTATTACCGTTAAAGGAAGTGACCGGATTATCGGCTCTTGCGACTTTAACCACCGCCATGAAGACGATGTTTTCGAGATTGGCTACATGCTTCATCCTGACTACTGGGGTCATGGCTATATGACAGAAGCTGTCGCAGCCTTGATTGAAGTCGGTTTTACCCTTCTCAATCTCCACAAAATCGAAATCCGCTGCTATGACTACAATAAGCAAAGCCAGCGCGTGGCAGAAAAACTAGGATTCACCCTTGAAGCAACCATCCGTGATCGTAAGGATAATCAAGGTAATCGCTGTGTCAATTTGATATATGGTTTGCTGAGGAGTGAGTGGGAGGGGAGAAAA

SEQ ID NO: 18930 - protein, 192 aa, Streptococcus agalactiae
MQILEDFDGKALPKLETDRLILRQRTVGDVPAMFDYVCLEEVAYPAGLSPIASLEDEYDYFENRYYQNLEKAKLPSGYGITVKGSDRIIGSCDFNHRHEDDVFEIGYMLHPDYWGHGYMTEAVAALIEVGFTLLNLHKIEIRCYDYNKQSQRVAEKLGFTLEATIRDRKDNQGNRCVNLIYGLLRSEWEGRK

SEQ ID NO: 18931 - protein, 648 aa, Streptococcus agalactiae
ATGAATGATTTTTTTAATTGGTTAATTACACTATATAATGATGATAAAGTTGCTTTTGTATCACTTTGTCTAACTTTAGTGTTTGGATTTTTTTCATGGTTAGCCCAATTAAAAAGAAACAAACAAGATGATATTCGACAAGCTGAACAGGATGAATTTAACAGACTAGCTCAAGATGAGTTAAAAGAATTTCAGAGTTTTCAAAAAAAGTTTGCAGAGTATCAACAAAAAGTGAGTGAATTGCAGTTTAATTTTGAAAGTCAAGAAAATTTCAAACCCTATTTTGAATTTAGCAAAACTAAATCAAGTACTTACGTTGAAGAAGGAAAATTGATTGCAAGAATATGTCTGACAAATGTAGGGAGAGGCACAGCTACAAAGATTACGACCAATCCTATTGACTACGACCAAGATGGAAATCCAATGTATTTTAGAACAATACCTACTAAACAGACACATGCTATATATGATTATTTTAGTGAGACTTTTGCTATTCCAAATGATTCTATATTTTTGAGTACAACTGCACTAGAACAGACAGAGAATCAGAATCATTGTATAGAGTTTAAAATTAAATTTTGTGATTCATCAGGCAGAACTTATGAACAAAAATTTGAATTCGGTTATGATAATTTTTTAGTAAGGGGA

SEQ ID NO: 18932 - protein, 216 aa, Streptococcus agalactiae
MNDFFNWLITLYNDDKVAFVSLCLTLVFGFFSWLAQLKRNKQDDIRQAEQDEFNRLAQDELKEFQSFQKKFAEYQQKVSELQFNFESQENFKPYFEFSKTKSSTYVEEGKLIARICLTNVGRGTATKITTNPIDYDQDGNPMYFRTIPTKQTHAIYDYFSETFAIPNDSIFLSTTALEQTENQNHCIEFKIKFCDSSGRTYEQKFEFGYDNFLVRG

SEQ ID NO: 18933 - protein, 2649 aa, Streptococcus agalactiae
ATGTCAAAAGAACTATCACCAAAATACAATCCTGCCGAGGTTGAGGCAGGCCGTTATCAAACTTGGCTTGACCAAGATGTTTTCAAGCCATCAGGGGATGCTGAGGCTAAGCCTTATTCTATTGTGATTCCACCACCAAACGTTACGGGTAAATTGCACTTGGGTCACGCTTGGGATACAACTCTACAAGATATCATTATTCGTCAAAAGCGTATGCAGGGCTTTGATACACTCTGGCTTCCAGGTATGGACCACGCTGGTATAGCCACTCAAGCTAAAGTTGAGGAGCGCCTTCGTGAGCAAGGCATTTCACGTTATGATCTTGGTCGTGAAAAATTCCTAGATAAAGTTTGGGAATGGAAAGACGAGTATGCAGCAACTATTAAATCTCAGTGGGGGAAAATGGGTCTTTCGGTTGATTATAGCCGTGAGCGTTTTACCCTTGATGAGGGACTTTCAAAAGCGGTAAGAAAAGTCTTTGTTGATTTGTACAATAGAGGTTGGATCTATCGTGGGGAGTTCATCATTAATTGGGATCCAGCAGCTCGTACAGCCCTTTCAGATATTGAAGTTATTCACAAGGATGTTGAGGGTGCTTTCTATCATATGAATTATATGCTGGAAGATGGCTCACGCGCTCTAGAAGTAGCAACAACTCGTCCTGAGACTATGTTTGGAGATGTGGCTGTAGCGGTAAATCCAGAAGATGCACGTTACAAGGATTTGATTGGTCAAAATGTTATCCTTCCTATCATCAATAAACCTATTCCAATCGTCGCTGATGAACACGCTGATCCAGAATTTGGAACAGGTGTGGTTAAGATTACGCCGGCTCACGACCCTAATGACTTTGCTGTAGGTCAACGCCACAACTTACCACAAGTTAACGTTATGAACGATGATGGTACTATGAATGAACTTGCGGATGAATTTAATGGTATGGATCGTTTCGAAGCTCGTAAGGCAGTAGTCGCTAAATTAGAATCGTTAGGAAACTTAGTAAAAATTAAAAAAACGACTCATTCTGTTGGTCATTCAGAACGAACAGGCGTTGTGGTTGAACCACGTTTATCTACTCAATGGTTCGTCAAGATGGATCAATTGGCTAAGAATGCCATTGCCAACCAAGATACAGAAGACAAGGTAGAGTTTTATCCACCACGATTTAACGATACTTTTATGAGCTGGATGGAAAATGTCCATGACTGGGTTATCTCTCGTCAATTATGGTGGGGACACCAAATTCCTGCATGGTACAACGTCAATGGTGAGATGTATGTTGGAGAAGATGCCCCAGAGGGTGACGGATGGACACAGGATGAAGACGTTCTAGACACATGGTTTAGTTCTGCTTTATGGCCGTTTTCAACAATGGGATGGCCAGACACCGAAGCAGCTGACTTCAAACGCTACTTCCCAACGTCAACCTTGGTAACTGGATACGATATCATCTTCTTCTGGGTATCGCGCATGATTTTCCAATCCCTTGAATTTACAGGACGCCAACCATTCTCAAATGTTCTTATTCATGGACTCATCCGTGATGAAGAAGGACGTAAAATGTCTAAATCACTCGGCAACGGGATTGATCCGATGGATGTCATTGAGAAATATGGTGCGGATGCCCTTCGTTGGTTCCTCTCAAATGGTTCAGCCCCTGGTCAAGATGTGCGTTTTTCATACGAAAAAATGGATGCTTCGTGGAATTTCATTAATAAGATTTGGAACATTTCACGCTATATCCTTATGAATAACGAAGGTTTAACGTTGGATCAAGCCAGAGAAAATGTGGAAAAAGTTGTTAATAGTCAAGTTGGAAATGTAACAGACCGTTGGATTCTCCACAATTTAAATGAGACTGTGGGTAAAGTTACTGAAAACTTTGACAAGTTTGAATTTGGTGTTGCTGGTCACATCCTTTACAACTTTATCTGGGAAGAATTTGCTAATTGGTACGTTGAGTTAACAAAAGAGGTTCTTTATAGTGACAATGAAGACGAGAAAGTCATCACTCGCTCTGTTCTTCTTTATACCTTAGATCAAATCTTGCGTCTTCTTCATCCAATCATGCCATTTGTGACAGAAGAAATTTTTGGACAATATGCAGAAGGATCAATTGTCCTTGCAAGTTATCCACAAGTTAACGCGACATTTGAAAATCAAACAGCTCACAAAGGCGTTGAAAGCTTGAAAGATTTGATTCGTTCAGTGCGAAATAGCAGAGCAGAGGTCAATGTTGCTCCATCTAAACCAATCACTATCTTGGTTAAGACAAGTGACAGCGAACTCGAAAGCTTCTTCAAAGACAATAGCAACTACATCAAACGCTTCACAAACCCAGAGACGCTTGAAATCAGCTCAGCAATTGCCACACCAGAACTTGCCATGTCATCAGTCATCACAGGTGCAGAAATTTTCCTCCCACTTGCTGACCTCCTTAACGTTGAAGAAGAGTTGGCACGACTTGAAAAAGAACTTGCTAAATGGCAAAAAGAACTAGATATGGTTGGCAAAAAACTCAGCAACGAGCGCTTTGTAGCTAACGCTAAACCAGAAGTCGTCCAAAAAGAAAAAGATAAACAGACCGACTACCAAACTAAATACGACGCAACCATAGCACGTATTGAAGAAATGAAGAAGTTGGTGAGG

SEQ ID NO: 18934 - protein, 883 aa, Streptococcus agalactiae
MSKELSPKYNPAEVEAGRYQTWLDQDVFKPSGDAEAKPYSIVIPPPNVTGKLHLGHAWDTTLQDIIIRQKRMQGFDTLWLPGMDHAGIATQAKVEERLREQGISRYDLGREKFLDKVWEWKDEYAATIKSQWGKMGLSVDYSRERFTLDEGLSKAVRKVFVDLYNRGWIYRGEFIINWDPAARTALSDIEVIHKDVEGAFYHMNYMLEDGSRALEVATTRPETMFGDVAVAVNPEDARYKDLIGQNVILPIINKPIPIVADEHADPEFGTGVVKITPAHDPNDFAVGQRHNLPQVNVMNDDGTMNELADEFNGMDRFEARKAVVAKLESLGNLVKIKKTTHSVGHSERTGVVVEPRLSTQWFVKMDQLAKNAIANQDTEDKVEFYPPRFNDTFMSWMENVHDWVISRQLWWGHQIPAWYNVNGEMYVGEDAPEGDGWTQDEDVLDTWFSSALWPFSTMGWPDTEAADFKRYFPTSTLVTGYDIIFFWVSRMIFQSLEFTGRQPFSNVLIHGLIRDEEGRKMSKSLGNGIDPMDVIEKYGADALRWFLSNGSAPGQDVRFSYEKMDASWNFINKIWNISRYILMNNEGLTLDQARENVEKVVNSQVGNVTDRWILHNLNETVGKVTENFDKFEFGVAGHILYNFIWEEFANWYVELTKEVLYSDNEDEKVITRSVLLYTLDQILRLLHPIMPFVTEEIFGQYAEGSIVLASYPQVNATFENQTAHKGVESLKDLIRSVRNSRAEVNVAPSKPITILVKTSDSELESFFKDNSNYIKRFTNPETLEISSAIATPELAMSSVITGAEIFLPLADLLNVEEELARLEKELAKWQKELDMVGKKLSNERFVANAKPEVVQKEKDKQTDYQTKYDATIARIEEMKKLVR

SEQ ID NO: 18935 - protein, 957 aa, Streptococcus agalactiae
ATGTCAAAGGTAAGGTATGGTGTTGTGTCAACGGCAAAGGTGGCGCCTCGTTTTATTGAAGGAGTCCGCTTAGCAGGAAATGGTGAAGTTGTGGCTGTATCGAGTCGAACTCTTGAGTCTGCGCAAGCTTTTGCCAACAAATATCATCTCCCAAAGGCTTACGATAAGTTAGAGGATATGTTAGCAGATGAGTCAATTGATGTGATTTATGTGGCAACAATTAATCAAGACCATTATAAAGTTGCTAAAGCAGCTCTGTTAGCGGGAAAACATGTGTTGGTAGAAAAGCCTTTCACATTGACTTACGACCAAGCGAATGAATTATTCGCTTTGGCAGAAAGTTGTAATCTGTTTTTGATGGAGGCACAAAAATCGGTATTTATTCCGATGACACAAGTGATTAAAAAATTACTTGCCTCTGGTGAAATAGGAGAAGTGATCTCCATCTCATCTACAACAGCCTACCCAAACATTGACCATGTAACATGGTTTAGAGAACTTGAGTTAGGTGGAGGAACAGTGCATTTTATGGCGCCCTACGCCCTGTCTTATTTACAATATCTATTTGATGCGACTATAACTCATGCTAGTGGGACTGCGACTTTTCCAAAAGGTCAAAGCGATAGTCAATCCAAACTACTCTTGCAATTATCAAATGGGGTCCTCGTAGATATCTTCTTGACAACACGTCTAAATTTACCGCATGAAATGATTATTTATGGAACTGAAGGTCGTCTAATCATTCCACATTTTTGGAAAACCACTCATGCAAAATTGGTGAGAAATGATACTAGTGCGCGAACGATTCAAGTTGACATGGTTAGTGATTTTGAGAAAGAAGCTTATCATGTTAGTCAAATGATTTTAGAAGGGCAAAGGGTAAGTCATATCATGACGCCTCAGTTGACGCTGTCAGGTGTTAAGATTATAGAAGACTTATACCGTTCATGGGGGAAA

SEQ ID NO: 18936 - protein, 319 aa, Streptococcus agalactiae; identical to SEQ ID NO: 916

SEQ ID NO: 18937 - protein, 150 aa, Streptococcus agalactiae
ATGTTTTCGAGCGATTTTGGATTTGAGATAATTAATGTTGACGACCTATCCTTGCAAGAGGAGAGATTTTTACCTTCAGAATTGCTGGCTTATGCACGTGATGAAAATGAGTCTTCTTTCGTACGTGATATTGAAGGGCANNNNNTTAAT

SEQ ID NO: 18938 - protein, 50 aa, Streptococcus agalactiae
  VARIANT 47, 48, 49: Xaa = Any Amino Acid
MFSSDFGFEIINVDDLSLQEERFLPSELLAYARDENESSFVRDIEGXXXN

SEQ ID NO: 18939 - protein, 663 aa, Streptococcus agalactiae
GTGCCGAGAGTGATACCAGTGACTCTATTTTTGAAAGAAGATGGCTTGTTTGTATTAGCTAATCATAAAAATATTAACCTTGTAAAAAAAGCACTTAATCGTGTTGAAAAGGTAGATTCTCCGAAACACCTCTTATTATCATTAGTGACTGCTTTCTCAAAGCAATATTTTGATGTTTTAGATACTATTTCTGAAGAAAGAGATAAACTAATCAATGATTTGCGTAAAAGACCAAACAAATCGAACTTGGCAAGGCTGGCAAATTTACAAAGTGGAACAGTACACTTAATGATGGGAACTAAGCAAAATTTTGAAATGCTGACCGATTTACAAAACATTGAGCAAGATAAAGAGAACACTAGAAATGAAAAGATGCAACTTCAAGATGCTATTATTGAAGCAAGACAATTATCTAACATGTGTTCCTTAAATTCACAGGTTTTCCAAGAACTTTCTTCTTATAATAATGTCCTCAGCAATAACCTTAACGACAATGTAACTACTTTAACAATTATTTCCATTGGTATTTCCATTATTGCTATGGTTACCAGTTTTTATGGAATGAATGTTAAGTTGCCTTTTGATAGTGTGGATGCTGTCTGGGTATTGATTATTTTAATTACGACTATCATTACTATTATGCTCTCTATTGTTATGTACATT

SEQ ID NO: 18940 - protein, 221 aa, Streptococcus agalactiae
MPRVIPVTLFLKEDGLFVLANHKNINLVKKALNRVEKVDSPKHLLLSLVTAFSKQYFDVLDTISEERDKLINDLRKRPNKSNLARLANLQSGTVHLMMGTKQNFEMLTDLQNIEQDKENTRNEKMQLQDAIIEARQLSNMCSLNSQVFQELSSYNNVLSNNLNDNVTTLTIISIGISIIAMVTSFYGMNVKLPFDSVDAVWVLIILITTIITIMLSIVMYI

SEQ ID NO: 18941 - protein, 948 aa, Streptococcus agalactiae
TTGTTGATCCCTAAGATCGAAACGGGGAGTTCAGTCCAGCCTTAATCCCAAGTTACGGTCGTCGAGACAATCATTTAGAAGAAATGGTTATCAAGCTTTATCGAACTGGAGTCACAACACGTGAAATCAGCGACATCATTGAGCGTATGTATGGTCATCATTACAGTCCAGCAACAGTATCTAATATCTCGAAAGCGACACAGGAAAACGTGGCTAGCTTTCATGAACGTTCCTTAGAAGCTAACTATACCGTATTATATCTTGATGGGACTTACCTTCCTCTGAGACGTGGTACAGTTAGTAAGGAATGCATCCACATTGCACTAGGCGTCACATCATATGGGCATAAGGCTATCCTTGGATATGACATCGCACCCAATGAAAACAATGCTTCGTGGTCAGACCTTCTAGAAAGATTTAAGGGTCAAGGTGTACAACAAGTCTCTCTTGTTGTGAGTGATGGTTTTAATGGACTTGATCAGCTTATCCAGCAAGCCTTCCCAATGGCCAAACAACAGCGTTGCCTTGTCCATATTGGCCGAAATATTGCAAGTAAGGTGAAACGAGCAGATCGTGCTCTAATTTTGGAGCAGTTTAAAACAATTTATCGCGCGATCAATGTAGAGGAAGCAAAGCAAGCCTTAGATAGCTTTATCAATGAGTGGAAACCACACTACAAGAAGGTAATAGAGACCTTAGAATCAATCGAAAATCTATTGATCTTTTATGAATTTCCTCATCAGATCTGGGGAAGTATCTACTCGACCAACCTTATTGAATCACTTAACAAAGAAATCAAACGTCAAACCAAAAAGAAAGTCGTCTTTCCCAATGAAGAATCCCTAGAACGCTATCTCGTCACACTATTTAGTGATTACAACTTCAAGCAAGGACAACGAATCCACAAAGGTTTTGGCCAATGTACGGACACACTGAAGCCTATTTGAT

SEQ ID NO: 18942 - protein, 317 aa, Streptococcus agalactiae
MLIPKDRNGEFSPALIPSYGRRDNHLEEMVIKLYRTGVTTREISDIIERMYGHHYSPATVSNISKATQENVASFHERSLEANYTVLYLDGTYLPLRRGTVSKECIHIALGVTSYGHKAILGYDIAPNENNASWSDLLERFKGQGVQQVSLVVSDGFNGLDQLIQQAFPMAKQQRCLVHIGRNIASKVKRADRALILEQFKTIYRAINVEEAKQALDSFINEWKPHYKKVIETLESIENLLIFYEFPHQIWGSIYSTNLIESLNKEIKRQTKKKVVFPNEESLERYLVTLFSDYNFKQGQRIHKGFGQCTDTLESLFD

SEQ ID NO: 18943 - protein, 1033 aa, Streptococcus agalactiae
ATGTCAATAGAATCAGATTTTTTCCGGAAAAAACGTTTTATTTTTTCATCGCTTGAGGAGTTTGGATTTATCAAATCTGACCAAGAGTATATCTATTGTCAAACATTTATGGATAATGACTTTAAAGCTATTATCACGATTTCATTGGATGGAAAGATAGCTGGTAAGGTTATTGATTCGGCACTTGAAGAAGAATATTTACCGCTTCGAGCAGCAAATTATAATGGTTCGTTTGTTGGCGAAGTACGATCGGCTTATATGGCTATATTAGGTGATATTTCAGATTCTTGTTGTAAGGACTTATTATTTACCAAAGATCAAAGTAATCGTTTAGCGGAGAAGATAGCTAAAACTTTTGAAGATTCAGTTGATTATCCATTTGCGAAGCACCCACAATATGCTTCCTATCGTGTGTCAGGTAAATGGTATGCTCTGCTTTTTCCATTGAAGATGGGGAAACTAGAAAATGTTCCAGCTCAACTGTCAGAAGATGAGGTTGAAGTTTTGAATATTAAAGTCAATCCTCAAGATATGGAAATACTTTTACAAAAAGAAGGTATTTATCCTTCTTATCATATGTCTAAAAAGACTTGGGTATCTATCGTTTTAGACAATACTTTGTCTGATATAGAAATTTTTAAATTGGTATCAGATAGTCGTAAGCTTGTTTCTCACAATAAAAAATCAAATTCTGAGCCAGAGTTTTGGATTATTCCTGCTAATCCTAAATTTTACGATATTGATAAGGAGTTTGCAGAGCATCAATTGATTGATTGGACTCAAAAAGGAAAGATTGCGGTGGGAGATTATGTGTTTATTTATATTACAGCACCTATTCGTGCTTTGCGCTATGTCTGTCAAGTGATAGAACGTGACCTTAAAACAAGTACTTACTTGGAGCAGAGATGTCAAAGCTTATATGCGACTCAAACTGATAAGGCAATTTGAAGATTCTACCTATCCTGTAGCATTTTTAGCAGAACACGGCGTTAAGACTGAGAGAGGACCACGGCGAATGACCAANNNNNTTAAT

SEQ ID NO: 18944 - protein, 345 aa, Streptococcus agalactiae
  VARIANT 342, 343, 344: Xaa = Any Amino Acid
MSIESDFFRKKRFIFSSLEEFGFIKSDQEYIYCQTFMDNDFKAIITISLDGKIAGKVIDSALEEEYLPLRAANYNGSFVGEVRSAYMAILGDISDSCCKDLLFTKDQSNRLAEKIAKTFEDSVDYPFAKHPQYASYRVSGKWYALLFPLKMGKLENVPAQLSEDEVEVLNIKVNPQDMEILLQKEGIYPSYHMSKKTWVSIVLDNTLSDIEIFKLVSDSRKLVSHNKKSNSEPEFWIIPANPKFYDIDKEFAEHQLIDWTQKGKIAVGDYVFIYITAPIRALRYVCQVIERDLKTSTYLGARDVKAYMRLKLIRQFEDSTYPVAFLAEHGVKTERGPRRMTXXXN

SEQ ID NO: 18945 - protein, 703 aa, Streptococcus agalactiae
ATGAAGAAAAGCTTTATTCATCAGCACAGGAGATTTCTTTTGTCAAAAATACTTTTACCAATATTTGATTGATAAGTTAGAAATCGTCGAAGTGCAAGGACCTATTCTTAGTCAGGTCGGGGATGGTATGCAAGATAATTTATCTGGTATTGAACATCCTGTATCGGTGAAAGTCCTTAATATACCTGAAGCTGAATTTGAAGTCGTTCACTCATTGGCTAAATGGAAACGCCATACTTTGGCAAGATTTGGGTTTAATGAGGGAGAAGGTCTTTTTGTTCATATGAAAGCTCTTCGTCCAGATGAAGATTCTCTTGATCCAACACACTCAGTTTACGTAGATCAGTGGGACTGGGAGAAGGTCATTCCTGATGGTAGACGTAATTTGGACTATCTAAAAGAAACTGTGGAAAAAATCTACAAAGCTATCCGCCTAACAGAGCTTGCCGTGGAAGCTCGTTTTGATATTGAATCCATTTTACCAAAGCGTATTACCTTTATTCATACAGAAGAATTGGTAGAAAAATACCCAGACTTAAGCCCTAAAGAGCGTGAAAATGCCATCGCTAAGGAGTATGGCGCAGTCTTTTTGATTGGTATTGGTGGAGAGTTAGCAGATGGTAAACCACATGATGGTCGTGCACCGGACTATGATGACTGGACAACACTCAGAAAATGGTTTTAAAGTCTCATGGTGATATTT

SEQ ID NO: 18946 - protein, 236 aa, Streptococcus agalactiae
  VARIANT 9: Xaa = Any Amino Acid
MKKSFIHQXQEISFVKNTFTQYLIDKLEIVEVQGPILSQVGDGMQDNLSGIEHPVSVKVLNIPEAEFEVVHSLAKWKRHTLARFGFNEGEGLFVHMKALRPDEDSLDPTHSVYVDQWDWEKVIPDGRRNLDYLKETVEKIYKAIRLTELAVEARFDIESILPKRITFIHTEELVEKYPDLSPKERENAIAKEYGAVFLIGIGGELADGKPHDGRAPDYDDWTTHQKMVLKVSMVIF

SEQ ID NO: 18947 - protein, 279 aa, Streptococcus agalactiae
GTGTGGAACGAACAGCTTGGAACTGCCTTTGAACTATCATCAATGGGAATTCGAGTTGATGAAGATGCTCTTAAACGTCAAGTTGTTCTCACCGGTGATGAAGATCGTTTAGAGTTTGAGTGGCATAAGACGCTATTACGTGGTTTCTTCCCTCTGACTATTGGTGGGGGAATTGGTCAATCACGATTAGCTATGTTCTTGCTTCGTAAAAAACATATTGGAGAAGTACAGTCAAGTGTCTGGCCAAAAGAAGTCAGAGATACCTTTGAAAATATATTA

SEQ ID NO: 18948 - protein, 93 aa, Streptococcus agalactiae
MWNEQLGTAFELSSMGIRVDEDALKRQVVLTGDEDRLEFEWHKTLLRGFFPLTIGGGIGQSRLAMFLLRKKHIGEVQSSVWPKEVRDTFENIL

SEQ ID NO: 18949 - protein, 447 aa, Streptococcus agalactiae
ATGATTAAAAAACTATTATTAACTTTAATAGCCATATTATGCCTTACAACGCTAAAATCAAACTTAAGTAGCGCTGACACCATGACTATTTCTCAACAACAATACCAACACATGATAACAAATAGTGACTTAATCGCCATCACAGATAAGGCGTTAGTAAGCAAAAGTCAACAATCTGAAGCGACTATTTTTATAGGACGTCCAACTTGCCAATATTGTAGAGCTTTCTTACCAAAATTATTAAAATCTCAAGCCACACTTCATTCAAAAATTTACTACCTTGATAGTCAAAAATACAAAGGGAAACGATTGAAGAGTTTTTTCAAAAAGCATCATATTACCACTGTTCCAAATTTAGCACATTATCAACAAGGAAAAATGACTAAATATCTTGTTCAAGGAAGCCAAGCTACACCTCAACAAATCCAAACTTTCTTAAGCCAAAAA

SEQ ID NO: 18950 - protein, 149 aa, Streptococcus agalactiae; identical to SEQ ID NO: 926

SEQ ID NO: 18951 - protein, 536 aa, Streptococcus agalactiae
ATGAGAGTAGTAGCAGGAACATTTGGAGGGCGTCCTTTAAAAACGCTTGATGGAAAAACAACTCGTCCAACAACTGATAAGGTTAAAGGCGCTATTTTTAATATGATTGGTCCTTTTTTTGAAAGTGGTCGTGTTTTAGACCTTTTTTCTGGCAGTGGTAGCTTAGCTATTGAGGCGATCTCAAGGGGATGGACCAAGCTGTCCTAGTTGAAAAAGATAGGCGTGCGCAGGTCGTTATTCAAGAAAATATTGCAATGACTAAGAGTCCGGAGCAATTTCAATTATTAAAAATGGAAGCCAACCGTGCTTTAGAACAATTAACGGGACAATTTGATTTGGTCTTGTTGGACCCGCCATATGCTAAGGAAGAAATTGTAAAGCAAATCCAAATCATGGATAGCAAGGGTTTATTAGGCGATGATATCATGATTGTTTGTGAAACGGACAAATCAGTTGATTTACCTGAAGAAATTGCTTCTTTTGGGATATGGAAACAGAAAATTTATGGCATTTCTAAAGTAACGGTCTACGTTCGT

SEQ ID NO: 18952 - protein, 179 aa, Streptococcus agalactiae
MRVVAGTFGGRPLKTLDGKTTRPTTDKVKGAIFNMIGPFFESGRVLDLFSGSGSLAIEAISRGMDQAVLVEKDRRAQVVIQENIAMTKSPEQFQLLKMEANRALEQLTGQFDLVLLDPPYAKEEIVKQIQIMDSKGLLGDDIMIVCETDKSVDLPEEIASFGIWKQKIYGISKVTVYVR

SEQ ID NO: 18953 - protein, 288 aa, Streptococcus agalactiae
ATGGATTACAAGTTAGTGATGATTATTCTCATCTTAGTCATATTGATTTATTTGTTGTTGCGCCTTCACTATTTAGAAGAGTTGCTAAAACATTATCACTTCAAAAATGATGAAGGAGTTTGTTCATTATCAAGAACAAAAAATCCATTGTATCTATTAATGGCAATGATTACTTTTTTGCCAAATCTTATCAATTGGATAGCTAATGGTTTTGAGGCAATAGACATTGTTCGCCTGATTCCTGTGGTAGTCTTTTTATGGTTGTATTATTGTGGAGATGACGACGAA

SEQ ID NO: 18954 - protein, 96 aa, Streptococcus agalactiae; identical to SEQ ID NO: 930

SEQ ID NO: 18955 - protein, 482 aa, Streptococcus agalactiae
ATGACAAAGAAAGCTTTATTTACAGGTTCATTTGATCCTGTTACTAATGGACATTTAGATATTATTGAGCGCGCCAGCTATCTATTTGATCATGTTTACATTGGGTTATTTTATAACCTTGAGAAGCAAGGTTACTTTTCGATTGAGTGCCGTAAAAAAATGTTAGAAGAAGCTATCCGTCAGTTTAAGAATGTTTCAGTTTTAGTGGCGCAAGATAGACTGGCTGTTGACTTAGCAAGGGAAGTGGGAGCAAAATATTTTGTTCGAGGTCTGCGTAATAGCCAGGATTTTGATTATGAAGCCAATTTGAGTTTTTTAATAAACAGTTGGCAGATGATATTGAGACAGTTTATTTATCAACGTCGCCATCTTTGAGTCCGATATCATCTAGTCGCATCCGTGAATTGATACATTTTAAGGCTTCTGTGAAGCCTTTTGTTCCAAAGAGTGTTGTTAGAGAAGTGGAGAAAATGAGTGAAGAA

SEQ ID NO: 18956 - protein, 161 aa, Streptococcus agalactiae; identical to SEQ ID NO: 932

SEQ ID NO: 18957 - protein, 1071 aa, Streptococcus agalactiae
GTGAAGAATAGAGATCCAAAAAGAAAACATAAAAGTTTACTAGGTCTGCTTAAATGGTGGATTATAGGTTTTGCTTTTTTATTGTTAGTATTAGCAAGCCTTGTAGTGAGACTACCTTATTATTTGGAAATGCCAGGTGGAGCTTATGATATCCGTTCGGTATTGAAAGTGAATAAAAAGGCTGATAAAGCTAAGGGTTCGTACAATTTTGTAGCGGTATCTGTCAGTCAAGCAACGCCAGCTCAGGTTCTTTATGCTTGGTTAACTCCTTTTACAGAATTATCTAGTAAAGAGGAGACAACAGGTGGCTTTAGTAATGACGATTATCTCAGAATTAATCAATTCTACATGGAGACTTCTCAAAATGAGTCCATCTATCAAGCTTTAAAGTTAGCTAATAAGCAAGTATCTCTTACTTATAAAGGAGTTTATGTGCTTAACTTAGCTAAAAATTCGACATTTAAAGATAGATTACATTTAGCTGATACAGTCACAGGAGTTAATGGCAAAAGTTTCAAAAATTCTTCTCAACTTATCAAATATGTTGCAGCTCTTCATCTAGGTGATAAAGTAAAGGTACAATACACAAGTCAAGGTAAAAAGAAAGAATCAGTTGGTAAAGTTATTAAACTATCAAACGGTAAAAATGGTATTGGTATCGGTTTGACAGACCATACAGAAGTATTATCTGATGTTCCTGTGGACTTTAATACTGAAGGTGTTGGAGGACCAAGTGCAGGTTTAATGTTTACTTTAGCGATTTACGACCAATTGGTTAAAGAAGATTTACGTAAAGGACGTAAGATTGCAGGTACTGGTACTATTGAGCAAAATGGGCATGTTGGCGATATTGGTGGAGCAGGTTTGAAAGTTGTTTCAGCGGCTAAAAAAGGAATGGATATTTTCTTTGTTCCTAATAATCCGATCGATAAAAATGCTAAAAAAGGCAAAACAAAGGTTCAGACGAATTATCAAGAGGCAAAAGCAGCAGCTAAGCGATTAGGTACGAAGATGAAAATTGTACCAGTTCAAAATGTTCAGCAAGCTATTGATTATTTGAAAAAAACAAAA

SEQ ID NO: 18958 - protein, 357 aa, Streptococcus agalactiae; identical to SEQ ID NO: 934

SEQ ID NO: 18959 - protein, 822 aa, Streptococcus agalactiae
ATGACAGAGCTTATAAGAATACTACATTTAAATGATCTGCACTCTCATTTTGAGAATTTTCCTAAGGTAAAACGATTTTTTCATGACAATCAAGCGCAGCCAATAGAGACGATTTCACTTGACTTGGGGGATAATATTGATAAAAGCCATCCTTTGACAGAAGCAAGCTCGGGAAAGGCTAATGTCCAATTGATGAATGAACTGGGTATTGAGCTTGCTACTATTGGTAATAATGAAGGAGTTGGTTTATCCAAAAAAGACTTGGACCAAGTCTACAAAGATTCAGATTTTACGGTTATTGTTGGCAATCTAAAAGATAACATAATCGAACCGAGTTGGGCAAAACCTTACATTATTTATGAGACGCAGCAAGGAACTAAGATTGCCTTTTTAGCTTATACTTTTCCTTATTATAAAACCTATGAACCTAATGGGTGGACGATAGAAGATCCAATTGACTGTCTTAAATGCCATTTACAAATAAATGAGATAAAAGAGGCAAATTGTCGCATTTTGATGAGTCATTTAGGTATTCGTTTTGATACAAGGATTGCTCAAGAATTTTCAGAAATTGACCTTATTATAGGTGCACATACACACCATTTATTTGAGGAAGGGGAGCTAATTAACGGTACATATCTTGCAGCAGCTGGTAAATATGGTCGCTTTGTTGGGAGTATTGATATAACTTTTGATAATCATACACTAAAAGATATTTTAATCTCAACATGTGATACAAAACAACTAACTGGTTATCCTTCGGACAGTGACTGGCTAAGAAGATTGAGTCAGAAGGTAAAGAACAGCTTAGAAAAGAAAGTT

SEQ ID NO: 18960 - protein, 274 aa, Streptococcus agalactiae
MTELIRILHLNDLHSHFENFPKVKRFFHDNQAQPIETISLDLGDNIDKSHPLTEASSGKANVQLMNELGIELATIGNNEGVGLSKKDLDQVYKDSDFTVIVGNLKDNIIEPSWAKPYIIYETQQGTKIAFLAYTFPYYKTYEPNGWTIEDPIDCLKCHLQINEIKEANCRILMSHLGIRFDTRIAQEFSEIDLIIGAHTHHLFEEGELINGTYLAAAGKYGRFVGSIDITFDNHTLKDILISTCDTKQLTGYPSDSDWLRRLSQKVKNSLEKKV

SEQ ID NO: 18961 - protein, 432 aa, Streptococcus agalactiae
ATGCTGTTTTACGCAGGTGCAGATGTTGCTATTATCAATTCTGGCTTAATTGTTCAGCCATTTGAAAAAGACTTTTCGAGGAAAAATCTCCACGAATCATTACCTCATCAAATGCGCCTCGCTAAATTGACAGTGAGTAGTCAAGAACTTTTAGAGATTTATGAAACTATTTATCAACAAGGTCAATTTTTAGCGCAACAAAAGATTCATGGTATGGGCTTTCGTGGCAAGTGCTTTGGAGAAGTTTTACATTCGGGATTTGATTACAAAAATGGAAAAATAGTGTATAATGAGAAAGATATTGATGCCAAAGAAGAAGTGATTCTTGTAATCGTTGATCAGTATTATTTTGCATCGTATTTTGAGTGTTTAAAAACGAAAAAAGTAGACTTGCTTTTCCTGAATTACTCAGAGATGTGGCAGCAGATTATT

SEQ ID NO: 18962 - protein, 144 aa, Streptococcus agalactiae
MLFYAGADVAIINSGLIVQPFEKDFSRKNLHESLPHQMRLAKLTVSSQELLEIYETIYQQGQFLAQQKIHGMGFRGKCFGEVLHSGFDYKNGKIVYNEKDIDAKEEVILVIVDQYYFASYFECLKTKKVDLLFLNYSEMWQQII

SEQ ID NO: 18963 - protein, 576 aa, Streptococcus agalactiae
ATGCGAAAAGAAGTGACACCAGAGATGCTTAACTATAATAAGTATCCTGGCCCACAGTTCATTCACTTTGAAAATATCGTTAAAAGTGATGATATTGAATTTCAACTTGTTATTAATGAAAAATCAGCTTTTGATGTGACTGTCTTTGGACAACGTTTTTCTGAGATTTTATTAAAATATGATTTTATCGTTGGCGATTGGGGTAACGAGCAGTTGAGGCTAAGAGGCTTTTACAAAGATGCTAGTACAATTAGAAAAAATAGCCGGATTTCACGTTTAGAAGATTATATTAAAGAGTATTGTAACTTTGGTTGTGCTTATTTTGTGTTGGAGAATCCAAATCCTAGAGATATTAAATTTGATGATGAAAGACCTCATAAGCGTCGTAAGTCAAGATCCAAATCACAATCATCAAAGTCACAAACTAGAAATAATCGTTCCCAGTCAAATGCCAATGCTCATTTTACAAGTAAAAAGCGTAAAGACACAAAACGCCGTCAAGAACGTCATATTAAAGAAGAGCAAGATAAGGAAATGACCTCTGCAAAGCAGCATTTTGTTATTCGTAAGAAAAAA

SEQ ID NO: 18964 - protein, 192 aa, Streptococcus agalactiae; identical to SEQ ID NO: 940

SEQ ID NO: 18965 - protein, 1104 aa, Streptococcus agalactiae
ATGCCTAAAAAAACTGATACACCCGCCTATAAACCCTCTATTTATAGCTTAACTCGCGATGAACTAATAGCTTGGGCTATTGAACATGGAGAAAAGAAATTCCGTGCTTCACAAATCTGGGACTGGCTCTATAAAAAGCGTGTGCAAAGCTTCGATGAAATGACTAACATTTCCAAAGATTTTATTGCACTTTTGAACGAGAATTTTGTTGTTAATCCTCTAAAACAACGTATTGTTCAAGAATCTGCTGATGGAACTGTTAAATACCTTTTTGAATTACCTGATGGCATGCTGATTGAGACGGTTTTGATGCGTCAACATTATGGTTTATCAGTATGTGTAACGACTCAAGTTGGTTGTAACATTGGTTGCACTTTCTGTGCAAGTGGTTTAATAAAGAAACAACGTGATCTTAACAATGGCGAAATCACTGCTCAAATTATGCTTGTTCAAAAATATTTTGATGAACGTGGACAAGGTGAGCGCGTTAGTCACATTGTGGTCATGGGAATAGGTGAACCCTTTGATAACTATACCAATGTATTAAAATTCTTGCGTACAGTTAATGATGATAATGGATTAGCTATTGGTGCACGTCACATTACAGTGTCTACTTCAGGTTTAGCACATAAAATTCGTGAATTTGCAAATGAAGGTGTACAAGTTAACTTAGCAGTATCTCTTCATGCTCCAAATAACGATTTACGATCAAGTATCATGCGTATTAATCGTTCTTTCCCTCTTGAAAAGTTGTTTGCGGCTATTGAATATTATATTGAGACGACTAACCGTCGTGTAACATTTGAGTATATTATGTTAAATGGTGTCAACGATACCCCAGAAAATGCTCAAGAGTTAGCAGATTTAACGAAAAAGATTCGCAAATTATCTTATGTCAATTTAATTCCTTACAATCCTGTCTCAGAACATGACCAGTATAGTCGTAGTCCTAAAGAGCGTGTAGAAGCTTTCTATGACGTTTTGAAGAAAAATGGAGTTAACTGTGTTGTTCGTCAAGAACATGGTACGGACATTGATGCAGCTTGCGGGCAATTACGTTCAAACACAATGAAACGCGATCGTCAAAAAGCGAAGGTAGGGCAG

SEQ ID NO: 18966 - protein, 368 aa, Streptococcus agalactiae; identical to SEQ ID NO: 942

SEQ ID NO: 18967 - protein, 513 aa, Streptococcus agalactiae
ATGCTTAAAAGATTACTTACTGAAGATGGGGAATTGACAAAGATTAGTCGTCGTTTCGTTTGGATGTTAGTGATTATCTATTGTCTTATTATTGTCAGGATGTGTTTTGGGCCTCAAATTATGATTGAGGGGGTATCAACTCCGAATGTTCAGCGCTTCGGAAGAATTGTAGCTCTTTTAGTACCATTTAATTCTTTTCGTAGTTTAGATCAGCTAACTAGCTTTAAAGAGATTTTTTGGGTTATTGGTCAAAATGTAGTGAATATTTTACTGCTGTTTCCTCTCATTATAGGGTTACTATCCCTAAAGCCAAGTTTACGGAAATATAAAAGCGTTATATTACTTGCTTTCTTGATGTCTCTTTTCATAGAGTGTACTCAAGTTGTTTTAGATATTTTAATAGATGCTAATCGGGTTTTTGAAATCGACGATCTATGGACAAATACCTTAGGCGGTCCTTTCGCCCTATGGACTTATCGAAACATAAAAGGTTGGCTTCTAACTATTAGAAAA

SEQ ID NO: 18968 - protein, 171 aa, Streptococcus agalactiae; identical to SEQ ID NO: 9736

SEQ ID NO: 18969 - protein, 1743 aa, Streptococcus agalactiae
ATGTCTATTATAAAAAATTTGTGGTGGTTTTTTAAGGAAGAAAAGAAGCGCTATCTTATTGGAATTTTGTCATTAAGTTTGGTTGCGGTGTTAAATCTTATCCCTCCTAAAATCATGGGATCAGTTATTGATGCTATTACAACTGGAAAATTAACAAGACCACAATTACTCTGGAATTTATTAGGTTTGGTTTTGTCAGCTTTAGCTATGTATGGGCTGCGTTATATTTGGCGTATGTATATTTTAGGGACTTCTTACAAATTGGGTCAAGTTGTCAGATACCGTTTATTTGAACATTTTACAAAAATGTCTCCTTCTTTTTATCAGAAATATCGTACAGGTGATTTAATGGCGCACGCGACCAACGACATCAATTCTCTAACACGTCTTGCAGGAGGAGGAGTTATGTCAGCAGTGGATGCCTCTATCACAGCATTAGTAACGCTTATCACCATGTTCTTTACTATTTCGTGGCAAATGACATTAATTGCGGTTATCCCTTTGCCCTTAATGGCCTTAGCAACTAGTAAATTGGGGCGAAAAACCCATGAAACCTTCAAAGAATCTCAGGCAGCCTTTTCAGAATTAAATAATAAAGTGCAAGAAAGTGTCTCTGGCGTCAAAGTGACTAAATCATTTGGTTATCAAGAACAAGAAATTGCTTCTTTTCAAGAGGTTAATCAGATGACTTTCGTGAAGAACATGCGGACCATGACTTATGATGTCATGTTTGATCCTTTAGTTCTTCTTTTTATAGGTGCCTCCTACGTATTAACATTGGCTATGGGAGCTTTTATGATTTCAAAAGGTCAAGTTACTGTTGGTGACTTGGTAACATTTGTGACGTATTTAGATATGTTGGTATGGCCCTTGATGGCGATTGGTTTCTTGTTCAATATGGTACAGCGTGGTAGTGTTTCTTATAACCGTATTAATAGCCTACTTGAGCAAGAATCGGATATAACTGACCCTTTAAATCCTATCAGACCTGTTGTCAATGGAACATTAAGATATGATATTGATTTCTTTAGATACGACAATGAAGAAACCTTAGCCGATATTCATTTCACCTTAGAAAAAGGTCAAACCTTAGGTTTGGTAGGTCAAACGGGATCAGGGAAGACAAGTCTTATTAAGTTATTGCTACGTGAACATGATGTGACTCAGGGAAAAATTACTTTAAATAAACATGATATACGTGATTATCGATTGTCTGAGTTACGTCAACTAATCGGTTATGTTCCTCAAGATCAGTTTTTATTTGCTACCAGTATTTTAGAAAATGTTCGCTTTGGAAATCCAACTCTATCTATCAATGCTGTTAAAAAAGCAACTAAATTGGCTCATGTTTACGATGACATTAAACAGATGCCAGCAGGATTTGAGACTCTAATTGGAGAAAAAGGAGTCTCATTATCTGGTGGACAAAAACAAAGGATTGCGATGAGTCGTGCCATGATTTTAGATCCAGATATTCTTATTTTGGATGATTCTCTATCAGCAGTGGACGCTAAAACGGAACATGCCATTATTGAAAATCTTAAAACGAATCGTCAAGGGAAATCGACTATTATTTCAGCACATCGATTATCAGCTGTTGTGCACGCAGACCTTATCTTAGTTATGCAAGACGGCAGAGTCATCGAGCGAGGTCAGCATCAAGAGTTGCTAAATAAAGGTGGTTGGTATGCTGAAACGTATGCCTCACAGCAATTAGAAATGGAGGAAGCATTTGATGAAGTC

SEQ ID NO: 18970 - protein, 581 aa, Streptococcus agalactiae; identical to SEQ ID NO: 946

SEQ ID NO: 18971 - protein, 1737 aa, Streptococcus agalactiae
ATGAAGTCTAATCAATGGCAAGTCTTTAAGAGATTAATCTCCTATTTACGCCCTTATAAATGGTTTACAGTATTAGCTCTATCTCTCTTATTGTTGACGACTGTTGTTAAAAATATTATTCCTTTAATTGCTTCACATTTTATTGATCACTATCTGACAAATGTTAATCAAACAGCAGTTCTTATTTTAGTGGGATATTATTCAATGTATGTCTTGCAGACCTTAATTCAATATTTTGGGAATCTCTTTTTTGCGCGTGTTTCTTATAGTATTGTTAGAGATATTCGTAGAGATGCTTTTGCTAATATGGAAAGGCTTGGCATGTCTTATTTTGATAGGACACCGGCAGGATCTATAGTGTCACGTATTACTAATGATACTGAAGCAATATCTGATATGTTTTCGGGTATTTTATCGAGTTTTATCTCGGCGATATTTATTTTTACAGTTACTCTGTACACTATGTTGATGCTAGACATTAAACTAACAGGACTTGTCGCTCTTTTATTACCTGTTATCTTTATATTAGTGAATGTCTATCGGAAAAAATCAGTCACTGTCATTGCTAAAACGAGAAGTTTACTTAGTGATATCAACAGTAAATTATCAGAAAGTATTGAAGGAATTCGCATTGTACAGGCTTTTGGTCAAGAAGAGCGCTTGAAGACTGAATTTGAGGAAATTAACAAAGAGCATGTTGTGTATGCCAATCGTTCTATGGCTCTTGATAGTCTCTTCTTAAGACCGGCGATGTCTCTTTTAAAACTCCTAGCATATGCTGTTCTTATGGCTTATTTTGGATTTACAGGAGTTAAAGGAGGTCTTACGGCAGGATTGATGTATGCTTTTATTCAGTACGTTAATCGTCTCTTTGACCCTTTAATTGAAGTAACGCAAAATTTTTCAACCTTACAAACATCAATGGTATCAGCAGGGCGTGTGTTTGATTTGATTGATGAAACAGGTTTTGAACCAAGCCAAAAAAATACAGAAGCTTTTGTGAGAGAAGGAAATATCGAATTTAAAAATGTATCATTCTCATATGATGGAAAAAAACAAATCCTTGATAATGTTTCTTTTAGTGTTAAAAAAGGTGAAACGATTGCTTTTGTAGGAGCGACAGGTTCTGGAAAATCATCTATTATTAATGTCTTTATGAGGTTTTACGAATTTCAATCTGGACAAGTTTTATTAGATGGGAAGGATATTAGGGATTACTCACAAGAACAATTGCGAAAGAATATTGGACTCGTCTTACAAGACCCCTTTTTATATCATGGCACTATTAAATCTAATATCAAAATGTACCAAGACATCACCGATCAAGAGGTACAGGACGCAGCAGAGTTTGTTGATGCTGATCAATTTATTCAGAAGTTGCCAGATAAGTACGATGCAGCTGTTTCAGAACGTGGGTCAAGTTTTTCGACTGGACAACGCCAACTATTGGCGTTTGCCAGAACTGTGGCTAGTAAACCTAAAATTTTAATCTTAGATGAAGCGACAGCAAATATTGATTCGGAAACAGAGCAGATTGTACAAGATTCGTTAGCAAAAATGCGTCAAGGTCGAACAACAATTGCCATTGCTCACCGCTTATCAACCATTCAAGATGCTAATTGTATCTATGTTCTTGATAGAGGAAAGATAATTGAAAGTGGGAATCACGAGTCTTTATTAGACCTAAAAGGGACTTATTATCGTATGTACCAATTACAAGCTGGCATGATGGAGGTC

SEQ ID NO: 18972 - protein, 579 aa, Streptococcus agalactiae; identical to SEQ ID NO: 948

SEQ ID NO: 18973 - protein, 563 aa, Streptococcus agalactiae
ATGTTACTATTGGTAGATAATTACGATTCTTTTACCTATAATTTAAAGCAATATTTAAGTGTCTATAAAGAGGTATTCGTCATAAAAAATGATGATCCTAACCTTTTTTTATTAGCTGAGAGCGCAGAAGCCATCGTCTTATCACCTGGACCAGGACACCCAAAGGATGCTGGGAAAATGGTAGAATTAATCAATCAGTTTATAGGAAAGAACCTATTCTAGGTATCTGTTTGGGGCATCAAGCGCTTGCCGAGTGCTTGGGTGGGCGATTAAATTTAGCAAATCACGTTATGCATGGTAAACAAAGTTGGGTAACAATAAACGACCATACTAGTTTGTTTAAGGGAATTGATAGTCCAACCCAAGTTATGCGTTATCATTCATTGGTAGTGACTGATTTACCAGAGAATATTGCTGTTATTGCACGATCAAATGAGGATAATGAAATCATGGCATTCCATTGCCCCAGCTTAAAGGTATATGCGATGCAGTTTCATCCTGAGTCAATCGGGAGTATTGATGGAATGAAAATGATTGAAAACTTTTTGACGTTAATTAATGAC

SEQ ID NO: 18974 - protein, 188 aa, Streptococcus agalactiae
MLLLVDNYDSFTYNLKQYLSVYKEVFVIKNDDPNLFLLAESAEAIVLSPGPGHPKDAGKMVELINQFIGKKPILGICLGHQALAECLGGRLNLANHVMHGKQSWVTINDHTSLFKGIDSPTQVMRYHSLVVTDLPENIAVIARSNEDNEIMAFHCPSLKVYAMQFHPESIGSIDGMKMIENFLTLIND

SEQ ID NO: 18975 - protein, 537 aa, Streptococcus agalactiae
ATGAAAACAAGAACAACTACCTATATTGCACTCATGGTTGCACTACTTATTGTTTTAGGTTTTATCCCAGGGATCCCATTAGGTTTCATTCCAGTCCCAATTGTTTTACAAAATCTTGGTGTTATGCTGGCAGGTGCTCTGCTTGGTAGTAGGAAGGGTTTCCTAGCTGTGGCTATTTTCTTGCTCTTAGTTGCTATTGGTGCACCATTTTTACCAGGAGGACGGTCAGGTCTCGTAACGCTGTTTGGGCCAACAGCAGGCTATCTGCTGACTTATCCATTTGCAGCTTTTTTTATCGGCCTAGGGCTTGAGAAAGTGAAAACAACAAAACTCTGGGTTCAATTCCTTATTATTTGGATATTTGGCGTACTATTGATTGATATTTGTGGTAGCATCGTTCTTTCCTTTCAAACTTCTCTACCCTTAACTAAATCACTATTTTCTAACCTTATTTTTATTCCTGGGGATACCTTAAAAGCATCCATTTGCTTGATTATTTATCGTAAATTTGCAAACAGATTAACTCATCTATACAAC

SEQ ID NO: 18976 - protein, 179 aa, Streptococcus agalactiae; identical to SEQ ID NO: 952

SEQ ID NO: 18977 - protein, 990 aa, Streptococcus agalactiae
ATGTCATTTCAAACAAATTATATCCATTTGGCTGACGAAATATTATCTGGAAAGACTAGCATTTCTTATGAACAAGCGCTGGAAATTCTAAATAGCGATGAGAACTGGTGGGAAATCTACGCTGCTGCCTTATACCTTAAAAATCAAGTTAGCCGAAATAATATTCGCCTTAACGTTTTATTAAGTGCTAAGCAAGGACTTTGTGCAGAAAATTGTGGTTACTGTTCTCAATCTAAAGAAAGCACTGCTGACATTGATAAATTTGGTCTGCTTCCTCAAAATGTCATTCTAAAACAGGCTATTGTCGCTCATCAAAATGGTGCTAGCGTCTTTTGTATTGCGATGAGTGGAACTAAGCCTAGCAAGAGAGAAATTGAGCAGTTATGTCAAGTCATCCCTGAAATCAAAAAAAGCCTCCCTCTAGAAATATGCCTTACCGCTGGTTTTTTGGATAGAGAACAACTTCATCAGCTAAAACAAGCAGGAATTGACCGTATCAATCATAATCTCAACACCCCCGAAGAAAACTACCCCAACATTGCAACGACGCATAGCTTCAAAGATCGTTGTGATACTTTAGAAAGAATTCACAATGAAGACATTGATGTTTGTTCTGGATTCATTTGTGGTATGGGAGAGAGCGATGAGGGGCTCATCACATTAGCTTTCAGACTAAAAGAGCTGGACCCCTATTCTATCCCTGTCAATTTTTTACTTGCTGTTGAAGGAACACCTCTTGGAAAATATAACTATTTGACTCCCATTAAATGCTTAAAAATTATGGCCATGTTGCGTTTTGTTTTTCCTTTCAAGGAATTAAGATTAAGCGCTGGACGAGAGGTCCATTTTGAGAATTTTGAATCATTAGTCACCTTACTTGTTGACTCAACTTTTTTGGGAAATTACCTAACAGAGGGCGGTCGCAATCAACATACCGATATTGAATTCTTGGAAAAATTACAACTAAATCATACTAAAAAGGAATTAATT

SEQ ID NO: 18978 - protein, 330 aa, Streptococcus agalactiae; identical to SEQ ID NO: 954

SEQ ID NO: 18979 - protein, 492 aa, Streptococcus agalactiae
ATGAAAAAACTATTTAAAAAAGCGATAGCTATGTGCCGAGATTTGCCGCTTAATTTTGTAATTGTTGAACTTAGTTTGTATCAAAGAGAGGATGGCTCATCTGATAATATTAAATGGATTTCTAAGAGAATTCTTGAGGTAACGGTAACTGATCAGCAATGGATTTACCATTTGAGGATGCTTAATTTACCAAAACTTAAGCCAATGTCACTAGCATCCAGTGACTGTCCTGCAAGGGAAGAGAAGGCTAGTCTTATTTCAATAGAAGAATGTCAAAAATTCACTAGCTTAGTGCGAGATAAAAATCCTTTTCACCAAGGGGAAGCAGCTATTGTGCCTGCGGCTCTATTATTGGAAAAAATAATGGAAGTTAGAAAAGGAAAAATAAAGGAGATTCATTTGACTTTTTTATCTCCAGTAAGGGTGAATCAAGAATTCTCAGTGCAAGTAGTGGATAACACAGTGATTATTTTTCAGCATCAAATATTATGG

SEQ ID NO: 18980 - protein, 164 aa, Streptococcus agalactiae; identical to SEQ ID NO: 956

SEQ ID NO: 18981 - protein, 1113 aa, Streptococcus agalactiae
ATGAAGAATAGAGATGTTTATATTGGTTTTGGGCTACGAACACCTATCGGTATAAAAGGGAAGCAATTTAAACATTACCGTCCAGAACTTTTAGGAGCACACCTTTTAAATCAAATAAAAAAAATAGAATCAGAATCTAACATTGATAGTATTATTTGTGGGAACACAGTTGGTACTGGGGGCAATATTGGTCGTTTGATGACTCTTTTTTCTGATTATGAATCCTATATTCCAGTACAAACGATTGATATGCAGTGTGCTTCATCAAGTTCTGCCTTGTTTTTTGGTTATCTAAAAATCAGTACCGGTATTAATGAAAAAGTTCTTGTTGGGGGGATTGAAAGTAGTTCTCTTCAACCTATGAGACGTTATGCTAAAGAAGATAATCGTAACGGAGAATATACAGTTGCTCAGTTTTCTCCTGACTCTTATGCTGAAACTGTAATGTTAGAAGGGGCCCAGAGAGTCTGTCAAAAATATGGTTTTAGAAGAGAAATGTTAGATAAATTGGCATTCTTGAGCCATAAACGCGCCTTAACAGCTAAACAAGGTGGCTATTTAGAAGAGGTAATCTTACCAATGGAAGGGATGCGAGATCAAGGCGTTAGAAAACTAAAAGAAACATTTTTTCAAAAATTACCAAGATTGATGGAAAATTCACCTTTGCTCACTATTGGAAATGTTTGTTTAATGCACGATGCTGCTGCATTTCTAACGCTTCAGAGTCAGAAAACAGAATTCCGGATTGTTCACATTGTAGAAGTAGCAGGAGATCCCAAGCTTAGTCCAGAATTGGTTCACACGGCTACGGAAAAACTATTAACAGAAACTCATACTAAAATATCGGATTATGATGCAATTGAATGGAATGAACCATTTGCAGCGATTGATGCTCTATTTAATCATTATTATCCTGAAGAGAGAGAAAAATTCAATATTTTTGGAGGGACATTAGCTTACGGACACCCTTATGCCTGCTCAGGAATTATTAATATCCTTCATCTTATGCAGGCATTAAAATATAAAAATAAACCTATGGGTCTAACTGCCATTGCAGGGGCAGGAGGAGTCGGAATGGCCATATCAATAGAGTACTTAGGAGTTAAGAATGCT

SEQ ID NO: 18982 - protein, 371 aa, Streptococcus agalactiae; identical to SEQ ID NO: 958

SEQ ID NO: 18983 - protein, 1227 aa, Streptococcus agalactiae
ATGCTTGAATCATTGAAAACGATAGTTAAAACCAATAGCGATAAAAAGTTATTTGATGGTGATTTACAGGTCAGTTATGGAGAATTTTATAACTTAGTAAGACAAGATATGGCGTCACAAGACAATAGGAAACATGTGATTAGCACACACTCTCTGCTTAACCAATTAGTAAGATTTGTTTCAAAGTTATGTCAAAAAGCTCTTCCTATTATTTGTAAACCTAACCTTACTCATAATGAAATAAGTCGATTAGAAAAAGAAGTGCAGTATGCTCCTCAACTAGCTGATTTTGGTGTTCTTTCTTCTGGGACTACAGCTGATGCTAAACTATTGTGGAGGAGCTTCACTTCGTGGTCTGATTTTTTTAGCATTCAGAATGCTTATTTTTCGGTCACTTCCAATAGCAAACTGTTTATTCAAGGTGATTTTTCATTTACTGGTAACTTAAATTTAGCGCTATCCCTTTTATTACTGGGGGGAACACTTGTTGTCACACAGAAAAATTCTGTAAAATACTGGCAGACTTTATGGGAAAAAACTGGTGTAACGCATCTATATCTGCTCCCTAGTTATCTCAAGTTAGTGGAACAATATAGCAAGGAGACTGCGTTAGACAATAAAACTATTATTACCTCTTCGCAATATGTCTCTGACTCATTACTGGAAGGTTTATATAGAAAGCATCCTAAAGTGTCAGTGAAAATCTTCTATGGTGCTAGTGAGCTCAATTATGTGTCATGGTACGATGGTCGTGATATCCGAGATAAGCCACAGTATGTTGGAGAAATCGTTCCAAATGTAGCTGTTAGGATTAAAGAGGGAAGAATTTTTGTAAAAACACCGTATAGTATCTGTGGCCTTTCAAGTGAATATTGTGCTGGTGATTATGGTGAACTGATAGATGGCAAATTATATCTATTTGGCCGTGGTGGTGATTGGTGCAATCAATCGGGCATTAAGCTCTATTTACCTAGATTAATCGAAAAAATAAAAACATGCCCTTATATCAAGGATGCAGTAGCATTTACAAAAGAGAGTCAAAGTCATGGACAAGAGTCACATTGCTGTATTGTTTTAATTGAAAATCAGATGCAACAAGAGTGTTTGAAGTGGTTATCGGAACATTTTGAAAAGAAGTATGGGTTTAAGCATTATCATATTGTATCTAAAATTCCTTTGATGCCATCTGGAAAAATTGATTATCAACAACTCAAAAGACAGTTAGCA

SEQ ID NO: 18984 - protein, 409 aa, Streptococcus agalactiae
MLESLKTIVKTNSDKKLFDGDLQVSYGEFYNLVRQDMASQDNRKHVISTHSLLNQLVRFVSKLCQKALPIICKPNLTHNEISRLEKEVQYAPQLADFGVLSSGTTADAKLLWRSFTSWSDFFSIQNAYFSVTSNSKLFIQGDFSFTGNLNLALSLLLLGGTLVVTQKNSVKYWQTLWEKTGVTHLYLLPSYLKLVEQYSKETALDNKTIITSSQYVSDSLLEGLYRKHPKVSVKIFYGASELNYVSWYDGRDIRDKPQYVGEIVPNVAVRIKEGRIFVKTPYSICGLSSEYCAGDYGELIDGKLYLFGRGGDWCNQSGIKLYLPRLIEKIKTCPYIKDAVAFTKESQSHGQESHCCIVLIENQMQQECLKWLSEHFEKKYGFKHYHIVSKIPLMPSGKIDYQQLKRQLA

SEQ ID NO: 18985 - protein, 630 aa, Streptococcus agalactiae
ATGTTATCAAAAGCAAAATCACGATATATTATCCGTGAGATTATTAAGTTATTTCCAGATGCTAAACCTAGCTTAGACTTTACTAATGTCTTTGAGCTTTTGGTAGCTGTAATGCTATCAGCTCAAACAACTGATGCAGCTGTTAATAAAGTTACACCCGCCCTTTTTGAACGCTTTCCAAATCCTTTAGTTTTGGCACAAGCTGATCCCAAAGAGATTGAACCCTATATTTCTAAAATTGGGCTTTACCGTAATAAAGCTCGATTCTTAAATCAATGCGCTAAACAATTGATAGAGCATTTTGATGGAAAAGTCCCCCGAACTCGTCAAGAGCTAGAAAGTTTGGCTGGCGTTGGAAGGAAAACGGCTAACGTGGTCATGAGTGTTGGATTTGGTATTCCGGCTTTTGCCGTAGATACTCATGTCACTCGGATTTGTAAACACCACCAGATTTGCAAACAGTCGGCTTCTCCACTGGAAATTGAGAAACGAGTCATGGAGGTTTTACCACCAGAAGAGTGGCTAGCTGCACATCAATCCATGATTTATTTTGGTCGTGCAATTTGTCATCCTAAAAATCCAAAATGCGACCAGTACCCACAACTTTATCACTTTCCTGATAATTTAAAG

SEQ ID NO: 18986 - protein, 210 aa, Streptococcus agalactiae; identical to SEQ ID NO: 9754

SEQ ID NO: 18987 - protein, 387 aa, Streptococcus agalactiae
ATGTCTACCATCTATTTTATTTCTTTATGCATGAGTTTTATCTTAAGTTATTATGATATAAAATACCAAGAGTATCCTATTTTTCTATGGATATTATTCACCATTTCAACGATAATTCTCACACCGATTACAAAAGTTTCTATTGTTTTGTGTTTATTTGGGATTTTAGCTGAAGTGGTTGATATTAATATCGGAAGTGGAGATTTCCTTTATTTAGCCACAATTGGCTTATCTTTACCTCTTCATCAAATGCTTTTTATTATTCAAATAGGTGCTTGGTTAGGAATTATTTATTGTTTAGTTATGAGAAAAATGAAAAAAACGATAGCTTTTCTACCGTTTTTAAGTATCGCTTATATAATCGTCACCAGTTACTCTCTTTTATTC

SEQ ID NO: 18988 - protein, 129 aa, Streptococcus agalactiae; identical to SEQ ID NO: 5342

SEQ ID NO: 18989 - protein, 207 aa, Streptococcus agalactiae
ATGAAATTTTTATTCGATGTGCAGAATCTTTTGAAAAAATTTGGTATTTATGTTTATATTGGTAAACGTCTTTATGATATCGAAGTTATGAAGATTGAATTGCAACGTCTCTACGATAATGGTCTGATAAGTAGAGATGATTATTTAAAAGCAGAACTGATTTTAAGAAGAGAGCACAGACTAGAATTGGAGAAGGAAAATAAAAAA

SEQ ID NO: 18990 - protein, 69 aa, Streptococcus agalactiae
MKFLFDVQNLLKKFGIYVYIGKRLYDIEVMKIELQRLYDNGLISRDDYLKAELILRREHRLELEKENKK

SEQ ID NO: 18991 - protein, 966 aa, Streptococcus agalactiae
ATGAGTAAGAAATTATTGGGAATTGACCTCGGAGGAACGACCATTAAATTTGGTATCTTGACGCTTGAGGGAGAAGTACAAGAAAAATGGGCAATTGAGACCAATACTTTAGAAAACGGAAGACATATCGTTTCTGATATCGTTGAATCTCTCAAACATCGTTTGAGCCTCTATGGATTAACAAAAGATGACTTTCTCGGTATCGGTATGGGTTCTCCAGGAGCTGTTGATAGAACTAGTAAAACAGTAACAGGTGCTTTTAATCTAAATTGGGCTGATACTCAAGAAGTAGGTTCAGTTATTGAAAAAGAAGTTGGAATTCCATTTTTTATTGATAACGATGCTAATGTTGCAGCACTTGGTGAACGCTGGGTAGGTGCTGGTGCCAATAATCCCGACGTTGTTTTCGTAACCCTCGGAACAGGAGTAGGTGGAGGTGTTATCGCAGATGGTAACCTCATCCATGGTGTTGCAGGAGCAGGTGGAGAAATTGGGCATATGATTGTTGATCCAGAAAATGGATTTACGTGCACATGTGGTAACAAAGGCTGCCTTGAGACAGTTGCATCAGCGACAGGTGTTGTTAGAGTAGCACGTCAACTCGCAGAACAATATGAGGGTTCGTCTGCCATTAAAGCAGCGATTGACAACGGTGATACTGTTACAAGTAAAGATATTTTTATAGCAGCAGAAGATGGGGATAAATTTGCTAATTCTGTTGTTGAACGTGTATCACGTTACCTTGGACTGGCAGCAGCTAATATTTCAAATATTTTAAACCCTGATTCTGTGGTTATTGGTGGCGGTGTCTCAGCAGCAGGTGAATTTTTACGTAGTCGCGTTGAGAAATACTTTGTCACATTTGCTTTCCCACAAGTTAAAAAGTCAACTAAAATTAAGATTGCTGAACTAGGTAATGATGCTGGTATTATTGGTGCAGCAAGCTTAGCCAATCAACAAGCAAGT

SEQ ID NO: 18992 - protein, 322 aa, Streptococcus agalactiae; identical to SEQ ID NO: 968

SEQ ID NO: 18993 - protein, 378 aa, Streptococcus agalactiae; identical to SEQ ID NO: 9761

SEQ ID NO: 18994 - protein, 126 aa, Streptococcus agalactiae; identical to SEQ ID NO: 970

SEQ ID NO: 18995 - protein, 1839 aa, Streptococcus agalactiae; identical to SEQ ID NO: 9763

SEQ ID NO: 18996 - protein, 613 aa, Streptococcus agalactiae; identical to SEQ ID NO: 9764

SEQ ID NO: 18997 - protein, 243 aa, Streptococcus agalactiae; identical to SEQ ID NO: 9765

SEQ ID NO: 18998 - protein, 81 aa, Streptococcus agalactiae; identical to SEQ ID NO: 976

SEQ ID NO: 18999 - protein, 1353 aa, Streptococcus agalactiae; identical to SEQ ID NO: 9767

SEQ ID NO: 19000 - protein, 451 aa, Streptococcus agalactiae; identical to SEQ ID NO: 978

SEQ ID NO: 19001 - protein, 1074 aa, Streptococcus agalactiae; identical to SEQ ID NO: 9769

SEQ ID NO: 19002 - protein, 358 aa, Streptococcus agalactiae; identical to SEQ ID NO: 980

SEQ ID NO: 19003 - protein, 1134 aa, Streptococcus agalactiae
ATGCCTAAGAAGAAATCAGATACCCCAGAAAAAGAAGAAGTTGTCTTAACGGAATGGCAAAAGCGTAACCTTGAATTTTTAAAAAAACGCAAAGAAGATGAAGAAGAACAAAAACGTATTAACGAAAAATTACGCTTAGATAAAAGAAGTAAATTAAATATTTCTTCTCCTGAAGAACCTCAAAATACTACTAAAATTAAGAAGCTTCATTTTCCAAAGATTTCAAGACCTAAGATTGAAAAGAAACAGAAAAAAGAAAAAATAGTCAACAGCTTAGCCAAAACTAATCGCATTAGAACTGCACCTATATTTGTAGTAGCATTCCTAGTCATTTTAGTTTCCGTTTTCCTACTAACTCCTTTTAGTAAGCAAAAAACAATAACAGTTAGTGGAAATCAGCATACACCTGATGATATTTTGATAGAGAAAACGAATATTCAAAAAAACGATTATTTCTTTTCTTTAATTTTTAAACATAAAGCTATTGAACAACGTTTAGCTGCAGAAGATGTATGGGTAAAAACAGCTCAGATGACTTATCAATTTCCCAATAAGTTTCATATTCAAGTTCAAGAAAATAAGATTATTGCATATGCACATACAAAGCAAGGATATCAACCTGTCTTGGAAACTGGAAAAAAGGCTGATCCTGTAAATAGTTCAGAGCTACCAAAGCACTTCTTAACAATTAACCTTGATAAGGAAGATAGTATTAAGCTATTAATTAAAGATTTAAAGGCTTTAGACCCTGATTTAATAAGTGAGATTCAGGTGATAAGTTTAGCTGATTCTAAAACGACACCTGACCTCCTGCTGTTAGATATGCACGATGGAAATAGTATTAGAATACCATTATCTAAATTTAAAGAAAGACTTCCTTTTTACAAACAAATTAAGAAGAACCTTAAGGAACCTTCTATTGTTGATATGGAAGTGGGAGTTTACACAACAACAAATACCATTGAATCAACCCCTGTTAAAGCAGAAGATACAAAAAATAAATCAACTGATAAAACACAAACACAAAATGGTCAGGTTGCGGAAAATAGTCAAGGACAAACAAATAACTCAAATACTAATCAACAAGGACAACAGATAGCAACAGAGCAGGCACCTAACCCTCAAAATGTTAAT

SEQ ID NO: 19004 - protein, 378 aa, Streptococcus agalactiae; identical to SEQ ID NO: 982

SEQ ID NO: 19005 - protein, 1371 aa, Streptococcus agalactiae
ATGGCTAGAAATGGCTTTTTTACTGGTTTGGATATAGGAACAAGCTCGATTAAAGTTTTAGTTGCAGAATTTATTGCAAATGAAATGAATGTAATTGGGGTTAGCAACGTCCCTAGTTCCGGTGTAAAAGATGGTATAATTATTGATATTGAGGCAGCAGCAACTGCAATCAAAGAGGCGGTAAAACAAGCTGAGGAGAAAGCAGGCATCACCATTGACAAAATCAATGTTGGATTACCAGCAAATCTTCTCCAAATTGAACCAACTCAAGGAATGATTCCTGTTCCTAATGAATCAAAAGAAATTAAGGATGAAGATGTCGAAAGTGTTGTTAAATCAGCATTGACTAAAAGCATTACTCCTGAAAGAGAAGTTATTTCATTGATTCCGCTTGAATTCATTGTAGATGGTTTCCAAGGGATTAGAGACCCTAGAGGGATGATGGGGATTCGCCTTGAGATGCGTGGTCTTATCTATACTGGACCAACAACTATCCTTCATAATCTTCGTAAAACTGTTGAACGAGCAGGTATAAAAGTAGAGCATGTTGTGATCGCCCCTCTAGCCTTAGCAAAATCAGTTCTAAACGAAGGTGAACGTGAGTTTGGTGCAACTGTGATTGATATGGGAGGCGGACAAACAACAGTCGCTTCTATGCGTAATCAAGAATTGCAATATACTAATATTTATTCTGAAGGTAGCGATTATGTTACCAAAGATATTTCTAAAGTGCTACGTACAACAGTAGAAATCGCCGAAGCATTGAAATTCAACTTTGGACAAGCTAATGTTGAAGAAGCAAGTACTTCTGATACAGTTCAAGTTAATGTTGTTGGTAACGAGGAACCTGTTGAAATTACAGAAAGCTATCTTTCGCAAATTATTTCAGGACGTATTCGTCAAATTTTAGAACATGTCAAACAAGACTTGGGTAGAGGTCGTTTACTTGATTTACCTGGTGGTATTATTCTTGTTGGAGGTGGTGCAATTATGCCAGGAGTTGTCGAGGTTGCTCAACAAATTTTTGGAACTAGAGTTAAATTGCACGTTCCAAACCAAGTAGGTATTCGCAATCCAATGTTTGCTAATGTTATTAGTATCGTTGATTATGTAGGAATGATGTCAGAAGTTGACATTATCGCACAACATGCTGTAACTGGCGACGAAATGCTAAGACATAAACCAGTCGACTTTGATTATAAAGAAAAAACAAATACAATGTCGACAATGCCTTATTCTGAGCCGTTAACCTCTTCTATGGAAGATTCTAATTTAGAACCAATCCGAGCAAGAGAAAACGCTCAAGAGCCTACTGAGCCTAAAGCTAATATTGGTGAGCGCATCAGAGGAATTTTTGGAAGTATGTTTGAC

SEQ ID NO: 19006 - protein, 457 aa, Streptococcus agalactiae; identical to SEQ ID NO: 984

SEQ ID NO: 19007 - protein, 1278 aa, Streptococcus agalactiae
ATGGTATTTTCATTTGATACAGCATCAGTACAAGGTGCAGTTATTAAAGTTATTGGTGTTGGAGGCGGTGGCGGTAACGCTATTAACCGCATGATTGACGAAGGTGTCGCTGGCGTTGAGTTTATTGCAGCAAATACTGATATTCAAGCCTTAAGTAGCTCAAAAGCTGAAACTGTCATTCAACTTGGTCCAAAATTAACTCGCGGACTTGGTGCAGGAGGACAACCTGAAGTTGGTCGTAAAGCAGCTGAAGAAAGTGAAGAAGTTTTAACAGAAGCACTTACTGGCGCTGATATGGTATTTATCACAGCAGGTATGGGGGGCGGATCTGGTACAGGTGCGGCTCCAGTTATTGCACGTATTGCAAAGAGTTTAGGAGCACTTACAGTAGCGGTCATCACACGTCCTTTTGGCTTTGAGGGTAATAAACGTTCTAACTTCGCTATCGAAGGTATTCAAGAATTAAGAGAACAAGTTGATACACTGCTTATCATTTCAAATAATAATCTTCTTGAAATTGTAGATAAGAAGACACCATTGCTTGAAGCTCTTAGTGAAGCAGATAATGTTTTACGTCAAGGTGTTCAAGGTATTACGGATTTGATTACTAACCCAGGTTTAATTAACCTTGACTTTGCAGATGTTAAAACAGTTATGGCAAATAAAGGTAATGCACTGATGGGAATTGGTATCGGTTCTGGTGAGGAACGTATTACTGAAGCTGCTCGAAAAGCAATTTATTCACCACTTCTTGAAACAACGATTGATGGAGCAGAAGACGTTATTGTCAATGTTACCGGCGGTATGGATATGACACTTACTGAAGCAGAGGAAGCATCAGAGATTGTTAGCCAAGCAGCAGGTAAAGGTGTCAATATTTGGTTAGGTACTTCAATTGACATGGATATGAAAGACGAAATCCGCGTAACAGTTGTTGCAACAGGTGTACGTAAAGATAAAACTAATCAAGTATCTGGTTTTACAACATCAGCTCCAACTAATCAAGCACCTTCAGAACGTCAAAGTACTTCAAATTCAAACTTTGATCGTCGTGGCAACTTTGATATGACAGAGTCTCGCGAAATGCCAACTCAACAAAATCAGCCTCATGCACAAAATCAGCAACAAAGTTCTGCTTTTGGTAATTGGGACCTTCGTCGTGATAATATTTCACGTCCGACAGAAGGTGAACTTGATAGCAAGTTGTCTATGTCAACGTTTTCAGAAAATGATGATATGGATGATGAACTTGAAACACCTCCATTCTTTAAAAACCGT

SEQ ID NO: 19008 - protein, 426 aa, Streptococcus agalactiae; identical to SEQ ID NO: 986

SEQ ID NO: 19009 - protein, 672 aa, Streptococcus agalactiae
ATGATGAATTTACAAGAAAATAAAACAGCGATTTTTGACAATGTTAGTAAATTAGCACTAAAAGCAGGTCGCGCTCATGAATCAGTTCATATCGTAGCTGTAACAAAATATGTTAACTGTCAAACAACAGAAGCGCTTATTAGAACAGGTGTTAATCATATCGGTGAAAATCGTGTTGATAAATTTCTTGAAAAATATCAAGCATTAAAAGATGAAAAGCTTACATGGCATCTCATTGGTAGTTTACAACGTCGAAAAGTTAAAGATGTCATTAATTATGTTGATTATTTTCATGCTTTAGATTCTGTTAAGTTAGCAGCTGAGATTCAAAAACGTGCTCAAAAACCAATTAAATGTTTTCTACAAGTTAATATATCACGAGAAGACAGTAAGCATGGTTTTACTATTGAGCAAATAGATGATGCACTGAACTTAATTTCTCGGTACGATAAAATTGAACTTATCGGCATCATGACTATGGCTCCCTTAAAAGCAACTAAAGAGGAAATATCATCAATTTTTGAAGAGACTGAGAGTCTTAGGAAAAGGCTTCAAGCTAGGAACATAGAACGAATGCCGTTTACAGAATTAAGCATGGGCATGAGTAGAGATTATGATATTGCTATTCAAAATGGATCAACATTTGTAAGGATAGGAACTTCATTCTTTAAA

SEQ ID NO: 19010 - protein, 224 aa, Streptococcus agalactiae; identical to SEQ ID NO: 988

SEQ ID NO: 19011 - protein, 603 aa, Streptococcus agalactiae
ATGGCATTAAAAGATAGATTTGACAAAATTATTTCTTATTTTGACACTGACGATGTAAGTGAAAATGAAGTACACGAAGTACAAGAGAGAACTTCAGTGCAAAGAGATTCCAGAGCAGCTACAGCACAGGAAGCTTCTCAGCGTAGTCATATGACTAACTCCGCAGAGGAAGAGATGATTGGTAGTCGTCCGAGAACTTCTACCTATGATCCTAATCGTCAGGAGAGACAAAGGGTACAGAGAGACAATGCTTATCAGCAAGCTACTCCTAGGGTTCAAAATAAAGACTCAGTTCGACAACAGAGAGAACAAGTAACAATTGCTCTGAAGTATCCCCGTAAGTATGAGGATGCACAAGAAATTGTTGATTTACTTATCGTTAATGAATGTGTCTTGATTGATTTTCAATATATGCTTGATGCGCAAGCACGACGTTGCTTGGATTATATTGATGGTGCAAGTAGAGTATTATATGGTTCATTACAAAAGGTTGGGAGTTCAATGTTTCTATTAACACCAGCCAATGTTATGGTTGATATTGAGGAGATGAATATTCCAAAGACTGGTCAAGAGACGAGTTTTGATTTTGATATGAAGAGACGA

SEQ ID NO: 19012 - protein, 201 aa, Streptococcus agalactiae
MALKDRFDKIISYFDTDDVSENEVHEVQERTSVQRDSRAATAQEASQRSHMTNSAEEEMIGSRPRTSTYDPNRQERQRVQRDNAYQQATPRVQNKDSVRQQREQVTIALKYPRKYEDAQEIVDLLIVNECVLIDFQYMLDAQARRCLDYIDGASRVLYGSLQKVGSSMFLLTPANVMVDIEEMNIPKTGQETSFDFDMKRR

SEQ ID NO: 19013 - protein, 786 aa, Streptococcus agalactiae
ATGACGTTAGATGATATTTATCAGCATTTTCGACCGGAAGAGTATGCGTTTATCCATAAAATAGACCATTTAGCTCAATATGTCGAAAACACCTATTCGTTTATTACCACTGAATTTCTAAATCCTAGGGAATTTAAAATACTCGAAAGTGTTCTAGAGAGGCGAGGTAGTCATTATTACACTTCTGGTCAGTATTTTCAAACAGAATATGTTAAAGTAATAATAGCACCGGAATACTATCAGTTAGATATGGTTGATTTTAACCTTAGCCTAATTGAAATAAAGTATAATGCTAAATTTAATCACCTTACCCATGCTAAAATTATGGGAACTTTACTGAATTACTTAGGTGTAAAACGATCAATTTTAGGGGATATCCTAGTTGAAGAAGGCTGTGCTCAGGTTTTGGTCGATAGTCAAATGACAAATCACCTTGTTCATTCAGTTACAAAAATTGGAACTGCTAGTGTACAATTAGCTGAAGTTCCCTTGTCCAAACTTCTAACTCCCAAACAAGATATTCAAAAACTAACTGTTATTGCTTCCAGTTTACGTCTTGATAAAATTTTAGCAACGATTTTAAAGATTTCACGAACACAGTCGACGAAATTGATTGAGGCAGATAAAGTCAAGGTCAATTATGCAACCGTCAATCGAGTTTCTGAACAATTAGTAGAGGGGGATTTGATTAGTGTTAGAGGATATGGTCGATTTACGTTGAACCATAACCTAGGGTTAACTAAAAATCAAAAATATAAGTTAGAAGTAGACAAAATGATACATAAC

SEQ ID NO: 19014 - protein, 262 aa, Streptococcus agalactiae
MTLDDIYQHFRPEEYAFIHKIDHLAQYVENTYSFITTEFLNPREFKILESVLERRGSHYYTSGQYFQTEYVKVIIAPEYYQLDMVDFNLSLIEIKYNAKFNHLTHAKIMGTLLNYLGVKRSILGDILVEEGCAQVLVDSQMTNHLVHSVTKIGTASVQLAEVPLSKLLTPKQDIQKLTVIASSLRLDKILATILKISRTQSTKLIEADKVKVNYATVNRVSEQLVEGDLISVRGYGRFTLNHNLGLTKNQKYKLEVDKMIHN

SEQ ID NO: 19015 - protein, 768 aa, Streptococcus agalactiae
ATGCCACTTACAGCACTTGAAATTAAAGATAAAACATTTTCATCAAAATTTCGCGGTTATAGCGAAGAAGAAGTTAATGAATTTTTAGAGATTGTTGTTGACGATTACGAGGACTTGATTAGACGTAATCGTGAGCAAGAGCAATACATTAAAGATTTAGAAGAGAAAATCGCTTACTTCAACGAAATGAAGGAATCGTTAAGTCAATCAGTTATTTTAGCTCAAGAAACTGCTGAGCGTGTGAAAATTTCAGCACAGGATGAAGCATCTAACCTAATGGGGAAAGCTACATTTGATGCTCAACATTTAATTGATGAGGCTAAATTAAAAGCAAATCAAATCCTTCGAGATGCGACAGATGATGCTAAGCGTGTTGCTATAGAAACAGAAGATTTGAAACGTCAATCACGTGTTTTCCACCAACGTTTGCTTTCTGAGTTAGAAGGGCAGCTAAAATTAGCTAACTCATCTGCTTGGGAAGAATTGTTGAAACCAACAGCTATTTATCTTCAAAATTCTGATGCTTCTTTCAAAGAAGTTGTTGAAAAAGTTCTTGATGAAGATGATGCTTTACCAGTGGTGGATGACACTGAGTCATTTGATGCTACTCGTCAATTCTCACCAGATGAAATGGAAGAATTACAGCGTCGTGTTGAAGAAAGTAACAAACAACTTGAAGAGTCAGGTTTATTAGATACTAATAATTTCCAAATGGAAGAACCGATCAATTTAGGTGAAACTCAAACTTTTAAATTAAATATTGAAGAT

SEQ ID NO: 19016 - protein, 256 aa, Streptococcus agalactiae; identical to SEQ ID NO: 998

SEQ ID NO: 19017 - protein, 2790 aa, Streptococcus agalactiae
ATGAAATTAAAAGAAACCTTGAATTTAGGACAAACAGCTTTTCCAATGCGTGCAGGGCTTCCAAATAAGGAACCTCAATGGCAAGAAGCATGGGATCAAGCTGACATTTATAAAAAACGTCAAGCATTGAATGAAGGAAAACCAGCCTTTCACCTTCATGACGGACCTCCCTATGCTAATGGGAATATTCATGTAGGACATGCACTAAATAAAATTTCGAAAGACATTATTGTACGTTCAAAATCAATGTCAGGTTTTCGAGCTCCTTATGTGCCTGGTTGGGATACTCATGGACTCCCAATTGAGCAAGTATTAGCTAAAAAAGGGGTTAAACGTAAAGAAATGGACTTGGCTGAATACCTTGAAATGTGTCGTGATTATGCTCTCAGCCAAGTTGACAAACAACGTGATGATTTTAAACGTCTGGGCGTTTCTGCCGATTGGGAAAATCCTTATATTACACTAACACCAGATTATGAAGCAGATCAAGTACGTGTTTTCGGTGCTATGGCAGATAAAGGATATATCTATCGTGGTGCTAAACCAGTGTATTGGTCATGGTCATCAGAGTCTGCCCTTGCTGAGGCTGAAATCGAATATCATGATATTGATTCGACATCACTCTACTATGCCAATAAAGTTAAAGATGGTAAGGGAATTCTTGATACAGATACCTATATCGTCGTTTGGACGACAACACCATTTACTGTAACAGCTTCACGCGGTTTAACAGTAGGACCAGATATGGAGTATGTTGTAGTTGTACCAGTAGGTAGTGAGCGTAAATACCTTCTTGCAGAGGTTCTTGTAGATAGTCTCGCTGCTAAGTTTGGCTGGGAAAACTTTGAAATTGTGACTCATCACACTGGTAAAGAACTTAATCACATTGTTACAGAACATCCATGGGATACAGAAGTAGAAGAGTTGGTTATCCTTGGAGACCATGTTACAACAGATTCTGGTACAGGTATTGTCCACACGGCTCCTGGTTTTGGTGAAGATGACTATAACGTTGGTATTGCTAATGGACTTGATGTTGTAGTTACCGTAGATAGTCGTGGTTTGATGATGGAAAATGCTGGTCCTGATTTTGAAGGTCAATTCTATGACAAAGTAACACCACTTGTAAAAGAAAAATTGGGAGATCTTCTTTTAGCCAGCGAAGTTATCAACCACTCATATCCATTTGACTGGCGTACGAAAAAGCCAATCATTTGGCGTGCGGTTCCACAATGGTTTGCCTCTGTTTCGAAATTCCGTCAAGAAATCCTCGATGAAATTGAAAAGACAAATTTCCAACCTGAGTGGGGTAAAAAACGTCTTTATAACATGATCCGTGACCGTGGCGACTGGGTAATCTCACGTCAACGTGCTTGGGGTGTTCCACTTCCAATTTTTTATGCAGAAGATGGTACAGCTATCATGACAAAAGAAGTGACTGATCACGTTGCAGATTTATTTGCTGAATACGGCTCAATCGTTTGGTGGCAACGTGATGCTAAGGACCTTCTACCAGCAGGTTATACTCATCCAGGTTCACCTAATGGTCTCTTTGAGAAAGAAACAGACATCATGGATGTTTGGTTTGATTCTGGTTCATCATGGAATGGGGTAATGAATGCTCGTGAAAACCTTTCCTATCCAGCAGATCTTTATCTTGAAGGTTCTGATCAATACCGTGGTTGGTTCAACTCATCACTAATTACATCAGTTGCTGTTAATGGTCACGCTCCATACAAAGCAGTCTTATCTCAAGGTTTTGTACTTGATGGTAAAGGTGAGAAAATGTCTAAATCTCTAGGAAATACAATTCTTCCTAGTGATGTTGAAAAACAATTTGGTGCGGAAATCTTGCGTCTGTGGGTAACTTCTGTTGACTCAAGTAATGATGTTCGTATTTCAATGGATATCTTAAAACAAACATCAGAAACTTATCGTAAGATCAGGAATACATTGCGTTTCTTGATTGCAAATACTTCCGATTTTAATCCTAAACAAGATGCAGTAGCCTATGAAAATTTAGGTGCCGTTGATCGTTATATGACTATTAAATTTAATCAAGTTGTGGATACAATCAACAAAGCTTATGCTGCTTATGATTTTATGGCAATTTATAAAGCTGTCGTTAACTTCGTAACAGTTGATCTATCAGCATTTTACCTTGATTTTGCAAAAGATGTGGTTTACATCGAAGCGGCTAACAGTCCAGAACGACGTCGTATGCAAACTGTTTTCTATGATATTTTAGTTAAACTTACAAAACTTTTGACTCCGATTCTACCACATACTGCTGAAGAAATTTGGTCATACCTCGAACATGAGGAGGAGGAGTTTGTTCAATTAGCAGAAATGCCTGTTGCACAGACATTCTCTGGTCAAGAAGAAATTCTTGAAGAGTGGTCAGCATTCATGACGTTACGAACACAAGCTCAAAAAGCTCTCGAAGAAGCACGTAACGCTAAAGTTATTGGTAAATCTCTAGAAGCACATTTAACAATTTATGCTAGTCAAGAAGTGAAAACGTTATTAACAGCGTTAAATAGCGATATTGCACTCTTGATGATTGTCTCACAATTAACAATTGCTGATGAAGCAGACAAACCAGCTGACTCAGTATCATTTGAAGGTGTTGCATTTACTGTTGAACACGCTGAAGGTGAAGTCTGCGAACGCTCACGCCGTATTGATCCAACCACAAAGATGCGTTCGTATGGTGTAGCTGTTTGTGATGCTAGTGCAGCAATTATTGAGCAATATTATCCTGAAGCAGTAGCTCAAGGTTTTGAAGCT

SEQ ID NO: 19018 - protein, 930 aa, Streptococcus agalactiae
MKLKETLNLGQTAFPMRAGLPNKEPQWQEAWDQADIYKKRQALNEGKPAFHLHDGPPYANGNIHVGHALNKISKDIIVRSKSMSGFRAPYVPGWDTHGLPIEQVLAKKGVKRKEMDLAEYLEMCRDYALSQVDKQRDDFKRLGVSADWENPYITLTPDYEADQVRVFGAMADKGYIYRGAKPVYWSWSSESALAEAEIEYHDIDSTSLYYANKVKDGKGILDTDTYIVVWTTTPFTVTASRGLTVGPDMEYVVVVPVGSERKYLLAEVLVDSLAAKFGWENFEIVTHHTGKELNHIVTEHPWDTEVEELVILGDHVTTDSGTGIVHTAPGFGEDDYNVGIANGLDVVVTVDSRGLMMENAGPDFEGQFYDKVTPLVKEKLGDLLLASEVINHSYPFDWRTKKPIIWRAVPQWFASVSKFRQEILDEIEKTNFQPEWGKKRLYNMIRDRGDWVISRQRAWGVPLPIFYAEDGTAIMTKEVTDHVADLFAEYGSIVWWQRDAKDLLPAGYTHPGSPNGLFEKETDIMDVWFDSGSSWNGVMNARENLSYPADLYLEGSDQYRGWFNSSLITSVAVNGHAPYKAVLSQGFVLDGKGEKMSKSLGNTILPSDVEKQFGAEILRLWVTSVDSSNDVRISMDILKQTSETYRKIRNTLRFLIANTSDFNPKQDAVAYENLGAVDRYMTIKFNQVVDTINKAYAAYDFMAIYKAVVNFVTVDLSAFYLDFAKDVVYIEAANSPERRRMQTVFYDILVKLTKLLTPILPHTAEEIWSYLEHEEEEFVQLAEMPVAQTFSGQEEILEEWSAFMTLRTQAQKALEEARNAKVIGKSLEAHLTIYASQEVKTLLTALNSDIALLMIVSQLTIADEADKPADSVSFEGVAFTVEHAEGEVCERSRRIDPTTKMRSYGVAVCDASAAIIEQYYPEAVAQGFEA

SEQ ID NO: 19019 - protein, 300 aa, Streptococcus agalactiae
ATGAGACTAAATAATACAACCAGTAGTCATCCTGAACTAGTTCGAAATCAACTCCAAAATACAGATGCAAAATTAGTGGAAGTCTATTCAGCTGGCAACACCGATGTCGTTTTTACAAAAGCACCTAAACATTATGAATTATTAATTTCAAACAAATATCGTGCTATCAAAGATGAAGAATTAGAAGCTATTCGTGAGTTCTTCTTAAAGCGTAAAATAGATCAATCTATTATTATTCAAGAGCAGATGAAATCACTCCATACTGCCAAGTTAATTGAAATTTCATATCCAACAACAGCA

SEQ ID NO: 19020 - protein, 100 aa, Streptococcus agalactiae
MRLNNTTSSHPELVRNQLQNTDAKLVEVYSAGNTDVVFTKAPKHYELLISNKYRAIKDEELEAIREFFLKRKIDQSIIIQEQMKSLHTAKLIEISYPTTA

SEQ ID NO: 19021 - protein, 453 aa, Streptococcus agalactiae; identical to SEQ ID NO: 9789

SEQ ID NO: 19022 - protein, 151 aa, Streptococcus agalactiae; identical to SEQ ID NO: 1006

SEQ ID NO: 19023 - protein, 2258 aa, Streptococcus agalactiae
ATCTCTGTCAAAACTGCAAACTAAACGAATCAACTATTCATTTGTATACAAATGTTAATGGAAAACAAAAGCAAGTTGATCTTTGTCAAAATTGCTACCAAATTATTAAAACTGACCCTAATAATCCACTTTTTTCAGGTTTAAATCATGTTTCACATGCGCCTGGTGGCATCAATCCTTTCTTTGATGATTTCTTTGGAGATTTAAATAATTTCAGAGCCTTTAATGGCCAAGATTTACCAAACACTCCTCCTACACAATCAGGAGGAAACCGAGGTGGAGGAAACGGTAATGGACGAAATAATAATCGCAACCAAACTGCAACTCCTTCTCAAGCCAAAGGGATTCTAGAAGAATTTGGTATCAATGTCACTGAAATAGCCCGCCATGGTGATATTGACCCTGTTATTGGACGTGACTCAGAAATTATTCGTGTTATCGAAATCCTTAATCGTCGTACAAAAAATAATCCTGTACTTATTGGCGAACCCGGCGTTGGGAAAACTGCCGTTGTTGAAGGACTTGCTCAGAAAATTGTTGATGGTAATGTGCCTCATAAACTTCAAGGCAAACAAGTTATTCGTTTGGATGTTGTGAGTCTAGTACAAGGAACGGGCATTCGTGGTCAATTTGAAGAACGCATGCAAAAGTTGATGGAAGAAATTCGTCAACGTCAAGATGTTATTCTATTCATAGATGAAATTCACGAAATAGTTGGAGCTGGTACAGCTGGCGAAGGTAGTATGGATGCAGGTAATATTTTAAAACCTGCCCTTGCACGTGGAGAATTACAACTAGTAGGTGCTACTACTCTCAATGAATATCGTATTATCGAAAAGGACGCTGCCTTAGAACGCCGTATGCAACCTGTAAAAGTCGATGAGCCTTCTGTTGAAGAAACCATTACTATTTTGAAAGGTATCCAAAAAAAATACGAAGATTATCATCATGTAAAATATAATAATGATGCCATAGAAGCAGCTGCAGTACTATCTAATCGTTATATCCAGGACCGCTTTTTACCTGATAAAGCAATAGACTTATTAGATGAAGCTGGTTCTAAAATGAACCTAACACTAAATTTTGTTGATCCAAAAGAAATTGATCAACGTCTCATTGAAGCAGAAAATTTAAAAGCGCAAGCGACTCGTGAAGAAGATTACGAACGTGCAGCTTACTTCCGTGACCAGATTGCAAAATATAAAGAAATGCAACAACAAAAGGTCGACGATCAAGATACACCTATTATTACCGAAAAAACAATTGAGCACATCATTGAAGAAAAAACGAATATCCCTGTTGGTGATTTAAAAGAAAAAGAACAATCTCAATTAATTAATCTCGCAGATGACTTGAAACAACATGTGATCGGCCAGGATGACGCTGTCGTTAAGATTGCAAAAGCTATTCGTCGTAATCGAGTTGGTCTTGGTAGCCCAAACCGTCCTATTGGTTCCTTTTTATTTGTAGGACCAACCGGCGTTGGTAAAACTGAACTTTCTAAACAACTAGCAATTGAGCTCTTTGGTTCAGCTGATAGTATGATTCGTTTTGATATGTCAGAGTACATGGAAAAGCATGCTGTTGCTAAATTAGTCGGAGCGCCTCCAGGATACGTGGGATACGAGGAAGCTGGACAATTAACTGAAAAGGTTCGTCGAAATCCTTACTCGCTCATCCTTCTAGATGAAATTGAAAAAGCTCATCCTGATGTCATGCATATGTTCTTGCAGGTCCTTGATGACGGTCGATTAACAGATGGACAAGGAAGAACTGTTAGTTTTAAAGATACCATTATCATCATGACCTCAAATGCTGGTTCTGGTAAAACTGAAGCAAGCGTTGGCTTTGGTGCCTCACGAGAAGGTAGAACGAATTCCGTACTAGGTCAACTAGGTAACTTCTTCAGCCCTGAATTTATGAACCGCTTTGACGGTATTATTGAATTCAAGGCTTTAGATAAAGAGAATCTCCTCAATATCGTTGATATTATGTTATCTGACGTTAATGCACGTCTCGCCATCAATGGTATTCATCTAGATGTCACTGATAAAGTGAAAGAAAAATTGGTTGATTTAGGTTACGATCCCAAAATGGGAGCACGTCCATTACGTCGTACCATTCAAGAACATATTGAAGATGCTATCACAGATTACTATCTTGAGAATCCAAGCGAAAAAGAACTTCGTGCTATTATGACTAGCAATGGAAATATCATAATAAAATCTTCTAAAAAAACTGAAGAAAGTACAAAAGGT

SEQ ID NO: 19024 - protein, 753 aa, Streptococcus agalactiae; identical to SEQ ID NO: 1008

SEQ ID NO: 19025 - protein, 477 aa, Streptococcus agalactiae
ATGGCGTCACAAGACAATAGGAAACATGTGATTAGCACACACTCTCTGCTTAACCAATTAGTAAGATTTGTTTCAAAGTTATGTCAAAAAGCTCTTCCTATTATTTGTAAACCTAACCTTACTCATAATGAAATAAGTCGATTAGAAAAAGAAGTGCAGTATGCTCCTCAACTAGCTGATTTTGGTGTTCTTTCTTCTGGGACTACAGCTGATGCTAAACTATTGTGGAGGAGCTTCACTTCGTGGTCTGATTTTTTTAGCATTCAGAATGCTTATTTTTCGGTCACTTCCAATAGCAAACTGTTTATTCAAGGTGATTTTTCATTTACTGGTAACTTAAATTTAGCGCTATCCCTTTTATTACTGGGGGGAACACTTGTTGTCACACAGAAAAATTCTGTAAAATACTGGCAGACTTTATGGGAAAAAACTGGTGTAACGCATAAATATCTGCTCCCTAGTATCTCNNNNNTTAAT

SEQ ID NO: 19026 - protein, 159 aa, Streptococcus agalactiae
  VARIANT 157, 158: Xaa = Any Amino Acid
MASQDNRKHVISTHSLLNQLVRFVSKLCQKALPIICKPNLTHNEISRLEKEVQYAPQLADFGVLSSGTTADAKLLWRSFTSWSDFFSIQNAYFSVTSNSKLFIQGDFSFTGNLNLALSLLLLGGTLVVTQKNSVKYWQTLWEKTGVTHKYLLPSISXXN

SEQ ID NO: 19027 - protein, 468 aa, Streptococcus agalactiae
ATGATTGTTGATCCAGAAAATGGATTTACGTGCACATGTGGTAACAAAGGCTGCCTTGAGACAGTTGCATCAGCGACAGGTGTTGTTAGAGTAGCACGTCAACTCGCAGAACAATATGAGGGTTCGTCTGCCATTAAAGCAGCGATTGACAACGGTGATACTGTTACAAGTAAAGATATTTTTATAGCAGCAGAAGATGGGGATAAATTTGCTAATTCTGTTGTTGAACGTGTATCACGTTACCTTGGACTGGCAGCAGCTAATATTTCAAATATTTTAAACCCTGATTCTGTGGTTATTGGTGGCGGTGTCTCAGCAGCAGGTGAATTTTTACGTAGTCGCGTTGAGAAATACTTTGTCACATTTGCTTTCCCACAAGTTAAAAAGTCAACTAAAATTAAGATTGCTGAACTAAGTAATGATGCTGGTATTATTGGTGCAGCAAGCTTAGCCAATCAACAAGCAAGT

SEQ ID NO: 19028 - protein, 156 aa, Streptococcus agalactiae
MIVDPENGFTCTCGNKGCLETVASATGVVRVARQLAEQYEGSSAIKAAIDNGDTVTSKDIFIAAEDGDKFANSVVERVSRYLGLAAANISNILNPDSVVIGGGVSAAGEFLRSRVEKYFVTFAFPQVKKSTKIKIAELSNDAGIIGAASLANQQAS

SEQ ID NO: 19029 - protein, 420 aa, Streptococcus agalactiae
ATGGTTGATTTTAACCTTAGCCTAATTGAAATAAAGTATAATGCTAAATTTAATCACCTTACCCATGCTAAAATTATGGGAACTTTACTGAATTACTTAGGTGTAAAACGATCAATTTTAGGGGATATCCTAGTTGAAGAAGGCTGTGCTCAGGTTTTGGTCGATAGTCAAATGACAAATCACCTTGTTCATTCAGTTACAAAAATTGGAACTGCTAGTGTACAATTAGCTGAAGTTCCCTTGTCCAAACTTCTAACTCCCAAACAAGATATTCAAAAACTAACTGTTATTGCTTCCAGTTTACGTCTTGATAAAATTTTAGCAACGATTTTAAAGATTTCACGAACACAGTCGACGAAATTGATTGAGGCAGATAAAGTCAAGGTCAATTATGCCACCGTCAATCGAGTTTCTGAACAT

SEQ ID NO: 19030 - protein, 140 aa, Streptococcus agalactiae
MVDFNLSLIEIKYNAKFNHLTHAKIMGTLLNYLGVKRSILGDILVEEGCAQVLVDSQMTNHLVHSVTKIGTASVQLAEVPLSKLLTPKQDIQKLTVIASSLRLDKILATILKISRTQSTKLIEADKVKVNYATVNRVSEH

SEQ ID NO: 19031 - protein, 228 aa, Streptococcus agalactiae; identical to SEQ ID NO: 14265

SEQ ID NO: 19032 - protein, 76 aa, Streptococcus agalactiae; identical to SEQ ID NO: 1010

SEQ ID NO: 19033 - protein, 684 aa, Streptococcus agalactiae
ATGAATTTTTCATTTTTAACAATATTGGTCCTATTTTAATTATGGTGTGATGGTAACCATTATGATTTCAACATGTGTTGTTTTTTTTGGAACTATTATAGGTGTGTTAATTGCTTTAGTAAAGCGTATATTTCTTTTCTCACAATATTAGCTAATTTCTATGTATGGGTATTTCGTGGGACACCGATGGTAGTTCAAATTATGATTGCTTTCGCATGGATGCATTTTAACAATTTACCAACGATTAGCTTTGGTGTTTTAGATTTAGATTTTACACGACTTTTACCTGGTATCATTATCATTTCCTTAAATAGTGGTGCCTATATTTCGGAAATTGTACGTGCAGGGATTGAGGCTGTACCATCTGGACAAATAGAAGCAGCTTACTCGTTGGGGATTCGACCTAAAAATACACTTCGCTATGTTATCTTACCCCAAGCTTTTAAAAATATTTTACCTGCTCTAGGGAATGAATTTATTACAATTATTAAAGATAGTGCTCTCCTTCAAACTATTGGTGTCATGGAATTATGGAACGGAGCACAATCAGTTGTAACGGCTACTTACTCACCAGTTGCACCGTTATTATTTGCAGCATTTTACTATTTAATGTTGACAACGATTCTCTCAGCTTTGTTAAAACAAATGGAGAAATATCTTGGGAAAGGGGTAAAAATAGATGGT

SEQ ID NO: 19034 - protein, 230 aa, Streptococcus agalactiae
  VARIANT 7, 45: Xaa = Any Amino Acid
MNFSFLXQYWSYFNYGVMVTIMISTCVVFFGTIIGVLIALVKRTXLHFLTILANFYVWVFRGTPMVVQIMIAFAWMHFNNLPTISFGVLDLDFTRLLPGIIIISLNSGAYISEIVRAGIEAVPSGQIEAAYSLGIRPKNTLRYVILPQAFKNILPALGNEFITIIKDSALLQTIGVMELWNGAQSVVTATYSPVAPLLFAAFYYLMLTTILSALLKQMEKYLGKGVKIDG

SEQ ID NO: 19035 - protein, 729 aa, Streptococcus agalactiae
ATGGTTGAGCCAATTATTTCAATACAAGGACTTCATAAAAGTTTTGGGAAAAATGAGGTTTTAAAAGGCATTGACTTGGATATTCATCAAGGAGAAGTAGTGGTTATTATTGGCCCTTCTGGCTCTGGTAAGTCAACATTTTTAAGAACAATGAATCTCTTGGAAGTACCAACAAAGGGAACAGTGACTTTTGAAGGGATTGATATAACAGACAAAAAGAATGATATTTTTAAAATGCGCGAAAAAATGGGCATGGTTTTTCAACAGTTCAATCTATTTCCCAATATGACTGTACTAGAAAATATTACTTTATCACCTATTAAGACAAAGGGGCTTTCTAAGCTTGATGCTCAGACAAAAGCATATGAGCTACTTGAAAAAGTTGGACTCAAAGAGAAGGCTAATACTTATCCAGCTAGCTTATCTGGAGGACAACAACAACGAATTGCTATTGCAAGAGGTCTTGCAATGAATCCTGATGTCCTTCTTTTTGATGAACCTACTTCAGCTCTTGATCCTGAAATGGTAGGTGAAGTCTTGACTGTTATGCAAGATTTAGCTAAATCTGGTATGACGATGGTTATTGTCACTCATGAAATGGGTTTTGCACGTGAAGTAGCGGATCGTGTCATTTTTATGGATGCAGAATTATTGTTGAGCAAGGGGCCCCTAAGAAGTATTTGAGCAGACAAAGAAATCCGCACAAGAGATTTCTTAAGTAAAGTATTA

SEQ ID NO: 19036 - protein, 244 aa, Streptococcus agalactiae
  VARIANT 216: Xaa = Any Amino Acid
MVEPIISIQGLHKSFGKNEVLKGIDLDIHQGEVVVIIGPSGSGKSTFLRTMNLLEVPTKGTVTFEGIDITDKKNDIFKMREKMGMVFQQFNLFPNMTVLENITLSPIKTKGLSKLDAQTKAYELLEKVGLKEKANTYPASLSGGQQQRIAIARGLAMNPDVLLFDEPTSALDPEMVGEVLTVMQDLAKSGMTMVIVTHEMGFAREVADRVIFMDAXIIVEQGAPKEVFEQTKEIRTRDFLSKVL

SEQ ID NO: 19037 - protein, 1692 aa, Streptococcus agalactiae
ATGAATTATAAAGAGATTTATCAAGAGTGGTTAGAAAACGACTCACTCGGTAAAGATATTAAGTCAGATTTAGAAGCTATTAAAGGCGATGAATCTGAAATTCAGGATCGTTTTTACAAAACATTAGAATTTGGAACGGCGGGATTGAGAGGTAAACTTGGAGCAGGAACCAATCGTATGAATACTTATATGGTGGGGAAAGCAGCACAAGCATTAGCTAATACGATTATTGATCATGGCCCTGAAGCTATTGCACGTGGAATTGCAGTTAGTTATGATGTCCGTTATCAATCTAAGGAATTTGCAGAATTAACTTGTTCCATTATGGCAGCAAATGGTATTAAGTCTTATATTTATAAAGGGATTCGCCCAACACCAATGTGCTCATATGCTATTCGTGCTCTAGGATGTGTTTCGGGTGTGATGATTACTGCTAGTCATAATCCTCAAGCTTATAATGGTTATAAGGCATATTGGAAAGAAGGATCTCAGATTTTAGATGATATTGCTGATCAAATTGCCAATCATATGGATGCTATAACCGATTATCAGCAAATTAAGCAAATACCCTTTGAAGAGGCTCTGGCAAGTGGTTCGGCAAGTTATATCGATGAGAGTATTGAAGAAGCATATAAAAAAGAAGTGCTTGGTTTAACTATTAATGATACTAATATTGATAAGTCAGTCCGGGTAGTTTATACTCCTTTAAATGGCGTAGGAAATTTACCTGTGCGCGAAGTTTTAAGACGCCGTGGTTTTGAAAATGTTTATGTGGTACCTGAGCAGGAAATGCCCGATCCTGATTTTACAACGGTTGGCTATCCAAACCCTGAAGTTCCTAAAGCATTTGCCTATTCAGAATCTCTAGGAAAGTCAGTTGATGCAGATATCTTACTTGCCACAGATCCAGATTGTGACCGAGTAGCATTGGAAGTCAAAGATAGTAAGGGAGAATATATTTTCTTAAATGGTAATAAGATAGGGGCACTTCTTTCCTATTATATTTTTTCACAACGATGTGCCTTAGGGAATTTGCCACATCATCCTGTATTGGTAAAATCCATTGTAACTGGTGATCTATCAAAAGTTATTGCAGATAAATATAATATTGAAACTGTTGAAACTTTAACAGGATTTAAAAATATTTGTGGAAAAGCTAATGAATATGATATCTCAAAGGATAAAACTTATCTCTTTGGCTATGAAGAAAGTATTGGTTTTTGCTATGGCACTTTTGTACGTGATAAAGATGCTGTGAGTGCTTCAATGATGGTAGTAGAAATGACTGCCTATTATAAAGAACGAGGGCAAACACTTTTAGACGTTTTGCAAACCATTTACGATAAATTTGGCTATTACAACGAGCGCCAATTTTCTCTTGAGTTAGAGGGTGCTGAGGGGCAAGAACGTATTAGTCGTATTATGGAGGATTTTAGACAGGACCCAATATTACAAGTAGGTGAGATGACATTGGAGAATTCTATTGATTTCAAGGATGGTTATAAGGATTTTCCAAAGCAAAATTGTTTAAAATATTATTTTAATGAGGGTTCATGGTATGCTTTAAGGCCGTCAGGGACGGAACCTAAGATAAAATGTTACCTTTATACGATTGGTTGTACAGAAGCAGATAGTTTATCGAAACTTAATGCAATTGAGTCGGCTTGTCGTGCTAAAATGAATAGTACTAAA

SEQ ID NO: 19038 - protein, 564 aa, Streptococcus agalactiae; identical to SEQ ID NO: 1014

SEQ ID NO: 19039 - protein, 852 aa, Streptococcus agalactiae; identical to SEQ ID NO: 9803

SEQ ID NO: 19040 - protein, 284 aa, Streptococcus agalactiae; identical to SEQ ID NO: 1016

SEQ ID NO: 19041 - protein, 711 aa, Streptococcus agalactiae; identical to SEQ ID NO: 9805

SEQ ID NO: 19042 - protein, 237 aa, Streptococcus agalactiae; identical to SEQ ID NO: 1018

SEQ ID NO: 19043 - protein, 1338 aa, Streptococcus agalactiae
ATGTCAGACTATTTATCCGTGTCGACACTGACTAAGTATTTAAAATTAAAATTTGACAAAGACCCTTATTTAGAGAGGGTTTATTTAACTGGGCAAGTGTCTAATTTTCGTCGTCGCCCAAACCATCAATATTTCTCTTTAAAAGATGATAAATCAGTCATTCAGGCGACAATGTGGTCAGGTCACTTCAAAAAATTGGGTTTTGAATTAGAGGAAGGGATGAAGGTTAATGTAGTTGGCCGTGTTCAACTTTATGAACCAAGCGGCTCCTACTCTATTATTGTTGAAAAAGCAGAACCGGATGGTATAGGAGCTCTTGCTATCCAATTTGAACAACTAAAGAAGAAACTCTCTCAAGCAGGTTATTTTGATGATCGTCATAAGCAATTAATTCCTCAATTTGTTAGAAAAATAGGAGTTGTGACTAGTCCAAGTGGAGCCGTTATTCGGGATATTATTACAACAGTATCTCGTCGATTTCCAGGAGTGGAAATATTACTTTTCCCCACAAAAGTTCAAGGAGAGGGCGCAGCTCAGGAAATAGCACAAACTATTGCTTTAGCTAACGAGAAAAAGGATTTGGATCTATTAATTGTTGGCCGTGGGGGAGGTTCTATTGAGGACTTATGGGCATTTAATGAAGAATGTGTTGTAGAAGCTATTTTTGAATCTCGTCTTCCCGTTATTTCTAGTGTCGGACATGAAACTGATACAACTTTAGCAGATTTTGTAGCCGATCGCAGAGCAGCAACTCCAACTGCAGCAGCTGAGCTTGCTACACCGGTTACTAAAATTGATATCTTGTCTTGGATTACTGAACGTGAAAATAGAATGTATCAGTCTAGCCTTCGTCTTATCAGGACAAAAGAGGAGAGGTTGCAAAAATCAAAGCAATCAGTTATTTTTAGGCAACCAGAGCGTCTATATGATGGTTTCCTTCAAAAATTAGATAACCTAAATCAGCAGTTAACATTTTCTATGCGTGATAAACTACAAACAGTAAGACAAAAGCAAGGTTTGCTTCATCAAAAACTGCAAGGCATAGATTTAAAACAGCGTATTCATACTTACCAAGAGCGTGTTGTACAAAGTAGACGACTATTATCAAGTACAATGACTAGTCAGTATGACAGCAAGCTAGCACGTTTTGAAAAGGCTCAAGATGCGCTTATATCATTGGATAGTTCTAGAATTGTAGCGCGTGGTTACGCTATTATCGAAAAAAACCATACTTTAGTATCTACTACTAATGGAATAAATGAAGGAGATCATTTGCAAGTTAAGATGCAAGATGGTCTTTTAGAAGTTGAGGTGAAGGATGTCAGACAAGAAAACATT

SEQ ID NO: 19044 - protein, 446 aa, Streptococcus agalactiae
MSDYLSVSTLTKYLKLKFDKDPYLERVYLTGQVSNFRRRPNHQYFSLKDDKSVIQATMWSGHFKKLGFELEEGMKVNVVGRVQLYEPSGSYSIIVEKAEPDGIGALAIQFEQLKKKLSQAGYFDDRHKQLIPQFVRKIGVVTSPSGAVIRDIITTVSRRFPGVEILLFPTKVQGEGAAQEIAQTIALANEKKDLDLLIVGRGGGSIEDLWAFNEECVVEAIFESRLPVISSVGHETDTTLADFVADRRAATPTAAAELATPVTKIDILSWITERENRMYQSSLRLIRTKEERLQKSKQSVIFRQPERLYDGFLQKLDNLNQQLTFSMRDKLQTVRQKQGLLHQKLQGIDLKQRIHTYQERVVQSRRLLSSTMTSQYDSKLARFEKAQDALISLDSSRIVARGYAIIEKNHTLVSTTNGINEGDHLQVKMQDGLLEVEVKDVRQENI

SEQ ID NO: 19045 - protein, 213 aa, Streptococcus agalactiae; identical to SEQ ID NO: 9809

SEQ ID NO: 19046 - protein, 71 aa, Streptococcus agalactiae; identical to SEQ ID NO: 1022

SEQ ID NO: 19047 - protein, 870 aa, Streptococcus agalactiae; identical to SEQ ID NO: 9811

SEQ ID NO: 19048 - protein, 290 aa, Streptococcus agalactiae; identical to SEQ ID NO: 1024

SEQ ID NO: 19049 - protein, 825 aa, Streptococcus agalactiae; identical to SEQ ID NO: 9813

SEQ ID NO: 19050 - protein, 275 aa, Streptococcus agalactiae; identical to SEQ ID NO: 5400

SEQ ID NO: 19051 - protein, 471 aa, Streptococcus agalactiae; identical to SEQ ID NO: 9815

SEQ ID NO: 19052 - protein, 157 aa, Streptococcus agalactiae; identical to SEQ ID NO: 1028

SEQ ID NO: 19053 - protein, 1656 aa, Streptococcus agalactiae
ATGCTTTTAGAAATTTCTATTAAGAATTTCGCTATTATCGAAGAAATTTCACTTAATTTTGAAACAGGAATGACTGTTTTAACTGGTGAGACTGGTGCAGGGAAATCTATCATTATTGATGCTATGAATATGATGTTAGGATCCCGTGCTAGCGTTGAAGTGATTCGCCATGGTGCTAACAAAGCAGCAATTGAAGGATTTTTCTCTGTTGAAAAAAATCAATCATTAGTCCAATTATTGGAAGAAAATGGCATTGAATTAGCAGATGAATTAATTATTCGCCGAGAAATCTTTCAAAATGGGCGCAGCGTTAGTCGAATTAATGGGCAAATGGTGAATTTGTCAACACTAAAAGCTGTGGGGCATTATTTGGTAGATATTCATGGTCAGCATGACCAAGAGGAACTAATGAAACCTAACATGCACATTCTGATGTTAGATGAATTTGGTAATACAGAATTTAATGTCATAAAAGAACGTTATCAAAGTCTTTTTGATGCTTATCGTCAGCTTCGTAAACGCGTATTGGATAAGCAAAAAAATGAACAAGAGAATAAATCACGTATTGAAATGCTAGAATTTCAAATAGCAGAAATTGAGTCTGTAGCCCTTAAATCAGATGAAGACCAAACGCTACTCAAGCAACGTGATAAATTAATGAATCATAAGAATATTGCAGATACTTTGACAAATGCATATCTTATGTTAGATAACGAAGAGTTTTCAAGTTTATCGAATGTTCGTTCTGCAATGAATGACCTTATGGCTTTAGAAGAATTTGATCGAGAATATAAAGATCTTTCCACCAATCTTTCAGAAGCTTACTACGTTATTGAAGAAGTTACTAAACGTTTAGGTGACGTTATCGATGATTTAGATTTTGACGCTGGTTTACTACAAGAAATTGAAAATAGACTAGATGTTATTAACACAATAACGCGAAAATATGGCGGTGATGTGAATGATGTTTTAGACTATTTTGATAACATTACTAAAGAATATAGTCTATTGACAGGTAGTGAAGAGTCCTCAGATGCTTTAGAAAAAGAATTAAAGATTTTAGAACACGATTTGATTGAATCAGCAAATCAATTAAGTTTAGAGCGCCATAAGCTAGCTAAACAATTGGAAAATGAAATCAAACAAGAATTAACAGAGCTTTATATGGAGAAAGCTGATTTCCAAGTTCAATTTACAAAAGGAAAATTTAATAAAGAAGGGAACGAAATCGTTGAATTTTATATTTCAACGAATCCCGGAGAGGGCTTTAAGCCATTGGTAAAAGTGGCTTCAGGAGGAGAGTTATCTCGATTGATGTTAGCTATTAAATCTGCTTTTTCACGTAAGGAAGATAAAACTTCCATTGTATTTGATGAGGTGGATACAGGAGTTTCTGGTCGCGTGGCCCAGGCTATCGCTCAAAAAATTCACAAGATTGGTAGTCATGGACAAGTTTTAGCAATTTCTCATTTAGCTCAGGTTATTGCAATAGCGGATTACCAATATTTTATTGAAAAAATTTCCAGTGACTCTTCAACAGTTTCAACGGTAAGGCTTTTAAGCTATGAAGAACGTGTAGAAGAAATCGCTAAAATGTTGGCAGGAAACAATGTAACAGACACTGCACGTACTCAAGCTAAAGAATTACTTGGTAGT

SEQ ID NO: 19054 - protein, 552 aa, Streptococcus agalactiae
MLLEISIKNFAIIEEISLNFETGMTVLTGETGAGKSIIIDAMNMMLGSRASVEVIRHGANKAAIEGFFSVEKNQSLVQLLEENGIELADELIIRREIFQNGRSVSRINGQMVNLSTLKAVGHYLVDIHGQHDQEELMKPNMHILMLDEFGNTEFNVIKERYQSLFDAYRQLRKRVLDKQKNEQENKSRIEMLEFQIAEIESVALKSDEDQTLLKQRDKLMNHKNIADTLTNAYLMLDNEEFSSLSNVRSAMNDLMALEEFDREYKDLSTNLSEAYYVIEEVTKRLGDVIDDLDFDAGLLQEIENRLDVINTITRKYGGDVNDVLDYFDNITKEYSLLTGSEESSDALEKELKILEHDLIESANQLSLERHKLAKQLENEIKQELTELYMEKADFQVQFTKGKFNKEGNEIVEFYISTNPGEGFKPLVKVASGGELSRLMLAIKSAFSRKEDKTSIVFDEVDTGVSGRVAQAIAQKIHKIGSHGQVLAISHLAQVIAIADYQYFIEKISSDSSTVSTVRLLSYEERVEEIAKMLAGNNVTDTARTQAKELLGS

SEQ ID NO: 19055 - protein, 834 aa, Streptococcus agalactiae
ATGAGTAAAATCAAAATTGTAACGGATTCTTCCATTACCATTGAACCAGAACTTATTAAAGAGCTTGACATTACAGTTGTTCCCTTGTCAGTTATGATAGATGGTACCTTGTATTCAGACAATGACTTAAAAGCACAAGGGGAATTCTTGAACCTAATGCGTGGAAGTAAGGAATTGCCAAAAACAAGTCAACCACCTGTAGGTGTTTTTGCAGAAATTTATGAAAAATTAATGAATGAAGGTGTGGAACATATCATTGCAATTCATTTAACGCATACACTATCAGGAACTATTGAAGCATCACGCCAGGGAGCTAATATTGCTGGTGCAGATGTTACAGTTATTGATTCTACTTTTACAGACCAGTGTCAAAAATTCCAGGTTGTAGAAGCTGCGAAATTAGCTAAAGAGGGAGCTGATTTAGATACCATCTTGGCTCGTGTGGAAGAAGTACGCCAGAAGTCAGAATTATTTATTGGCGTATCGACCCTTGAAAATTTAGTAAAAGGTGGTCGTATTGGACGTGTAACGGGTCTTCTAAGTTCATTGCTTAATATAAAAGTAATTATGGAGCTAACAAACCATGAATTAGTACCGATTGTTAAAGGTCGCGGTCTAAAGACCTTCAGCAAATGGTTAGATAATTTTGTTGAAAGTGCCCAAACACGAAAAATTGCTGAAATTGGCATCTCCTACTGTGGTAAAGCTGATATGGCTAATAACTTTAGAGAAAAACTAGCTGTTCTAGGTGCTCCTATATCCGTTTTAGAAACTGGCTCAATCATCCAAACTCATACTGGTGAGGATGCATTTGCTGTTATGGTTCGTTATGAA

SEQ ID NO: 19056 - protein, 278 aa, Streptococcus agalactiae
MSKIKIVTDSSITIEPELIKELDITVVPLSVMIDGTLYSDNDLKAQGEFLNLMRGSKELPKTSQPPVGVFAEIYEKLMNEGVEHIIAIHLTHTLSGTIEASRQGANIAGADVTVIDSTFTDQCQKFQVVEAAKLAKEGADLDTILARVEEVRQKSELFIGVSTLENLVKGGRIGRVTGLLSSLLNIKVIMELTNHELVPIVKGRGLKTFSKWLDNFVESAQTRKIAEIGISYCGKADMANNFREKLAVLGAPISVLETGSIIQTHTGEDAFAVMVRYE

SEQ ID NO: 19057 - protein, 854 aa, Streptococcus agalactiae
TTGCTGTTATGGTTCGTTATGAATAAGAAAAAAATACTTACCGGACTTTCTTTTTTTCTGGTAAGTCTTCTTTTATCTTTTGGGATTTTTTCCTTGATCATTCCAAAATCAAATCCTAAATTAACAAAAAAAGACTTCCTAACAAAGAAAGTTATCCCACTTAACTATGTTGCTCTTGGAGATTCTCTGACCGAAGGTGTGGGCGATACAACCTCTCAAGGTGGTTTTGTTCCACTGCTATCAGAATCACTCCATAATCGATACTCTTACCAAGTGACTTCTGTTAATTATGGTGTGTCTGGGAATACTAGTCAACAAATTTTAAAACGTATGACGACAGATCCTCAAATCGAAAAAGATTTAGAGAAAGCTGATTTATTGACGCTAACTGTTGGTGGTAATGATGTCTTGGCTGTTATTCGTAAAGAGCTCAGTCATTTATCACTAAATTCCTTTGAGAAACCAGCAGAAGCATATAAGGAACGTTTGAAAGAAATCCTTGCAAAAGCAAGACAAGATAATCCTAAATTGCCTATTTATGTTTTAGGCATTTATAATCCTTTTTACCTAAACTTTCCACAATTAACTAAAATGCAAACCGTTATTGATAATTGGAATAAAGCTACAAAAGAAGTAGTTGATGCTTCAGAAAATGTTTATTTTGTCCCAATTAATGACCGCCTTTATAAGGGAATAAATGGTAAAGAGGGTATTATAGAGTCATCAAATAGTCAGGCAAGTATCACTAATGATGCTCTCTTTACTGGAGACCATTTTCATCCCAATAATATTGGCTATCAAATCATGTCTAACGCCGTTATGGAGAAAATAAATGAAACAAGAAAAACTGGCCG

SEQ ID NO: 19058 - protein, 285 aa, Streptococcus agalactiae
  VARIANT 283: Xaa = Any Amino Acid
MLLWFVMNKKKILTGLSFFLVSLLLSFGIFSLIIPKSNPKLTKKDFLTKKVIPLNYVALGDSLTEGVGDTTSQGGFVPLLSESLHNRYSYQVTSVNYGVSGNTSQQILKRMTTDPQIEKDLEKADLLTLTVGGNDVLAVIRKELSHLSLNSFEKPAEAYKERLKEILAKARQDNPKLPIYVLGIYNPFYLNFPQLTKMQTVIDNWNKATKEVVDASENVYFVPINDRLYKGINGKEGIIESSNSQASITNDALFTGDHFHPNNIGYQIMSNAVMEKINETRKXWP

SEQ ID NO: 19059 - protein, 599 aa, Streptococcus agalactiae
ATGAAACAAGAAAAACTGGCCGTAATTTAAATTTCTGGAAATGGGCATTTCTCTTATTGTTGGCAATTAACCTTTCCTTCACAGCAGTGATTGCAAGTCGCTTAATTCAAGTACGTGAGCCTAATACAGGAAAAATTTCGACTGGGGTACAAGATAAAGTAAAAGTAGGTACTTTTACGACCAATAAGTCGCAACTGAATAAGACAATTGCACTTTATTTAAAACAATATCAAACTAAGAAGATGAATTATAAGATTTATGCTGCTTCATCTTCTATACTATTTGAAGGCTCTTATCAATTATTAGGTTATGAAGTGCCTTTATACATCTATTTTGAACCTTATCGTTTAACAAATGGCGCTGTTCAACTTAAAGTGACCTCATTTTCAGTAGGAACTCTTCCGCTTCCAGAAAAAGATGTGTTACAATATATAAAATCATCTTATAAATTGCCAAACTTTGTAGATATAAAACCTAAAAAATCGGTTATTAATATTAATTTGCAAGATTTAAAAAATAAAGAAGGTATTTATTTGAAAGCGACTGCAATTGATTTAGTAAACGATAATTTTAGTTTCGATATTTTTAAGAAAAAGCCC

SEQ ID NO: 19060 - protein, 200 aa, Streptococcus agalactiae
  VARIANT 6: Xaa = Any Amino Acid
MKQEKXGRNLNFWKWAFLLLLAINLSFTAVIASRLIQVREPNTGKISTGVQDKVKVGTFTTNKSQLNKTIALYLKQYQTKKMNYKIYAASSSILFEGSYQLLGYEVPLYIYFEPYRLTNGAVQLKVTSFSVGTLPLPEKDVLQYIKSSYKLPNFVDIKPKKSVININLQDLKNKEGIYLKATAIDLVNDNFSFDIFKKKP

SEQ ID NO: 19061 - protein, 271 aa, Streptococcus agalactiae
ATGGCTAACAAACAAGATTTAATTGCAAAAGTAGCAGAAGCTACAGAATTAACTAAAAAAGATTGCAGCAGCAGTAGATGCAGTTTTTGCAGCTGTAGCAGATTACCTTGCTGAAGGTGAAAAAGTACAATTAATCGGTTTTGGTAACTTTGAAGTTCGTGAACGTGCAGCTCGTAAAGGTCGTAACCCACAAACTGGTGCAGAAATCGAAATTGCAGCATCAAAAGTTCCAGCATTTAAAGCTGGTAAAGCTCTTAAAGACGCTGTTAAA

SEQ ID NO: 19062 - protein, 91 aa, Streptococcus agalactiae; identical to SEQ ID NO: 5412

SEQ ID NO: 19063 - protein, 1139 aa, Streptococcus agalactiae
ATGTGGTCAGAAAAACACAAAAGTGGAAAAGTAAATTTTGTAGAAAGATATAAAGATCCATATACTAATAAATGGAAACGTACATCAGTACTGATGGAAAAAGATACTCCTCGAATTAGAAAAGAAGCTCAAAGAATATTAGATGCTAAGATAGCTGATATCGTAAGAAAGTTGCAAACCTCTGACATGCTATTTACAAATCTAATTGATGAGTGGTGGATATTTTACCAACAGGAAATTAAAAGATCGTCTATTGTCACTTTAAAAGGCAATATTCGAGAGATTAGAGCAGAATTTGGGATCAATATACCTGTAGTTAATATCGACCCTAGATATGTCCAAAATTATCTGGATAATCTCGATTGCTCTAGAAACAAAAAAGAGCGAAACAAGTCTATGCTTAATCTTATCTTTGATTATGCTGTTAGTCTAGATATCATCAAGGATAATCCTGCAAGACGCGCTAAACTGCCAAAAATCAAGAAAACACTTAATGATTGGAAAAAGATTGAAGAAAAATATCTTGAAGAAGAAGAAATCAAGCGGTTGTTAAAAGAATTATTTAGAAGACCTAGCACTCACCGCCTGGGATTACTATCAGAATTTATGAGTCTTAACGGATGCCGTATTGGTGAGGCTATTAGCATAGAGCCGGATAATATTGATTTTAAAAACAAAACTCTACAGTTGCACGGAACTTATGATCGCACTAATGGTTACATAAATGGAGAAAAGACCTCTCCAAAACCCTTGCGTCCTATCGTGAAACCATTATGAGCAAACGTGAAATGGAAATTTTACAAGAGATGGAGTTTATTAACGAACTCGAAAAAAATACAAATAAACGATACAGAGACATGGGGTATATATTCACGACTAGGAACGGTGTTCCTATCCAAATAAATTCCTTTAATTTAGCATTGAAAAAAGCAAACGAGCGGCTTGAACAACCAATCAATAAAAATATCACTAGCCACATCTTCCGTCATACTTTAGTCAGTCGTCTTGCTGAAAATAACGTACCACTAAAAGCAATCATGGATCGTGTTGGACATGCTGATGCAAAAACTACTGTACAAATTTATACCCACATTACAAAGAAAATGAAATCCAACATAGCTGATATTATGGAAAACTAC

SEQ ID NO: 19064 - protein, 380 aa, Streptococcus agalactiae
MWSEKHKSGKVNFVERYKDPYTNKWKRTSVLMEKDTPRIRKEAQRILDAKIADIVRKLQTSDMLFTNLIDEWWIFYQQEIKRSSIVTLKGNIREIRAEFGINIPVVNIDPRYVQNYLDNLDCSRNKKERNKSMLNLIFDYAVSLDIIKDNPARRAKLPKIKKTLNDWKKIEEKYLEEEEIKRLLKELFRRPSTHRLGLLSEFMSLNGCRIGEAISIEPDNIDFKNKTLQLHGTYDRTNGYINGEKTSPKTLASYRETIMSKREMEILQEMEFINELEKNTNKRYRDMGYIFTTRNGVPIQINSFNLALKKANERLEQPINKNITSHIFRHTLVSRLAENNVPLKAIMDRVGHADAKTTVQIYTHITKKMKSNIADIMENY

SEQ ID NO: 19065 - protein, 549 aa, Streptococcus agalactiae
ATGGATATAAATAAAATAAAGGAATTTGCTGTGTCAACATCAGAAAAGGCTAAAGACGGCATTATTAAAGCAAACGAAATGAGAAAAAGGGCATCACAAGAAAGCAAAATAGTCTTACCGCCCACAATTAATTTAGGTTTTAATACACCTACTGCTATTCGTAAAACAGTGGAGGGTGACTACTATATTGGTTTTTATTCTGAAAAACCTGATTTATTTAAATTTGTGGATTTTCAGTTTGATGGTTCACGAATTATTGAAAAAACAGTAACAAAAGGAAAAACGACTCAAAAAGGTCGTTCTGGTAGTACAATTATTGGAGGATTAATAGGTGCAACTATCAATCCTACTGCTGCAGTACTTGGCGGATTAGCTGGTGCAAATCGTGGTAAAAAAGGAACTATTAACAGTACCTCTACTACTATAACCGAGGAAATTCCGGGTAAAGCTCAATTAACACTCAGAAATTTAAAAACAAATGATATAAAAATAATTAAAACAAAACTAACTCAGGCTCAAGCTAACAATATTCAAAATTTTTTTAGCAAA

SEQ ID NO: 19066 - protein, 183 aa, Streptococcus agalactiae
MDINKIKEFAVSTSEKAKDGIIKANEMRKRASQESKIVLPPTINLGFNTPTAIRKTVEGDYYIGFYSEKPDLFKFVDFQFDGSRIIEKTVTKGKTTQKGRSGSTIIGGLIGATINPTAAVLGGLAGANRGKKGTINSTSTTITEEIPGKAQLTLRNLKTNDIKIIKTKLTQAQANNIQNFFSK

SEQ ID NO: 19067 - protein, 384 aa, Streptococcus agalactiae
ATGACTATTGAAGAGATTGTAGACTGTCACAAAGTTAATCTCGCATACTTTGATAACGAATTATGGCCACGACCTGGGATTTATATAGACGATATTAAAGTTATTTTTGTCAATAAATCACTATCGTTAGATGCTCAAAAACGGGTTATCCTGCATGAACTCGGACATTGTGAAAGAAATATTGGTGACTATAAGACACTACGTGAGAAACACGAGCTAGAAGCTGACAGATACATGATTAGTCATTTAATCGCTGAAGCACTTTCTCAATTAGAAGATAAACGAGAGTTTAACTACCTACAATTTATGCAATATCATCAACTAACAACTACTGCAGATGAATGCATGGTAATTGATGAATACTATAATTTACTTAAGGTCGTG

SEQ ID NO: 19068 - protein, 128 aa, Streptococcus agalactiae
MTIEEIVDCHKVNLAYFDNELWPRPGIYIDDIKVIFVNKSLSLDAQKRVILHELGHCERNIGDYKTLREKHELEADRYMISHLIAEALSQLEDKREFNYLQFMQYHQLTTTADECMVIDEYYNLLKVV

SEQ ID NO: 19069 - protein, 417 aa, Streptococcus agalactiae
TTGAATTGTCAACATTTTTCACCCAAAAAGTTGAAATATTTTTTGTCATGCCTTAGAAAGGTTGATAAATCAATGTCTCCGACGTTTGAAAAAATCAAAGAATTGTGCAAACAGCGTGGAATTACACTTATTCAACTAGAGGAAACCTTAGGATATAGCCGAAATACACTCTATAAGTTGAAAACTCAAAAACCCAACGCTGAAAGAATTGCTGAAATAGCAGACTACTTCAATGTCTCTACAGATTACTTATTAGGTAGAACAGATAATCCCAATATAGCTAAAGATAGCCAAGAATACACTTCTGACGATCTTAGAAAAATGGCAGAAAAGGCTAAAACATTTGATGGCAAGCCACTTACTGAATCAGATATTGATGCAATACAAAATATTATTGAAATTTATTTGAAAGGAAGA

SEQ ID NO: 19070 - protein, 139 aa, Streptococcus agalactiae
MNCQHFSPKKLKYFLSCLRKVDKSMSPTFEKIKELCKQRGITLIQLEETLGYSRNTLYKLKTQKPNAERIAEIADYFNVSTDYLLGRTDNPNIAKDSQEYTSDDLRKMAEKAKTFDGKPLTESDIDAIQNIIEIYLKGR

SEQ ID NO: 19071 - protein, 243 aa, Streptococcus agalactiae
ATGAAAAAAAACATCGTTGATCTACAAAAGCGTAATGAGCATTTTCAGTGGGTCGCTGATAGCTTAGAGGGGAAAGAAAACGAACTTTACGTGGAAAGAGATTGGTACGACAATCCGACTCTTATTTCCAAAGAGGATGCAAAAAAAGAAGTAGAGCAAGTACAACAAAAACTTATTCTACTTCAAAAGAAATCATTTATTGAATATATTTTGCAATTATTGCACCAACTATTCCGCCGACAA

SEQ ID NO: 19072 - protein, 81 aa, Streptococcus agalactiae
MKKNIVDLQKRNEHFQWVADSLEGKENELYVERDWYDNPTLISKEDAKKEVEQVQQKLILLQKKSFIEYILQLLHQLFRRQ

SEQ ID NO: 19073 - protein, 786 aa, Streptococcus agalactiae
ATGTCTCGATACTCTGATTATAAATACGCTAATACTATCCTTAAAAGTATTGAAGAACGACCAGAAAAATATCTAATTATCCATTACTCCTGCGAAAGTTTTTATAATCTAGGTAGTAAAAGTCCTAGAATAGCTTCCATTTCAGTTCGTCAATTCAATAATGCCCAAACCAACAACTTTTCCATTCATCAGTATTCCGAGATATTAGATACCCCAATTACTGATGATACTTATGAAACTATCGAAAAAGAGCTGTTAACAGATTTCTTCACATTTGTTGACAGAAATACCGACAAAAATTGGATTCACTGGAACATGAGAGATACTGTCTTTGGCTTTCATGCTATTGAGCAGCGATTCAAAGTTCTAGGCGGCACACCAATAATCATTGATGATGACAAAAAGATCGATTTAGCCTATCTGTTTAAAAAGATGTACGGTGGAGGATATATTGACAATCCGCATATTGAAAAATTACTTGAATTGAACAATCTAACCCCACATCGTTTTCTGACAGGTAAACAAGAAGCTGACGCTTTCTCTTCGAGACAATACCATGAACTAAGTATGTCAACATCAAGCAAGGTCAATAGCTTTTCAACATTCCTCACTTTAGCTATCAACGATGATTTAAAAACTAACACCCCTAAATGGAAAATGAGAGGAACTAACCTATCTGGATTACTTTCCGCTTTTCAAGAAACAACCTCAGGAAAAGTGATAATCGGTATAATCAACCTTATTGTCGGCGGAATAGTTGGTGCAATAATTGCAAAATATATTCAA

SEQ ID NO: 19074 - protein, 262 aa, Streptococcus agalactiae
MSRYSDYKYANTILKSIEERPEKYLIIHYSCESFYNLGSKSPRIASISVRQFNNAQTNNFSIHQYSEILDTPITDDTYETIEKELLTDFFTFVDRNTDKNWIHWNMRDTVFGFHAIEQRFKVLGGTPIIIDDDKKIDLAYLFKKMYGGGYIDNPHIEKLLELNNLTPHRFLTGKQEADAFSSRQYHELSMSTSSKVNSFSTFLTLAINDDLKTNTPKWKMRGTNLSGLLSAFQETTSGKVIIGIINLIVGGIVGAIIAKYIQ

SEQ ID NO: 19075 - protein, 189 aa, Streptococcus agalactiae
ATGCCAGATATTGCAGTTGGACGAGAAAAAGTTGTTACCTTTCTAAAAAGTAACAATATCAAGAAGAGTGATTTAGCAGCAGCCTATGGTCTCAATCGTCAAGAGGTCACTAACATTCTTAGTGGCTCAACTAGAGGACCAAAGGCTAACCAGTTTATTCTGCGAGTGATTGCAGATTACAGCATTGAG

SEQ ID NO: 19076 - protein, 63 aa, Streptococcus agalactiae
MPDIAVGREKVVTFLKSNNIKKSDLAAAYGLNRQEVTNILSGSTRGPKANQFILRVIADYSIE

SEQ ID NO: 19077 - protein, 309 aa, Streptococcus agalactiae
ATGCCAAAAGCTGAATTAGTCTACAGACCAGCTAAGCAGTCGGAAAAAGCCGACTATGGCGATTATGTGCATCTTTGCCAAATCTGGGAGGGATTAACCGTCGGAACGGCAAAGGTTTGGGCAGCAGAAATGAGAAATCATCCAGATTTTAAACAATTTATCAATAATCCAACGCATAGAATTGTATTCATCAATTACGAGGGATTTAAGTTGTTTGTTACTTGGAAGTCTAGAAATAGATATAAACCTAAAAAGGAAACGCTGGCAGAAATGTTGGAAAATATTAAAAAGGAAAGACAGTTAGGAGTA

SEQ ID NO: 19078 - protein, 103 aa, Streptococcus agalactiae
MPKAELVYRPAKQSEKADYGDYVHLCQIWEGLTVGTAKVWAAEMRNHPDFKQFINNPTHRIVFINYEGFKLFVTWKSRNRYKPKKETLAEMLENIKKERQLGV

SEQ ID NO: 19079 - protein, 147 aa, Streptococcus agalactiae
ATGAAGAAATTATTTAAAAAATTATTTGTAAAGAAAAATCAGGTTATAGAAACACGTCAAAAATGGACAATCGAAACACATGGCTGGGAAGCTAATGCACGACGTTACGACAATATGATTGAACGTAATAATAGAGGGCGTACATGT

SEQ ID NO: 19080 - protein, 49 aa, Streptococcus agalactiae
MKKLFKKLFVKKNQVIETRQKWTIETHGWEANARRYDNMIERNNRGRTC

SEQ ID NO: 19081 - protein, 225 aa, Streptococcus agalactiae
ATGTTAAAAGAAGTATTACTAGAAAATGAACTGTTGCGTGATGAAAATAGACGACTAACTAATGAAATGGCAGATTATTATTTTACGAACGTAGCAAAAGCAAATTTATTGGATATTATCGTCAACGAAGGTTACATCTTAGATAGCACACTGGAAAAATGTATTGCTAAGTTAGATAACGTTGATAGACAAACACTAGAAAAAAATTGGAGTGATGATAATGAT

SEQ ID NO: 19082 - protein, 75 aa, Streptococcus agalactiae
MLKEVLLENELLRDENRRLTNEMADYYFTNVAKANLLDIIVNEGYILDSTLEKCIAKLDNVDRQTLEKNWSDDND

SEQ ID NO: 19083 - protein, 228 aa, Streptococcus agalactiae
ATGATTGAAGTTGAAAGACAACCAAAAAATACGTACTCACGAATTAGATGTTCAAATAATATTTATGATGAAATCGCCAATATTGCAAATGAATGTGATTTAACACTAAAAGAAGTAACTGATGCACTACTAAACTATGGTCTTGCTAACGCTCAAATTATTAGTTCTGAAAAAGTAGTTACCGAAAGTAAATTAGTAATAGGAGATTTTGACAATGACAATCACAAT

SEQ ID NO: 19084 - protein, 76 aa, Streptococcus agalactiae
MIEVERQPKNTYSRIRCSNNIYDEIANIANECDLTLKEVTDALLNYGLANAQIISSEKVVTESKLVIGDFDNDNHN

SEQ ID NO: 19085 - protein, 1317 aa, Streptococcus agalactiae
ATGACAATCACAATTAATAAGTTAGAAATCGAAAACGTAAAGCGCATTAAAGCTGTAAAAGTTGAACCATCATCCAAAGGATTAACCATCATCGGTGGCAATAACAATCAGGGTAAAACTAGCGTTCTGGATAGTATTGCTTGGGTATTAGGTGGTAATAAGTTTAAACCTAGTCAAGCAGCACGAGAGGGAACTATGGTACCACCTACGCTTAAAATTACCATGTCAAATGGTTTGATTGTTGAGCGTAAGGGTAAGAATTCTAGTTTGAAAGTTATTGATCCTAACGGGCAAAAAGGTGGTCAACAATTGCTTGATAGCTTTGTAGAAGAGTTAGCTATTAACTTACCAAAATTTATGGATGGAACTCCAAAAGAAAAAGCAGATGTCTTACTTGAAATCATTGGAGTTGGTGATCAGTTGGCAGAATTAGAACTCAAAGAAAAAGAACTCTATAATCAACGTCATACTATTGGTGTTATTGCTGACCAAAAAGAAAAGTTTGCTAAGGAGCAACCATACTATAATGATGCCCCAAAAGAATTAATTAGTATCGCTGATTTAATCCAGCAACAACAAGAAGTGTTAGCAAAAAATGGGGAAAACGCTAGAAAACGTCAGAATCTATCCGTTATTCAACAAAATCATCAATTTAAACAGTCAGAGGTTGAACATTTAAAACAACAATTAGCCACAGCAGAGAAACAATTACAAGAGTTATCTAGTGACTTGGAAATTGCACAAAGAGACACAATGTCATTAATAGATGAATCAACTGCAGAAATAGAAGAAAACATTTCTAATATTGAAGAAGTCAACCGCAAAGTCAGAGCTAATCTGGATAAAGATAAAGCTGAAGAAGATGCTAAACATCAGCGTGAACAATATAACATATTGACTAATGATATTGAGTCAATTCGTCAACAAAAACGAGACTTATTGATTAATGCAGATCTGCCACTTGAAGGCTTGTCAGTAGATGATGGAAAGTTACTTTACCTTGGTCAAGAGTGGGATAACATGTCAGGCAGCCAACAACTAATAGTAGCAACTGCTATTGTACGTAAACTAAAACCAGATTGTGGCTTTGTTTTGATTGATAAACTCGAACAGATGGACAACATCACACTTGAACAATTTGGTAAATGGCTAGAGCAGGAGGGTTTGCAAGCTATTGCAACCCGTGTATCAACTGGCGAAGAGTGTGCCATCATTATAGAAGATGGATACTCAGTGGAAAATAAAGCCCATAGCTTTAAAACAGCAGAGGGTGGTAGTTTTGCTGAAACAGTAGCACCGACTTGGCAAGGTGGATTT

SEQ ID NO: 19086 - protein, 439 aa, Streptococcus agalactiae
MTITINKLEIENVKRIKAVKVEPSSKGLTIIGGNNNQGKTSVLDSIAWVLGGNKFKPSQAAREGTMVPPTLKITMSNGLIVERKGKNSSLKVIDPNGQKGGQQLLDSFVEELAINLPKFMDGTPKEKADVLLEIIGVGDQLAELELKEKELYNQRHTIGVIADQKEKFAKEQPYYNDAPKELISIADLIQQQQEVLAKNGENARKRQNLSVIQQNHQFKQSEVEHLKQQLATAEKQLQELSSDLEIAQRDTMSLIDESTAEIEENISNIEEVNRKVRANLDKDKAEEDAKHQREQYNILTNDIESIRQQKRDLLINADLPLEGLSVDDGKLLYLGQEWDNMSGSQQLIVATAIVRKLKPDCGFVLIDKLEQMDNITLEQFGKWLEQEGLQAIATRVSTGEECAIIIEDGYSVENKAHSFKTAEGGSFAETVAPTWQGGF

SEQ ID NO: 19087 - protein, 1071 aa, Streptococcus agalactiae
ATGCAAATTACTAGAGGAAAACGGGCAAGGGCACAACGTGTCATTATCTATGGACCAGAAGGAATTGGGAAGTCAAGTTTTGCAGCGCAATTTCCAGAGCCGTTGTTTATAGACACAGAGGGTTCAACTGACAACATGGACGTGGCACGCATGGACAAGCCTACAAGCTACACTATGCTAAAAAATCAAATTGCTTTTGTAAAAGCTAACCCTACATGCTGTAAGACACTTGTCATTGATACTATTGACTGGGCAGAAAGCTTAATAGTAGATGATGTCTGTGCTCAACATGGAAAAAAAGGAATTGAAGATTTTGGTTGGGGTAATGGTTACACTTACACAAAAGAAGAAGTTGGACGTTTCCTAAATATGTTGCAGGAATTGATAGAGTTAGGTATCAATGTCGTCCTTACTGCTCATGCCCAAATGCGTAAATTTGAGCAACCTGATGAAATGGGAGCTTATGATCGCTGGGAACTCAAGCTAGGTAAAAAGACAAGCTCACAGACTGCACCATTAGTTAAAGAATGGGCTGACATGGTTCTGTTCGCTAATTATAAAACTGTAGTGATGACAGCTGATAACAACAAGAAGAAAGCAACTGGCGGTGCCCGTGTCTTATATACACAACATCATCCAGCGTGGGATGCAAAAAACCGTCATGGATTACAAGAAGAAATGCCACTTGATTACGCTGGTATCGCACATATATTCGCACAAGCACCAAGTCAACCAGTAGCAGAAACACCGCCAGTACAGCAACCGGTGCCTACTCAACCTATACACGAACCTGTACATGAGCAACAGGCGCAAATGTCGGGACCAACTGCAGCAACAGAGTATCCATCTGTCCTACCAAAGGCTTTGACGGATTTGATGACGCCTGAACAAGTTACACCAGATGAGTTAGTAGCAGTAGCAAATATTAGAGGACACTTCCCTCCATTGACTCCTATTGAAAACTTTCCACCAGATTACTGGAACATGATTGTAGCAAATTGGGGAGCCACATTGGAAGTTATTAAAACACAAGTCCGAGCAACAGAACAGCCCTTTACAGTGGAAGGCTCA

SEQ ID NO: 19088 - protein, 357 aa, Streptococcus agalactiae
MQITRGKRARAQRVIIYGPEGIGKSSFAAQFPEPLFIDTEGSTDNMDVARMDKPTSYTMLKNQIAFVKANPTCCKTLVIDTIDWAESLIVDDVCAQHGKKGIEDFGWGNGYTYTKEEVGRFLNMLQELIELGINVVLTAHAQMRKFEQPDEMGAYDRWELKLGKKTSSQTAPLVKEWADMVLFANYKTVVMTADNNKKKATGGARVLYTQHHPAWDAKNRHGLQEEMPLDYAGIAHIFAQAPSQPVAETPPVQQPVPTQPIHEPVHEQQAQMSGPTAATEYPSVLPKALTDLMTPEQVTPDELVAVANIRGHFPPLTPIENFPPDYWNMIVANWGATLEVIKTQVRATEQPFTVEGS

SEQ ID NO: 19089 - protein, 603 aa, Streptococcus agalactiae
ATGACTGAATACAATAACAACTTTGAACGTGAATTTGGATGGGATGACACAATCCAAGAAGATGCAAAAGAATTTATTACATTACAACCTGGTGACTATGTCTTCACAGTAACAGACTTTGAACGTGCACGCCACACACCAAATCCACGAAAAACAGGGAAATTGCCAGCATGTAATAAAGCAGTAATTTCTCTTGAAATTGAAACTGATGAAGGTGTTGCTAGTTTGAAGCATAATCTATTTTTACATAGCTCTACCGAAGGAATGTTATCAGCATTCTTTGGGGCAATTGGTCAGAAAAAACACGGTGAGCCATTAAAAATGAATTGGAACACAGTAGTTGGTGCGACGGGTGTATGTAGTGTTAAGAATAGAACATATAACGACAATGTTTATAATGAAGTGAAATCGATGATTTATGCTGATAGCGTTGACTGGACTAAAGTATTGAATGCAAATACTCAACCACAAGCGCCACAACCAACGTATCAACAACCAGCTCAGCAAACAACTAATTTTGCACCTCAACAACAACCAGCACCTCAGTCATATCAACAAGGTCAAATGCAAGCACCTCAACAACAAGGTGGATGGGGAGGATTC

SEQ ID NO: 19090 - protein, 201 aa, Streptococcus agalactiae
MTEYNNNFEREFGWDDTIQEDAKEFITLQPGDYVFTVTDFERARHTPNPRKTGKLPACNKAVISLEIETDEGVASLKHNLFLHSSTEGMLSAFFGAIGQKKHGEPLKMNWNTVVGATGVCSVKNRTYNDNVYNEVKSMIYADSVDWTKVLNANTQPQAPQPTYQQPAQQTTNFAPQQQPAPQSYQQGQMQAPQQQGGWGGF

SEQ ID NO: 19091 - protein, 606 aa, Streptococcus agalactiae
ATGGGAAAAGCTAAAGATTACACTGGTCAACGATTTGGTAGGCTTGTAGTGATTGAGCGTTTACCTCAGGATCCATATACAAAAGCAAAATATAAATGTCAATGTGATTGCGGTAAGTTAACGATTGTTAATAGTAGTAATCTAGCAACTGGTCATAGTACCAGTTGCGGATGCATTGTTACTAAACATGGTTTTGCTAGAAAAGAGCGTCTTTATAATATTTGGGTTGGAATGAGACAACGCTGCAGAGATAAAAATTCCAATGATTATATTAAATACGGTGGCCGTGGAATAACTATATGTGACGAATGGGAAGAATATATTCAATTCAAACAATGGGCATCATCGAATGGTTATCGAGACAATTTATCTATTGACCGTATTGATGTTAACGGAAATTATGAACCATCTAATTGTAGATGGGCTAATTCAACCGAACAAGCAAATAATCAAAGAAATAACCATTTAATCACATTTAAAGGTAAGACTCAGACAATAAAACAATGGTCAAGTGAACTTGGTATTTCTAATATTACTTTACTTACAAGATTAAATCGTGGTTGGAGTATTACAAAAGCTTTAACGACACCTACACAAAAAGGAGTG

SEQ ID NO: 19092 - protein, 202 aa, Streptococcus agalactiae
MGKAKDYTGQRFGRLVVIERLPQDPYTKAKYKCQCDCGKLTIVNSSNLATGHSTSCGCIVTKHGFARKERLYNIWVGMRQRCRDKNSNDYIKYGGRGITICDEWEEYIQFKQWASSNGYRDNLSIDRIDVNGNYEPSNCRWANSTEQANNQRNNHLITFKGKTQTIKQWSSELGISNITLLTRLNRGWSITKALTTPTQKGV

SEQ ID NO: 19093 - protein, 1590 aa, Streptococcus agalactiae
GTGATTTACATCAAACTTAGAGAATATCAAGAAGAGGCAAGGTCAGCAGTGCAACAAGAGTGGGAACAAGGCAAGAAGAAAACCCTTCTTGTCCTTCCTACTGGTTGTGGTAAGACTATTGTCTTCTCAAAGATTATTGAAGATAGAGTTAAACTAGGCGAACGTGTTTTAGTATTGGCTCATCGGTCAGAGTTGCTGGAACAAGCAAGTGATAAGCTAATGACAGCAACAGGATTGGGCACGGCTTTAGAAAAAGCAGAAAGTACATCGCTCGGCTCATGGTATCGAGTGGTTGTTGGTTCTGTGCAGACGTTGCAGCGAGAAAAGCGTTTGAGTAAATTTCCAACAGATTACTTCGACACAATTGTTGTTGATGAAGCGCATCATGCTATTTCAGACGGTTACCAAAGAGTTCTACAACACTTTGATAGTAGCAATGTTTTGGGAGTTACAGCAACACCAGATCGTGGTGACAAACAAAATCTAGGTAAATATTTCGATAGTTTAGCTTATGAGTATTCTTTGGTAGATGCTATCAAATCTGGTTATTTATCAAAAATTACAGCAGTTACTATTCCTTTGACTTTGGACCTATCTACAGTGAGTCAGCAAGCTGGAGATTTTAAAGCAAGTGAGATTGGGACGGCGCTTGACCCGTACCTAGAACAAATTGCCGATGAAATGGTTAAGCAATGTTCTAATCGCAAAACAGTTGTATTTTTACCACTTGTTAAAACTTCCCAAAAATTCCGTGATATTCTAAACCAAAAAGGATTCAAAGCAGCAGAGGTCAATGGAGAATCGAAAGACCGTGCTGAAGTCCTAGAAGACTTTGATAATGATAAATATAATGTACTATGCAATTCAATGCTTTTAACTGAAGGATGGGATTGCCCGACAGTCGATTGCGTAGTTGTACTGAGACCCACAAAAGTAAGAGCTCTTTATAGTCAAATGGTCGGTCGTGGCACACGATTAGCGCCGGGGAAAGAAAAACTACTGTTATTAGATTTTTTATGGCATACCGAACGCCATGAGCTTTGTCGTCCTGCTCATCTAATTGCAAAAACACCAGAAGTTGCACAAAAAATGGTCGAGAACATGACCGATGAAACTGAAGTAGCTTTTGAATTGTTAGAAGCTGAAGAAGTAGCCAGCAAAGATGTTGTTGCAGAGCGAGAAGAAGCACTCGCTAAGCAGTTAGCAGAAATGCGTAAACGTAAACGTGCATTAGTTGATCCGTTGCAATTTGAAATGTCTATCAACGCTGAAGACTTAGTGGACTATGTACCGGAATTTGGTTGGGAGATGGCGCCAGCTTCTGAAAAACAACTTAAAACACTTGAGAAATTTGGCATATTTACTGACGAAATTGGGAATGCTGGTAAGGCTGCCAAATTATTAGATAGACTGGATAAACGTCGTCAATCAGGTCTAACAACTCCAAAACAAATACGAATGCTTGAGCGATACGGTTTCAAAAATGTAGGTATGTGGAAATTTGAAGTAGCATCAAACATGATTAATCGTATTGCTGCTAGCGGATGGCGCCTACCAAAAGGCATCAATGCTCGAGAATATCAACCAGAA

SEQ ID NO: 19094 - protein, 530 aa, Streptococcus agalactiae
MIYIKLREYQEEARSAVQQEWEQGKKKTLLVLPTGCGKTIVFSKIIEDRVKLGERVLVLAHRSELLEQASDKLMTATGLGTALEKAESTSLGSWYRVVVGSVQTLQREKRLSKFPTDYFDTIVVDEAHHAISDGYQRVLQHFDSSNVLGVTATPDRGDKQNLGKYFDSLAYEYSLVDAIKSGYLSKITAVTIPLTLDLSTVSQQAGDFKASEIGTALDPYLEQIADEMVKQCSNRKTVVFLPLVKTSQKFRDILNQKGFKAAEVNGESKDRAEVLEDFDNDKYNVLCNSMLLTEGWDCPTVDCVVVLRPTKVRALYSQMVGRGTRLAPGKEKLLLLDFLWHTERHELCRPAHLIAKTPEVAQKMVENMTDETEVAFELLEAEEVASKDVVAEREEALAKQLAEMRKRKRALVDPLQFEMSINAEDLVDYVPEFGWEMAPASEKQLKTLEKFGIFTDEIGNAGKAAKLLDRLDKRRQSGLTTPKQIRMLERYGFKNVGMWKFEVASNMINRIAASGWRLPKGINAREYQPE

SEQ ID NO: 19095 - protein, 195 aa, Streptococcus agalactiae
ATGGAAAATATTAATGAACAGATTGAAAAGTTTATTTCAAATTTTGCTGATGAAGCAATCGAAAAATCCGAAACATATTCGGAGGCAATTTTATATGTCGATAAACACTCAAGTCTCACCGAGTTTGGGCAAGTAGTAAAAAAAGCTATTCAAGAAAAAATCAGAGATATTGCCTTGAATAGCAGAATTATTAAA

SEQ ID NO: 19096 - protein, 65 aa, Streptococcus agalactiae
MENINEQIEKFISNFADEAIEKSETYSEAILYVDKHSSLTEFGQVVKKAIQEKIRDIALNSRIIK

SEQ ID NO: 19097 - protein, 249 aa, Streptococcus agalactiae
ATGCCTGAAATAAAAATTACTTTTTCAGATGGTTCTATTGTTATATTTCACGAAGAACAGAGTTTTCAAAGTGTAGTAAAATCAAATGATGCTATGTCCTTATCAAAAATATATTCATTATGGAACCATGTTCATGATGGATTAATTCCTAGCTTCTTAGAATTAATTGCTAACTCGCAATTTTTCTTTGACTTAGAAAACCCACAAATTTATTACGCTTCAAATGCTGTTATAAAAATTGAAGCTATT

SEQ ID NO: 19098 - protein, 83 aa, Streptococcus agalactiae
MPEIKITFSDGSIVIFHEEQSFQSVVKSNDAMSLSKIYSLWNHVHDGLIPSFLELIANSQFFFDLENPQIYYASNAVIKIEAI

SEQ ID NO: 19099 - protein, 2295 aa, Streptococcus agalactiae
ATGTGCAGAAAGGATAACATGGCAGAGAATGATTTTAATTTGCTACCGTTGCTGGATTATATCAATCCTGCCACGGTAGACTATCAAACATGGGTTCAAGTAGGAATGGCCCTAAAGCATGAAGGTTATACAGCAATGGATTGGGATGTTTGGTCACAATCTGATAGTAGATATAAAAAAGGTGAGTGTTTTGCAAAATGGGATAGTTTCCAAGGCAATGGCTTTGGGACTATCACAGGGGCAACAATCACACAGCTAGCTAAAGATAATGGATGGACATCATCAGAGTATCGTAACAGCGATGATGCTCATGAACTCAGCTGGGACGATACAATCGATCGTGATTATAAGATTGTCGATAAAAATTGGATTGAATCGAAAGAGATTCAAGAGCCAAGAAACTGGAATCCAGTTCAAGATTTAATTACTTACATAGATACCTTATTTGAATCAACTGACAAAGTTGGTTATGTAACAGAGACCTATCCAATTACCCTTGATACGGGAGAGATTGTTTATAAACCAACAAAAGGAGCGTATGACAGGACTGCTGGTCAACTGATTGAATCACTCCAAAAAAATCCTACTGACTTAGGAGCAGTATTTGGAGACTTCAAAGAAGAGGCTGGTGCATGGATTCGTTTTAATCCACTAGATGGAAATGGTGTCAAGAATGACAATGTAACAGACTTTAGATATGCCTTGGTTGAATCCGACAGCATGGAACTTGGTAAACAGTATGCTTTGTTTAAAGAACTAGAATTGCCAATAGCAACCTTAGTCCATAGCGGTAAAAAATCATTACACGCTATTGTCAAAGTAGATGCTCGTGATTATCAGGAGTACCGCAAACGGGTTGATTATATCTATCAAATTTGTAAAAAGAATGGACTTGATATTGACACACAGAACCGCAACCCTAGTCGATTATCACGCATGCCTGGTGTGACTCGGAATGGGCACAAGCAATTCTTGATTGATACTAATGTGGGTAAAACCAACTACGAAGAATGGTATCAATGGATTGAAGATTTAAATGACGATTTGCCTGACCCAGAGACGCTAGCTGACGAATGGGATAATATGCCAGAATTGGCACCGGAACTCATCAAAGGAGTTTTGCGTCAAGGCCACAAGATGTTGATTGCTGGACCATCAAAAGCTGGTAAGTCGTTTGCATTAATTGAGCTATCCATCGCGCTGGCTGAAGGTAAAGAATGGTTAGGCTGGCAGTGTGAACAAGGTAAGGTCTTGTATGTCAATCTGGAACTGGATAGACCGTCAGCTTTGCATCGCTTCCGTGATGTATACGAAGCTATGAGCTTGCCACCAGCAAACATCAAGAATATTGATATTTGGAACCTACGTGGAAAGACCGTTCCCATGGACAAGTTAGCGCCTAAGCTTATCCGTCGTAGCTTAAAGAAAAATTACCAAGCGGTCATCATTGACCCTATCTATAAGGTGCTGACTGGTGATGAAAATAGTGCGGACCAAATGGCTCACTTTACCAATCAGTTTGACAAAGTAGCTACTGAGTTAGGTTGTAGTGTGATTTACTGCCACCATCACTCAAAGGGGAGCCAAGGCGGTAAAAAATCTATGGACCGTGCAAGTGGTTCAGGAGTGTTTGCCCGTGACCCTGATGCACTGATTGACCTAGTAGAGCTAGAATTGACTGAGGAACTCATCAAGTCACGCTCAGAAAAAGCAGCCGCTAAGATTTACCAACAAGCCTTGCAAGAAAAAGCGCTAGCCTACTATCAACAGGAAGTAACGCTAGATGATTTGGAAAGTCGTTATCAGATGCAGCAACATTTTGACAAGGCTATCAAGGACATCATGATTAAACAGCCCTATCTGGAAGCGGTCAAGAAAGCCCAGTATGAGGTGGAGATTTCCACTGCCTGGCGAGTTGAAGGGACTTTACGCGAGTTTGCTAAATTCCAACCAGTTAACATGTGGTTTAGCTATCCAGTGCATGATGTAGACACAACGGGTGTCTTGGCTGATATATCACTAGAAGATAATGTGCCGACTTGGAAGAAGAATTTTGAGAAGAAGAGTCCAAGAGAGTCCAGGGAAAAGAAATCTCAAAAAGTAGAGACTGCAATTAATTCATTGAATGATGGAATAGAGCCAGTCACAATCGATAACTTAATCGAATATTTTTCTACTGAAGATAAGCCAGTTTCTGAAAAAACTATTCGTAGATGGATAAAAGAAAACGGTAAATTTGAAGTTAAAAATAAACAAATTTTACCAATAGAAGAACCTAAAACCAATAAAAGTTTG

SEQ ID NO: 19100 - protein, 765 aa, Streptococcus agalactiae
MCRKDNMAENDFNLLPLLDYINPATVDYQTWVQVGMALKHEGYTAMDWDVWSQSDSRYKKGECFAKWDSFQGNGFGTITGATITQLAKDNGWTSSEYRNSDDAHELSWDDTIDRDYKIVDKNWIESKEIQEPRNWNPVQDLITYIDTLFESTDKVGYVTETYPITLDTGEIVYKPTKGAYDRTAGQLIESLQKNPTDLGAVFGDFKEEAGAWIRFNPLDGNGVKNDNVTDFRYALVESDSMELGKQYALFKELELPIATLVHSGKKSLHAIVKVDARDYQEYRKRVDYIYQICKKNGLDIDTQNRNPSRLSRMPGVTRNGHKQFLIDTNVGKTNYEEWYQWIEDLNDDLPDPETLADEWDNMPELAPELIKGVLRQGHKMLIAGPSKAGKSFALIELSIALAEGKEWLGWQCEQGKVLYVNLELDRPSALHRFRDVYEAMSLPPANIKNIDIWNLRGKTVPMDKLAPKLIRRSLKKNYQAVIIDPIYKVLTGDENSADQMAHFTNQFDKVATELGCSVIYCHHHSKGSQGGKKSMDRASGSGVFARDPDALIDLVELELTEELIKSRSEKAAAKIYQQALQEKALAYYQQEVTLDDLESRYQMQQHFDKAIKDIMIKQPYLEAVKKAQYEVEISTAWRVEGTLREFAKFQPVNMWFSYPVHDVDTTGVLADISLEDNVPTWKKNFEKKSPRESREKKSQKVETAINSLNDGIEPVTIDNLIEYFSTEDKPVSEKTIRRWIKENGKFEVKNKQILPIEEPKTNKSL

SEQ ID NO: 19101 - protein, 279 aa, Streptococcus agalactiae
TTGACATTGACTATGCGCGAAAATAAAAAAAGATGGGAAGTGACAAAAATGAAAGAATACAAAAAAAGAATGATTGTTGAATATCAAGAATTAAAAAGCCGTGCAGAAAAATTATCAGTATTAATTAATAAATTTTATATTGATAGTCTAGATTTTAAATTACAATGTCCTATTGAATTATTAGTAGCACAATGGCATGCAATGGGAGCTTATCTAAAAATTTTAGAACAACGTGCAGCAATTGAAAAAATAAACTTGGATAATGTTGATCATGACAAT

SEQ ID NO: 19102 - protein, 93 aa, Streptococcus agalactiae
MTLTMRENKKRWEVTKMKEYKKRMIVEYQELKSRAEKLSVLINKFYIDSLDFKLQCPIELLVAQWHAMGAYLKILEQRAAIEKINLDNVDHDN

SEQ ID NO: 19103 - protein, 405 aa, Streptococcus agalactiae
ATGTTGATCATGACAATTGAATTTTTTATCCCAATGAAAAAAATACCAACCACAACACATCAGCAAAAAAAGGTCCGTGTGGTAAATGGGAAACCACAATTCTATGAACCAGATTCACTAAAGGAAGCTAGGGCAATGTTTATGGATAAGTTTGCTCAACATGTCCCTAAAGAAAAATTAAATGGTCCAATAAGACTAACAACCAAGTGGTTATTTCCGAAAATCAAAAAATCAGTAAACGGACAATATAAAGATACTAAACCCGACACAGATAATTTGAACAAGTTACCTAAAGATTGCATGACTGAATTGGGATTTTGGAATGATGATGCGCAGGTTGCTTCGGAAATTATTGAGAAGTTCTGGGCTGATACAGTAGGAATATATGTGAAGGTGGAAGAGTTA

SEQ ID NO: 19104 - protein, 135 aa, Streptococcus agalactiae
MLIMTIEFFIPMKKIPTTTHQQKKVRVVNGKPQFYEPDSLKEARAMFMDKFAQHVPKEKLNGPIRLTTKWLFPKIKKSVNGQYKDTKPDTDNLNKLPKDCMTELGFWNDDAQVASEIIEKFWADTVGIYVKVEEL

SEQ ID NO: 19105 - protein, 213 aa, Streptococcus agalactiae
ATGAAAATTGATTATATTGATTTTTTTGAACGAGTGGTTCCTGGCTGGATGAGAGAAAGTAACAAAAAAATGCAGGAGCTTGGTTTTGGAACTGAACAATATTGGGTATGGGTTAATATGTCAATCGTTGATATTTGCGAGAGTTATGGCAACGACGATTTGGTGAATGGCCAATTCCACATGATTTGGGAGTGGCTAGAAAGGAAAACAAAA

SEQ ID NO: 19106 - protein, 71 aa, Streptococcus agalactiae
MKIDYIDFFERVVPGWMRESNKKMQELGFGTEQYWVWVNMSIVDICESYGNDDLVNGQFHMIWEWLERKTK

SEQ ID NO: 19107 - protein, 312 aa, Streptococcus agalactiae
TTGCGAGAGTTATGGCAACGACGATTTGGTGAATGGCCAATTCCACATGATTTGGGAGTGGCTAGAAAGGAAAACAAAATGACAGGTGAATTAGTACATAAACCAAAGCATTATAATCATGGGGAAATTGATTTGATTGAGTCGTGGTATAAGACATACCCATGGGACCAGTTTGTCGCAATCATGGAAAGTCACATTGATAAATACATTAAACGACATAGATACAAAGGCAATGCGACTCAGGATTTAGAAAAAGCACTCGAATATACAAAACGTCTCGTTGAATATTGGTTACTAGAAAGTGTGAACGAA

SEQ ID NO: 19108 - protein, 104 aa, Streptococcus agalactiae
MRELWQRRFGEWPIPHDLGVARKENKMTGELVHKPKHYNHGEIDLIESWYKTYPWDQFVAIMESHIDKYIKRHRYKGNATQDLEKALEYTKRLVEYWLLESVNE

SEQ ID NO: 19109 - protein, 330 aa, Streptococcus agalactiae
TTGTCATTAATTGATGAAGTAAAAGAATGCGGTTCAGAATCTCACAAAAAATGGTTTGATAGGTACTTTGATGGTTTAAAAATCGAGGAGAAACTTAAACAGTCTGCGATGAAAGGATTCTCTGGTTATAAAATCTCTATTCCAAAAAATGATGAATACTTAGCTAGACGACTTGACAGCCAAAAAACAATAGATTTACTAAAATACCGACTTGGTGATGGTTTTGATGTTGAAATAAAAAATCTTGAGTCATCATATAAAATCTTTGGTAAACCAGTTGTACTAAGTAGAGATTTATTTATTTTTTGGAGAACAGGAGATAAGAATGGA

SEQ ID NO: 19110 - protein, 110 aa, Streptococcus agalactiae
MSLIDEVKECGSESHKKWFDRYFDGLKIEEKLKQSAMKGFSGYKISIPKNDEYLARRLDSQKTIDLLKYRLGDGFDVEIKNLESSYKIFGKPVVLSRDLFIFWRTGDKNG

SEQ ID NO: 19111 - DNA, 411 bp, Streptococcus agalactiae
atgagtaaattatctaacgcacagttaaaggcttttgatgagtggttgtttgattatcgcgatattgaacgtaaaattgcaattagaaaacttgagctgcagacgcctgttagtacagatatcaatgtaggcggggggaagtctaatctagtagctaaagagacagaagatattgtcataaagtggtcaaaggacggtaaaatcaaaagttatgaaaacttcagagaaagtgttgatagggttaaagcactgcttgacgatgaattgaattatatttttgatctaaggtggggaactggttctaataatacctgggaggagatagcttataagattcatacgtctagagcaggaacctaccgaaaaagggatagaattttgactctatttgcacaacaaattggaaaattg

SEQ ID NO: 19112 - protein, 137 aa, Streptococcus agalactiae
MSKLSNAQLKAFDEWLFDYRDIERKIAIRKLELQTPVSTDINVGGGKSNLVAKETEDIVIKWSKDGKIKSYENFRESVDRVKALLDDELNYIFDLRWGTGSNNTWEEIAYKIHTSRAGTYRKRDRILTLFAQQIGKL

SEQ ID NO: 19113 - DNA, 429 bp, Streptococcus agalactiae
ttgagtaaattaacactaaaacaaaagcgttttgcagatgagtacatcatctcagctaacgcgacagcagcggctattaaagcaggttacagtaaaaagacagcgaggtcaataggtcaagaaaacttgaccaaacctgacattaaagcttatatagatgaaaggattgaaaagcttgaatctgcaaagattgccacgcaagaagaagttttacaataccttacatcaatcatgcgaggcgatcagcaagaaaaaacactgatcagcatcggggagttaggacaagagattgtcgatattgatgtaggtgcaaaagatagaatcaaggcagctgagctactaggtaagcggtacagattattcactgacaaaattgaaatggatataagttcagatgtaaccatcagtgtaggtgagtgggatgacgac

SEQ ID NO: 19114 - protein, 143 aa, Streptococcus agalactiae
MSKLTLKQKRFADEYIISANATAAAIKAGYSKKTARSIGQENLTKPDIKAYIDERIEKLESAKIATQEEVLQYLTSIMRGDQQEKTLISIGELGQEIVDIDVGAKDRIKAAELLGKRYRLFTDKIEMDISSDVTISVGEWDDD

SEQ ID NO: 19115 - DNA, 1278 bp, Streptococcus agalactiae
atgacgactaagcaacgccctaaaattaatattgtcatcaagtatcctagcaaagtctttaataaacatatctacgataaactatataattacgataacttcacagaggtacactatggaggtgcatcttctggaaaatcacacggtgtattccaaaaaattatcttaaaagcactcaatccaaagtttaaacatccgagaaagattcttgtccttcgaaaagttggtgcaactgtcagagactctgtatttgctgatattatgtctaacttgtcgtattttggcgtcttggataaatgcaagataaatatgtcagcttttagaataacattgccgaatggctcggaatttattttcaaaggcatggataatccagaaaagattaagtcaattaaagggatatctgatgttgtaatggaagaagctagtgagtttacacttgatgattacacacagttgactttgcgtttaagggataagaaacatctagagaagcaagtctatctcatgttcaatcctgtgagtaaagcaaactgggtttataaagctttctttatcaagtcacctaaaaacactgtagtttatcaaactacatataaagataataggtttttagatgatgttactagagaaaatatagaggaactagcaaacagaaacgaagcttattacaagatttatgctctaggtcagttcgcgactttagaaaagctcatatttccaaagtatgaaaaaagaatactaaacaaagacaagttatcacacttgccttctttttttggtttggactacggattcattaatgatccttcggcatttttgcatgtcaaaatcgatgatgcaaacaagaagctatacatcttggaggaatatgtcagaaagaatttgaccaatgataaaatagctaatgctataaagagcctcggatatgccaaagaagaaatcagaggggattcagctgaaaagaaatctaaccaagagttgagaaatttaggtattcaaagaatgattgatgtaaaaaaaggagctggttcagttatgcaaggaattcagtacatgctacagtacgatatcgttgttgacgaaaggtgtgttaaaacaattgaagagctggagaattacacttggaaaaaagataagaaaactaacgagtatatcaatgagccagttgacagctataaccattgcattgatgctatcagatatgcagtacaagatagaatatatcaatcatctgacagaaataaacgactaaataatgctaaatattattttaga

SEQ ID NO: 19116 - protein, 426 aa, Streptococcus agalactiae
MTTKQRPKINIVIKYPSKVFNKHIYDKLYNYDNFTEVHYGGASSGKSHGVFQKIILKALNPKFKHPRKILVLRKVGATVRDSVFADIMSNLSYFGVLDKCKINMSAFRITLPNGSEFIFKGMDNPEKIKSIKGISDVVMEEASEFTLDDYTQLTLRLRDKKHLEKQVYLMFNPVSKANWVYKAFFIKSPKNTVVYQTTYKDNRFLDDVTRENIEELANRNEAYYKIYALGQFATLEKLIFPKYEKRILNKDKLSHLPSFFGLDYGFINDPSAFLHVKIDDANKKLYILEEYVRKNLTNDKIANAIKSLGYAKEEIRGDSAEKKSNQELRNLGIQRMIDVKKGAGSVMQGIQYMLQYDIVVDERCVKTIEELENYTWKKDKKTNEYINEPVDSYNHCIDAIRYAVQDRIYQSSDRNKRLNNAKYYFR

SEQ ID NO: 19117 - DNA, 1527 bp, Streptococcus agalactiae
ttgtttgaaagaaaatttttatcaggaacaagatttaatgaaaatgcgaacaggcaatttatcatgttgcaagaagattttgatgctattgaatataattcgcagaaatggattgatcagttaaaaaaatatatttctagttttgagactgagcaactagaccgattgaaagagttaaagcgatattatcttggtgataacaatatcaaatatcgtccagcaaagaccgatgaatatgcagctgacaatcgtattgctagtgattttgctaagtacattacagtctttgagcaaggttatatgcttggtgtgcctgtcgagtacaagaacgaagatagtgatattcaaaaaaacattaatcttatgagtgttcgtaacaacgaagactatcacaatgtagcaatcaaaacggacttatccatttacggtcgtgcttacgagcttttaaccgttgaagaagtagataatgggacagaaattaaactctatcaactacccgcagaacagacatttgttatttatgatgatacttatcaacataattctttgatggctgtacatttctacgacatcgattacggcgcaggtaaacgtaagcaaattgttaaggtctatacttcaaatatgatatttacttacgaggactttaatcaagaaacaaaaggaatgagtctgaaagatgaagaagaacattactttagtggtgttccagttaatgaatattctaataatgatgatagagcaggcgcttatgaatcagtcttagataatattgatgcatacgacttatcacagtcagagcttgctaactttcaacaagattctgtagatgcaatcctagttctctctggtaatccgtatacaggagcagacgaaaatgatttttttgaagatggacgtataaatccaaacggtcgtttaggtatatctattggattcaagaaggcaaaagttattgtccttgatgacaatcctaacccggatggtgctaagccagatgcgtattatctaaaaaaagaatatgatatggcaggaagtgaagcgtataaaaacagactagtgtcagatatcttacgctttacttttactcccgatattcaagatttaaaattctctggtgttcaatctggcgagtcaatgaagtataagctaatggcttcagataattaccgtgaaaagcaagaacggttgttcaaaaaaggactcatgagacgtttacgtttagctgccaatatctggtcaatcaaggggaacgaatcgacggtatatagtcaagttaatgatactagtatagtatttactcctaatgtgccgcagaatgataatgaaattgtttcggctgcacagagtctttatggaattgttagcgatcaaactatttttgaaattttaaacgcagtaactggtgtcgatgctgaagctgaattaaaacgtctgaaagaagaggctgacgagaagcaagtaatgccagaaccaagaaatgtaggtgatgctaatggacaagaagaaccaacagcaggaccatct

SEQ ID NO: 19118 - protein, 509 aa, Streptococcus agalactiae
MFERKFLSGTRFNENANRQFIMLQEDFDAIEYNSQKWIDQLKKYISSFETEQLDRLKELKRYYLGDNNIKYRPAKTDEYAADNRIASDFAKYITVFEQGYMLGVPVEYKNEDSDIQKNINLMSVRNNEDYHNVAIKTDLSIYGRAYELLTVEEVDNGTEIKLYQLPAEQTFVIYDDTYQHNSLMAVHFYDIDYGAGKRKQIVKVYTSNMIFTYEDFNQETKGMSLKDEEEHYFSGVPVNEYSNNDDRAGAYESVLDNIDAYDLSQSELANFQQDSVDAILVLSGNPYTGADENDFFEDGRINPNGRLGISIGFKKAKVIVLDDNPNPDGAKPDAYYLKKEYDMAGSEAYKNRLVSDILRFTFTPDIQDLKFSGVQSGESMKYKLMASDNYREKQERLFKKGLMRRLRLAANIWSIKGNESTVYSQVNDTSIVFTPNVPQNDNEIVSAAQSLYGIVSDQTIFEILNAVTGVDAEAELKRLKEEADEKQVMPEPRNVGDANGQEEPTAGPS

SEQ ID NO: 19119 - DNA, 1440 bp, Streptococcus agalactiae
atggacaagaagaaccaacagcaggaccatcttgattactggcaaaaacgtcaagaagatattgttagttatttagatagagcagacttagatattttcaatgaattatctagagtatatagtaaccaatcattgtctttacaaaaggatttatatgatttttataatcgttttgctgaagataataagataacttatcaagatgctgttaagaagcttagacacgaagatttaagtgattatgcagcaaatgccaatcgatatagagagcaagctgagaaagacccagagctacttaaacgtattaatgaacaatatgtatcagcgcaggctactcgtcttgacatgcttaatttagagcttatacatcgtgcaggtactatgagaggtatcttagatggtttgtttagcgatcatctaagaaaggcagctagttatgcttaccaaaaatctgtaggtggtcgctcaggaacaattaatgggccagctctagaacagttaatcaagacaccatttgacggctataattactcagagcaactctggggaaatgttgataatctagtaaaagatttacaagaagcattcaaaaaaggatttgtcagaggtcttggtcctagagaaatggctcgtgaattgggcaaacgttacgacgtagccagacatagggctgaaacgcttattcgtactgatggcacgatgattatcaataatgctacagccaagcgatacattgatgcgggtattaagtattatcgagacttagttcagctagatgatagaactactcagatatgtcgaagtaaggcaagagaaaataaaaagaaactcttatctgaaatgcagcccggaattaatgctgctccatatcactttaattgtaggactacaattattcctgacgaggatgaacttaataccgatgttgaacctatcgctgataaaagtactaagtattttaaggatgtcacatcagattggatagatgggcaagagtatgagtctcaaatatctatgctgaatgagtacactaaaggaggcggaacttacagagttgatggtcataacgtagtacttgaccattcaaactacgaatatagagttgctaactggttatctaagaagacaggattacaagttgaaatggttccgagggttaatttccccgaaaatattaacactccagactatttagttgacgacgttccatttgacttgaaagaaatcacaggttcaggtaaaaacgtcatcgatggtaatctacgaaaagcaaaaaagcaagcacctaatatcatttttgatatcacaaaaaccccactatcttttgaagaaatactggggcagttagaacatatttataagatagatcgcaggggtctcaatatatcaattatcaaaaacaaagacgaggtgttagctgtagtagaaaaagaaagacga

SEQ ID NO: 19120 - protein, 480 aa, Streptococcus agalactiae
MDKKNQQQDHLDYWQKRQEDIVSYLDRADLDIFNELSRVYSNQSLSLQKDLYDFYNRFAEDNKITYQDAVKKLRHEDLSDYAANANRYREQAEKDPELLKRINEQYVSAQATRLDMLNLELIHRAGTMRGILDGLFSDHLRKAASYAYQKSVGGRSGTINGPALEQLIKTPFDGYNYSEQLWGNVDNLVKDLQEAFKKGFVRGLGPREMARELGKRYDVARHRAETLIRTDGTMIINNATAKRYIDAGIKYYRDLVQLDDRTTQICRSKARENKKKLLSEMQPGINAAPYHFNCRTTIIPDEDELNTDVEPIADKSTKYFKDVTSDWIDGQEYESQISMLNEYTKGGGTYRVDGHNVVLDHSNYEYRVANWLSKKTGLQVEMVPRVNFPENINTPDYLVDDVPFDLKEITGSGKNVIDGNLRKAKKQAPNIIFDITKTPLSFEEILGQLEHIYKIDRRGLNISIIKNKDEVLAVVEKERR

SEQ ID NO: 19121 - protein, 201 aa, Streptococcus agalactiae
ATGAATAAACGAATTAAGAAGAAACGTAAACTCGAACGAGCTATTGTGATGCTTATCGCAGAGAATGCCATGCAAGCAGAAGCTCTTAGAAATCAACATAAAAGAATTGAACAACTTGAACAAATTGTAGAACATAATGCTCAAGCGACAAATAACGAACTTGATTATATAAAGAATAACTATAAGAAAAAATGGAAGAAA

SEQ ID NO: 19122 - protein, 67 aa, Streptococcus agalactiae
MNKRIKKKRKLERAIVMLIAENAMQAEALRNQHKRIEQLEQIVEHNAQATNNELDYIKNNYKKKWKK

SEQ ID NO: 19123 - protein, 567 aa, Streptococcus agalactiae
ATGGCAGAAGAAAATGTAGCAACAGAAACTACTGAGCAAGTCGACACTCAGAAAGAAGCTGTTGAACAAGCTAAGCAAGAACATGAGCGTACATTTACTCGTGCGGATATTTCAAAAATGATGACTGCTGAGCGAGCTAAATGGGAAGCAGAACAATCTGACGCTATTGAAAAGGCACGTACTGAGGGCGAACGATTGGCCAAAATGTCCAAGGATGAACGTGCTAAGGAAGAAGAACAAAAACGTCTTGATGCAATCGCAGAACGAGAAAAAGCAGTCGCAGAACGTGAAATGCGTATTGAGACTCAAACGCTCCTTGTGGAAAAAGGTTTGCCATTAGAATTTATTGATGTTGTTTTAGGTACTACTGCAGAAGAAGTTAAGACTAATATTGATAATTTACAAATTATTTTTGATAAGGCTGTTGAAAAGCGCGTTAATAATCGTTTGACTCAGAAGCCACCACGGACTGGCAACGGCTCTGTCGGCATGACTAAAGCTGAGATTATGGCAGTAGAAGACGACGACGAACGTATGCGTTTAATTGCTGAAAATCGTAACTTATTT

SEQ ID NO: 19124 - protein, 189 aa, Streptococcus agalactiae
MAEENVATETTEQVDTQKEAVEQAKQEHERTFTRADISKMMTAERAKWEAEQSDAIEKARTEGERLAKMSKDERAKEEEQKRLDAIAEREKAVAEREMRIETQTLLVEKGLPLEFIDVVLGTTAEEVKTNIDNLQIIFDKAVEKRVNNRLTQKPPRTGNGSVGMTKAEIMAVEDDDERMRLIAENRNLF

SEQ ID NO: 19125 - protein, 894 aa, Streptococcus agalactiae
ATGGCTGAAAAAAATTTAAACACCATGGCAGACTTGGGAGACATTAAATCGATTGATTTTGTTAACAAGTTTTCCAAAAACATTAATGACTTACTGAAACTACTAGGGGTTACTCGTCGTGAAGAGTTAACCAGTGATTTAAAAATTCAGACCTATAAGTGGGAAGTGACTTTAGATCAAACTGATCCTGGAGAAGGGGAAACAATCCCTCTGTCTAAGGTTACTCGAACTAAAGATAAAGACTATACAGTGAAGTGGTTCAAGAAACGTCGTGCAACTACAGCTGAGGCAATTGCTCGCCATGGTGCAGCTCGTGCTATCACTGAAGCAGATAAGCGCATTATGCGTGAGCTTCAGAATGGAATTAAGGATGCGTTCTTTACATTCCTCAAAACAAAACCAACAAAAGTTAAAGGGGCTGGTCTTCAGAAGGCACTATCTTTATCATGGGCAAAACTAGCTACTTTTAATGAGTTTGAGGGGTCTCAACTTGTTTCTTTTGTATCTCCTTTAGATGTAGCAAATTACCTTGGTGATACTAAAGTAGGTGCAGATGCTTCTAATGTTTTTGGGATGACGTTACTAAAGAACTTTTTAGGGATGCAGAATGTTATCGTTATGCCATCTGTGCCAGAAGGAAAAGTTTACTCAACTGCAGTTGATAATCTTGTTTTTGCTTCGTTGAATGTACGTGGTGGAGATTTAGGTGGTCTATTTGCAGACTACACAGATGAGACTGGCTTGATTGCTGCAGCTCGTCAACGTCAATTATCTAACTTAACTTATGAGTCAGTATTTTTTGGAGCGAATGTACTATTTGCTGAAATTCCTGAAGGAGTTGTAGAGGCAACTATTGAAGCAGATAAAGAGGTCCCAGGAGCAGTTCCAGGAGGG

SEQ ID NO: 19126 - protein, 298 aa, Streptococcus agalactiae
MAEKNLNTMADLGDIKSIDFVNKFSKNINDLLKLLGVTRREELTSDLKIQTYKWEVTLDQTDPGEGETIPLSKVTRTKDKDYTVKWFKKRRATTAEAIARHGAARAITEADKRIMRELQNGIKDAFFTFLKTKPTKVKGAGLQKALSLSWAKLATFNEFEGSQLVSFVSPLDVANYLGDTKVGADASNVFGMTLLKNFLGMQNVIVMPSVPEGKVYSTAVDNLVFASLNVRGGDLGGLFADYTDETGLIAAARQRQLSNLTYESVFFGANVLFAEIPEGVVEATIEADKEVPGAVPGG

SEQ ID NO: 19127 - protein, 354 aa, Streptococcus agalactiae
ATGGATAAGGAACTACTTTTAGTTGAGGTAAAAATTTTTAAAGGTATTGCTAAGAATGATGCCTCACAAGACGAATTGATTAAACTTGCCATTGACGAAAGTATTGAACGTATCCTTGCGAAACTCAATGAGTATTCTGATGAAGAGCTGTTAGAAATACCACGACGTTTAACATTTATCGCAAGAGATGTAGCTATTAAAAGATATAATCGGCTTAATTCAGAAGGAGCCAAGGCAGATTCTGAAGAAGGTCGGTCTTTTAGTTGGGAAGACTATCTCACAGAATATGACTCAATTCTTAGAAATGTTGCTTATGGTAAAAGGTGCCGTGGAAAAGGTGTCGCTAGATTTATT

SEQ ID NO: 19128 - protein, 118 aa, Streptococcus agalactiae
MDKELLLVEVKIFKGIAKNDASQDELIKLAIDESIERILAKLNEYSDEELLEIPRRLTFIARDVAIKRYNRLNSEGAKADSEEGRSFSWEDYLTEYDSILRNVAYGKRCRGKGVARFI

SEQ ID NO: 19129 - protein, 342 aa, Streptococcus agalactiae
ATGAGTCTTACTTATCGTATGCGAGGACTGGACAGGTTTTTACGCAGTGTTGAGCGCAAGCAGAAGTCAGCACGAATCGCTGTAGATAAAAAACTTAGCAAATCAGCAGCTAGGATTGAGAGACAGGCTAAAATACTAGCCCCGGTTGATACTACATGGCTGAGAAGTCAAATCTACAATGAACAACAAAAACTCTTGCACTATAGAGTGGTTTCTCCTGTTTTATATTCTATTTATCTTGAGTTAGGTACTCGTAAAATGGAAGCTCAACCATTTTTAGACCCTGCCCTGAGAAAAGAATGGCCAGTGTTAATGGCTAACCTCAAAAAAATGTTTAAGAGG

SEQ ID NO: 19130 - protein, 114 aa, Streptococcus agalactiae
MSLTYRMRGLDRFLRSVERKQKSARIAVDKKLSKSAARIERQAKILAPVDTTWLRSQIYNEQQKLLHYRVVSPVLYSIYLELGTRKMEAQPFLDPALRKEWPVLMANLKKMFKR

SEQ ID NO: 19131 - DNA, 357 bp, Streptococcus agalactiae
atgatatactcaccatcaactttatatctgaatgaggtaaaaaatagattgggaacacttaatatcccaatctattttaaattaccaaaatcggacgttttagagccgtttattgtcataggttccaatgtatcggatacatcaaaaacagcgcagacaggagctgttgtgggagattttgggctaaatattgacgcattcttacctgccactagcagaacagatgcagaggaggttaagtctagaatgattatgtccttaggacgaaacaaacggattaatgcacagttattgatggataattctgtaggtcgtgaggtctaccatattgctatcaatatcacagaaatactaatt

SEQ ID NO: 19132 - protein, 119 aa, Streptococcus agalactiae
MIYSPSTLYLNEVKNRLGTLNIPIYFKLPKSDVLEPFIVIGSNVSDTSKTAQTGAVVGDFGLNIDAFLPATSRTDAEEVKSRMIMSLGRNKRINAQLLMDNSVGREVYHIAINITEILI

SEQ ID NO: 19133 - DNA, 630 bp, Streptococcus agalactiae
atggaaactacagttgaaattactacagctaagcctattaaaggtaaaaatatattttattttattcaatctgttgatgctgaattaggtagtaaagcaattctgccagcgtatcgcacagatgggacaacgacgctcggtggagattttattgatgaacaaactcaacaaggacgtgtgcttgaaaaagcaacagatgagcactcaattgatttgacatcatactacacaccgaaagacaaagcaattgaaattgtagaaatagctaaaacaactggtaaatctgtcaaagtttggcgtgttatcgcagacgaatctttgaaagaaaaaggttcaggaactttaaaagatagagaagtttatcctgctaagtttggatatggaaaaattgacgagattgaatattcagaaggtgttgaagatcttgtagaagcatcatatgcattgaatattatcgatagtttaaaagatggcaaatttccactgacggcagaagatatcgctttgctaacaagtgtttatgcatatcaaaacccaggcgaaactactggcgattatgacaatatccagaaaaaagaagtttcaggaagttcaccgggagcagttcctgaaaaattatcagaaggacac

SEQ ID NO: 19134 - protein, 210 aa, Streptococcus agalactiae
METTVEITTAKPIKGKNIFYFIQSVDAELGSKAILPAYRTDGTTTLGGDFIDEQTQQGRVLEKATDEHSIDLTSYYTPKDKAIEIVEIAKTTGKSVKVWRVIADESLKEKGSGTLKDREVYPAKFGYGKIDEIEYSEGVEDLVEASYALNIIDSLKDGKFPLTAEDIALLTSVYAYQNPGETTGDYDNIQKKEVSGSSPGAVPEKLSEGH

SEQ ID NO: 19135 - DNA, 453 bp, Streptococcus agalactiae
atggaattaacagtagcaaaacgcagtattgaaattaaatttgattttaaaacaatgtttaagataaataatagacttgggactgtgaataaagagacaggggaacgtaacgctgacggcgtcggtacgctattttataaaatcttagagcgtgatgattcagctgtagtagatttagtcaagctgtctgtaggcagcggtaaaaaagcattgtcagaagatgaagtgcttgattctatcgcagagctagtcgaagaagaagggtcgacagaagccttatttaaagaaattgagaatgacatggttgaatctggttttttcaaagagaagatttcgaaatatatcgaaagcatggagaaatcagtgaaatatttagaagctcgagaagatgcggacgaagctcaaatccaaatcgtaaaagacatgattgggaaaatgaaagacgcaatctct

SEQ ID NO: 19136 - protein, 151 aa, Streptococcus agalactiae
MELTVAKRSIEIKFDFKTMFKINNRLGTVNKETGERNADGVGTLFYKILERDDSAVVDLVKLSVGSGKKALSEDEVLDSIAELVEEEGSTEALFKEIENDMVESGFFKEKISKYIESMEKSVKYLEAREDADEAQIQIVKDMIGKMKDAIS

SEQ ID NO: 19137 - DNA, 228 bp, Streptococcus agalactiae
atggaaggtttgcagtacaagcaaattgcagaacgtgaaaacctctctgaacttgctttaaatctcagatacacgttaaatgctaaaaacgtcaatgctaataagctcaaattagataaacaacgtaacaaaattaaacgaacttatcaaaataaacaagatctaactaatatttcaaacgatttcgcagaacgtgtagcgaagctcaatttacattttcaaaattta

SEQ ID NO: 19138 - protein, 76 aa, Streptococcus agalactiae
MEGLQYKQIAERENLSELALNLRYTLNAKNVNANKLKLDKQRNKIKRTYQNKQDLTNISNDFAERVAKLNLHFQNL

SEQ ID NO: 19139 - DNA, 4224 bp, Streptococcus agalactiae
atggcaggtacatttgatggggctatattcgctgatattggtgcaaatactaaagattatgaggcagctatggctagaattgttagtactacacaaaatgcttttagaaaagcgcaggatgctgcagttaacaacagcaacaaaatgatacagatgattggtcaaattatggctcaattagcaaataatggtcaatcattagggcaaagactcggtaatgcatatagtacaggtctcaagttatctcttggtcaaattcaaaggatagcagcatctatcggtgaaaaaattcccgaacccataaagaatgggttcaataaagctttttcaattattcaaaatagcgtacagaagttatcgagcgccatccctcaacccataaaatccgcattcacaagtgcaacaagtgcagtagttagcttttcgtctaagatcacaagtgccgtctcagctgctttcaactctgttagttctaaagcgagtactgttgcagataaaatcagtagtagttttgggggtagaatcacttcagcggttactaatttagcgactaagttaagcacaggtcttagcaatagttttagcaggatgtccagttctgcaactagtgtcctaaatggtattagtcagagattcgcaagcgcatcatctgctggtgaaaaactaagaagcactgtgggaagtatcatttctgcttttagtttgatggccattgctcagaaaggaatccaagcaatcacaggagcaatggacggtgcaataagtcgtgtagataccatgaaccgctttccgaaaacgatggcgctatttgggtattctgcacaacagtctaaagcatcaatagataaattatctaaaggaattgaaggacttcctacaccactagacagtgctgttaaaagtgcccaacaattagctataactacaggtagcttagataaaggaacagagctagcattagcatttaataatgcaatgattggttatggagcgactactgaaggggctgagcaagcacttagacagtttaaccagtcgttggggtctggtaagatatatgccgaagagtttaattctgtgtctgaagctgcccctggcttaatgtctaaaatggcagagtcattcggatttggtaaaaatggtgttcaggacttaaaagcagctctttcagacggcagtattactgcccaagaattcgctgataaaatgattgaactaaacaaggcgcagggtggttttgctgagatggcccaatcatcggctggtggaatccgaactgcatggaagaacgtacataccgccgtcgtaaaaggcgtagcaggtatgatttcagcctttgatgaagctgccaaagctaatggtatgaagaccattgcagaatccattaatagtattaagccagctataaattctgcatttgcaactgtgaactcaataatgccaaaccttgttgcagcattcgctagaatctccaagatggtgaatattgactttagtccactaactagtggaattaaatcagcttttggattattaaatactgctttaggtgaatttgcaaaaactggtgaagtatcgtcagcaactattgatagaatcaaatcaaagatagcatctataggtcctactgcaatagcagcttgggccttattaaatcctgcaagtgctattgcaactattatgcctttaatatcaattattggtaagattggtgttgctcttgggactgttggttcagcgttgggatcattcggagcaatggtagccagtggattgtcaactgctagcggaataattggtgcttttgcagcaacagtaagtggtttacctgccatttttgtaactgcggcagcgagaggtgttgctatactcggtgcaatgacacaagccatgggagctgtggtaagcgttgctatggcagcaatagggccagcggcaattttaggattggtcgtagcaggtcttggtttagtaaacaatcaatttggtactcaaattgataaattgctaaatatagcaattactaaaggtcctcaaattatcactaatttggtaaatggcattacatcacaaatacctcaattaattgctagtggtgctgaacttatatctaaatttgcaaatgctattactgtattgttacctgttattattcaagcaggtgtccaattaatatctagtttagttcaaggtgttggacaaaatgctacgagtttaattagttcagcaatacaaattatagggacatttattagttcaattgcaagtgcattacctcagcttttagcagttggtatggaattgatagttaatttagttcaaggaattgtgcaaaatattccactaattattcaatatgctcaacaaattattaacaattttggggcaagcttacaagcaaacatgccaagcattgttaataatggcattgctatcttaactaatttagtgcaaggcattatccaaatgttacccgcagttgtacaaattgcaacccaagtcatcacaggttttatttccggtatagctcagtatttgccacaggtaatccaaggcggcatccagattataatcatgttagtgcaaggtattattcaaaatttaccacaggtaatccaagcagcgatgcagattattcagtcattgatatctggtttatcacaagcattaccacaaattatatctgcagggctacagttagttgtgcagttggctgttgcaattattaaagggttgccacagattatttcagctggtattcaattgattataggacttggcaaagctatgcttgaggctattccgaatgctctttcaggggtatgggaaggcattaaaggtggatttagttctatgtgggaccaaatcacaggaaagagctcaacaagtgccgctaaagttacatcagacatgtcaacaatgactatgaatgttggtatgcagacgaccacaatggctaatcaaactaacatagacacaactactatgctaaatagcattagtcaaaatactggtcttgctaatttaaatgcgacaacaaatgctactcagatggcaacaaatgtaaatgcacaaacagcatctatggcaaatcaaggtttgctgaatgcggcaggatttaatgaagcgttgagttcgaacatgactttagcaaatacaaatgctactaatcaagctaatcaaatgactgctaatgttaataacgctactagccaaatgagtctggggtctctaccgaatttcttggaattatcgcaacaggcaacaagtaatatgcaaactgcacaagcaaatgctaccacttccgcgaatggaatgagttctggagttactggtgctacagctggtatggctagtggtgtagctaataacatgtcaggtataactagcactgtatctacagggatgaatcaagctgcaaatgctgcaaaatcaggcggtgcaaatatatctaacagtgtgaatagcagttttacacaagctaaatctacagtttcaagttcaatgtcaggaatgaacagcactgttactagtggaatgaatagtattaataatactgtaaaatcaggtggaaataatattaaatccacctttacaagttcctttaattctgctaagtctacagtttcaaatgctatgtctagtattcgttcgtcaatttcaagtggaatgaacagcgctgtgagtgtaacaagaagtgcaatgaattcggttgtatctgcaatgaatgcagcagcgagtggtgctagatctgcaggttataatactgggattggatttgcaaatggcctagcaagcactgcaggaactattatggctattgctaatagtattgctgctaatgtcgctgcaacaatcagaagcgcaatggatattcattcgccttcgcgagtaacgcgagaacttggtgcttatactggtgaaggttttgcacttggtatgcaggattggatggatgatatcaatgcaataggtaaagagtacgctaatgctgtgactgatcagcgatgggaaacagattcacaattagcgacatctgcaaacatatcaagtgcaggtgtatcatcatcacttgataatctaagcgacgaggtacgcaaccaacaattgactagtccaacgttcgaggttcataatgaacttgttggtgatgaaatttatacaactattaaatctaaagaagcaagagaaagtaataaagataattacttcaactttgcgaca

SEQ ID NO: 19140 - protein, 1408 aa, Streptococcus agalactiae
MAGTFDGAIFADIGANTKDYEAAMARIVSTTQNAFRKAQDAAVNNSNKMIQMIGQIMAQLANNGQSLGQRLGNAYSTGLKLSLGQIQRIAASIGEKIPEPIKNGFNKAFSIIQNSVQKLSSAIPQPIKSAFTSATSAVVSFSSKITSAVSAAFNSVSSKASTVADKISSSFGGRITSAVTNLATKLSTGLSNSFSRMSSSATSVLNGISQRFASASSAGEKLRSTVGSIISAFSLMAIAQKGIQAITGAMDGAISRVDTMNRFPKTMALFGYSAQQSKASIDKLSKGIEGLPTPLDSAVKSAQQLAITTGSLDKGTELALAFNNAMIGYGATTEGAEQALRQFNQSLGSGKIYAEEFNSVSEAAPGLMSKMAESFGFGKNGVQDLKAALSDGSITAQEFADKMIELNKAQGGFAEMAQSSAGGIRTAWKNVHTAVVKGVAGMISAFDEAAKANGMKTIAESINSIKPAINSAFATVNSIMPNLVAAFARISKMVNIDFSPLTSGIKSAFGLLNTALGEFAKTGEVSSATIDRIKSKIASIGPTAIAAWALLNPASAIATIMPLISIIGKIGVALGTVGSALGSFGAMVASGLSTASGIIGAFAATVSGLPAIFVTAAARGVAILGAMTQAMGAVVSVAMAAIGPAAILGLVVAGLGLVNNQFGTQIDKLLNIAITKGPQIITNLVNGITSQIPQLIASGAELISKFANAITVLLPVIIQAGVQLISSLVQGVGQNATSLISSAIQIIGTFISSIASALPQLLAVGMELIVNLVQGIVQNIPLIIQYAQQIINNFGASLQANMPSIVNNGIAILTNLVQGIIQMLPAVVQIATQVITGFISGIAQYLPQVIQGGIQIIIMLVQGIIQNLPQVIQAAMQIIQSLISGLSQALPQIISAGLQLVVQLAVAIIKGLPQIISAGIQLIIGLGKAMLEAIPNALSGVWEGIKGGFSSMWDQITGKSSTSAAKVTSDMSTMTMNVGMQTTTMANQTNIDTTTMLNSISQNTGLANLNATTNATQMATNVNAQTASMANQGLLNAAGFNEALSSNMTLANTNATNQANQMTANVNNATSQMSLGSLPNFLELSQQATSNMQTAQANATTSANGMSSGVTGATAGMASGVANNMSGITSTVSTGMNQAANAAKSGGANISNSVNSSFTQAKSTVSSSMSGMNSTVTSGMNSINNTVKSGGNNIKSTFTSSFNSAKSTVSNAMSSIRSSISSGMNSAVSVTRSAMNSVVSAMNAAASGARSAGYNTGIGFANGLASTAGTIMAIANSIAANVAATIRSAMDIHSPSRVTRELGAYTGEGFALGMQDWMDDINAIGKEYANAVTDQRWETDSQLATSANISSAGVSSSLDNLSDEVRNQQLTSPTFEVHNELVGDEIYTTIKSKEARESNKDNYFNFAT

SEQ ID NO: 19141 - protein, 840 aa, Streptococcus agalactiae
ATGGATTTATTAGTACAAAAGAGTGATCAATCCTTTCGATTTTCAGAGATTGGTCTACGAATACTTGATGTCGATGACCGTTCATCATCTCTTGAGGTTGATAGTCGAACAGTGAAAGGTCGAAGCGGTAAAATCTTTGCTAGTGCTAAGTATGGCACAAAAAAAGTTAAGGTTAATGGGCGCTTAGTTGTAGCTTCTATTAAAGATTTTATGACAAAAAAAGATGATGTGAATGGCTTACTAGTGGATAGTGAGCCTTTTTACATTACTAAAATGTATCCTCAGAAAGAAAATTTATATGATTTCGAATTGCCTGGGATGAAAGCAGGTGATTTAGACTTATTAAATCAATCTCATACAGCGTGGCACTATCGTTGGAAAGTTTATGTCTCAAGTGAACCTGAGTACACTTTTGTTGGTAAGTCTAGTGAAGGTCTCAAATACAACTTTACAATTGCATTTGAGACTGCAGAACTTCCATTTGGTGAAACTATTGCACAAAATATAGTCATTACTAACGGAACGTTTAATTATTCTGGTACTGCACCTTTTAGCCAGTTAGAATACCCATGGTCTGTAGAGTTAACTTCAACTGGTGGACAAAGTAGTTTTTATCTTGAAATCGATGGGAGGCGCTGGGCTTATCAATATAGTGCACCACTTAATCAAGGCGACGTTATTGTAATCACTGGTATATCCACAACATTGAATAAGATAAATGTGACTGCTAGAACCAATCATGAATATTTTGTTTTAAAGCAAAAAGTCAACAAGACTATTCTCTACAGCACAAATTTTCAAGGCACAATCAAGTTTTTAAACTTTAAAGAACTTTACAAG

SEQ ID NO: 19142 - protein, 280 aa, Streptococcus agalactiae
MDLLVQKSDQSFRFSEIGLRILDVDDRSSSLEVDSRTVKGRSGKIFASAKYGTKKVKVNGRLVVASIKDFMTKKDDVNGLLVDSEPFYITKMYPQKENLYDFELPGMKAGDLDLLNQSHTAWHYRWKVYVSSEPEYTFVGKSSEGLKYNFTIAFETAELPFGETIAQNIVITNGTFNYSGTAPFSQLEYPWSVELTSTGGQSSFYLEIDGRRWAYQYSAPLNQGDVIVITGISTTLNKINVTARTNHEYFVLKQKVNKTILYSTNFQGTIKFLNFKELYK

SEQ ID NO: 19143 - protein, 3399 aa, Streptococcus agalactiae
TTGACAACTTTTTTAGATCATAAAGATAATGAGTTTGAAGCTCAAGCTGTTGTTAAAACAACTAATGCAGTTAACGGAGAAAGGTCTTTATCAGGAACAATTTATACTAACGAAGAGGTACTAAACAAGGTCGATAAAGGTTGGAAACTTGAGTTTGATGATGAGTATTACAAGATTATTTATGCTAAACCTACTGATACTGGTAACAAAATTCAAGTTGAATTTGATGCAGTTCATCAATTTTTTTATGATTTTGATAAATCATCACTACATAAGCAATTAAATGATGGTTCACATACTTTCCAAGCATATTTGAACTTTATTTTTAATGGCAGCGGGTATACTTACAGTTTAGAAGTAGTTGTCAAATCTTTCGAAAAGCAATCGTTTGGATATAAATCGCGACTTGATTTATTTAATGACATCATTAAGAGTGCAGGAGTTGAATTTTTTGTTCGTGGCAAGGTTGTTCGAATTCTACAAAAAACAGGAACAGATTTATCAACAATCGTACGTAAAAATTTCAATATGAATGAAATCATAATTGAAAAGAAAATCAATGATTTTATTACATATCAGAAGGGTTTTGGAGCGTGGACTGACCAAGAGGATCATTCCAAAGGAAGGCTCGAAGTAGAATATGAAAGTCCACTTGCAAAGGAATATGGACGAATTGAGGGTGAGCCTGTTGTTGATGAGCGGTACACTAACGCTGACAATTTAAAATCAGTACTAAAACAAAATGTAGATTCGTCTTACAATATCGCTGTAAAAATTGACATTGAAGATCTTACAAAAGCAGGTTATCAGTACACTCAACCTATTGCCGGTGATTATATTATGGCTATCAATGAGACACTAGGATTTAAGGAAAAAATCCGAATAGTATCGTTTGAAAGTGAGTATGATGTAACAGGTCAGCTGATTAACCATAAAGTCACTTGTAACGATATTGGTACAATCAAAAAACAAACTGTAGCTGTTAGCCAATTATCAAGTAAGATTAATAATAACCAAGAAATACTAGATAATGCAGTATTTAAAGCAAATCAAGCACTAGCATCAGCTGATGGTAAAAACACTAACTACTATGGTACGGAGATGCCAGTAGATGATCCAAAAGGCACGCTAAGAAAGGGTGATTTGCTTTTTTTAACTGTTGGCGATACTACCAGAATGTATTTCTGGAATGGTGCTGAATGGATTATCAATTCTTTTAGCGACGATATTGATTTTGTAAAGAAAGAAATTACTAATAAAATCATAGAGGTTAATGCAGCAATGAAACTTGCTGATGAACAGTTAACTGAAAAATATAATGCAATTGTTGCTAAAAATGTTAGCCAAGACGAATTAATTAATCAAGCAAAGAATTTGTCTGATTCTGCCAAAAAAGATGCTACAGAAGCATTGACAAACCTTATTAGTGAATCTAAAAAACTGACGGATAAAATGTCTGCGTTATCTAAAACAGAAGTTGAGCATTATTCAACAACTAATCTGCAACTGACACAACTTGATGGTACAGTCAAAGGATTACAAACTAGCTACGAGGCATTGTTAAAAAAAGATGGAGATATCACTCAAACACTCGCTAATTATAAGCAGACGATTGATCAAAATAGTACAAGTATTACTGCTAACAAAAAGACTGTTGATGGTACGCTTAGCAGTCTACAGACCCAAGTCACACAAACGGCTAATGAAATTACAACGAGATTATCTCAAACAAATATTGAAGCGTTGATTACAAGTAAGTCTGCTGTTATCGCTGATAATAAAGTCAAGGAAACTGCAGATAGTTTTAGCAGAGAAATAACTCGTGTTAATAATACTATTGATAATTTAAAGATAGGTACAGTTAATCTACTATCTGGTACTAAAAATTGGACTAAAAATTGGTTTAATCGTAATAACTGGCAATCTGATGACGATAACTTGACTATTGGTAATTTTAGCTTAACAGTGCTAAAGCGCAAAGCAATGTGGAGTGGTATATCACAATTGTATGCTGTAAAAAGCGGAGAGAATTACGTTTTTAGTGCATACGCTAAATCGAGCATGGATAATGACGTTGTGAATTTATATTTATTACCAAACGGTCAATCCCCGCAAGCAAAGATAAGTATTAGTTTCAAGTCAATCACTCTAAACACGGATTGGCAACGTATCGTTATTAAATTTAATGTAACTTCTGATGGCTATATCTTACCGCGTTTTGAACGTTTTAACGAAAACGGATGGTTGTATATTGCAGGCTATCAGCTAGAACATGGAAACGTTGCAAGTGACTATTCAGAGGCACCAGCCGATCAAGAAGACAAAATGACTGTTGAATTTAATAAAATCAACGATACAGTTAACAGCCATAGTCAATTGATTGGTAAACAGAACGAGAGTCTGACGGCTACAATACAAAAAGTTGATAATATACAATCAACAGTATCTAATGTTGATGGACGTTTGTCACGAGTTACACAAACTGCCGACGGTATAGTCACAACAGTTAGTCAGCTTGATAATAATATTTTACCTGGCACAAAAAATTTTACAGGATGGCAAATAGAAGGTGCAGTACTAGAAGATGTAACACAATCATCTTATCCATTTGTCTTTAAAAAATGGATAAGCGGCAACAAGGTATCGCCCTTAATCGAATATGATGTTAAAAAAAATCAAGAGTACACATTTACTGCATACATTGCTAGAGAACAAGCAGGTAATCTATATTTCTACTTGTACGATCTTTGGAATCATCATATCACAAGTGCAACCCCTCGCGAAACCATTATAAGAGACGTTAATTCTAGTGTAATACGATTTAGAATAACATTTATTCCAAATAGAGACGGTAAAATCAGACCACGGTTCGCAATGTTGGCCAGTGATCAAGGCTGGTTTATGGTTGGTGGTTTTATGTTATCTAAAGGTACCGCTGATCTACCCTGGTCTGAATCCAAGCAAGATATCAAAGATAATGTTACTGCGATTAATACAATAGTCGCACAAACAGCGAACAGTTGGGCTATTAAAAATTTGACTTCTAACGGTACTGTATTGAGTCAGCTTAATTTGACTGATGGTAACGTAAAACTGGAAGGTAAGTTAATACATTTGTCAGGTCAATCTATTATTGATAATGGCATTATTACTAATGCGATGATAAAAGATTTAACTGCAGATAAGATTACAGCAGGAACAATTGATGCTAATCGTATAAATGTCATTAATTTAGATGCTAGTAATATTACCAGTGGAAGAATGTCAGCGGACCTGATACGTAGCGGCGTTTTAATATCGCAAAACGGTGCAATGTTAACCGATCTTAATACAGGACAAATTGAATTTTACACAGATAATCCAAGTATCAAACGTATTACTGCAGNNNNNTTAATTAAT

SEQ ID NO: 19144 - protein, 1133 aa, Streptococcus agalactiae
  VARIANT 1129, 1130: Xaa = Any Amino Acid
MTTFLDHKDNEFEAQAVVKTTNAVNGERSLSGTIYTNEEVLNKVDKGWKLEFDDEYYKIIYAKPTDTGNKIQVEFDAVHQFFYDFDKSSLHKQLNDGSHTFQAYLNFIFNGSGYTYSLEVVVKSFEKQSFGYKSRLDLFNDIIKSAGVEFFVRGKVVRILQKTGTDLSTIVRKNFNMNEIIIEKKINDFITYQKGFGAWTDQEDHSKGRLEVEYESPLAKEYGRIEGEPVVDERYTNADNLKSVLKQNVDSSYNIAVKIDIEDLTKAGYQYTQPIAGDYIMAINETLGFKEKIRIVSFESEYDVTGQLINHKVTCNDIGTIKKQTVAVSQLSSKINNNQEILDNAVFKANQALASADGKNTNYYGTEMPVDDPKGTLRKGDLLFLTVGDTTRMYFWNGAEWIINSFSDDIDFVKKEITNKIIEVNAAMKLADEQLTEKYNAIVAKNVSQDELINQAKNLSDSAKKDATEALTNLISESKKLTDKMSALSKTEVEHYSTTNLQLTQLDGTVKGLQTSYEALLKKDGDITQTLANYKQTIDQNSTSITANKKTVDGTLSSLQTQVTQTANEITTRLSQTNIEALITSKSAVIADNKVKETADSFSREITRVNNTIDNLKIGTVNLLSGTKNWTKNWFNRNNWQSDDDNLTIGNFSLTVLKRKAMWSGISQLYAVKSGENYVFSAYAKSSMDNDVVNLYLLPNGQSPQAKISISFKSITLNTDWQRIVIKFNVTSDGYILPRFERFNENGWLYIAGYQLEHGNVASDYSEAPADQEDKMTVEFNKINDTVNSHSQLIGKQNESLTATIQKVDNIQSTVSNVDGRLSRVTQTADGIVTTVSQLDNNILPGTKNFTGWQIEGAVLEDVTQSSYPFVFKKWISGNKVSPLIEYDVKKNQEYTFTAYIAREQAGNLYFYLYDLWNHHITSATPRETIIRDVNSSVIRFRITFIPNRDGKIRPRFAMLASDQGWFMVGGFMLSKGTADLPWSESKQDIKDNVTAINTIVAQTANSWAIKNLTSNGTVLSQLNLTDGNVKLEGKLIHLSGQSIIDNGIITNAMIKDLTADKITAGTIDANRINVINLDASNITSGRMSADLIRSGVLISQNGAMLTDLNTGQIEFYTDNPSIKRITAXXLIN

SEQ ID NO: 19145 - protein, 2412 aa, Streptococcus agalactiae
TTGACAAACCTTATTAGTGAATCTAAAAAACTGACGGATAAAATGTCTGCGTTATCTAAAACAGAAGTTGAGCATTATTCAACACTAATCTGCACTGACACAACTTGATGGTACAGTCAAAGGATTACAAACTAGCTACGAGCATTGTTAAAAAAAGATGGAGATATCACTCAAACACTCGCTAATTATAAGCAGACGATTGATCAAAATAGTACAAGTATTACTGCTAACAAAAAGACTGTTGATGGTACGCTTAGCAGTCTACAGACCCAAGTCACACAAACGGCTAATGAAATTACAACGAGATTATCTCAAACAAATATTGAAGCGTTGATTACAAGTAAGTCTGCTGTTATCGCTGATAATAAAGTCAAGGAAACTGCAGATAGTTTTAGCAGAGAAATAACTCGTGTTAATAATACTATTGATAATTTAAAGATAGGTACAGTTAATCTACTATCTGGTACTAAAAATTGGACTAAAAATTGGTTTAATCGTAATAACTGGCAATCTGATGACGATAACTTGACTATTGGTAATTTTAGCTTAACAGTGCTAAAGCGCAAAGCAATGTGGAGTGGTATATCACAATTGTATGCTGTAAAAAGCGGAGAGAATTACGTTTTTAGTGCATACGCTAAATCGAGCATGGATAATGACGTTGTGAATTTATATTTATTACCAAACGGTCAATCCCCGCAAGCAAAGATAAGTATTAGTTTCAAGTCAATCACTCTAAACACGGATTGGCAACGTATCGTTATTAAATTTAATGTAACTTCTGATGGCTATATCTTACCGCGTTTTGAACGTTTTAACGAAAACGGATGGTTGTATATTGCAGGCTATCAGCTAGAACATGGAAACGTTGCAAGTGACTATTCAGAGGCACCAGCCGATCAAGAAGACAAAATGACTGTTGAATTTAATAAAATCAACGATACAGTTAACAGCCATAGTCAATTGATTGGTAAACAGAACGAGAGTCTGACGGCTACAATACAAAAAGTTGATAATATACAATCAACAGTATCTAATGTTGATGGACGTTTGTCACGAGTTACACAAACTGCCGACGGTATAGTCACAACAGTTAGTCAGCTTGATAATAATATTTTACCTGGCACAAAAAATTTTACAGGATGGCAAATAGAAGGTGCAGTACTAGAAGATGTAACACAATCATCTTATCCATTTGTCTTTAAAAAATGGATAAGCGGCAACAAGGTATCGCCCTTAATCGAATATGATGTTAAAAAAAATCAAGAGTACACATTTACTGCATACATTGCTAGAGAACAAGCAGGTAATCTATATTTCTACTTGTACGATCTTTGGAATCATCATATCACAAGTGCAACCCCTCGCGAAACCATTATAAGAGACGTTAATTCTAGTGTAATACGATTTAGAATAACATTTATTCCAAATAGAGACGGTAAAATCAGACCACGGTTCGCAATGTTGGCCAGTGATCAAGGCTGGTTTATGGTTGGTGGTTTTATGTTATCTAAAGGTACCGCTGATCTACCCTGGTCTGAATCCAAGCAAGATATCAAAGATAATGTTACTGCGATTAATACAATAGTCGCACAAACAGCGAACAGTTGGGCTATTAAAAATTTGACTTCTAACGGTACTGTATTGAGTCAGCTTAATTTGACTGATGGTAACGTAAAACTGGAAGGTAAGTTAATACATTTGTCAGGTCAATCTATTATTGATAATGGCATTATTACTAATGCGATGATAAAAGATTTAACTGCAGATAAGATTACAGCAGGAACAATTGATGCTAATCGTATAAATGTCATTAATTTAGATGCTAGTAATATTACCAGTGGAAGAATGTCAGCGGACCTGATACGTAGCGGCGTTTTAATATCGCAAAACGGTGCAATGTTAACCGATCTTAATACAGGACAAATTGAATTTTACACAGATAATCCAGCTATCAAACGTATTACTGCAGGTTATCCTAACCAATTCGTTAAATTTGCAACAGGTAATGTTGAAGGAAAGGGCGCGGCTGGCGTAACGGTTATAGGTTCTAATCGATGGGGAAGTGAATCGTCAAACGACGGTGGCTTCGTTGGTATTCGCGCTTGGAATGGTAAAGACATCGATACTCTTGATTTAGTTGGCGATAGTATTCACTTAGCAAGCTCTGCGTACACTAACGCTGATGGTTGGGAAATCATTACTTTGCCAAATCAGCTATCAATAGATGCACGTAACATAAATCATCGTGTAACGTCTAAGGTAAAAGTAGGAGATATTTGGCTATGGAAAAATACATCAACTTATGTAAGCATGAAAGATACAATTAATATGATTATTGATAACTTGCAGCTACTACACAATAATAAAACCACTGAAAAAGGCTACAGTTATACTATTCCAGGAAAGATT

SEQ ID NO: 19146 - protein, 805 aa, Streptococcus agalactiae
MTNLISESKKLTDKMSALSKTEVEHYSTTNLQLTQLDGTVKGLQTSYEALLKKDGDITQTLANYKQTIDQNSTSITANKKTVDGTLSSLQTQVTQTANEITTRLSQTNIEALITSKSAVIADNKVKETADSFSREITRVNNTIDNLKIGTVNLLSGTKNWTKNWFNRNNWQSDDDNLTIGNFSLTVLKRKAMWSGISQLYAVKSGENYVFSAYAKSSMDNDVVNLYLLPNGQSPQAKISISFKSITLNTDWQRIVIKFNVTSDGYILPRFERFNENGWLYIAGYQLEHGNVASDYSEAPADQEDKMTVEFNKINDTVNSHSQLIGKQNESLTATIQKVDNIQSTVSNVDGRLSRVTQTADGIVTTVSQLDNNILPGTKNFTGWQIEGAVLEDVTQSSYPFVFKKWISGNKVSPLIEYDVKKNQEYTFTAYIAREQAGNLYFYLYDLWNHHITSATPRETIIRDVNSSVIRFRITFIPNRDGKIRPRFAMLASDQGWFMVGGFMLSKGTADLPWSESKQDIKDNVTAINTIVAQTANSWAIKNLTSNGTVLSQLNLTDGNVKLEGKLIHLSGQSIIDNGIITNAMIKDLTADKITAGTIDANRINVINLDASNITSGRMSADLIRSGVLISQNGAMLTDLNTGQIEFYTDNPAIKRITAGYPNQFVKFATGNVEGKGAAGVTVIGSNRWGSESSNDGGFVGIRAWNGKDIDTLDLVGDSIHLASSAYTNADGWEIITLPNQLSIDARNINHRVTSKVKVGDIWLWKNTSTYVSMKDTINMIIDNLQLLHNNKTTEKGYSYTIPGKI

SEQ ID NO: 19147 - protein, 150 aa, Streptococcus agalactiae
ATGGAAGAAAAAATAAAATCAAATTTAGCTTTACAAATAGCGCAATTATCTTTAGATAAAGCAACTCTACAAGCTCAAAACGAGCAATTACAATTACAAATTGCTGAGTTAAATCAGCAATTAGATGAGATAACTAAACCAGGAGCAAAG

SEQ ID NO: 19148 - protein, 50 aa, Streptococcus agalactiae
MEEKIKSNLALQIAQLSLDKATLQAQNEQLQLQIAELNQQLDEITKPGAK

SEQ ID NO: 19149 - protein, 414 aa, Streptococcus agalactiae
ATGAAACAATGGAACATTGTTGGAAAACCATTTCCAATTTATCAAGGTGGAGCAGTTGTAAAAACAGATGTGCGTCTGCAAGGAGATGATGGGACATATTTACCACAAGAGCTAATTGGTAATCATGTTGATAAGGATAATCAATCACTGATAAGACTTGTACTTGAAACTTTTGCAAAAGAAAATGTTGTTGATTTCGCAATGCTTGAGTCTGTAAAAGATATTGAGCAACTAAAAGCTGACAAAGTAACTTTAATCAAAAAAATTGCAGAGGCTGATGAGGCAATTTCTAAGATGTCGCAAGCAACAAAAGATATGCAGCTTAAAGTTGATAAAGCAGTTGTCGAGTTAACTGACTTAGTGACATCAAGTGTATCTAGCCTTTCCGTGCCGTCTACATCGATGGAATCAAGC

SEQ ID NO: 19150 - protein, 138 aa, Streptococcus agalactiae
MKQWNIVGKPFPIYQGGAVVKTDVRLQGDDGTYLPQELIGNHVDKDNQSLIRLVLETFAKENVVDFAMLESVKDIEQLKADKVTLIKKIAEADEAISKMSQATKDMQLKVDKAVVELTDLVTSSVSSLSVPSTSMESS

SEQ ID NO: 19151 - DNA, 222 bp, Streptococcus agalactiae
atggaattaacgttgaataccgttataacactatattatttaataaaaaaaggagaatttaatatgacatatacttttaaaaaagatcatcttattgttgacgtttggtaccgtcgtgttgcgaatggtatttgtgatttcgaagcagtacctaaattatttaatttacgagatgttgtgcttgagttacttagtcaaaaagttactgataaagaatcagag

SEQ ID NO: 19152 - protein, 74 aa, Streptococcus agalactiae
MELTLNTVITLYYLIKKGEFNMTYTFKKDHLIVDVWYRRVANGICDFEAVPKLFNLRDVVLELLSQKVTDKESE

SEQ ID NO: 19153 - DNA, 294 bp, Streptococcus agalactiae
atgatagattttgtgcaagttggcgcttttgcaggtgctgctttatctattttgggagtatggggatttattgttaatccctttaaaaaagcaatggaagctaacgagattgctatggctcagctcaaggactcactcaaagaactagcatacgagctcaaaaatatagatagagaccgagagattacaaaagctgttattgatcgtcacgaggagcgtttaggtcgtgtcgaggatgatatcatcatcaataaagagcaaatcaaaacattatttaataataataaggagaaa

SEQ ID NO: 19154 - protein, 98 aa, Streptococcus agalactiae
MIDFVQVGAFAGAALSILGVWGFIVNPFKKAMEANEIAMAQLKDSLKELAYELKNIDRDREITKAVIDRHEERLGRVEDDIIINKEQIKTLFNNNKEK

SEQ ID NO: 19155 - DNA, 333 bp, Streptococcus agalactiae
atgaacgaatttacaacacaaatcattacagtatcagtaccaatttttggtatcatcgcaggtattctcacgcacaaagtaaaaaaattacttataaaaaaaggtggagaaaaagctgttaaaattgcagaaattgtcgctcgtaatgctgttgaggcagttgaacaaatatctgtggaagttggtattaagggacaagataagctaacagaagctaaaacagctgttattgatggtttatcgcaatataatatcagtttaacagatactcagttagaaacatttatcgaagctgcggttaaacgcatgaatgatgagtggaagaaaggtcaa

SEQ ID NO: 19156 - protein, 111 aa, Streptococcus agalactiae
MNEFTTQIITVSVPIFGIIAGILTHKVKKLLIKKGGEKAVKIAEIVARNAVEAVEQISVEVGIKGQDKLTEAKTAVIDGLSQYNISLTDTQLETFIEAAVKRMNDEWKKGQ

SEQ ID NO: 19157 - DNA, 744 bp, Streptococcus agalactiae
atgatgagtggaagaaaggtcaataatatggtaattaatattgagcaagctatcgcatggatggcatctagaaaaggtaaagttacttactcgatggactatcgaaatggtccttcatcttacgattgctctagctctgtctattttgctctacgctcagcaggcgcatcagataatggctgggcagtaaatacagaatatgagcacgattggttgataaaaaacggttatgttcttattgcagaaaatactaattggaatgcgcaaagaggtgatatttttatttggggtaaacgtggggcttcggctggagcttttggacatactggtatgtttgttgatccagacaatattattcactgtaattatggttataactcaattacagtgaataaccatgatgaaatctggggatataatggtcaaccttatgtttacgcttatcgttacgctaggaaacagtcaaatgctaaggttgataatcaatcagttgtatctaaatttgaaaaagagttagacgttaacacaccgctaagtaattcaaatatgccatattacgaagcaacaatttcagaagattattacgttgagtccaagcctgacgtcaatagcactgataaggagttgcttgttgctggtactagagttcgagtttacgaaaaagtaaaaggctgggcaaggataggcgctccacagtctaatcagtgggtagaagatgcttacttaattgatgcaacagatatg

SEQ ID NO: 19158 - protein, 248 aa, Streptococcus agalactiae; identical to SEQ ID NO: 5612

SEQ ID NO: 19159 - DNA, 111 bp, Streptococcus agalactiae
ttgctaaaaaaaggatttgttgaaaaaacaattgctaaaggcaaagaactagcagatgatgctaaagatgctgttgaagaggcagtagatgctgtcaaagaaaaactgaaa

SEQ ID NO: 19160 - protein, 37 aa, Streptococcus agalactiae
MLKKGFVEKTIAKGKELADDAKDAVEEAVDAVKEKLK

SEQ ID NO: 19161 - protein, 246 aa, Streptococcus agalactiae
ATGGAATATGGAAATAAAATTTTTGAAATTTACAATAAACCGTTTAAATATCGTAACAGTTCATCAACTAACTACAATAAGGTTAGAGCTAACGGTATCGAGCCAAACCAATTTGTAGTTAATAAAGCAGCAAATATTAATTGTGCAGTATATCCTCGACACGGATCAATTGAAAAAGTTTTTTACTGGGGTGATAGAAAAATCACTCAAGCGACTGCTGAAAAACGTTGTGGGTATTTTAGAGAG

SEQ ID NO: 19162 - protein, 83 aa, Streptococcus agalactiae
  VARIANT 37: Xaa = Any Amino Acid
MEYGNKIFEIYNKPFKYRNSSSTNYNKVRANGIEPNXKFVVNKAANINCAVYPRHGSIEKVFYWGDRKITQATAEKRCGYFRE

SEQ ID NO: 19163 - protein, 207 aa, Streptococcus agalactiae
ATGGAATTGTACGAATTTGTCGGAGAACAAATACGCCATCAAAGAAAACTTGCTAAACTCACTCAAAGTCAACTTGCGGATTTACTAGAAACTAATCAGCAAACTGTCGGAATGATGGAAAATGGCAGGCGTAGAACCACTATTCAGGATTTAGTTAAACTTTGTAAGATATTTAATGCGTCAGCAGATGACTTTTTACCTAAAAAT

SEQ ID NO: 19164 - protein, 69 aa, Streptococcus agalactiae
MELYEFVGEQIRHQRKLAKLTQSQLADLLETNQQTVGMMENGRRRTTIQDLVKLCKIFNASADDFLPKN

SEQ ID NO: 19165 - protein, 822 aa, Streptococcus agalactiae
ATGCCAAAACAATTAAGTGAATATCTCAGAAAATCTAATACTTCAGATGAATTAATCTGGAATTTTGCCTTTTTAGGACGAAACGATAACCAAAATGCAAAATTTACAGAATTAGCTGAGCTTGCTGAACCTGAAAATTGGACTTCGTCAAATTCAAAAAGACCAAATGATATTTTATATAGTTATATCACACATACTTTTGAAAGAGCTTTTGAATTAGGTGATGATTATGTAATTATTAATGAAGATGAATCATATGCTTGTTTTAACACCGGATTACTGACTGATAATGGAGAAGATATTATTTGTTTGTTCAATACTTTTGATTCAAGTGATGAATATCATTGGCATCTTTTTGGATTCAGAAAGGAGTCTAATTGGGATTTTTTAAACAATTTTAGTAAGACACCTTTAGTTCCTCATTTTTTTACAAATCCGCAAGATATATACTTTGACCCTAATAAAGAACTAATAAAAAATCTTGATCATATTCTCGAGGACAATATTGATAGGTTTGAAGGTAGGTTACAGGAAAAAGGAAAGCAATTTATCAATGCTTTGTTGAATAATGCAATCGAGTTAACAATTACAAAGTGTAAACGTAATTATAGAATAGCCGTACCTCAATATTATAGAGGAAAAATTACTTACCTTTTGCCAGTTACTATAGATGGACAGCTTATGTCTGTAGCAGTTGAAAATATAAACGGGAGGTATAGGGTTAACACTATTTTTACTTTAGAAATGGCTTATAAAAACGCTAGATTATTAATGAAACCTGAAGTGGATTGGATAACTTCCGCTACAAAACAAAAAAAAGAG

SEQ ID NO: 19166 - protein, 274 aa, Streptococcus agalactiae
MPKQLSEYLRKSNTSDELIWNFAFLGRNDNQNAKFTELAELAEPENWTSSNSKRPNDILYSYITHTFERAFELGDDYVIINEDESYACFNTGLLTDNGEDIICLFNTFDSSDEYHWHLFGFRKESNWDFLNNFSKTPLVPHFFTNPQDIYFDPNKELIKNLDHILEDNIDRFEGRLQEKGKQFINALLNNAIELTITKCKRNYRIAVPQYYRGKITYLLPVTIDGQLMSVAVENINGRYRVNTIFTLEMAYKNARLLMKPEVDWITSATKQKKE

SEQ ID NO: 19167 - protein, 564 aa, Streptococcus agalactiae
TTGAATTTAATAGAAAAAGGGCTTATGAAAAAGTATATAATATGTGTAATAATGTTAGTAGCGCTAGTTTTCTCTAATTGTATGAAGACTAAAGCAGAGACTAAGGGAGTTGAAGAATTAAACCCCTACAGACATCAATCAAGAGTAATACATGTTAGGAAATACACCAACAAAACTGTTAGTTTTAAAGCTGGGAATATATTACACATCGAAACAGATGATACTAGTGTTTCTGAAGGTAGAAAATTGATTTTGCGAACAGAGATATCTGATAATTCAATTTTAGAAAAAGTAAAGATAGGTACAAAAGTAGATTTTTATGCAGTTCAGGATTTATTCCTGGTTTATACCTGTAAAGATACGATTAGCTTATTTACTGAAGGAGGAATCACTATTCCTGAAGAAGGTAATAAGTATGACCGAAAATTGTACGGAAAAATTATAAATAATGATGGTCTTCCAGAGACAATCCTAATTGAATTTGATAAAAAGGTAGTGACATTTCAAGAACTAGACTTAAAAGTAAGGAAAGCACTATATGATAAAAAAACTTTGGTATCAAGA

SEQ ID NO: 19168 - protein, 189 aa, Streptococcus agalactiae
MNLIEKGLMKKYIICVIMLVALVFSNCMKTKAETKGVEELNPYRHQSRVIHVRKYTNKTVSFKAGNILHIETDDTSVSEGRKLILRTEISDNSILEKVKIGTKVDFYGSSGFIPGSYTCKDTISLFTEGGITIPEEGNKYDRKLYGKIINNDGLPETILIEFDKKVVTFQELDLKVRKALYDKKTLVSR

SEQ ID NO: 19169 - protein, 174 aa, Streptococcus agalactiae
ATGATAAAAAAACTTTGGTATCAAGATAAAGACCATGTGAAGGGTAAATATGGTATACATTATAATGATAATAAAGAAGAAGAAGTTGACTTATCAACGTATTATAATTATATTGACAATAGATTGATTGATGTATCAACGATAGCTGATTTACATTTATACCTCGATAAAAAT

SEQ ID NO: 19170 - protein, 58 aa, Streptococcus agalactiae
MIKKLWYQDKDHVKGKYGIHYNDNKEEEVDLSTYYNYIDNRLIDVSTIADLHLYLDKN

SEQ ID NO: 19171 - DNA, 177 bp, Streptococcus agalactiae
atgttatatatagatgagctacaagaagcgattgataaaggatatatttcagggaacacagtgatggttgtgcgcaaaaacggaaagatatttgattatgtgttaccacacgaaaaagtgagagatgatgaagttgtgacggtagagagtgtggaagacgttatgagagaattggag

SEQ ID NO: 19172 - protein, 59 aa, Streptococcus agalactiae
MLYIDELQEAIDKGYISGNTVMVVRKNGKIFDYVLPHEKVRDDEVVTVESVEDVMRELE

SEQ ID NO: 19173 - DNA, 207 bp, Streptococcus agalactiae
ttgcgaaagagaatgtcagaaaaagctatactattaattatccttattgcttttgttattatcgctattataaagatagctctgttaaagttatatatgaatacgataaaacctaaagtagataatgaaggaaacatcataacaaagcctgtaaaggatgatttaacacccgaggaacgtgaagaacgtgaatttgataaagattgg

SEQ ID NO: 19174 - protein, 69 aa, Streptococcus agalactiae; identical to SEQ ID NO: 1040

SEQ ID NO: 19175 - DNA, 930 bp, Streptococcus agalactiae
atggtatcgctaaaaacggaaattgctggttttagttttgacaattgtttgatgaatgcagcgggtatttattgtatgactaaggaagagttattagctattgaaaattctgaagctggttcctttgttacaaaaacaggtacccttgaagctagagagggaaaccctcaaccacgttatgcagatactgactggggatcaattaattctatgggactccctaataaaggtattgactattatcttgatttcgtgactgaattacaagatcaagacaatagcaaaaatcacgttttatcattagtaggtttatcaccagaagagacacatattattcttaaaaaggttgaaaacagtagttacaatggcctaatagagttaaatttatcgtgcccaaatgttcctggaaaacctcaaattgcttatgattttgaaatgactgacctcatcctttcagaaatctttagctattatcaaaagccattgggcatcaaattaccaccttactttgatatcgttcactttgatcaagcagctacaatttttaacaaatatcctttagcttttattaactgtgttaattctatcggaaatggacttgttattgatgatgaaactgtcgttataaagcctaaaaatggctttggaggtatcggtggggattttatcaagcctaccgccttagctaacgtccatgctttctacaaacgtttaaatccttcaattaaaattatcggaacaggtggtgttaaaaacggccgtgatgcctttgaacacattctatgtggagctagtatggtccaaatcggaaccgctttacaaaaagaaggaccagaaatttttcagcgtgtaagcagagaattaaaagaaataatggctgataaaggctatcaatcattggaggattttcgaggacaacttaattacctt

SEQ ID NO: 19176 - protein, 310 aa, Streptococcus agalactiae; identical to SEQ ID NO: 1042

SEQ ID NO: 19177 - DNA, 1233 bp, Streptococcus agalactiae
atggcgcttaaagaattaacagctaaagagttcgaaagttattcaggaaattacgatttacaatcgtttatgcaaacccctgagatggcaaagcttctaaaaaaacgtgggtatgacattacctacatgggctaccaaatcgatgggaaaatggaaatcatcagtattgtttataccatcccaatgactggtggacttcatatggaagtcaattctggtccagcccattccaattctaaatatctgaaacatttttataaagaactacagaactatgccaaatctcagggcgctttagaattattaattaaaccttatgatacctaccaagagtttactggtgaaggtaagcctaaaggtgcaccgaacacctatcttattgatgacctgactagtataggttatcaccacgatgggcttcatattggttatcctggcggtgaacctgattggcattatgttaaaaatctagaaggtatcactcctcaaaatcttcttaaatctttctctaaaaaaggacgccccttggttaaaaaagccatgtcttttggtataaaaatacgtgtcctcaagcgggaagaactacatatctttaaggatattacttcttctacttctgatcgccgggactatatggataaatctctagattattatcaagatttttatgatagtttcggagataaggcggaatttgtcattgcaactctaaactttagggaatatgatcataacctacaattaaatgcaaagaaattggaagaacagattacagtccttgataatcgccatcaaaataatacagattctgccaaataccatcgtcaacgtactgagcttgtcaatcaactagctagtttagataaacgtcgcaaagaagtcgaaccttttattcaaaaatttggaaatcaagatgttgttttagctggtagcctctttatttatagcccgaaagaaactgtctatcttttctctggctcatacacagaatttaataaattttatgcgcctgcagttcttcaagaatatgttatgcaagaggctttaaagcgtcaatcaactttctataattttttaggtattcaaggaaattttgatggttcagatggcgtacttcgctttaaacagaattttaatggttacattgttcgtaaaatgggtactttccgctactatccaaatccattaaaatataagagtattcaattactaaagaaaatcttacgccgaaca

SEQ ID NO: 19178 - protein, 411 aa, Streptococcus agalactiae; identical to SEQ ID NO: 1044

SEQ ID NO: 19179 - DNA, 1209 bp, Streptococcus agalactiae
atgtatagagaaattaccgctgtcgaacacgatcgctttgtgagcgaatccaaccaaacaaacctacttcaatcttctaattggcccaaagtaaaagacaactggggtagtcaattacttggcttttttgacggtgaaacccaaattgccagcgctagtattctcatcaaatcacttcctcttggcttctccatgctatatattccgcgtggaccaatcatggattactccaatctagatattgtaactaaggtccttaaggaccttaaagcttttggcaaaaaacaaagagctctctttatcaagtgtgatcctctcatctatttaaaaatggtcaatgccaaagattttgaaaattcgcccgatgaaaaagaagggttaatcgccattgatcatttacagcgtgcaggtgctgattggactggtcggacaacagatttagctcatactatccaaccacgttttcaggcaaacctatatgctaatcaatttggacttgataaaatgtctaaaaaaactcgtcaagctattcgaacttccaaaaataagggagtagatatacaatttggtagccatgaactacttgaagattttgcagagttgatgaaaaaaacggaagaccgtaaagggataaatcttagaggaattgactactaccaaaaactccttgatacgtatcctaataactcatacatcacaatggcttcgctagatgttgcaaaacgattagaaaaaatagaaaaagaatgtcagatagcccaatctgaaagaataaaatcacttgaacttaatcgtgagaaaaaagttaaacaacaccaaggtacgattgatcgattaaataaagaaattgattttctcaaagaagctcaaaaagcctatgaccgagacattattccattggctgcaaccctcactctagaatttggtaatacatcagaaaatatttatgctggtatggacgattactttaaatcttattctgctcctatttacacttggtttgaaacagctcaaagggcttttgaacgtggaaatatttggcaaaatatgggggggattgagaatgacttatctggtggtttatatcattttaagtctaagttcgaaccaatcattgaggaatttattggagaatttaacattccagtgaacagattgctttataaagcctctaattatgtctatgccttacgcaaaaaacgtaatagc

SEQ ID NO: 19180 - protein, 403 aa, Streptococcus agalactiae; identical to SEQ ID NO: 1046

SEQ ID NO: 19181 - protein, 1233 aa, Streptococcus agalactiae; identical to SEQ ID NO: 9835

SEQ ID NO: 19182 - protein, 411 aa, Streptococcus agalactiae; identical to SEQ ID NO: 9836

SEQ ID NO: 19183 - protein, 810 aa, Streptococcus agalactiae; identical to SEQ ID NO: 9837

SEQ ID NO: 19184 - protein, 270 aa, Streptococcus agalactiae; identical to SEQ ID NO: 1050

SEQ ID NO: 19185 - protein, 1314 aa, Streptococcus agalactiae; identical to SEQ ID NO: 5425

SEQ ID NO: 19186 - protein, 438 aa, Streptococcus agalactiae; identical to SEQ ID NO: 1052

SEQ ID NO: 19187 - protein, 384 aa, Streptococcus agalactiae; identical to SEQ ID NO: 9841

SEQ ID NO: 19188 - protein, 128 aa, Streptococcus agalactiae; identical to SEQ ID NO: 1054

SEQ ID NO: 19189 - protein, 2682 aa, Streptococcus agalactiae; identical to SEQ ID NO: 9843

SEQ ID NO: 19190 - protein, 894 aa, Streptococcus agalactiae; identical to SEQ ID NO: 1056

SEQ ID NO: 19191 - DNA, 858 bp, Streptococcus agalactiae
atgaccaaacttgctatcatgagtgatttacatattgacctcaatcatttttctacctttgagacgaaaacgttaattaatttgcttaagaaagaaaaaattgatcacctccatatcgctggagatatatctaatcattttactaaagatacacttccctttatcaataacttaaaaaagcatattaaacttagctataatttaggaaaccatgatatgcttgatttaacagaaacagaaatccaacgtcttgactttcaaacctatcgatttgacaaaaaaatgctactagcttttcatggctggtatgattacagcttttcaaataatagagacatcaaggatgttgaaaaattaaaaaagactttttggtttgatagacgtttaaaacgtccaaataatgatgtaactatccaagcatcaattttaaaacgcttagacgaaatattagcaaaagtcgattcttcaaatatcattattgctatgcactttgttccccataaacaattcacgatgactcatcctagattctctccttttaatgcttttttggggagtcaggcttatcatgatttattccaaaaatatcatatcaaagatgttgtttttggtcatgcacaccgctcatttggcgacgttaaaattggagagactacttatcattctagaccacttggatatattagagaatggaatttaactattgactttgtcaatcagaatcccaatcataaccctaatttaacctggaatcttagcaaaaggtataatgccgttaagcatttggatagttttgaaaactatcgaaaaaaatattttgaagacgaattacgcaactctatgacaatatttgattgc

SEQ ID NO: 19192 - protein, 286 aa, Streptococcus agalactiae; identical to SEQ ID NO: 1058

SEQ ID NO: 19193 - DNA, 1866 bp, Streptococcus agalactiae
atgatcaatttagaagctatttgtcaattacccaaagggacggagtattttattagtgatttacacggggaatacgatgctgttgattatctcttacggacaggtgcagggtctattagagctaaattattagactgttttgattggcagaaaatagttgctgttgatttagatgatttttgtatactgctttattacccaaaggaaaaattagccttcgataaaatgaacttgtcagcaagtgcttataaaacgaagttatgggaaatgattccgttacaaatacaagttttaaaatatttttctagtaaatatacaaaatctaaagtacgtaagcaattgtcaggtaagtttgcttacattatcgaagaacttttagctgagattgaccgtaacccagagaagaaaagctattttgatactattattgaaaaattatttgaattagaccaagtagaagatttaattatagtattgtcccaaacaattcaagttttgattattgaccatttacatgttgtaggggatatttacgatcgtggtaggtatcctaatcgtatcttgaataggttaatggcttttccaaatttggatatccaatgggggaaccatgatgtcacttggatgggagcagcatctggttcttacctttgtatggtaaatgttatccgtattgctgcacgttataataatattactttaattgaagaccgatatggtatcaatttgcgtcgcttggttgattactcacgccgttactatgaacctctaccttctttcgttcctatattagatggagaggaaatgactcatccagatgaactagacttgttaaatatgatacaacaagcaacagcaattttacagtttaaattggaagcccaattgattgacaggcgtccagaatttcaaatgcataatcggcaacttattaaccaggtaaattataaagatttaagtatatctattaaggaagttgtgcatcaacttaaagattttaatagtagatgcattgattcgaaaaatcccagtcgattaacaagtgaggaagaagagcttttacaacaattgatgatagccttccagacttctgaaagtttaaagaaacatattgatttcctatttgaaaaaggaagtatgtatttaacatataatgataatcttttattccatggttgcataccaatgcatagtaatggtgattttaaaagctttaaaattgcaggaaaaacttatggtggtagggatttactggatttatttgaaagtcaaatacgtctagcatatgctagaccagagaaacatgatgatttggcgacagatatcatttggtatctttggtgtggtgaaaattcttctctttttggtaagaatgccatgactacttttgagcgctattatgtttccgacaaagtaactcatcaagaaagaaaaaatccctactttaaactgagagataaagatgatatttgcactgctcttttacaagagtttgatttgcctaagtttgggcatattgtcaatggtcatacgccagtcaaagaaaaaaatggtgagcaaccgataaaagcaaatggtaagatgttagtaattgatggtggctttgccaaaggttatcagaaaaatacaggtttagctggctacactttgatttataatagctatgggatacaattaatttcacaccttccttttacatccattgaggaagttttaagtggaaccaactatatcattgatacgaagcgattagtagaagaagccaaggataggattcttgtaaaagatacaactattggacaaaagttaaccaaagagattaaagacttagatcacctttatcgtcattttcaggaatatgatgac

SEQ ID NO: 19194 - protein, 622 aa, Streptococcus agalactiae
MINLEAICQLPKGTEYFISDLHGEYDAVDYLLRTGAGSIRAKLLDCFDWQKIVAVDLDDFCILLYYPKEKLAFDKMNLSASAYKTKLWEMIPLQIQVLKYFSSKYTKSKVRKQLSGKFAYIIEELLAEIDRNPEKKSYFDTIIEKLFELDQVEDLIIVLSQTIQVLIIDHLHVVGDIYDRGRYPNRILNRLMAFPNLDIQWGNHDVTWMGAASGSYLCMVNVIRIAARYNNITLIEDRYGINLRRLVDYSRRYYEPLPSFVPILDGEEMTHPDELDLLNMIQQATAILQFKLEAQLIDRRPEFQMHNRQLINQVNYKDLSISIKEVVHQLKDFNSRCIDSKNPSRLTSEEEELLQQLMIAFQTSESLKKHIDFLFEKGSMYLTYNDNLLFHGCIPMHSNGDFKSFKIAGKTYGGRDLLDLFESQIRLAYARPEKHDDLATDIIWYLWCGENSSLFGKNAMTTFERYYVSDKVTHQERKNPYFKLRDKDDICTALLQEFDLPKFGHIVNGHTPVKEKNGEQPIKANGKMLVIDGGFAKGYQKNTGLAGYTLIYNSYGIQLISHLPFTSIEEVLSGTNYIIDTKRLVEEAKDRILVKDTTIGQKLTKEIKDLDHLYRHFQEYDD

SEQ ID NO: 19195 - DNA, 1122 bp, Streptococcus agalactiae
atggacataaaggcagaaattcaaaaattagcaaaagaaattggtatctctaaaattggttttacgacggcagataactttgattatttggaaaagtcattgcgtgcttctgtggaagaggggcgcaattcaggatttgaacataaagtcatagaggatcgtatctaccctgaaaggcttttagaatcggctaaaacgattatttcaattggcgttgcttatcctcacaaacttcctcagcaacctcaaaaaacatcttataaacgaggaaaaattacacctaattcgtgggggcttgattatcattatgtggtcggcgaaaagttagacagactatcaaaaggcattgaagagctctgtcgagattttcctttgcaacaaaaagcaatggtcgatactggagctttagttgatactgcagttgcccaaagagcaggtattggttttataggaaaaaatggtctagttatttctaaagaatatggctcttatatgtttttgggagaattaattaccaatttagagatcgagccagacaagcctgtcgattatgattgtggtgactgtcgtcgttgtctagatgcctgtccaacttcttgtttaattggtgatggctcaatgaatgccaagcgttgtctatcatttcaaacccaagataagggaatgatggacatagagtttcgaaaaaagattaaaacagttatctatggttgtgatatttgccaaatttgctgtccttataacaaaggtataaataatccattggcgacagagattgatcctgagttggctcaaccagaattaataccatttttgagtttatcaaatggacaatttaaagaaaaatttggtatgattgctggaagttggcgaggtaaaaatattttacagcgtaatgccattattgcgctagcaaatgctcatgataaaaccgcagtggtcaaattaatagagattattgataaaaataataaccctattcatactgcaacagctatatgggcattgggagaaattgtcaaaaaaccaaacgatgagatactggagtttatgagtaatttaaccttaaaagatgaagatagccgaaaagagttggaattaatccgtcataaatggcaattt

SEQ ID NO: 19196 - protein, 374 aa, Streptococcus agalactiae; identical to SEQ ID NO: 9850

SEQ ID NO: 19197 - DNA, 978 bp, Streptococcus agalactiae
atgactgagccagacttttggaatgacaatattgcagcgcaaaagacatctcaagaactgaatgagttaaaaggtaagtatgatactttccataatatgcaagaattatctgacgaaacagaactcttacttgagatgcttgacgaagatgattctttgaaagaagaattagaagaaaatctaatgcagctagataagataatgggtgcttatgaaatgacgcttctcttatctgagccttatgaccacaataatgctatcttagaaatccatcctggttcaggaggaactgaagcgcaagattggggagatttactcttacgaatgtatacccgttttggcaatgctaatggtttcaaagtagaagtattagattatcaagcaggggatgaagctggtattaaatcggttaccctctcttttgaaggccccaatgcttatggtttgttgaaatcagaaatgggagttcatcgcctcgttcgtatatcaccttttgattcggctaaacgtcgtcatacctcatttgcttcagttgaagtgatgccagagttagatgatacgattgaagtagaagtacgtgatgatgacattaaaatggatactttccgttccggaggagctggtggtcagaacgtcaataaagtatcaacaggtgttcgtttgacgcatattccaactggaattgtggtatcgtctaccgttgaccgtactcaatatgggaaccgcgatcgcgctatgaagatgttgcaggctaagctatatcagttagaacaagaaaagaaagcacaagaagtagatgctcttaagggtgataaaaaagaaatcacttggggaagtcagattcgttcttatgttttcaccccttatacgatggtgaaggatcatcgtactaactttgagcttgctcaggtagataaggttatggatggagaaatcaatggctttattgatgcctaccttaagtggcgcattgaagac

SEQ ID NO: 19198 - protein, 326 aa, Streptococcus agalactiae; identical to SEQ ID NO: 1064

SEQ ID NO: 19199 - DNA, 690 bp, Streptococcus agalactiae
atggcactaatagaaatgtctggtgttactaaaaagtatcgccgttcaacaactgccttgagaaacttaaatttatcaattcagcaaggtgagtttgtgtatttagttggtccgtcaggtgctggtaaatctagcttgattcgcctcctataccgtgaagaaaaattaagttcaggtagattaaaggtaggggaattcaatctcaataaactcaaacgtcgtcaaattcctattttacgtcgtagtattggagttgtcttccaagattataaattactaccaacaaaaacagtttatgagaatgttgcgtttgcgatgcaagttattggagctaagcgccgtcatattaaaaaacgcgtgccagaagttctagaattagtaggtttaaaacacaagatgcgttcttttccaacacagttatctggtggagaacaacaacgtgtggcaattgcacgtgcgattgttaataatccaaaattattaattgcagatgaacctactggtaatttggatccagaaattgcttgggaaatcatgcatctattggaacgtattaaccttcaaggaacgactgttttgatggcaacacacaatagtcaaattgttaacacacttcgtcatcgtgtcattgagattgaagcaggtagcgttatccgagatgaagagaagggagaatatggttatcatgat

SEQ ID NO: 19200 - protein, 230 aa, Streptococcus agalactiae; identical to SEQ ID NO: 1066

SEQ ID NO: 19201 - protein, 927 aa, Streptococcus agalactiae; identical to SEQ ID NO: 5443

SEQ ID NO: 19202 - protein, 309 aa, Streptococcus agalactiae; identical to SEQ ID NO: 1068

SEQ ID NO: 19203 - protein, 708 aa, Streptococcus agalactiae
ATGAACATAAAACGTCACTCTATTTTTCTTTGGTTAACAACAAGTATCCTTGCTATTTTAATGGCCGTCGGGATGACCATTTACTTCAATACTTACCAAGCCTCCCCATTAGCTAGGAGAATTGCTAAAACCGCTACAAACCATAAGAACTACCTTCTTTTTAGAAGCAAGGGTAAGGTAAAAGCAAATATTATTTTCTATCAAGGGGCTCTTGTGGAAGAAGAAGCTTATTCTCAACTTGCTAGAGATTTAGCTGACAAAGGGGATAATACCTATATTTTGAAGACACCTTTAAATTTGCCAGTTTTATCGCCTCATAAAGCTAAAACAATTATTAATCAGAACCACTTAACTAATGTTTACCTTGCTGGACATTCTTTAGGAGGAGTTGTTGCTAGCCAAAATGCCAAAGTAGCCCCTGTTAGAGGGCTCATATTATTAGCTTCCTACCCTTCACGTAAATCCGACCTATCTCATAAAAAGTTAAGAGTACTCTCCATTACAGCAAGTAATGATCATATTTTAAACTGGGAAAAATATGAGGAAGCTAAAAAACGCCTCCCAAATTCAAGTACTTTTCGAACTATTGTCGGAGGAAACCATAGCCGATTTGGTAACTACGGACATCAAAAAGGGGATGGTAAAGCTACCCTTTCTCACAAATCATCTGAAAAACAATTGGCTACGTTTATTTCGAATTTTATCCAC

SEQ ID NO: 19204 - protein, 236 aa, Streptococcus agalactiae; identical to SEQ ID NO: 1070

SEQ ID NO: 19205 - protein, 696 aa, Streptococcus agalactiae; identical to SEQ ID NO: 5447

SEQ ID NO: 19206 - protein, 232 aa, Streptococcus agalactiae; identical to SEQ ID NO: 1072

SEQ ID NO: 19207 - protein, 761 aa, Streptococcus agalactiae
ATGTCAAAAGTTGCTATTGTTACTGGTGCTGGTCAAGGAATGGATTTGCTATTGCGAAACGTCTTCATGCAGACGGCTTTAAAATAGGCGTTTTAGACTATAATGAAGAGACTGCTCAGGCTGCGGTTGATAAACTATCACCTGAGGATGCTGTTGCAGTTGTAGCAGATGTTTCAAAACGTGATCAAGTTTTTGATGCTTTCCAAAAAGTTGTAGATACTTTTGGTGATTTGAATGTTGTTGTTAACAATGCAGGTGTTGCCCCAACAACTCCTCTTGACACTATTACTGAAGAGCAGTTTGAAAAGGCTTTTGCAATCAATGTCGGAGGAACTATTTGGGGAAGCCAAGCAGCTCAGAAACATTTTAGAGAATTAGGTCATGGCGGAAAAATTATAAATGCAACTTCACAAGCAGGATGTGAAGGGAATCCTAATTTGACTGTTTATGGTGGTACAAAATTTGCAGTTCGTGGTATTACACAGACTTTGGCAAAAGATTTAGCATCAGAAGGAATCACAGTCAATGCTTACGCACCAGGTATTGTTAAAACACCTATGATGTTTGATATTGCCCATGAAGTTGGTAAGAATGCAGGCAAAGATGATGAATGGGGTATGGAGCAGTTTGCCAAAGATATCACTTTGAAACGCTTGTCTGAACCAGAAGATGTTGCTAATGCAGTAGGCTTCTTAGCGGGAGATGATTCAAATTATATCACTGGACAAACAATAGTTGTCGATGGGGGTATGGTATTCCAT

SEQ ID NO: 19208 - protein, 254 aa, Streptococcus agalactiae; identical to SEQ ID NO: 1074

SEQ ID NO: 19209 - protein, 2503 aa, Streptococcus agalactiae
ATGTTTTGTTTTATAGATATAGCGTGCTATAATAGACTTACTATGACCCAGAAAAAACTTAGAAAATATGCAGTAGTTGACTTGGAGGCTACTGGAGCAGGTCCCAATGCTTCTATTATTCAGGTTGGGATTGTTATTATCCAGGAAATAAAATTATTGATAGTTATGAAACAGATGTTAATCCTCATGAATCTTTGGATGAGCATATTGTTCATTTGACAGGTATTACGGATAAGCAGTTGGCTAAAGCTCCGGATTTTGGTCAAGTGGCGCATCACATTTATCAATTGATTGAAGATTGTATTTTTGTTGCCCACAATGTAAAGTTCGATGCAAATTTATTGGCTGAGCAACTATTTTTAGAAGGCTGCGAGTTACGTACACCAAGGATAGATACAGTAGAATTATCACAAGTATTTTATCCCTGTTTAGAAAAATATTCTTTAGGGGCATTAGCAGAAAGCTTAAATATTGAATTAACAGATGCGCACACTGCTATTGCAGATGCAAGAGCTACAGCACAGTTATTCATTAAGTTAAAAGCTAAAATTAGTAGTTTACCTAAAGAAGTGTTGGAGACCATTTTAACATTTGCTGATAATCTTTTGTTCGAATCCTATTTATTGATTGAAGAAGCTTATCAAGAAGCTGATTTCGTTAATCCTAAAGAATATTATTTCTGGCAAGGATTGGTCTTAAAAAAAGAAAAAGCTGTTGGAAAGCCTAAGAAATTATCTAGTGATTTTCAAGTTAACATGGCTTTGTTAGGTATGGATGCTCGCCCTAAGCAAGTTGTTTTTGCTGACTTGGTTAAAGCGCATTTTAATGATCAAACAACAACGTTTTTAGAAGCTCAACCAGGACTTGGTAAAACATATGGTTATCTCTTGCCTTTATTGGATCAGTCTCAAAAACAACAAATAATAGTATCTGTTCCAACAAAGATTTTGCAAGATCAAATAATGGCTAAAGAAATAAAGCACATTCAAGAACTTTTTCATATTCCCTGTCACAGTATCAAAGGACCGAGAAATTACTTGAAGTTAGATGCGTTTTATAAGAGCCTCCAAGTGCAGGATCGAAATCGATTGATAAATCGTTTTAAAATGCAACTGCTAGTGTGGTTGACGGAAACGACTACAGGTGATTTGGATGAAATTAAACAAAAACAACGATTAGAATCTTACTTTGACCAGCTAAAACACGATGGAGAAGTGACTCAATCATCACTTTTTTATGATCTGGATTTTTGGAAACGCAGTTATGATAAAGTTGCACAAAGTCAACTTGTTATTATCAATCATGCTTATTTTCTTGAGCGTGTTCAGGATGACAAAGATTTTGCAAAGGGGAAGGTTTTAGTTTTTGATGAAGCTCAGAAACTTGTTTGGGACTGGAAAATTTTTCTCGTGGGCAACTTGATATTAGTCACCAATTGCAGGTTATTCAAAAAATAATTGATAGTTCTATTCCATTATTACAAAAGCGCCTTCTGGAAAGTATCTCTTATGAGCTAAGTCATGCAGTAGAACTTTTTTATCGTCATAATTCTTTTGAATTTTCAGAGACCTGGTTGAAACGTCTAAAAAATAGTATAAACGCTTTAGAAGTAGTAGGATTAGATGAGTTACAAACTTTTTTCACAGCTACTTATACTAACTATTGGTTTGAAACTGACAAAGTCAATGAGAAGCGTTTAACCATTTTACGTGGGGCGAGAGAAGATTTTCTTAAATTTTCAAAGTTCCTCCCCCCCACAAAAAAGACCTATATGATATCAGCGACTTTACAAATCAGTCCCAAAGTCTACTTGTCAGATCTTTTAGGAGGATTTTCAAGTATAAGTACAGAAAAGATAGCGCATGAGAAAAATGCCAATCAGAAAGTATGGATTGATACCTCTATGCCCAATATACTTGATTTATCACCGGAACAGTATGCTTACGAAATAGCCAAGCGTTTACAAGATATAATGACGTTAAAGCAGCCTACCTTAGTCTTATTAACTTCTAAACAGACAATGTTTATGGTATCTGATTATTTGGATAAGTGGGAGATAAAACATCTTACTCAAGATAAAAATGGCTTAGCTTATAACGTTAAAAAACGTTTTGATCGTGGAGAAAGCAATCTTCTTTTAGGTACAGGATCTTTTTGGGAAGGTGTTGACTTTGTACATCGTGATCGTCTTATTGAAGTTATCACGCGATTGCCTTTTGATACTCCCAAAGACTATTTTATCCAGAAACTATCGCAGAGTTTAACAAAAGAGGGGAAAAACTTCTTTTATGACTATTCTTTACCAATGACTGTCTTAAAATTAAAACAGGCCTTGGGACGTACTACAAGGAGAGAAGAACAAAAGTCAGCGGTAATTATTTTGGATAGCAGATTGGTTATTAAATCTTATGGACAAACCATCATGCATTCTCTTGGTAGAGATTTTGAAATTTCTAAGGAAAAAATTAACAAGGTCTTGACTGAAATGGCTAAATTTTTGATA

SEQ ID NO: 19210 - protein, 835 aa, Streptococcus agalactiae
  VARIANT 48: Xaa = Any Amino Acid
MFCFIDIACYNRLTMTQKKLRKYAVVDLEATGAGPNASIIQVGIVIIXGNKIIDSYETDVNPHESLDEHIVHLTGITDKQLAKAPDFGQVAHHIYQLIEDCIFVAHNVKFDANLLAEQLFLEGCELRTPRIDTVELSQVFYPCLEKYSLGALAESLNIELTDAHTAIADARATAQLFIKLKAKISSLPKEVLETILTFADNLLFESYLLIEEAYQEADFVNPKEYYFWQGLVLKKEKAVGKPKKLSSDFQVNMALLGMDARPKQVVFADLVKAHFNDQTTTFLEAQPGLGKTYGYLLPLLDQSQKQQIIVSVPTKILQDQIMAKEIKHIQELFHIPCHSIKGPRNYLKLDAFYKSLQVQDRNRLINRFKMQLLVWLTETTTGDLDEIKQKQRLESYFDQLKHDGEVTQSSLFYDLDFWKRSYDKVAQSQLVIINHAYFLERVQDDKDFAKGKVLVFDEAQKLVLGLENFSRGQLDISHQLQVIQKIIDSSIPLLQKRLLESISYELSHAVELFYRHNSFEFSETWLKRLKNSINALEVVGLDELQTFFTATYTNYWFETDKVNEKRLTILRGAREDFLKFSKFLPPTKKTYMISATLQISPKVYLSDLLGGFSSISTEKIAHEKNANQKVWIDTSMPNILDLSPEQYAYEIAKRLQDIMTLKQPTLVLLTSKQTMFMVSDYLDKWEIKHLTQDKNGLAYNVKKRFDRGESNLLLGTGSFWEGVDFVHRDRLIEVITRLPFDTPKDYFIQKLSQSLTKEGKNFFYDYSLPMTVLKLKQALGRTTRREEQKSAVIILDSRLVIKSYGQTIMHSLGRDFEISKEKINKVLTEMAKFLI

SEQ ID NO: 19211 - protein, 1191 aa, Streptococcus agalactiae; identical to SEQ ID NO: 5453

SEQ ID NO: 19212 - protein, 397 aa, Streptococcus agalactiae; identical to SEQ ID NO: 1080

SEQ ID NO: 19213 - protein, 1344 aa, Streptococcus agalactiae
ATGTCAAAAAAACTTATTTCAATTGTTGATGTTAAAGATTATGTTGGTCAAGAAGTTACTATTGGTGCTTGGGTTGCTAACAAATCAGGTAAAGGTAAGATTGCGTTTGTACAGTTGCGCGATGGTTCTGCCTTTTTCCAAGGTGTCGCTTTTAAACCAAACTTCATTGAAAAATATGGTGAAGAATCAGGTATTGAAAAATTTGACGTTATTAAACGTCTCAACCAAGAAACATCTGTTTATGTAACAGGGATTGTTAAAGAGGATGAACGTTCAAAATTTGGCTATGAGCTTGATATTACTGACCTTGAAGTCATTGGAGAGTCACATGAATATCCTATAACTCCTAAAGAGCATGGGACAGACTTCTTGATGGACAACCGTCATCTTTGGTTGCGTTCTCGTAAACAAATGGCTGTTATGCAAATTCGTAACGCTATTATTTATTCAACTTATGAATTCTTTGACCAAAATGGTTTTATCAAATTTGATAGCCCAATTTTATCAGAAAATGCAGCAGAAGATTCAACAGAGTTATTTGAAACAGACTATTTTGGGAAACCAGCATTTCTTAGCCAATCTGGTCAATTATACCTTGAAGCTGGAGCAATGGCTCTAGGCCGAGTTTTCGACTTTGGTCCAGTCTTTCGTGCTGAAAAATCTAAAACACGTCGCCATTTAACAGAATTTTGGATGATGGATGCTGAGTATTCTTTCTTGTCACATGAGGAATCACTTGACCTCCAAGAAGCTTATGTTAAAGCATTGATCCAAGGCGTTCTAGATCGTGCGCCTCAAGCACTTGATATTTTAGAACGTGATGTTGAGGCTCTCAAACGTTATATCGCAGAGCCATTCAAGCGTGTTTCTTATGATGATGCTATTACACTTCTTCAAGAGCATGAAGCAGATGAAGATACAGATTATGAACATTTAGAGCATGGTGATGACTTTGGTTCACCACATGAAACTTGGATTTCTAATTACTTTGGAGTGCCGACATTTGTAGTGAATTACCCAGCAAGCTTTAAAGCATTTTATATGAAACCAGTTCCTGGAAATCCAGAACGCGTTCTTTGTGCTGATCTTCTAGCTCCAGAAGGTTATGGAGAGATCATTGGCGGCTCAATGCGTGAAGACGACTACGATGCTCTTGTGGCTAAAATGGATGAACTAGGTATGGATAAATCAGAATACGACTTTTACCTTGACCTTCGTAAATACGGCTCTGTTCCTCATGGCGGTTTTGGTATAGGTATTGAACGTATGGTAACTTTTGTTGCTGGTACCAAACATATTCGCGAAGCTATTCCATTCCCACGTATGTTACATCGTATCAAACCA

SEQ ID NO: 19214 - protein, 448 aa, Streptococcus agalactiae
MSKKLISIVDVKDYVGQEVTIGAWVANKSGKGKIAFVQLRDGSAFFQGVAFKPNFIEKYGEESGIEKFDVIKRLNQETSVYVTGIVKEDERSKFGYELDITDLEVIGESHEYPITPKEHGTDFLMDNRHLWLRSRKQMAVMQIRNAIIYSTYEFFDQNGFIKFDSPILSENAAEDSTELFETDYFGKPAFLSQSGQLYLEAGAMALGRVFDFGPVFRAEKSKTRRHLTEFWMMDAEYSFLSHEESLDLQEAYVKALIQGVLDRAPQALDILERDVEALKRYIAEPFKRVSYDDAITLLQEHEADEDTDYEHLEHGDDFGSPHETWISNYFGVPTFVVNYPASFKAFYMKPVPGNPERVLCADLLAPEGYGEIIGGSMREDDYDALVAKMDELGMDKSEYDFYLDLRKYGSVPHGGFGIGIERMVTFVAGTKHIREAIPFPRMLHRIKP

SEQ ID NO: 19215 - protein, 555 aa, Streptococcus agalactiae; identical to SEQ ID NO: 5457

SEQ ID NO: 19216 - protein, 185 aa, Streptococcus agalactiae; identical to SEQ ID NO: 1084

SEQ ID NO: 19217 - protein, 981 aa, Streptococcus agalactiae; identical to SEQ ID NO: 5459

SEQ ID NO: 19218 - protein, 327 aa, Streptococcus agalactiae; identical to SEQ ID NO: 5460

SEQ ID NO: 19219 - protein, 411 aa, Streptococcus agalactiae; identical to SEQ ID NO: 5461

SEQ ID NO: 19220 - protein, 137 aa, Streptococcus agalactiae; identical to SEQ ID NO: 5462

SEQ ID NO: 19221 - protein, 888 aa, Streptococcus agalactiae; identical to SEQ ID NO: 9875

SEQ ID NO: 19222 - protein, 296 aa, Streptococcus agalactiae; identical to SEQ ID NO: 1096

SEQ ID NO: 19223 - protein, 972 aa, Streptococcus agalactiae; identical to SEQ ID NO: 9877

SEQ ID NO: 19224 - protein, 324 aa, Streptococcus agalactiae; identical to SEQ ID NO: 1098

SEQ ID NO: 19225 - protein, 909 aa, Streptococcus agalactiae
ATGAGTTTTACAGTAAAAGTCAAAGAAGAGCTGCTAGGTCATAAGAGTGAAAATAAGATGGAACTGTCAGCTATTATCAAAATGTCAGGTAGTTTAGGATTAGCTAACCACGGCCTTAACCTTTCTATTACTACAGAAAATGCTAAAATTGCTCGTCATATTTATAGCATGCTAGAAGAACATTATCATTTGCAGCCAGAAATCAAATACCATCAAAAAACGAACTTACGAAAGAATCGTGTGTATACTGTTTTTATTGAAGAAAAAGTTGATGTTATTCTTGCTGATTTGAAGTTGGCTGATGCTTTTTTTGGTATTGAAACTGGTATTGAACACTCTATATTGGACAATGATGAAAATGGAAGAGCTTATCTCAGGGGAGCATTCTTATCAACGGGTACTGTTAGAGAACCTGATTCTGGGAAATATCAACTAGAAATTTTTTCTGTTTATCTAGACCATGCACAAGACTTAGCTAATCTTATGAAAAAATTTATGTTAGATGCAAAGGTTATTGAACATAAACATGGAGCAGTAACTTATTTGCAAAAAGCAGAAGATATTATGGATTTCTTGATAGTCATTGATGCCATGGAAGCTAGAGATACTTTTGAAGAGATTAAAATGATACGTGAGACACGTAATGATATTAATCGTGCTAACAACGTTGAAACAGCTAATATTGCTAGAACAATCACAGCTAGTATGAAGACTATCAATAATATTATCAAGATTATGGATACTATTGGTTTTGATGCACTGCCTAGTGATTTAAGACAAGTAGCTCAGGTGCGTGTGGCTCATCCAGATTACTCTATTCAACAAATAGCAGACAGTTTAGAAACGCCTCTGAGTAAGAGTGGCGTTAACCATCGCTTACGGAAAATAAATAAAATTGCAGATGAATTA

SEQ ID NO: 19226 - protein, 303 aa, Streptococcus agalactiae
MSFTVKVKEELLGHKSENKMELSAIIKMSGSLGLANHGLNLSITTENAKIARHIYSMLEEHYHLQPEIKYHQKTNLRKNRVYTVFIEEKVDVILADLKLADAFFGIETGIEHSILDNDENGRAYLRGAFLSTGTVREPDSGKYQLEIFSVYLDHAQDLANLMKKFMLDAKVIEHKHGAVTYLQKAEDIMDFLIVIDAMEARDTFEEIKMIRETRNDINRANNVETANIARTITASMKTINNIIKIMDTIGFDALPSDLRQVAQVRVAHPDYSIQQIADSLETPLSKSGVNHRLRKINKIADEL

SEQ ID NO: 19227 - protein, 1089 aa, Streptococcus agalactiae
ATGGCTTGTACAACAATATTGGTTGGTAAAAAGGCTTCTTATGATGGTTCGACTATGATCGCTAGAACGGAAGACTCTGTTAATGGCGATTTCACACCCAAAAAATTAAAGGTAATGACATCTAAAGATCAACCGCGTCATTACAAATCAGTTTTATCAAATTTTGAAGTAGATTTACCAGATAACCCACTTCCTTATACTTCAGTACCGGACGCATTGGGAAAAGATGGTATATGGGGTGAAGCCGGTATTAACAGTAAAAATGTAGCGATGAGTGCTACAGAAACTATTACAACGAATTCCCGCGTTTTGGGTGCAGATCCTTTGGTTTCAGATGGTATAGGGGAAGAGGATATACTCACTTTAGTGCTTCCCTATATTCAGTCAGCGCGAGAAGGTGTGGAGCGTTTAGGTGCTATTTTGGAAAAATATGGAACCTATGAATCAAATGGTATTGCTTTTTCAGATACCGAAGAAATATGGTGGTTAGAAACAATTGGTGGGCATCATTGGATTGCTCGTCGCGTACCTGATGATGTTTATGTTACTAATCCTAACCAACTAGGAATTGATCATTTTGAATTTAATAACTGTGATGACTACATGTGCTCTAGTGATTTGAAAGAGTTTATCGAACAATACCATTTAGATTTGACCTATTCTAATGAGCATTTCAATCCTCGATATGCTTTTGGTAGCCAACGTGATAAAGATCGTCATTACAACACACCAAGAAGTTGGGCAATGCAGCGTTTTTTAAATCCTGAAATTGAACAGGATCCACGTAGCTTGTTTATTCCCTGGTGTCAAAAGCCTTACCGAAAAATTACTGTTGAGGATATTAAATATGTGTTGAGTGATCATTATCAAGACAGTGTGTATGACCCATATGGACCAGAAGGGGATGCGGTAAGTAGGAGAGCTTTTCGTTCAGTTGGTATCAACCGAACTAGTCAAACGTCTATTCTACAATTACGACCAAATAAATCACTTGAAACGACAGGTGTTCAATGGTTATCTTATGGCTCTATGCCATTTGCAACCATGGTGCCGTTGTTTACACAAGTTGAGACTGTACCAAACTATTTT

SEQ ID NO: 19228 - protein, 363 aa, Streptococcus agalactiae
MACTTILVGKKASYDGSTMIARTEDSVNGDFTPKKLKVMTSKDQPRHYKSVLSNFEVDLPDNPLPYTSVPDALGKDGIWGEAGINSKNVAMSATETITTNSRVLGADPLVSDGIGEEDILTLVLPYIQSAREGVERLGAILEKYGTYESNGIAFSDTEEIWWLETIGGHHWIARRVPDDVYVTNPNQLGIDHFEFNNCDDYMCSSDLKEFIEQYHLDLTYSNEHFNPRYAFGSQRDKDRHYNTPRSWAMQRFLNPEIEQDPRSLFIPWCQKPYRKITVEDIKYVLSDHYQDSVYDPYGPEGDAVSRRAFRSVGINRTSQTSILQLRPNKSLETTGVQWLSYGSMPFATMVPLFTQVETVPNYF

SEQ ID NO: 19229 - protein, 305 aa, Streptococcus agalactiae
TTAATACAACCAAGGATGCTTCAACAGATAATTTTTATTGGACCAATCGTTTAATTGCAGCTCTAGCAGATCCACACTTTTATCAACATGAAGCTGATATTGAAAGCTATATCGAGAGAACGATGGCTCAAGGACATGCACATATTAACGGTGTTGATAGAGAAGTTGCTGAGAATAAAGAGATTGATTTTCAACAGAAAAATCAAGAAATGAGTGACTATATCCAAAAAGAAAGCCAAGAATTGTTAAATCGTATTCTATTTGATGCAAGTAATTTAATGACAAATCGCTTTTCAATGGGAGAT

SEQ ID NO: 19230 - protein, 102 aa, Streptococcus agalactiae
LNTTKDASTDNFYWTNRLIAALADPHFYQHEADIESYIERTMAQGHAHINGVDREVAENKEIDFQQKNQEMSDYIQKESQELLNRILFDASNLMTNRFSMGD

SEQ ID NO: 19231 - protein, 1518 aa, Streptococcus agalactiae; identical to SEQ ID NO: 9883

SEQ ID NO: 19232 - protein, 506 aa, Streptococcus agalactiae; identical to SEQ ID NO: 9884

SEQ ID NO: 19233 - protein, 282 aa, Streptococcus agalactiae; identical to SEQ ID NO: 9885

SEQ ID NO: 19234 - protein, 94 aa, Streptococcus agalactiae; identical to SEQ ID NO: 1108

SEQ ID NO: 19235 - protein, 932 aa, Streptococcus agalactiae
ATGATTATTTTTCAACAAATTCTTGATAAAATCAAAGAGTACGACACCATCATTATCCATCGACATATGAGACCAGACCCTGATGCTCTTGGTAGCCAAATCGGCTTAAGGGATATCATCAGGCATAATTTTCCAAAGAAAAAAGTACTTGCTACTGGTTTTGACGAACCCACTCTCGCTTGGATTGCTAAAATGGATCAAGTGACCGACCAAGACTATCAAGGCGCTCTTGTTGTTGTTACAGATACAGCAAATACCCCACGCATTGATGATGAACGTTATAAAAAAGGTGACTTTTTAATTAAAATTGACCATCATCCAAACGATGAAGTCTATGGAGATCTCTCTTATGTAGATACTAACGCCTCTAGTGCAAGTGAAATTGTGACAGACTTTGCTCTTTCTTGTGATTTGTTGTTATCAACAAGTGCAGCAAGAGTTCTATATAATGGTATTGTAGGAGATACAGGACGCTTTTTATATCCTGCTACCACAAGTAAAACACTGAAGATTGCTAGCAAACTTCGTGAATTTGACTTTGATTTTTCTGCAATGGCACGTCAAATGGATTCCTTTCCTTTCAAAATTGCAAAATTACAAGCTTTATTTTTGAGCAACTTAAAATTGACAAGAACGGCGCTGCATGCGTTACTTTAACACAAGAAGACCTAAAACGCTTCGATGTAACAGATGCAGAGACTGCTGCAATCGTTGGTGTACCTGGAAAAATTGATATTGTAGAAAGTTGGGCAATTTTCGTTGAACAAAGCGATGGGCATTATCGTGTGCGCCTACGTAGTAAGTCACACATCATTAATGAAATAGCTAAACGTCATAATGGTGGCGGACATCCTTTAGCCAGCGGAGCTAATTCTTATAGTTTGGAAGAGAATCAAGCTATTTACCAAGAAATCCAGGAAATACTTTCTTTA

SEQ ID NO: 19236 - protein, 311 aa, Streptococcus agalactiae; identical to SEQ ID NO: 9888

SEQ ID NO: 19237 - protein, 1020 aa, Streptococcus agalactiae; identical to SEQ ID NO: 9889

SEQ ID NO: 19238 - protein, 340 aa, Streptococcus agalactiae; identical to SEQ ID NO: 1114

SEQ ID NO: 19239 - protein, 249 aa, Streptococcus agalactiae
ATGGCTTTAGCAAAGATTGTTTATGCTAGCATGACCGGAAATACTGAAGAAATTGCTGACATTGTTGCTGATAAATTACGTGACTTGGGTCTAGATGTTGAAGTAGAAGAGTGTACGATGGTTGATGCTGCAGATTTTGAAGATGCTGACATTGCAATTGTTGCCACTTATACATATGGTGATGGAGATTTACCAGATGAAATCGTGGAACTTTATGAAGATTTAGCAGAGGTTGATTTNNNNNTTAAT

SEQ ID NO: 19240 - protein, 83 aa, Streptococcus agalactiae
  VARIANT 80, 81, 82: Xaa = Any Amino Acid
MALAKIVYASMTGNTEEIADIVADKLRDLGLDVEVEECTMVDAADFEDADIAIVATYTYGDGDLPDEIVELYEDLAEVDXXXN

SEQ ID NO: 19241 - protein, 372 aa, Streptococcus agalactiae
ATGGCACTAATAGAAATGTCTGGTGTTACTAAAAAGTATCGCCGTTCAACAACTGCCTTGAGAAACTTAAATTTATCAATTCAGCAAGGTGAGTTTGTGTATTTAGTTGGTCCGTCAGGTGCTGGTAAATCTAGCTTGATTCGCCTCCTATACCGTGAAGAAAAATTAAGTTCAGGTAGATTAAAGGTAGGGGAATTCAATCTCAATAAACTCAAACGTCGTCAAATTCCTATTTTACGTCGTAGTATTGGAGTTGTCTTCCAAGATTATAAATTACTACCAACAAAAACAGTTTATGAGAATGTTGCGTTTGCGATGCAAGTTATTGGAGCTAAGCGCCGTCATATTAAAAAACGCGNNNNNTTAATTAAT

SEQ ID NO: 19242 - protein, 124 aa, Streptococcus agalactiae
  VARIANT 120, 121: Xaa = Any Amino Acid
MALIEMSGVTKKYRRSTTALRNLNLSIQQGEFVYLVGPSGAGKSSLIRLLYREEKLSSGRLKVGEFNLNKLKRRQIPILRRSIGVVFQDYKLLPTKTVYENVAFAMQVIGAKRRHIKKRXXLIN

SEQ ID NO: 19243 - protein, 480 aa, Streptococcus agalactiae
GTGTTGGAGACCATTTTAACATTTGCTGATAATCTTTTGTTCGAATCCTATTTATTGATTGAAGAAGCTTATCAAGAAGCTGATTTCGTTAATCCTAAAGAATATTATTTCTGGCAAGGATTGGTCTTAAAAAAAGAAAAAGCTGTTGGAAAGCCTAAGAAATTATCTAGTGATTTTCAAGTTAACATGGCTTTGTTAGGTATGGATGCTCGCCCTAAGCAAGTTGTTTTTGCTGACTTGGTTAAAGCGCATTTTAATGATCAAACAACAACGTTTTTAGAAGCTCAACCAGGACTTGGTAAAACATATGGTTATCTCTTGCCTTTATTGGATCAGTTCTCAAAAACAACAAATAATAGTATCTGTTCCAACAAAGATTTTGCCAAGGAATTCAAATTTAAATGGCTAAAGGGAAATAAAAAGCACATTCAAGAACTTTTTCATATTCCCTGTCACAGTATCAAAGGACCGAGAAATTAC

SEQ ID NO: 19244 - protein, 160 aa, Streptococcus agalactiae
MLETILTFADNLLFESYLLIEEAYQEADFVNPKEYYFWQGLVLKKEKAVGKPKKLSSDFQVNMALLGMDARPKQVVFADLVKAHFNDQTTTFLEAQPGLGKTYGYLLPLLDQFSKTTNNSICSNKDFAKEFKFKWLKGNKKHIQELFHIPCHSIKGPRNY

SEQ ID NO: 19245 - protein, 237 aa, Streptococcus agalactiae
GTGGACTTTTATGAAGATTTATCAGAGGTTGATTTATCTGGTAAAGTTTACGGCGTAGTGGGTTCAGGTGATACTTTCTATGATTACTTCTGCAAATCTGTTGATGAGTTCGAGGCTCAATTCGCATTAACAGGAGCACAAAAAGGTGCTGATTGTGTTAAAGTTGATTTAGCGACAGAAGACGAAGACATTGAAAACTTAGAAGCTTTTGCTGAAGAAATTGCTTCTAAACTTAAC

SEQ ID NO: 19246 - protein, 79 aa, Streptococcus agalactiae
MDFYEDLSEVDLSGKVYGVVGSGDTFYDYFCKSVDEFEAQFALTGAQKGADCVKVDLATEDEDIENLEAFAEEIASKLN

SEQ ID NO: 19247 - protein, 273 aa, Streptococcus agalactiae
ATGGAATTAGAAGAGATTCGTCAAGAAATAGATGAAATAGATCAGCAATTAGTAAGCCTTTTAGAAACTAGAATGGGTCTAATTTTAGAGGTCATAGCATTTAAAAAGAAACATCGACTTCCAGTTTTAGATAATAATCGTGAAAACGAAGTGCTTAACAATGTATTGAAGAAAGTCCAAAACCATCAATTTGACGATGTGATACGAGCAACTTTCAAAGACATTATGACAGAATCTCGTGTTTATCAAAAGGAGAATATTGTAGACGGTGAT

SEQ ID NO: 19248 - protein, 91 aa, Streptococcus agalactiae; identical to SEQ ID NO: 1118

SEQ ID NO: 19249 - protein, 423 aa, Streptococcus agalactiae
GTGATTAAACGATTTGATAATTATGCTCAGTACGTACTTGTTTTAGGTTTTAGCTTACTAATTGGTGGTGTGGTTGGGGCTATTACAGCAGTCTTTGGACGTGTTCTATTATTCCTGACAGCCTTTAGAAGTGATTATATAGCTTACCTACTCCCTTTTCTTAGCATTGTTGGTTTATTTATAGTTTTTGTCTATCAAAAATTTGGGGGTAAGAGTGTTAAAGGGATGGGATTGGTATTTGAAGTAGGTCATGGTAATGAGGAGACTATTCCGAAACGTCTTGTTCCTCTCGTGATATTAACAACTTGGTTAACCCACTTATTTGGTGGTAGTGCAGGTCGTGAGGGGGTTGCTGTACAGATTGGGGCTACCGTTTCACACTACTTTCAAAATATTGCCGTTTACAAAACGCTTCTCATTTTC

SEQ ID NO: 19250 - protein, 142 aa, Streptococcus agalactiae
  VARIANT 142: Xaa = Any Amino Acid
MIKRFDNYAQYVLVLGFSLLIGGVVGAITAVFGRVLLFLTAFRSDYIAYLLPFLSIVGLFIVFVYQKFGGKSVKGMGLVFEVGHGNEETIPKRLVPLVILTTWLTHLFGGSAGREGVAVQIGATVSHYFQKYCRLQNASHFX

SEQ ID NO: 19251 - protein, 795 aa, Streptococcus agalactiae
TTGCCGTTTACAAAACGCTTCTCATTTTCTAGTAATGGGAATGGCAGCAGGTTTTGCTGTTTATTTCAGACTCCTTTAGCTGCTACTTTTTTTGCGATTGAAGTTTTGGTAGTAGGTCGTTTAATGGTTTCGTATGTATTACCAAGTTTAATTGCTGCCCTGACAGCAAATTTCGTCTCACATTCTTTAGGTTTAGAAAAATTTTCTCATAGTATAGCAACATCAATGGCGTTAACACCAGATATTATTCTAAAATTATTGGTTTTAGGACTATGTTTTGGTCTGTGTGGTAATTTATTTGCTTATTTATTGGCTAAAGCTAAATTAATTGCTTCTAGTAGGTTGCTAAACCCATATAAACGGATTTTCACACTTGGATTGTTAGCTACTTTTTTATTGTTTATCTTCCATTTTGGACGATATTCAGGACTGGGAACAAATCTAATTGAGGCTAGCTTCACTAATAAGAACCTTTATGATTATGATTGGTTGTTAAAATTGTGTTTGACAGTTATTACTTTGGCTGCAGGTTATCAGGGAGGAGAAGTAACTCCCTTATTTGCAATCGGAGCAAGTTTAGGAGTGATTATTGCGCCCATTTTAGGTTTGCCAGTTATTTTAGTTGCTGCTTTAGGCTATACTAGCGTTTTTGGGAGTGCAACGAATACTCTGTTAGGTCCTATCTTAATAGGAGGCGAAGTCTTTGGCTTTGCCAACACTCCTTATTTTGTTATTGTATGTCTTGTTGCTTACTCCATATCACATGCTCATACGATTTATGGTGCTCAATCTAGA

SEQ ID NO: 19252 - protein, 266 aa, Streptococcus agalactiae
  VARIANT 10: Xaa = Any Amino Acid
MPFTKRFSLXLVMGMAAGFAGLFQTPLAATFFAIEVLVVGRLMVSYVLPSLIAALTANFVSHSLGLEKFSHSIATSMALTPDIILKLLVLGLCFGLCGNLFAYLLAKAKLIASSRLLNPYKRIFTLGLLATFLLFIFHFGRYSGLGTNLIEASFTNKNLYDYDWLLKLCLTVITLAAGYQGGEVTPLFAIGASLGVIIAPILGLPVILVAALGYTSVFGSATNTLLGPILIGGEVFGFANTPYFVIVCLVAYSISHAHTIYGAQSR

SEQ ID NO: 19253 - protein, 345 aa, Streptococcus agalactiae; identical to SEQ ID NO: 9909

SEQ ID NO: 19254 - protein, 115 aa, Streptococcus agalactiae; identical to SEQ ID NO: 1122

SEQ ID NO: 19255 - protein, 579 aa, Streptococcus agalactiae; identical to SEQ ID NO: 14397

SEQ ID NO: 19256 - protein, 193 aa, Streptococcus agalactiae; identical to SEQ ID NO: 1124

SEQ ID NO: 19257 - protein, 402 aa, Streptococcus agalactiae; identical to SEQ ID NO: 5623

SEQ ID NO: 19258 - protein, 134 aa, Streptococcus agalactiae; identical to SEQ ID NO: 5624

SEQ ID NO: 19259 - protein, 198 aa, Streptococcus agalactiae; identical to SEQ ID NO: 14401

SEQ ID NO: 19260 - protein, 66 aa, Streptococcus agalactiae; identical to SEQ ID NO: 1128

SEQ ID NO: 19261 - protein, 258 aa, Streptococcus agalactiae; identical to SEQ ID NO: 5627

SEQ ID NO: 19262 - protein, 86 aa, Streptococcus agalactiae; identical to SEQ ID NO: 1130

SEQ ID NO: 19263 - protein, 207 aa, Streptococcus agalactiae; identical to SEQ ID NO: 5629

SEQ ID NO: 19264 - protein, 69 aa, Streptococcus agalactiae; identical to SEQ ID NO: 5630

SEQ ID NO: 19265 - protein, 158 aa, Streptococcus agalactiae
TTGGGCGGCATTGGAGCGCATAAATTTTACGCAGGAAAAATAGGCCAGGTTTTTTTATATATTATTTTTAGATTACCTTTATTCCTGGAATTATCGACCTTATCGAAGCTTTGATGGCTCTCGGAAAACAAACTGATGAATATGGAAATATCATCGTT

SEQ ID NO: 19266 - protein, 53 aa, Streptococcus agalactiae
  VARIANT 24: Xaa = Any Amino Acid
MGGIGAHKFYAGKIGQVFLYIIFXITFIPGIIDLIEALMALGKQTDEYGNIIV

SEQ ID NO: 19267 - protein, 1275 aa, Streptococcus agalactiae; identical to SEQ ID NO: 14409

SEQ ID NO: 19268 - protein, 425 aa, Streptococcus agalactiae; identical to SEQ ID NO: 1134

SEQ ID NO: 19269 - protein, 648 aa, Streptococcus agalactiae
ATGGATATATTAGAAATAAAGAATGTAAATTACAGTTACGCAAATTCTAAAGAAAAAGTTTTGTCAGGAGTAAATCAAAAATTTGAACTTGGAAAGTTTTATGCGAAGTAGGGAGTCAGGAACAGGAAAATCCACACTTCTTTCCTTACTTGCAGGACTTGAAGTCAAACAGGAAAAATCTTGTTTAAGAATGAAGATATAGAAAAGAAAGGATATAGTAATCACAGAAAAAATAATATATCTTTGGTATTTCAAAATTATAATTTAATAGATTATTTATCGCCGATTGAAAATATTAGACTAGTAAATAAATCAGTAGATGAGAGTATCTTGTTCGAATTAGGTTTAGATAAAAAACAAATAAAAAGAAATGTTATGAAATTATCTGGTGGTCAGCAACAAAGGGTAGCTATTGCTAGGGCACTGGTATCAGATGCCCCAATAATACTAGCTGATGAGCCTACCGGTAACCTAGACAGTGTTACTGCTGGAGAAATAATTAATATATTAAAGGAATTAGCTCAAGATAGAAATAAATGTGTAATAGTTGTAACACATAGTAAGGAAGTAGCAGATTCTGCGGATATCATTTTAGAACTAAGTGGTAAAAAGTTGAAAAAAGTAAATAAAATGAATTTGGAGGTTGAA

SEQ ID NO: 19270 - protein, 218 aa, Streptococcus agalactiae; identical to SEQ ID NO: 5636

SEQ ID NO: 19271 - protein, 539 aa, Streptococcus agalactiae
ATGATAAAAAATGCATTTGCTTATGTAACTAGAAAAAGCTTAAAATCATTAATTATTATATTAGTTATTCTATCAATGGCAACTTTAAGCATCATTAGTTTATCTATTAAAGATGCCACAGATAGAGCTTCTAAGGAAACATTTGCTAATATAACAAACAGTTTTTCTATGGAAATAAATAGACAAGTAAATCCAGGAACACCTAGGGGTGGAGGAAATGTAAAAGGTGAAGATATTAAAAAGATATCTCAAACAAACAGTATAGACTCCTATGTAAAAAGAATAAACAGCGTCGCAGACCTAGTTGATCATGATATAATTGAAACTCAAGATACACTTGCAAATCAATCACCTGAAAGAGCAAAGAATTTTAAGAGAACAGTTATGTTAACAGGGGTTAATGACTCAGCAAAAGAAACAAAATTTGTATCAGAAGCATATAAGTTAGTAGAAGGAAAGCATTTAGAAAATAAAGATAAAAATAAAATTTTAATGCATAAAGATTTGGCAAAAAAAAAATCTCAAAGTTGGAGATAAAA

SEQ ID NO: 19272 - protein, 180 aa, Streptococcus agalactiae
MIKNAFAYVTRKSLKSLIIILVILSMATLSIISLSIKDATDRASKETFANITNSFSMEINRQVNPGTPRGGGNVKGEDIKKISQTNSIDSYVKRINSVADLVDHDIIETQDTLANQSPERAKNFKRTVMLTGVNDSAKETKFVSEAYKLVEGKHLENKDKNKILMHKDLAKKTISKLEIK

SEQ ID NO: 19273 - protein, 814 aa, Streptococcus agalactiae
TTGTTTGATGCTGACAATGAAAAAGTTGCAAATGAAACTGTAGAAGTAGAAATTAAAGGTTTATTTGATGGTCATAATAGCGGTGGGGTAAGTGCAGCACAAGAACTATACGAAAATACACTAATCACTGACGTTCATTCAGCTGCTAAAGTTTATGGTAATACAGAAGATACAGCCGTATACCAAGATGCAACATTCTTTGTAAAAGGTGATAAGAATCTTGATAGTGTAATAAAAGATCTTGGGAAACTAGATATAAATTGGAGAGAATATAATTTGATTAAAAGTTCATCAAATTATCCTGCGCTGCAACAATCTATATCCGGTATCTATTCTATTTCAAACAAATTATTTGTGGCTCATTAATATTGCAGGAGTTGTAGTTTCATTATTACTTTTCTTATGGATGAATGCCAGAAAGAAAGAAATAGCAGTATTACTATCATTAGGTATATCTAAATTAGAAATTTTTGGTCAATTTATAATCGAGATGGTATTTATATCCATTCCCGCACTTCTTGGATCTTATTTCTTAGCTCAATATACAGCTGATAAGCTAGGGAATAATATATTGAATAAAGTTACTGGCGATATAGCTAAACAAATAGCTAGACAATCTGCATCTAGTCAATTAGGCGGGGGGGCAGAAGCTGAAGGATTCAACAAGACTCTTTCAGGTTTAGATATAAATGTATTACCTAAATTCATAATTTATGTAGTTATATTTATGAGTTTTGTACTTCTTGTATCATTGATTCTTTCTTCAATTTATACATTAAGAAAGAATCCAAAAGAGTTATTAATTGATAATAAT

SEQ ID NO: 19274 - protein, 272 aa, Streptococcus agalactiae
MFDADNEKVANETVEVEIKGLFDGHNSGGVSAAQELYENTLITDVHSAAKVYGNTEDTAVYQDATFFVKGDKNLDSVIKDLGKLDINWREYNLIKSSSNYPALQQSISGIYSISNKLFVGSLIFAGVVVSLLLFLWMNARKKEIAVLLSLGISKLEIFGQFIIEMVFISIPALLGSYFLAQYTADKLGNNILNKVTGDIAKQIARQSASSQLGGGAEAEGFNKTLSGLDINVLPKFIIYVVIFMSFVLLVSLILSSIYTLRKNPKELLIDNN

SEQ ID NO: 19275 - protein, 651 aa, Streptococcus agalactiae; identical to SEQ ID NO: 9929

SEQ ID NO: 19276 - protein, 217 aa, Streptococcus agalactiae; identical to SEQ ID NO: 1146

SEQ ID NO: 19277 - protein, 747 aa, Streptococcus agalactiae
ATGAAGAAATTAAAAATATTCCCAAAAATGTTCATACAAATATTTTCTATTCTTGGAATACTAATTATATTAGTTCATTCATTATTCTTTTTTATCTTTCCTAAAACATATTTGGAGACGAGGAAAGTAAAAATCCACATTATGGCAGATGAAATTTCTAAAAATATGAATGGAAAAGAGTTAAAATATTTAGACCAAACTTTGGAGCTTTATTCTAAAAGTAGTGACATAAAGGTATTTATAAAAAAAAATAATAACAAAAATGAATTACAAATAAATGATAATATAAATGTTAATGTAAAAAGTGATAGTAATTCTTTAATAATTGAAGAAAGGGAAATTAAACTTCATGATGGCAAAAAAATACATCTTCAATTTGTTTCAACAGCTGATATGCAAAAAGACGCGAAAGACTTGAGCCTTAAGTTTTTACCATATTCTTTATCGATATCATTTCTTTTTTCCATTGTTATTTCTTTAATTTATGCTAAATCTATAAAAAACAATATACAAGAAATAACTATGGTTACTGATAAAATGATAAAACTTGACAAAGAAACAAGATTGAAAATTAGTTCTAATGATGAAATTGGACAACTAAAACAGCAAATCAATGACTTATATTGTGCTTTATTGAATACAATTAATGATTTGGAATTTAAAAATAAGGAAATTTTAAAGTTAGAAAAATTGAAATATGATTTTTTTAAGGGGGCGTCCCACGAACTTAAAACTCCTCTTTCAGCC

SEQ ID NO: 19278 - protein, 249 aa, Streptococcus agalactiae
MKKLKIFPKMFIQIFSILGILIILVHSLFFFIFPKTYLETRKVKIHIMADEISKNMNGKELKYLDQTLELYSKSSDIKVFIKKNNNKNELQINDNINVNVKSDSNSLIIEEREIKLHDGKKIHLQFVSTADMQKDAKDLSLKFLPYSLSISFLFSIVISLIYAKSIKNNIQEITMVTDKMIKLDKETRLKISSNDEIGQLKQQINDLYCALLNTINDLEFKNKEILKLEKLKYDFFKGASHELKTPLSA

SEQ ID NO: 19279 - protein, 108 aa, Streptococcus agalactiae
ATGGGAATTGAGATGTGGCCTGAAGATACAATCGCTTCTTTTCGTCGCACACTTTTAGGGTGGTATGACCAAGAAAAACGTGATCTCCCTTGGCNNNNNTTAATTAAT

SEQ ID NO: 19280 - protein, 36 aa, Streptococcus agalactiae
  VARIANT 32, 33: Xaa = Any Amino Acid
MGIEMWPEDTIASFRRTLLGWYDQEKRDLPWXXLIN

SEQ ID NO: 19281 - protein, 285 aa, Streptococcus agalactiae
ATGGCTAAATACGAAATTCTTTATATTATTCGTCCAAACATTGAAGAAGAAGCTAAAAACGCTTTGGTAGCACGTTTTGATTCTATCTTATCTGACAACGGTGCAACTGTTGTTGAATCAAAAGATTGGGAAAAACGTCGTCTTGCATACGAAATCCAAGATTTCACTGAAGGACTTTACCATATCGTTAACGTTGAAGCTGAAGATGCAGTAGCTCTTAATGAGTTTGATCGTCTTTCAAAAATCAACGGTGACATTCTTCGTCACATGATCGTTAAAGTAGAC

SEQ ID NO: 19282 - protein, 95 aa, Streptococcus agalactiae; identical to SEQ ID NO: 3124

SEQ ID NO: 19283 - protein, 489 aa, Streptococcus agalactiae
ATGATTAATAATGTAGTACTTGTAGGTCGCATGACCCGTGATGCAGAACTTCGTTATACACCAAGTAATCAAGCGGTAGCCACTTTTTCACTTGCAGTTAATCGTAATTTTAAAAATCAATCTGGCGAACGTGAGGCTGATTTTATTAACTGTGTTATTTGGCGCCAACAAGCTGAAAACTTGGCTAACTGGGCAAAAAAAGGTGCTTTGGTTGGAATTACAGGTCGTATCCAAACGCGTAATTATGAAAACCAACAAGGTCAACGTGTCTATGTAACAGAAGTTGTTGCGGAAAGTTTCCAATTATTGGAAAGTCGTGCTACACGAGAAGGTGGTTCACCTAACTCTTATAATAACGGTGGCTATAACAATGCTCCGTCAAATAATAGTTATTCAGCTTCTTCTCAACAAACACCTAATTTTAGTCGTGATGAGAGTCCGTTTGGTAACTCAAATCCAATGGATATTTCAGATGATGATCTACCATTC

SEQ ID NO: 19284 - protein, 163 aa, Streptococcus agalactiae; identical to SEQ ID NO: 3122

SEQ ID NO: 19285 - protein, 1316 aa, Streptococcus agalactiae
ATGATTGCTCAGAAAGCTATAGACATCTTTGAAAAGGTTCAAGTATTTCAACGGAAGATATATCTATCGACCAAGGCAGATAATAAGCGAAAGTTTGGTGTTTTATACGACAAAGTATATCGTAAAGATATCCTGAAAGTTGCGTGGTTCTATGTCAAAAGGAATAAAGGTTCGGCAGGCATTGATGACTTCACGATTGAAGAAATTGAAGCCTACGGTGTACAGAAATTCCTTGATGAAATAGAAGACCAGCTAAGAAACAAGAAATATCAACCTAAAGCAGTAAAGCGAGTTTATATTCCAAAAGCAAATGGTAAAAAGAGACCGTTGGGAATTCCGACAGTCCGAGATAGAGTTGTCCAAACAGCTGTGAAAATAGTTATAGAGCCAATATTTGAAGCTGACTTTCAAAAGTTTTCTTATGGCTTTAGACCTAAGCGAAGTGCTAACCAAGCTATAAGAGAGATATATAAATATCTCAATTATGGTTGTGAGTGGGTTATTGATGCCGACTTAAAAGGTTACTTTGACACGATACCTCATGATAAGTTACTACTTTTAGTAAAGGAACGAGTAACTGATAAGTCAATTATCAAGTTACTTAGTCTATGGCTAGAAGCAGGTATCATGGAAGACAATCAAGTGAGAAGTAATATTTTAGGTACTCCACAAGGAGGTGTCATATCACCGCTGTTAGCGAATATCTATCTGAATGCTTTAGACAGATATTGGAAGAACAATCGGTTAGAAGGAAGAGGACATGATGCCCACTTGATACGTTATGCGGATGACTTTGTTATTCTATGCTCAAATAATCCGAAGAAATATTATCAGTATGCGAAACAGCGTATTGATAAGCTGGGATTAACATTGAACGAAGAAAAGACAAGAATTGTGCATGCGACAGAGGGATTTGATTTTCTAGGCTATACGCTTAGGAAATCAAAATCTCACAAAAGTGGTAAGTATAAAACCTACTACTATCCTTCAAGAAAATCTATGAAATCAATAAAAGGCAAAGTAAAAGATGTATCCAAACAGGACAACACCTGAACCTTCCTGATGTCATGGAAAGATTGAATCCAATGTTGAGAGGATGGGCTAATTATTTCAAAGCTGGGAACTCTAAGCAACACTTCAAGAGTATAGATAACTATGTCATATATAATCTAACAATTATGCTTAGAAAGAAGCACAAGAAGTCTGGAAAGGGATGGAGGGAACATCCGCCGTCATGGTACTATAACTACTTTGGACTGGTTTGTTTAAGGAAGTTGAGTACCAATATCAATGATGATAGTCAGAGATATGGTAGA

SEQ ID NO: 19286 - protein, 439 aa, Streptococcus agalactiae
MIAQKAIDIFEKVQVFQRKIYLSTKADNKRKFGVLYDKVYRKDILKVAWFYVKRNKGSAGIDDFTIEEIEAYGVQKFLDEIEDQLRNKKYQPKAVKRVYIPKANGKKRPLGIPTVRDRVVQTAVKIVIEPIFEADFQKFSYGFRPKRSANQAIREIYKYLNYGCEWVIDADLKGYFDTIPHDKLLLLVKERVTDKSIIKLLSLWLEAGIMEDNQVRSNILGTPQGGVISPLLANIYLNALDRYWKNNRLEGRGHDAHLIRYADDFVILCSNNPKKYYQYAKQRIDKLGLTLNEEKTRIVHATEGFDFLGYTLRKSKSHKSGKYKTYYYPSRKSMKSIKGKVKDVIQTGQHLNLPDVMERLNPMLRGWANYFKAGNSKQHFKSIDNYVIYNLTIMLRKKHKKSGKGWREHPPSWYYNYFGLVCLRKLSTNINDDSQRYGR

SEQ ID NO: 19287 - protein, 237 aa, Streptococcus agalactiae; identical to SEQ ID NO: 12047

SEQ ID NO: 19288 - protein, 79 aa, Streptococcus agalactiae; identical to SEQ ID NO: 3120

SEQ ID NO: 19289 - protein, 942 aa, Streptococcus agalactiae
ATGAAGCAAATGTTTCTTTCAACGGCAATTGAATTTAAAGAAATTGAAACATTCGAGCCAGGTGCTTGGATAAATCTGGTTAATCCCTCCCAGGAAGAATCCGAACAAGTAGCTGATCAATTTGGTATTGATATTGATGATTTACGTGCTCCCCTCGATGTGGAAGAAACTTCCCGTATCTCGGTTGAAGATGATTATACTTTAGTTATTGTTGACGTTCCTACCTATGAAGAACGCAATAACAAAAGTTATTATATGACTATTCCTATGGGCATTATCGTTACTGACAACGCTGTTATTACTACTTGCCTAGAACATTTGACGCTGTTTGATCACTTTTATAGACGACGTGTCAAAAATTTTTATACCTTTATGAAGACACGTTTTGTTTTCCAATTGCTTTATCGCAATGCCGAATTATACTTACAGGCTTTGCGTACTATCGATAGGCAGAGCGATAAAATTGAAGCACAACTAGAGAGTGCAACTCGAAATGAGCAATTGATCGATATGATGGAATTGGAAAAATCTATTGTCTATCTAAAGGCCTCTTTAAAATTTAATGAGCGAATCGTCAAAAAATTGACCAGTAGTACCAGTAGTTTAAAAAAATACATTGAAGATGAAGATCTGCTTGAAGATACATTGATCGAAACTCAGCAGGCTATTGAAATGGCAAATATCTATGAAAATGTCTTAAATGCCATGACAGAAACGACTGCTTCAATCATCGGTAATAATCAGAATACCATTATGAAAACCTTAGCCCTAGTAACTATGACATTGGATATTCCAACGGTTATTTTTTCGGCGTATGGGATGAACTTTCAAAATAATTGGATGCCTTTGAATGGTCTCGCACATGGCTTTATCTATGTTGTTCTTTTGGCCTTTTTGATGAGTTCATTTGTTGTATTTTATTTTATTCGTAAAAAATGGTTT

SEQ ID NO: 19290 - protein, 314 aa, Streptococcus agalactiae; identical to SEQ ID NO: 7830

SEQ ID NO: 19291 - protein, 669 aa, Streptococcus agalactiae; identical to SEQ ID NO: 7827

SEQ ID NO: 19292 - protein, 223 aa, Streptococcus agalactiae; identical to SEQ ID NO: 3116

SEQ ID NO: 19293 - protein, 674 aa, Streptococcus agalactiae
ATGATAAGAGGAGCAAGAGCTCACAATTTAAAAAATATAAGTGTCGACATTCCACGAGACAAGTTAGTTGTCGTTACGGGACTATCAGGATCAGGTAAGTCTAGTTTGGCCTTTGACACTATCTATGCAGAAGGACAACGTCGTTACGTTGAAAGTCTTTCTGCTTACGCGCGCCAATTTTTGGGAAATATGGAAAAGCCTGATGTAGATTCTATTGATGGCCTTAGTCCAGCTATTTCTATTGATCAGAAAACAACAAGTAAGAATCCTCGCTCTACTGTTGGGACTGTAACAGAAATTAACGATTATTTACGTTTGCTTTATGCTCGTGTTGGAACCCCATATTGTATCAATGGTCACGGAGCCATCACAGCATCTTCTGTAGAGCAAATTGTGGATAAGGTACTAGCGCTTCCAGAGCGAACAAAGATGCAAATTTTAGCCCCAATTATACGTCGAAAAAAAGGACAACACAAATCAACATTTGAGAAAATACAAAAAGATGGTTACGTTCGTGTTCGTATTGATGGTGATATTCACGATGTTACTGAGGTGCCTGAATTATCAAAAAGTAAGATGCACAATATTGATATTGTAGTAGATCGATTAATTAATAAAGAGGGCATTCGTTCCCGCTTATTTGATCCGTTGAAGCGGCTCNNNNNTTAATTAAT

SEQ ID NO: 19294 - protein, 225 aa, Streptococcus agalactiae
  VARIANT 215, 221, 222: Xaa = Any Amino Acid
MIRGARAHNLKNISVDIPRDKLVVVTGLSGSGKSSLAFDTIYAEGQRRYVESLSAYARQFLGNMEKPDVDSIDGLSPAISIDQKTTSKNPRSTVGTVTEINDYLRLLYARVGTPYCINGHGAITASSVEQIVDKVLALPERTKMQILAPIIRRKKGQHKSTFEKIQKDGYVRVRIDGDIHDVTEVPELSKSKMHNIDIVVDRLINKEGIRSRLFXSVEAAXXLIN

SEQ ID NO: 19295 - protein, 429 aa, Streptococcus agalactiae
TTGAATAATGATGAAGAATATTTAAATGTTGGTGATACATTAGATGAAGTATTAGAAAAATACTCTATCTTAGTAAATCAAAAAAAAATAAATATTAATAAGGAATTATTAGACTATAATATTTATATAGGAAAAACGGCACTAAATATTGTATTTTCTAATTTGATTAGCAATGCAGTAAAATATACTAATCGAAATGGAATAATTAATATCAAAATAGCTAATGATTGGTTACTTATAGAAAACTCATATGATAAAAATAAAATTTCGAAAATAAATAAAATTTTAGATGCTAGTTTTGATCTAAAATTGGATAATAGTAATGGATTAGGATTAAATATAGTAAAGAATATACTTAATAAGTATAATATAAAGTATGAAATATTACATGGTGAAAATTATTTTATATTTAAAATAAAAATAATCTCT

SEQ ID NO: 19296 - protein, 143 aa, Streptococcus agalactiae
MNNDEEYLNVGDTLDEVLEKYSILVNQKKININKELLDYNIYIGKTALNIVFSNLISNAVKYTNRNGIINIKIANDWLLIENSYDKNKISKINKILDASFDLKLDNSNGLGLNIVKNILNKYNIKYEILHGENYFIFKIKIIS

SEQ ID NO: 19297 - protein, 558 aa, Streptococcus agalactiae
ATGGCTACCGTTAAGACAAAAACAGCTCTTAAAAAGACTCAAAAAACGTATCCTCAAAACTTACTCAACCAGAAATTTAATCCTGATAAACCTAATCAAGTATGGTCTACTGACTTCACCTATATTTCTATTGGATATAAGAAATATGTCTATCTCTGCGCAATAATTGATCTCTATTCTAGAAAATATATTGCTTGGAAATTGAGTCATCGTATGGATGCAAAGTTAGCATGTGACACTCTAGAATTAGCTCTTAATAAAAGAAAGATTGAAGGAACACTTCTCTTTCATTCCGACCAAGGGTCACAATTTAAGGCCAGGGAATTTAGAAAAATAATTGATGACAACAATATCATGCATTCTTTTTCTAAACCTAGATATCCTTATGATAATGCCGTAACTGAAGCATTTTTCAAGTATTTAAAGCATAGACAAATCAACCAAAAAAATTATCAAAATATCAAACAGGTTCAATTAGACTGCTTTGAATACATTGAGAATTTTTATAACAATTACATCCCACATACGGCTAATCTAGGACTAACCCCTAATCAGAAA

SEQ ID NO: 19298 - protein, 186 aa, Streptococcus agalactiae
MATVKTKTALKKTQKTYPQNLLNQKFNPDKPNQVWSTDFTYISIGYKKYVYLCAIIDLYSRKYIAWKLSHRMDAKLACDTLELALNKRKIEGTLLFHSDQGSQFKAREFRKIIDDNNIMHSFSKPRYPYDNAVTEAFFKYLKHRQINQKNYQNIKQVQLDCFEYIENFYNNYIPHTANLGLTPNQK

SEQ ID NO: 19299 - protein, 198 aa, Streptococcus agalactiae; identical to SEQ ID NO: 5651

SEQ ID NO: 19300 - protein, 66 aa, Streptococcus agalactiae; identical to SEQ ID NO: 5652

SEQ ID NO: 19301 - protein, 186 aa, Streptococcus agalactiae; identical to SEQ ID NO: 5653

SEQ ID NO: 19302 - protein, 62 aa, Streptococcus agalactiae; identical to SEQ ID NO: 5654

SEQ ID NO: 19303 - protein, 1203 aa, Streptococcus agalactiae; identical to SEQ ID NO: 14427

SEQ ID NO: 19304 - protein, 401 aa, Streptococcus agalactiae; identical to SEQ ID NO: 1152

SEQ ID NO: 19305 - protein, 558 aa, Streptococcus agalactiae
ATGAATTATCATGATTATATTTGGGATTTGGGTGGTACACTACTTGATAATTACGAAAGTTCCACACGTGCTTTTGTAGAGACTTTGAAAGAATTTGGATATCAAGCAGACCACGATAGTGTGTATCAAAAATTAAAAGAGTCAACAGCAGATGCAATTGCATATTTTATCCCTGAAGAAGCTGATTTTTTAAAAGAGTATAAGGCTAATGAAACTAAGGTTTTGGAAACACCAATTCTATTCCAAGGGGCAAAAGAACTTTTAGCGAAAATTCAAAGACAAGGTAGTCGTAATTTTTTGGTGTCTCATCGTGATAATCAAGTTATAGTTATTCTGGAAAAAACAGAAATTATTGACTATTTTACAGAAGTAGTGACTGCTGATAACGGCTTTTCAAGGAAACCTAGTCCCGAGAGTATGCTTTATTTGAAAGAAAAATACCAAATTGATAATTGTTTAGTAATAGGCGATCGTGATATAGATAAGCAAGCAGGAGAATCGGCTGGTTTTGATACCTTATTAGTCGATGGGTCAAAATCATTGATGGAGATAATAGAG

SEQ ID NO: 19306 - protein, 186 aa, Streptococcus agalactiae
MNYHDYIWDLGGTLLDNYESSTRAFVETLKEFGYQADHDSVYQKLKESTADAIAYFIPEEADFLKEYKANETKVLETPILFQGAKELLAKIQRQGSRNFLVSHRDNQVIVILEKTEIIDYFTEVVTADNGFSRKPSPESMLYLKEKYQIDNCLVIGDRDIDKQAGESAGFDTLLVDGSKSLMEIIE

SEQ ID NO: 19307 - protein, 1860 aa, Streptococcus agalactiae; identical to SEQ ID NO: 14431

SEQ ID NO: 19308 - protein, 620 aa, Streptococcus agalactiae; identical to SEQ ID NO: 14432

SEQ ID NO: 19309 - protein, 1719 aa, Streptococcus agalactiae
ATGTCGAGCGGAATCATATTGCTGCTTGTGGCTATAGTCCTGCTTGTGATTATTGCCTACGTAGTCGGCGTCGTAATAAGAAAACGTAATGATACATTAATTGCAAACTTAGAAACTAGAAAACAAGAGTTAGTTGACCTTCCTGTGCAAGAGGAGATTGAGCAAGTCAAATTGCTTCATTTGATTGGCCAAAGTCAATCAACTTTTAGAGAATGGAACCAAAAATGGACTGATTTATCAACTAATTCATTTAAAGATATTGATTTTCATTTAGTTGAAGCTGAAAATCTTAATGATTCATTTAATTTTGTGCGTGCTAAGCACGAGATTGATAATGTTGATAGTCAGCTAACTATTATAGAAGAAGATATTGTTTCGATTCGTGAAGCTTTAGAAGTTTTAAAAGAGCAAGAAGAGAAAAATAGTGCCCGTGTAACACATGCTTTGGACCTATACGAAACACTTCAAAAATCAATTTCTGAAAAAGAAGATAATTACGGGACAACCATGCCAGAAATTGAAAAGCAGTTGAAAAATATCGAGGCTGAATTTTCACATTTTGTGACCTTAAACTCAACTGGTGACCCGATTGAAGCTTCTGAAGTTTTGAATAAAGCAGAGGAGCATACGATTGCTTTAGGGCAAATTACAGAACAAATTCCAGCTATTGTTGCTAAATTAGAAGACGATTTTCCAGATCAGTTAGATGATTTGGAGACAGGATATCGTCGTCTTTTAGAGGAAAACTACCATTTCCCTGAAAAGGATATTGAACAACGTTTTCAAGAAGTTCGTGAGGCTATTCGTTCGAATTCAGATGGTTTAGTTAGTTTGGATCTAGATCGTGCTCGCGATGAAAATGAACATATTCAAGAAAAAATTGATAAACTTTATGATATTTTTGAACGTGAGATTGCTGCTTATAAAGTAGCTCATAAGGATAGTAAAATTATTCCTCAATTCCTTGCTCATGCAAAATCTAACAATGAACAACTGGGGCATGAAATCAAACGATTATCTGCTAAATATATCTTAAATGAAAATGAAAGCTTAAGTTTACGTTCCTTCACAAATGATTTGGAAGAAATTGAAACAAAGGTTTTACCTTCTGTAGAAAATTTTGGTCAAGAAGCTTCACCTTATACTCATCTACAAATTTTATTTGAGCGTACGTTGAAAACATTGACTACTGTTGAAGAAAATCAAATGGAAGTTTTTGAAGCCGTTAAAACTATTGAAAGCGTTGAGACACGAGCACGCCAAAATATGGATAAGTATGTTAACAAGCTCCATATGATTAAACGTTTCATGGAAAAACGCAATCTTCCAGGAATCCCGCAAGACTTCTTAAGCACTTTCTTTACAACAAGTTCTCAAATTGAGGCACTTATTAATGAACTCAGTCGCGGTCGTATTGATATTGAGGCTGTTTCACGTTTAAATGATGTGACTACAAATGCTATCGCTAATTTAGAGCAAGCTACATATCTAGTTGTTCAAGATGCGACTCTCCAGAGCAGTTACTACAGTATTCAAACCGTTATCGTAGTTTTGAACAAAATGTGCAAAAGAGCTTTGAACAAGCTTTGTACTTATTTGAAGTTGAACATAACTATAAAGCATCTTTCGATGAAATTTCATACGCTTGAGACTGTGGAACCAGGTGTAACTGACCGTTTTGTGACGTCTTATGAAAAGACACAAGAACGTATTCGTTTC

SEQ ID NO: 19310 - protein, 574 aa, Streptococcus agalactiae
  VARIANT 505, 549: Xaa = Any Amino Acid
MSSGIILLLVAIVLLVIIAYVVGVVIRKRNDTLIANLETRKQELVDLPVQEEIEQVKLLHLIGQSQSTFREWNQKWTDLSTNSFKDIDFHLVEAENLNDSFNFVRAKHEIDNVDSQLTIIEEDIVSIREALEVLKEQEEKNSARVTHALDLYETLQKSISEKEDNYGTTMPEIEKQLKNIEAEFSHFVTLNSTGDPIEASEVLNKAEEHTIALGQITEQIPAIVAKLEDDFPDQLDDLETGYRRLLEENYHFPEKDIEQRFQEVREAIRSNSDGLVSLDLDRARDENEHIQEKIDKLYDIFEREIAAYKVAHKDSKIIPQFLAHAKSNNEQLGHEIKRLSAKYILNENESLSLRSFTNDLEEIETKVLPSVENFGQEASPYTHLQILFERTLKTLTTVEENQMEVFEAVKTIESVETRARQNMDKYVNKLHMIKRFMEKRNLPGIPQDFLSTFFTTSSQIEALINELSRGRIDIEAVSRLNDVTTNAIANLEQATYLVVQDATLXEQLLQYSNRYRSFEQNVQKSFEQALYLFEVEHNYKASFDEISYXLETVEPGVTDRFVTSYEKTQERIRF

SEQ ID NO: 19311 - DNA, 639 bp, Streptococcus agalactiae
atgattaaaggtttgttagtcatggacgttgattcaaccttaataatggaagaagctattgatttattagctattgaagcaggggtggggaaacaggttgctgcactgactgacgctgcaatgcgtggcgagttagattttgaagaagctttgaagaaaagagtagcgctacttaaaggtttgcctgttactattttgacagatatattatcctcaatacattttactccaggggcttatgaattgattaaagagtgtcacaagcgtcagatgaaagttggtcttgtatcaggaggttttcacgagacgattgatatcttagctaagcaattacaagttgattatgtcaaagcgaatcgtcttggtgtcaaaggtggttttctcactggcgaagttgagggagagattgtcactaaagaagtgaaaaaaataaagttaaaagagtgggcttctgaaaatcacttagacctttcacaaaccatcgcaatgggagatggtgccaatgatttaccaatgatcaaatccgctggggtaggaattgctttttgtgcaaaaccaattgtcagagaagaagctgcgtatcagattaatgaaaaaaatttgcttaaggtatttgatattattgatgcaaatgaaaac

SEQ ID NO: 19312 - protein, 213 aa, Streptococcus agalactiae; identical to SEQ ID NO: 1162

SEQ ID NO: 19313 - DNA, 483 bp, Streptococcus agalactiae
atggaaatttgggatgcttatgaccaatatgggttcattacaggtcttacacttaatagggatcaaaatatcccacaaggcttattccacttagttgttgatgttatcctttttcatgaggatggtgacgtattgatgatgaaacggcaccctaaaaagaaagcttttcctgcttatttcgaagccaccgctggcggatctgcccttaaaggagaaaatgctaagcaagctattctaagggaactcaaagaagaaactggtatcgttcctcaatgtctaacctttcttaatagagagtggttctctgagcgttcttactttgtagaccattttatcgcaaaatacaatggtgcaaaagatataattacattgcaagaaggagagaccgttgactatatctggttaaaaccagaatatattgatttatttttatctaaaaacaaattaataccctctcaaataaaactcttaaaatccttaatc

SEQ ID NO: 19314 - protein, 161 aa, Streptococcus agalactiae; identical to SEQ ID NO: 1164

SEQ ID NO: 19315 - DNA, 453 bp, Streptococcus agalactiae
atgactgaacttgacaataaaatcctacaaaaagcaagcggtgaaaatcgtcttgatcctgatcaacaacgttactaccttggtacttataaagaaagagttgtgctccacttaagtttaaaagaggcacaagaagaaaagtttcaacttgctataacatctgctcttaataatctgatacttgaatatcctaatcttagtttaaaattatcaccaaatctccctactgatgttcaaatgttctacatgaagttagctaaccgtctatcactagctgctacgattgttaatgaagcaaatgccaattctccatttggtattattatacatagtgataaggctgaaaacgttgaatggaacgattttgagacacaattccctgatttattcaattcaccaaaaaaagaggagtctcctaaaaaaagtctatggcaacatttctttagtcaaaaa

SEQ ID NO: 19316 - protein, 151 aa, Streptococcus agalactiae; identical to SEQ ID NO: 1166

SEQ ID NO: 19317 - DNA, 1305 bp, Streptococcus agalactiae
atgtcaattattactgatgtttacgcacgcgaagtccttgactcacgcggtaacccaacacttgaagtagaagtttatacagaatcaggtgctttcggacgtggtatggttccttcaggagcttctactggtgaacacgaagcagttgaacttcgcgacggcgacaagtctcgttacggtggtcttggaacacaaaaagctgttgacaatgtaaataacgttattgcagaagcaatcattggttatgatgtacgcgaccaacaagctatcgaccgtgctatgatcgctcttgacggaactcctaataaaggtaaattaggtgcaaatgctattcttggtgtttctattgccgtagcacgtgctgcagctgattaccttgaagtaccactttacagctaccttggtggattcaacactaaagttcttccaactccaatgatgaacatcatcaacggtggttctcactcagacgctccaatcgcattccaagaattcatgattatgccagttggtgcaccaactttcaaagaagcacttcgttggggtgctgaagtattccatgctcttaagaaaatccttaaagaacgtggtcttgaaacagctgttggtgatgaaggtggatttgcacctaaatttgaaggtactgaagatggcgtagaaactattcttaaagctattgaagcagctggttacgaagctggcgaaaacggaatcatgattggttttgactgtgcttcatcagagttctacgatgcagaacgtaaagtatacgactacagtaaattcgaaggtgaaggtggagcagttcgtactgctgcagaacaaatcgattaccttgaagagttggttaacaaatacccaatcatcactattgaagatggtatggatgaaaacgactgggatggttggaaagctcttacagaacgccttggtggacgtgtacaattagttggtgacgatttcttcgttacaaatactgattacttagcacgtggtatcaaagaagaagctgctaactcaatccttatcaaagttaaccaaatcggtactttgacagaaactttcgaagctattgaaatggctaaagaagctggttacactgcagttgtatcacaccgttcaggtgaaactgaagattcaacaatcgctgatatcgcagttgcaactaacgctggtcaaattaaaacaggttcattatcacgtactgaccgtattgctaaatacaaccaattacttcgtatcgaagaccaacttggtgaagttgctcaatacaaaggtatcaaatcattctacaacttaaaaaaa

SEQ ID NO: 19318 - protein, 435 aa, Streptococcus agalactiae; identical to SEQ ID NO: 1168

SEQ ID NO: 19319 - DNA, 657 bp, Streptococcus agalactiae
atgacgaattggctaaatactggaaactacaatagcacgaattcatctaaccctgagagcatgctattctatgaaaaacaactaaagacttggctttcgactcataaaaactactacttagattataaagtaacaccaatttatcaaaataatgaactaattccaagaaaaattgaattaaaatatgttggtattgataagactgggaaattattacctatttttatcggaaacaaatccactcaagatcaattcggcatcagcactgttaccttagagaatacctcaccaaatgctaccattgactacctcagcggaaaggctcaaaatactgtcttatcagctaaagaacaaagaaaacttatcgctaagcacgaagaagaaaaacgacttgcagaaaagaaagttgaagaggaaaaagctgctgctgaaactcagaaaaaactggaagaagaacaagcaaggcttgctgctgaagctcaaaggaagcaaaaagaggagcaagcaaggctcgcagctgaaactcagaaaaaacaagaaactctagtacaagaacaaactagtcaaggctacaaacgtgactatagaggaaggtggcatcgtccaaatggacaatacgcttcaaaagcagaaatcgctgctgctggattgcaatgg

SEQ ID NO: 19320 - protein, 219 aa, Streptococcus agalactiae
MTNWLNTGNYNSTNSSNPESMLFYEKQLKTWLSTHKNYYLDYKVTPIYQNNELIPRKIELKYVGIDKTGKLLPIFIGNKSTQDQFGISTVTLENTSPNATIDYLSGKAQNTVLSAKEQRKLIAKHEEEKRLAEKKVEEEKAAAETQKKLEEEQARLAAEAQRKQKEEQARLAAETQKKQETLVQEQTSQGYKRDYRGRWHRPNGQYASKAEIAAAGLQW

SEQ ID NO: 19321 - protein, 396 aa, Streptococcus agalactiae
ATGAAAAGAAAACAGTTTATAAAATTAGGAATTGCAACCTTACTAACGGTTATTTCGCTTTACACACCAATAAACCTAGCTACAAATCATACCACAGAAAATATTGTTACTGCTCAAGAGTATAAAACAAAAGAGAATGGTACTTTACCTTTTAAACACAAACGACAATTGGTTTTAGGAGAGTTGGATGACAAAGGTCGTGCCACATTCGCACATATTCAGCTAAAAGTTAAAGATGAACCCAAGAAAAAGAGAGTAAAACGTTTAAAAACAACCCCTGTTGGATGGCACAATTTTAAATTCTATTATAATGATGGTACTCAAAAAGCTTGGCTAATGAGCCGAGGCCGTCTTATTTGCCACCAATTTAGTGGACTAAACAATGAAGAAAGAATT

SEQ ID NO: 19322 - protein, 132 aa, Streptococcus agalactiae
MKRKQFIKLGIATLLTVISLYTPINLATNHTTENIVTAQEYKTKENGTLPFKHKRQLVLGELDDKGRATFAHIQLKVKDEPKKKRVKRLKTTPVGWHNFKFYYNDGTQKAWLMSRGRLICHQFSGLNNEERI

SEQ ID NO: 19323 - protein, 1281 aa, Streptococcus agalactiae; identical to SEQ ID NO: 5675

SEQ ID NO: 19324 - protein, 427 aa, Streptococcus agalactiae; identical to SEQ ID NO: 1172

SEQ ID NO: 19325 - protein, 510 aa, Streptococcus agalactiae; identical to SEQ ID NO: 5677

SEQ ID NO: 19326 - protein, 170 aa, Streptococcus agalactiae; identical to SEQ ID NO: 5678

SEQ ID NO: 19327 - protein, 1371 aa, Streptococcus agalactiae
ATGTCAAGAAATAATTACGGTCAGCTAAATCATCATGAAGAGCTACGATATAACTATCTTTTAAAAAACATCCATTATCTTAATGAACGTGAAAAGATGGAATTTCAGTACCTTCATTATAAAAAAACAGCAGTACGACCACAGAGAAGGACAGAAAGTCCACCAACTAATTCTTATTATGAGGAACCTTATTCTGATTCTTATTATCAAGATGACGATTTTTACTCAGAGCCTCAGCTAACCTCACAAGGTTTACCAATTTATCAAGAAGAGAGAGCTCCGAAGAAGAAAAAACAAAGGGCCAGAAAAGAAAAACAGAGGGTGAAGGTTATGGCGCCTTTCCCTCCAAAGGCTATAACCCCCCCTAGAAAGAAAAAAAAATTTAAGGGTTTCCTAAAGTTCATAGGTATTATATTACTAATTGTTTTATCAGGTATGGTTTTCATGTTTGTTAAAGGAATGCGTGATGTGAATAATGGGAAGTCACATTATAGCCCTGCAATTATTGAAGATTTTAAGGGAAAAGATGCTGTTGATGGGACTAATATCTTAATTTTAGGTAGTGATAAACGTGTCAGCGAGAGATCTACTGATGCGAGAACAGATACCATAATGGTTGCTAATGTTGGTAACAAGGATAATAAGGTTAAGATGGTGAGTTTTATGCGAGATCTCTTAGTCAATATTCCTAATTATAGTACGGAAGGTTACTATGATATGAAATTAAATGCGTCTTTTAATTTGGGAGAACAAGATAATCATAAAGGAGCAGAGTATGTTCGACAAACGTTGAAAAATCATTTTGATATTGATATAAAATATTATGTTATGGTTGACTTTGAGACATTTGCAGATGCTATTGATACACTGTTTCCTAATGGTGTCAAGATTAATGCTAAATTTGGACTTGTCGGTGGACAATCTGCTGATTCAGTTAAAGTTCCTGATGATTTAAGGATGAAAAATGGCGTTGTACCTAGCCAAAAAATTAAGGTTGGGATTCAGTACATGGATGGAAGGACCCTTCTAAATTATGCTCGTTTCAGAAAAGACGATGATGGGGACTTTGGTCGAACACAACGTCAACAACAAGTTATGAGAGCTATTGTCTCTCAAATAAAAGACCCACGTCGTCTCTTTACAGGTTCTGCTGCTATCGGTAAAGCCTATGCTTTAACTTCAAGTAATTTATCTTATAGATTTGTCCTAACAGATGGCATTCCAATTTTATCAGATGCTAAAAATGGTATTAAGCAAATGACAATTCCAAGAGAAGGAGATTGGGTAGATGATTATGACCAGTATGGTGGTCAAGGGTTAACAATTGATTTTGCTAAGTACAAAAAGATCCTAAAGAAAATGGGACTGCGT

SEQ ID NO: 19328 - protein, 457 aa, Streptococcus agalactiae
MSRNNYGQLNHHEELRYNYLLKNIHYLNEREKMEFQYLHYKKTAVRPQRRTESPPTNSYYEEPYSDSYYQDDDFYSEPQLTSQGLPIYQEERAPKKKKQRARKEKQRVKVMAPFPPKAITPPRKKKKFKGFLKFIGIILLIVLSGMVFMFVKGMRDVNNGKSHYSPAIIEDFKGKDAVDGTNILILGSDKRVSERSTDARTDTIMVANVGNKDNKVKMVSFMRDLLVNIPNYSTEGYYDMKLNASFNLGEQDNHKGAEYVRQTLKNHFDIDIKYYVMVDFETFADAIDTLFPNGVKINAKFGLVGGQSADSVKVPDDLRMKNGVVPSQKIKVGIQYMDGRTLLNYARFRKDDDGDFGRTQRQQQVMRAIVSQIKDPRRLFTGSAAIGKAYALTSSNLSYRFVLTDGIPILSDAKNGIKQMTIPREGDWVDDYDQYGGQGLTIDFAKYKKILKKMGLR

SEQ ID NO: 19329 - protein, 1359 aa, Streptococcus agalactiae
ATGTTACATAAAAATGATATTATTGAAACTGAAATTAGCGACATTAGCCATGAGGGAATGGGTATTGCCAAAGTAGATGGCTTTGTTTTCTTTGTTGAAAATGCTCTTCCAGGTGAGATTATTAAGATGCGCGTCTTGAAATTACGTAAGCGTATAGGATATGGAAAAGTTGAGGAATATTTAACGACTTCTCCTCACCGAAATGAAGGATTAGACTATACCTATTTACGTACAGGGATTGCTGATTTGGGACATCTTACTTATGAACAACAGCTGTTATTTAAACAAAAACAAGTAGCTGATAACCTTTATAAAATTGCTCATATATCTGATGTTTTAGTAGAACCTACTCTTGGTATGACAATCCCTTTGGCATATCGAAATAAAGCTCAGGTACCAGTTCGTCGTGTTGATGGACAGCTAGAGACAGGTTTTTTCAGAAAAAATTCACATACTCTGGTATCCATTGAAGATTATTTAATTCAGGAAAAAGAGATTGATGCTCTGATTAATTTTACACGAGATTTATTAAGAAAATTTGATGTTAAACCATATGACGAAGAGCAGCAATCTGGTTTAATTAGAAATCTCGTTGTTCGTCGAGGACATTATACAGGGCAATTAATGTTGGTTTTGGTGACAACACGTCCTAAAATATTCCGCATTGACCAAATGATTGAAAAGTTGGTGTCTGCCTTTCCTTCTGTTGTTTCAATTATGCAAAATATTAATGATCGTAATAGCAACGTTATTTTTGGGAAAGAATTTCGTACTCTATATGGTTCTGATACTATTGAGGACCAAATGTTAGGAAATACTTACGCTATATCAGCCCAATCTTTTTACCAAGTTAATACTGAAATGGCTGAAAAACTGTACCAAAAAGCAATCGATTTTTCAGATTTAAACTCAGAGGATATCGTTATTGATGCCTATTCAGGTATAGGAACAATTGGCTTATCTGTTGCTAAACAAGTAAAACATGTTTATGGTGTTGAAGTTGTTGAAAAAGCAGTAAGTGATGCCAAAGAAAATGCTACTCGAAATGGGATAACTAACAGTACCTATGTTGCTGATTCGGCTGAAAATGCAATGGCAAAGTGGCTTAAAGAAGGTATAAAACCAACTGTTATAATGGTTGATCCACCACGAAAAGGATTAACGGAGAGTTTTGTATATTCTGCTGCCCAAACAAAAGCAGACAAAATCACTTATATTTCTTGTAATTCAGCGACAATGGCGCGTGATATCAAACTATTTGAAGAATTAGGGTATCATTTAGTAAAAATTCAACCAGTAGACTTATTCCCAATGACACATCATGTGGAGTGCGTAGCGTTGCTACAACGAAGCAAAGGG

SEQ ID NO: 19330 - protein, 453 aa, Streptococcus agalactiae
MLHKNDIIETEISDISHEGMGIAKVDGFVFFVENALPGEIIKMRVLKLRKRIGYGKVEEYLTTSPHRNEGLDYTYLRTGIADLGHLTYEQQLLFKQKQVADNLYKIAHISDVLVEPTLGMTIPLAYRNKAQVPVRRVDGQLETGFFRKNSHTLVSIEDYLIQEKEIDALINFTRDLLRKFDVKPYDEEQQSGLIRNLVVRRGHYTGQLMLVLVTTRPKIFRIDQMIEKLVSAFPSVVSIMQNINDRNSNVIFGKEFRTLYGSDTIEDQMLGNTYAISAQSFYQVNTEMAEKLYQKAIDFSDLNSEDIVIDAYSGIGTIGLSVAKQVKHVYGVEVVEKAVSDAKENATRNGITNSTYVADSAENAMAKWLKEGIKPTVIMVDPPRKGLTESFVYSAAQTKADKITYISCNSATMARDIKLFEELGYHLVKIQPVDLFPMTHHVECVALLQRSKG

SEQ ID NO: 19331 - DNA, 90 bp, Streptococcus agalactiae
atgggaaatggtcaggattgggttggaacagccgaaagactagatggtgaaactgatacagttccaaaagaaggtactattctctctttt

SEQ ID NO: 19332 - protein, 30 aa, Streptococcus agalactiae; identical to SEQ ID NO: 1226

SEQ ID NO: 19333 - DNA, 93 bp, Streptococcus agalactiae
ttgaaaattcatatcgtcgacgaaaaacaattagaagttctagaactattagctatatttgaatttcaaaatggaaagcacttaggatactct

SEQ ID NO: 19334 - protein, 31 aa, Streptococcus agalactiae; identical to SEQ ID NO: 5688

SEQ ID NO: 19335 - DNA, 228 bp, Streptococcus agalactiae
atgggcattactctagtttttaataagctatctgatgagcagaaggagaagttaatgcatgttgggaagtcttattttgactatcaagaaaatgctcttatcccacaattaggttttctatattctaaattaactaaaaaaattgaacttgataatcggttgtctccgactgaacaaaagttattgattaccttattattacatactaaaggtttaatcattgatatg

SEQ ID NO: 19336 - protein, 76 aa, Streptococcus agalactiae; identical to SEQ ID NO: 1228

SEQ ID NO: 19337 - DNA, 102 bp, Streptococcus agalactiae
atgatatttgaagagtccaaagatctaatagatagtccagttagagaagcgttgattataagtgataaggattttcaaaaattaaaacaagagctattattt

SEQ ID NO: 19338 - protein, 34 aa, Streptococcus agalactiae; identical to SEQ ID NO: 1230

SEQ ID NO: 19339 - DNA, 267 bp, Streptococcus agalactiae
atggtgagcttgcttctcttgaaagtaaagcaggaggagttgatagagtttcataatgttttttatagagaagcgatatcttcttatcttgaaacagaaaattttgagaaggctaaagtgactgaagagaattaccaagtttttttaggaatccgtacttatcagaagagttataactatcaagatcatagtgagaatctaaaaggaaatattgaggtagcaatgataggagtagaaaataatattagcgacgaacatattttttgc

SEQ ID NO: 19340 - protein, 89 aa, Streptococcus agalactiae; identical to SEQ ID NO: 1232

SEQ ID NO: 19341 - protein, 1148 aa, Streptococcus agalactiae
ATGGTACGTAAATTTTTAAAATCGCTCCTATCTCTCTTTCTTATAGCAGTAATCGCCACCGGTATTTCAGTGGCATGTTTCTTTTTTATTCCAGAAAATAAAGGGAATATTACACCGATTTTATTGCATCGCTTTATGCGAAAAAATAATGTCAATGGAATGATGATTGTTAGCGATAATACTGGTAAACCGATTACCATCTCGCATGGGATTAACCGTGGGGAAGTAGAAACGGATATTGAAAATAATAAATTATTTCCAATGGCTTCTCTCCAAAAACTCATGACAGGAATTATTATCCAAAGATTAATTGATCAAGATGTCTTGAGTGAAGACGACCGATTGTCTCAGTTCTTTCCCCAAGTAAAAGGGAGTAATAGTATTACCATCCACCAATTGTTGACCCATACGAGTGGGTTAAGAGAAAAAGGTGTTAAGGTGTCTCCTTATCTAAAAAATGAGAAAGAACAATTACAATTTTGCTTAAAACACTATAACTTTGTTAATAAGAAATCGTGGTATTATTCTAATATCAACTTTAGTTTCCTAACAGGTATAGCCACTCAAGTTACGGGAAGGACCTACGCTGAACTTGTTGATGATGTGATAAAAAATCCTTTGCGATTAGATGCTACCCAAAGTTACCAATCAGTTGTAATCATGACTTAGTTAGCCCAATGCGAAAGAACGGCAAGTTAAATAAAATTAATATCTTTAATCAAGTATCCACAGCATATGGAGCTGGAGATTTTTTCACAACTCCGCTGAACTTTTGGGTGTTGATGCGGTCTTTTTCTAAAGGGTACTTTTTCCCAACGGATGAATATACCAAACATCAAAATGATGCGATATCACATTATTATGGTGGACTTTACATGCATGGTCGTATAGTTAATTCTAATGGGGCCTTTTTCCAGTATTCAAGTTTTGGTTATGCAGATCTAAAGACGCATGATACAATGGTGCTTTTTATGAATAACAAAGTCTATAGTGACGCTAGTCATGTGGCACCAAAAGCATTTGAATATTATCAAAAATTTATGTTCCTTAATAAGATTTTCCACTTAGTCTTTTACTTTGTATTTTCTTTCCTTTTAATGCTTTTAATACGTCATTCGTTTCGGAAAAGAAGGTATAAGAAACGTCAC

SEQ ID NO: 19342 - protein, 383 aa, Streptococcus agalactiae
  VARIANT 219: Xaa = Any Amino Acid
MVRKFLKSLLSLFLIAVIATGISVACFFFIPENKGNITPILLHRFMRKNNVNGMMIVSDNTGKPITISHGINRGEVETDIENNKLFPMASLQKLMTGIIIQRLIDQDVLSEDDRLSQFFPQVKGSNSITIHQLLTHTSGLREKGVKVSPYLKNEKEQLQFCLKHYNFVNKKSWYYSNINFSFLTGIATQVTGRTYAELVDDVIKNPLRLDATQSYQSVXNHDLVSPMRKNGKLNKINIFNQVSTAYGAGDFFTTPLNFWVLMRSFSKGYFFPTDEYTKHQNDAISHYYGGLYMHGRIVNSNGAFFQYSSFGYADLKTHDTMVLFMNNKVYSDASHVAPKAFEYYQKFMFLNKIFHLVFYFVFSFLLMLLIRHSFRKRRYKKRH

SEQ ID NO: 19343 - protein, 990 aa, Streptococcus agalactiae
ATGTCAATGATTGAAGTTTCTCACCTTCAGAAAAATTTTATAAAAACCGTTAAAGAACCAGGGTTAAAAGGAGCATTTCAATCATTTCTTCGTCCTGAAAAACACACCTTTGAAGCTGTTAAAGATTTAACATTTGATGTGCCTAAAGGACAAATTTTGGGATTTATTGGAGCGAACGGTGCAGGAAAATCTACAACAATTAAAATGTTAACTGGGATTTTAAAACCAACTTCGGGCTTTTGCCGTATTGATGGCAAATTGCCACAAGAAAACCGACAAAATTATGTTAAGGATATTGGAGTCGTTTTTGGGCAACGTACGCAGTTGTGGTGGGATTTAGCTCTACAAGAAACCTATACAGTGTTAAAAGAAATCTATGACGTTCCTGATAAAGAATTTCGCAAACGCATGGCTTTTTTAAATGAGGTTTTGGAATTAAATGACTTTATAAAGGATCCTGTTAGAACTTTGTCTCTCGGACAGCGTATGAGAGCGGATATCGCAGCTTCTTTATTACATAACCCAAAGGTTCTTTTCTTAGATGAACCCACCATTGGCTTGGACGTTTCAGTGAAAGATAATATCCGACGTGCAATCACACAAATTAATCAAGAAGAAGAGACAACGATTTTACTAACGACACATGACCTCAGTGATATTGAACAACTCTGTCATCGTATTTTTATGATTGATAGAGGACAAGAAATATTTGATGGCACAGTTTCTCAGCTAAAAGAGACATTTGGAAAGATGAAAACTCTTTCTTTTGATTTGCGCCCAGGACAAGAGCATATCAGCTCTAGTTTAATTGGAAAGTCGGAGATTAATATTAAACGTAATGACTTAGTTTTAGATATTCAGTATGATAGTTCTCGCTACCAAACTGCTGACATAATTCAGCAGACATTAGCAGATTTTTCTGTACGTGACCTTAAAATGACAGATGTGGATATTGAAGATATCATTCGTCGCTTCTATAGAAAGGAGCTA

SEQ ID NO: 19344 - protein, 330 aa, Streptococcus agalactiae
MSMIEVSHLQKNFIKTVKEPGLKGAFQSFLRPEKHTFEAVKDLTFDVPKGQILGFIGANGAGKSTTIKMLTGILKPTSGFCRIDGKLPQENRQNYVKDIGVVFGQRTQLWWDLALQETYTVLKEIYDVPDKEFRKRMAFLNEVLELNDFIKDPVRTLSLGQRMRADIAASLLHNPKVLFLDEPTIGLDVSVKDNIRRAITQINQEEETTILLTTHDLSDIEQLCHRIFMIDRGQEIFDGTVSQLKETFGKMKTLSFDLRPGQEHISSSLIGKSEINIKRNDLVLDIQYDSSRYQTADIIQQTLADFSVRDLKMTDVDIEDIIRRFYRKEL

SEQ ID NO: 19345 - protein, 393 aa, Streptococcus agalactiae
TTGACGGTTACGGATAAAAAGAGCAGGAAGTTCAGCATTAACAAGATTGACGAAGCTAAAGAAGGCTTAGTAGGTGCGACCTTCACCTTGTCTAAACGCACAACAGTAGCGGCAGATCATCAAGTACAAGGAGATTTCATTCCTGTCAGCAAAGAGACGACAGTCGGTCGGACAACCCTTACCTTTGACAACCTTAAACCTGGATTTTATGACCTTAAAGAAACGAAAGCGCCGAATGCTTACGTACTTGATCCTAAGACTTATGTTGTGGTCGTTCAAAATTCAGGAAAAACGACAATTGTGGATGAAGCTAACTTCAAAGAGGCTGATTACCCAATGGCTGATAATACCAGCCATGTGGAGTGCGTAGCGTTGCTACAACGAAGCAAAGGG

SEQ ID NO: 19346 - protein, 131 aa, Streptococcus agalactiae
MTVTDKKSRKFSINKIDEAKEGLVGATFTLSKRTTVAADHQVQGDFIPVSKETTVGRTTLTFDNLKPGFYDLKETKAPNAYVLDPKTYVVVVQNSGKTTIVDEANFKEADYPMADNTSHVECVALLQRSKG

SEQ ID NO: 19347 - protein, 809 aa, Streptococcus agalactiae
ATGACAAATTGGAGACGTTATAACCTTTATTAGTACAGGAATCCAAGGATTAATCACATATCGTGTGATTTCATCTTTATAGGATAGGTGATGTGATAGGAGCATTTGTTGCATTTTATCTATGGAAAGCAGTTTTCGATTCCTCAAGTCAATCCTTAATCCAAGGTTTTCAGCTGTCAGATATGATTCTCTATATTATTATGAGTTTTGTGACTAATTTATTAACAAGAACTGATAGTTCATTTATGATAGGTGACGAAGTAAAAGACGGTTCAATTATTATGCGACTCTTACGTCCAGTTCACTTTGCTGCTTCCTACCTTTTCATGGAGATTGGTTCTAGATGGCTCATCTTTTTAAGTATAGGGGTACCGTTTTTGCTTGTTATTACGGGGGTACGCCTCTTCTTGGGGACTGATTTGATTCAAGCTATAGTGTTAGTGGTATTTTATATTATTAGCATTATTTTAGCTTTTTTGATTAACTTCTTTTTTAATATTTGTTTTGGCTTCTCGGCATTTGTTTTTAAAAATTTATGGGGGTCAAACCTGTTAAAAAATTCGTTAGTCGCATTTATGTCGGGGAGCTTGATTCCTCTTACTTTTTTTCCGAAAATCGTTGCTGATATTTTAGGATTTTTACCATTTTCATCTTTAATTTACACACCAGTAATGATTATTATTGGTAAATATGATGGCAGTCAAATTGTGCAAGCCTTACTTTTACAAATATTTTGGCTAATAGTAATGGTAGCTTTATCTCAATTAATATGGAAAAAAGTACAGTCGCATATCACTATCCAAGGAGGT

SEQ ID NO: 19348 - protein, 272 aa, Streptococcus agalactiae
  VARIANT 4, 9: Xaa = Any Amino Acid
MNRXWRRYXPFISTGIQGLITYRVDFILYRIGDVIGAFVAFYLWKAVFDSSSQSLIQGFQLSDMILYIIMSFVTNLLTRTDSSFMIGDEVKDGSIIMRLLRPVHFAASYLFMEIGSRWLIFLSIGVPFLLVITGVRLFLGTDLIQAIVLVVFYIISIILAFLINFFFNICFGFSAFVFKNLWGSNLLKNSLVAFMSGSLIPLTFFPKIVADILGFLPFSSLIYTPVMIIIGKYDGSQIVQALLLQIFWLIVMVALSQLIWKKVQSHITIQGG

SEQ ID NO: 19349 - protein, 783 aa, Streptococcus agalactiae
ATGACAAAATATCAGCGAATGCACTTTATTTTTATTAAACAATACATGAAGCAAATCATGGAGTATAAAATAGACTTTTTTGTAGGCGTTTTAGGAGTATTTTTAACACAAGGGCTAAATCTTTTATTTCTGAATGTTCTTTTTCAACATATCCCTTCTTTAGAAGGATGGACTTTTCAGCAAATAGCTTTTATTTATGGTTTTTCTCTCCTCCCAAAAGGAATTGATCACCTTTTCTTTGATAACTTGTGGGCTCTTGGTCAAAGGCTTATTCGAAAAGGAGAATTTGATAAGTATTTAACCAGGCCTATCAGTCCTTTATTTCATGTCCTAGTTGAAACCTTTCAAGTAGATGCATTGGGGGAGTTATTGGTTGGTTTTATTCTGTTATCTACCACAGTATCTAGTATAAGCTGGACCGTGCCAAAAGTATTATTATTTATATTTATTATCCCCTTTGCAACTTTGATTTATACCTCCTTGAAGATTGCTACGTCAAGTATCGCTTTTTGGACCAAACAATCTGGTGCTGTTATCTATATTTTTTATATGTTTAATGACTTTGCTAAGTATCCTGTCGCAATATATAATAATCTATTGCGTTGGATCATTAGTTTTGTCATTCCATTTGCTTTTACAGCTTATTATCCCGCTGCTTACTTCTTACAAGATAGAAATGTCTATTTTAATATTGGTGGGGTTATCTTGATTTCCTTGATTTCTTTTATGGTATCACTAATACTTTGGCATAAAGGAGTAGAAGTATATGAGAGTGCGGGTTCT

SEQ ID NO: 19350 - protein, 261 aa, Streptococcus agalactiae; identical to SEQ ID NO: 1240

SEQ ID NO: 19351 - DNA, 846 bp, Streptococcus agalactiae
atgaaaacagtaataatatatggaggacagggtaatgttcagtcaaaacacctttgtcaactagttaaaactccaaaaggtgaaattcttttttcaaagttacaagcaactgatttagaatcatatcagttaatgatggatgtcattaaccacaaggtaagtttagacaatgttcatgcgtctatgttagcaaattttttatataatgattggctaacaaacgatgaaaaaatagtatctgggataggattttcagctcatagcgccggtattttcaatgtgttatatgctagtggtagtactagttttgaaaacattattcactttattaaacgtcgtgcccaacttatagaaaattgtcatgtgtctgaagagctttggcttttgatggttgaaaacattgatatgtttagtaaggatgttttaaaagaacagtctgagaaagtaaaattagctattattactgatgatagagctggtgtaattgctatggatcaagtcaaccgttctttctttgatgacgtgatgactaacaaaggttatttttataaattaaagcagttaggcgtaaaagcaccatatcatactgattttttaaatgaatctaaagagcagtataaacaattgattgaaagcctagatatttcgcaaaatgatgactatgactatatttttcattgtgatcaattggtagatgaaattttatatcagtggaccaatctctttaactggcgtgcgattaaggaaactatcatagaaaaggatgcggagattattgatatttctcctaataggtttatttctagtcagttgcaaaaaatgaaaaagagggggaggaaacagtta

SEQ ID NO: 19352 - protein, 282 aa, Streptococcus agalactiae; identical to SEQ ID NO: 1242

SEQ ID NO: 19353 - DNA, 720 bp, Streptococcus agalactiae
atgaaagtagcaatagttactggtggtaccagaggaattggaagggctattacaaaagagttatacaaagaaggttacaaagtcattgctatttataatagcaatgatgctaaggcaagagctttacaagaggagttaccaaaattagacgtttataaatgcaatatttcagatgcaaaagcagtacaaaaattggtgactaaaatttttagagaatatggcggtattgattgtttagttaataatgctggtattgttagagatggctttttcttgatgatgtctgaggaaaaatggatggatgtcattaacataaatattatggggctagttaacatgagtaaagccgtgttaaaaatcatgaaggctaagcgtatacagggaaaggttatcaatatttcttcaactagtggtatagcagggcagatagggcaagcgaactattcagcaacgaaaggcgctatcatttccattactaaaactctagcgaaagaatttgcatcagatggtattacgattaattgtgtaagtccaggattcattgaaacagatatgacaaatgaattgcaaaataaagaagagctaaaagagcatcttattcctctaaaaaggtttggacaacctgaagaggtggcttggctcgtaagctttttagcaagtgagaaggcaaactatattacaggaaaaaatattgtgattgatggaggaatgattaatgat

SEQ ID NO: 19354 - protein, 240 aa, Streptococcus agalactiae; identical to SEQ ID NO: 5706

SEQ ID NO: 19355 - DNA, 303 bp, Streptococcus agalactiae
atgattaactgggctgaagaacgtaaaataataaaaacacgtcaagaagtagttgatgaaattaaaggtattttgattgactctttaatgttggatattgataaagatctgattatgaatgatcaaccattatttggtcgtggattagagctagactctattgatgccctagaactgtcaatagggatttcaacaacgtttggtgttgaactaaatgatgatgatatttcaatattatcatcagtaaatagactagcagattttgtgattgaaaatagtgaggatatagatgaccaagctaag

SEQ ID NO: 19356 - protein, 101 aa, Streptococcus agalactiae; identical to SEQ ID NO: 1246

SEQ ID NO: 19357 - DNA, 474 bp, Streptococcus agalactiae
atgaccaagctaagtagtgaagaaattataaaaatgttacctcatcgctatccgtttctaatggtggatagagtgcagagttataaaaaaggtatcattgaatgtcgtaagaatattactatcaacgaaccttactttcaaggacattttccacaacgtcctatagttccgggtgttttgatgattgagatggcagctcaatctgcagctttactttatattttagatgcacttgatggtagcctcccctctcttgatgaattaacagcagagaaaatagcagaaaaagtaggttatttagccagtgtgaagaatttcaaattcaagaaaattgttactccaggagaccagctaaacattacatgtaaatctcaatcaaaattggggcatcttttagaaattcaagtcgttattagagatgagaataaaaaagaggttgcctcaggaaggatgttggtatcagaaaatggaaat

SEQ ID NO: 19358 - protein, 158 aa, Streptococcus agalactiae; identical to SEQ ID NO: 1248

SEQ ID NO: 19359 - DNA, 927 bp, Streptococcus agalactiae
atggaaattaaactcaaaaatattggaaaaaaatatggttcttttgaagcattgagagacattaatctcatctttgaagagggaaaattttatggccttcttggacctaatggagctggtaaaacaactttatttaaccttttaattcaaaattttaagcaaacgtcaggcgatattaagtgggaggtggatggaaaacctctatctattaaagatttttatcgtcacattggtattgtcttccaaagtaatcgcttagatgataatttaacggttgaggaaaatctaatttctagaggtgctttgtacggtttatctaaatcacaagtacgtaatcgccttaaagatcttcaaacgtatctagatatcacagcaataaaaaaacaaaaatatggcagtttatcaggaggtcaaaaacgaaaagttgatattgcacgcgccttgctgccacaaccttctctattattattagatgaaccaacgactggtttagaccctcaatctcgtcgcgatttatgggatgctatcgcacaactaaatcaacaatcgcagatgacagttgtactaattactcattatcttgaagaaatgtctgcttgtgatgttttaaatgttcttattgaaggaaacatttattattcgggagatattaaaagctttattgagcaacattccacaacaaacttgaatgtggtattgaaaccagaaaagtcattagaccaactttcgatagctgattttgttaataaatgtcaagtcctttcagaaagggagatagtatttaaggatatttctgttgaggaaatgatgcaggttatctcagacaatcaagataaatctattattgagacatttaatgttgaatattcgaacttagaggcggcgtatctcaacttgcttagagaaaaagaaaggaaaaacaatgtt

SEQ ID NO: 19360 - protein, 309 aa, Streptococcus agalactiae; identical to SEQ ID NO: 1250

SEQ ID NO: 19361 - protein, 876 aa, Streptococcus agalactiae
ATGTTTGAACTAATTTCTAGAAATCGTAAAGTTTACACGCGAGATCGGTTAGCGTTTTTCATGTCTTTTTTATCAGTTATTATCTTAATTTTGGTCTATCAGATTTTCTTGGGAAAAATTCAATTAGATGCTATAAAAGCAGCATTGAGGAGTAATACAGTATCCAGTGATACTATTCACATGGTTAATTATTGGCTCATTGCAGGTTTGACGACTATTATTTCAATGACTAGTACATTAGGTGCCTTTGGAGTTATGGTGTCCGACAAAGAAAAAAAATTAAATGAAGATTTTAAGGTCAGTCCTATATCAAATATCAAAATTGAATTGTCCTATGCTATATTTGCCGTTTTATTTGGTATTGTCATGACGATGTTCTCTTGCATCTTTGCTATCGGTATTTTTAACGGCTTTAATTCCTTGCTAGAGTATTCAGCTATGGATTATTTAACTATTTTAGGGATCGTTTCCTTAGGGACTGTTTTATCTGCGGCGATGATTTTACCTATTTTAGCCTTTATTCATACTAGTTCAGCTTTTACGACTCTTAGCACAATTGTAGGGACTTTTATTGGTTTTATTTCAGGAGTATATCTCTCAATTGGCTCGGTAGGAAAAGCATTACAACAGGTTATGACATGGTTTCCATTGACTCAAATCAATTCTCTTTTGAAACAGGTCTTAATGAAGGGTTCTATTGCGAAGGTATTTGATAAAGCCAACGAAGCCACTGTCTCTAACTATAAAGAATCATATGGTGTTGTTTTGCGTAATGCTGATGGAGAAAGGCTGAGTAATCACTTTATGTTGATTTATGTCATTGCCCTCATTCTTATTTTATTGGCAATTCATTTTATTATTAAAAAGGTTAAAAAA

SEQ ID NO: 19362 - protein, 292 aa, Streptococcus agalactiae; identical to SEQ ID NO: 5714

SEQ ID NO: 19363 - protein, 2001 aa, Streptococcus agalactiae
ATGAAAGATGATAATAAATTAAAGATTTCTGAAGCTTCCTTAGAAGATTATTCTGAAGTGGTTCATTTATTTAATAGGAATCATGTTTATCAATTTCCAGACGGTAGGCCTTTAACTGTTGATGACCTTGATTTAACGTTAAAAGTTAAAGAAGTGACACATTTATTTTTACTGAAAAATCATGGTGTTTTGATTGGAACATCAGCTTTCTTTAAATTTATTACCTATGGTTGTTTAGATTGGAATAGTAGCTTTAGTGGTTTTCTTTTAATTGATTCGAAAAGTCGTAGTGGACAGGCAATCACTTATCTATATAAAACTATCTTAAAGAAGATAACAAAACTGAAGTTTTCTAATATCTATACCGAAATCAGTAACTACAATAAACCCTCCTTAGCTTTATCAAAATTGAATGGCTTCAAAGAGTATGATAAGACATATGAAGACATACTGCATTGTCGATCATTGCGTAGTCACCTCCCTAAGATATTGAATACGTTTCGTATTTCGAATTATTATGGTAAAACATACGACATATCAACTTTTCAAATTATGGAGGAAATTGAAAATCCCTTGGAAGAGGAGACAGAAATTAGGACCAAAGTCTCTGATGAAGAAATATTATTTAAAGCAGAAGATAGTGCTTCACTTCCTTATTATTTAAAAATGAGCTTGTTTCAAATGGAAATTGCTAGGTTAGATAACCGTTATGTTTTACAAGTTGACTTTTTATCGGAACAAGTAAAGAGGGTTCGGGTTAAAACTGGAAAATATCACTTGGCAAACTTAACGAGGGCTCACCCTAGCCTAACTTTAAGTCGTTTTGCCAATTATTATTACATTCAAGCAACTGTGGAAACCCTTTATGGTAATATCGATGTTCAACTGGAACGTCGAAAAAAGCATTATAGAGATGCAACTATTTGTCTTAAGAGAACTTTTCAAGGTTATGATTTACTTATCTCTCCAAATGGCAGCCTTATTTTTGAAAAGCAGAAAAGAAAGATACTTGAAGATAGTTTTTTGATTTTTAGCCAACCTTTGGACAAGAAATTAGTTGTAAAAGAAGAAGAAAATCACATTACAATCAAATGTTTCTATCAAGGTGCTTTAATTGAGAAAATCATGACATTTACAAGTGACGAAGAAATCACTTGTGTTTATAAATGTAATCAAAAGGCTAAAGAGATGTTCCCAAAATTATTGAAACAGACTTTCAAGTTACACTGCCAAGAGCAGTTGATTAGAGATAGTGAAGGTTATCTTGTGAATGTTCCAGGAAGTTACCCGATTGAGCATGATGATTTTCTTCGAGCAGATAAGTTTGAAGATAGACAATTCCATTATTACCTCCCGAATGAAGATAAAATGATTTCCTATTCTCCTCCTGGCAAAGCCAGCAATCAAATGCAATTTAGACCCTTATGTCTTATTGATACAGATAGCCTTTCTTTTCCACTGACTTATCATTTTAGGATTTCACAAGCATCATCGGAGGAGGCGTTAATCAATCTAAAAAAACAGCCAATATGGGACAGCAACTACCAAGCGTCAGCAACTGACCTTTTAAAACATATCTCTAACCTAACATTAGAAGAAGAGAAGGATTATGGCATCAAGAGAATGATAGCTAACAGAAAGCATTATCCTAGTCACAAACTGGTTTTAGCCTATAATCAGATTGTTTTGCCTAAGAATGAAATTCCAAGAGACAGTGAATTATATTCTATTTCTTTTGATTATCGAATTAGAGGAAAGTTTGTCCAAATCCGCCAAGGGGAACATGTCAAATATGATAATAAATCCTATGTTTTGGAAAATAGTCAACAATTAGTATTGTATGTAGCTAGCGATGATAAATATATACTAATTTCTGCTAAAAATGGAATATTTTATTCTTACAAAGAGAACAATCATTTAAAAATAAGGTGCATGTTTAAAAGGAACTCACCTTATGCTACAAATGTGAGCATTACAGAATATAGAAAGTGTGAAGAAAAA

SEQ ID NO: 19364 - protein, 667 aa, Streptococcus agalactiae; identical to SEQ ID NO: 5716

SEQ ID NO: 19365 - protein, 951 aa, Streptococcus agalactiae; identical to SEQ ID NO: 10127

SEQ ID NO: 19366 - protein, 317 aa, Streptococcus agalactiae; identical to SEQ ID NO: 1256

SEQ ID NO: 19367 - protein, 2193 aa, Streptococcus agalactiae; identical to SEQ ID NO: 10129

SEQ ID NO: 19368 - protein, 731 aa, Streptococcus agalactiae; identical to SEQ ID NO: 1258

SEQ ID NO: 19369 - protein, 1209 aa, Streptococcus agalactiae; identical to SEQ ID NO: 10131

SEQ ID NO: 19370 - protein, 403 aa, Streptococcus agalactiae; identical to SEQ ID NO: 10132

SEQ ID NO: 19371 - DNA, 573 bp, Streptococcus agalactiae
ttgaatcctttatcagaaaaagacaaagttaactatattatgatttataaaaataggcagtctacattggagaataatttatctggcgatcggttgatgagatatcaacaagcaaatagacaggtaagcaaagataaactgttaacagggagttattttgtgtaccaatgcttaaaaaagttaggttttaccaataagatttgtcaggaatctttttctagtgttagtagttatttaattggtttgccaaaggggaaaattagttactctaattctggtgactatcatattctaacctatgctcccagtggttcaactggggttgatattgagaaatacaaagatagatcagaacaaacctaccaaaactacctaggagaatcagttagtagtgatatggattctaaattattattttataaggcatggttacaaaaagaaatttcctataaatgtgggaaatctatagatattacctatcaaacaatgatagatggctatatttatggttatgcttttgataatacttttaaagtagaagcggtttacttaaaagaattattaccagataac

SEQ ID NO: 19372 - protein, 191 aa, Streptococcus agalactiae; identical to SEQ ID NO: 1264

SEQ ID NO: 19373 - DNA, 339 bp, Streptococcus agalactiae
atgagtgaattcctttcagccaaacctattggtcataatgattcatctaatactattttaataattatagagaatacgaaatatattcatcactatgatggaaaagttgttgtcgaaattcctcctcaaaaagagcctatcaaagtcttttttatggattcacgtcttcattatttagaattttcagacatatgtcggtatgtaactgttgttttgaaaaatagtaccgttgataatataaccaatttagggctagataatcatattgtttatgacaatggtgatgatatggttgatccgttgccgagtattcagcatggattatttcttaatgatgat

SEQ ID NO: 19374 - protein, 113 aa, Streptococcus agalactiae
MSEFLSAKPIGHNDSSNTILIIIENTKYIHHYDGKVVVEIPPQKEPIKVFFMDSRLHYLEFSDICRYVTVVLKNSTVDNITNLGLDNHIVYDNGDDMVDPLPSIQHGLFLNDD

SEQ ID NO: 19375 - DNA, 513 bp, Streptococcus agalactiae
atgacattttataaaaagacggacaaatttggatttaggaaaagtaaagtgtgccgcagcctatgcggtgctttattgggtacagtagcagttgttagtctagctacagcaagtacagagattcacgctgatgaagcaacaacctcacctaccactgtaacgaaagtacctcagccagttcaagcagacacaacagctctaaatacctctaagactcacagtacacaagcaactacaactcctgttgaagctaaggagaataaggttgtcaaaagtgaaactgttcaatctgagagccgagtaatgcctagagataaggtagtagaaaggccagaaacagtaaaagctagtgttaactcagacgttagccaacctattacaaccacacccccaacaattaatgaaaaaacagttgagattcctaacttagctcaagatactaagaaggtagctccaaaagtaactgttacaccagaagttgttaatcagccaaagcagttgcctaaatacgag

SEQ ID NO: 19376 - protein, 171 aa, Streptococcus agalactiae; identical to SEQ ID NO: 1268

SEQ ID NO: 19377 - DNA, 2610 bp, Streptococcus agalactiae
gtgccaaagcctcaaaaagtaagagtaattgttgaatttaataaggaatctatcttagattatgcgacagaacagaaaaaaacagttgcacagttaaatcaagctgatgttgagaaaaaattacaaagcatcaagcaagagcaagataaagttcttaagaatattgaaaaaagtgttcactttgattcaagcaaagtgaagcgttacgatgctattattaatggtgtcgcacttgatattcaagctcaagaaattgaaaaattaaaaacgattgctgatgttagaagggtctatgtctcacaagaatatgttcagacaaaacctttactatcttcctcagggcaacttattggtttgccagaagtttggaacaactcccagtataaaggtgagggaactgttgttgcagttattgattcaggggttgatttcaaacaccaagcactaaaaatcaaagaaccaaatcgtgctaagtataataaaactagtattgaaaaactgattcatgaaaagaatctcaaaggaaaattctattccgaaaaagtaccttatggttataactattatgactataatgataacctcaaggatagctacggtgtaatgcatggtatgcatgtaacaggtatcgtaggagctaatgatgataatcaaaaattgtatggtgttgcaccaaatgctcaaattttagcgatgaaggtattttcagatgaccaacaaaatcccacaaccttcacagatgtgtggctaaaagctctagacgatgctattttactaaaagctgatgttgttaatatgagtcttggaacacctgctggatttgtacatgaggggaaagactatcctgaacttgaagttattgcaagagcgtgtaaggcaggaatcgtcattgcagtagcagcaggtaatgaaggaaatatcactgacggtaatacttatggtgttaagccgctagcagaaaattatgatacagccttgattgccaacccagccctcgatgataataccttggctgttgcctctatggagaaccttaaaaagcatgctcatgttttgaaatttaaagataaaaaatctggaacagaagttacagaagtcattaatcttcatgttgccccaaacgcttcaaaaactattattggattggctgtagatttgggagcaggagctccttcggaattgtcaaaacattttgatttaagtggtaaaatcgccatgcttgaaattccagaagataataaatctaatggatttttagaaaaagtacaggcgattactaagttaaatccagctgctatcttgctttacaataatgcgaaggttaaagatgatttaggcagtcaattattagttgaatcagaagcagctaaatttaatattgctcgcattaccagaagcacgtataacaatatcaaaaataatagcaataaaattattactattttaacagagcgtcaagctattgataatagtttagcaggacaattatcttcttattcttcttggggacctacaccagacttacgtctaaaacctgagattacagctccaggtggtcatattttctcaactgtggaggataatcaatatgctgataaatcaggaacatcaatggctgcacctcaggtagctggggcagctgcagttttaaaacaatacattacagataaaaaaattcctgttgataatgctgctgattttattaaattactcttgatgaacactgcacagccaattatcaataaacaatcaaaagatggcaaaacaccttactttgtgcgccaacaaggtagcggagcaatgaatcttgccaaagctcttgttacgacagtcgttgcaactgtaacagggactaacgataataatgcagatggtaagttggagttacgtgaattaaaagagaaaaaatttaaagcacgcattctacttcgtaactttggaaaaactaataaaacgtatatcatctcatcagaagcgattgcggacccagttgatgaaaaaggatttcgtacgcaaaattcagaacacctagtatcaaaaaaagctgatgcagttacaaggaaagttactgtagaagcaggtaagacattagctgttgaccttgatgtggattattctgatgcagaggctttaactcgcaataatttcttggaaggttatcttaacttaaaagatactgaaggtgtagccgatttacacttaccatttttaggtttttacggttcatggacagagcaaaaagctattgatgcttttgaaggcatttctgaaattggtaacggtgacaaaaaacgtcgcgttcaattctatgttaataaagaaaccaacaagacctcatcaacctttacaactaacggcatgttgagtcttccaatctataacaatacagtatttttctctcctaatagtcctttctatgacaaagcaggagttcgtattgcagctttgcgtaatatggagtatgttcaatattctattatagatccagataccaataaagaagttcgtgtacttggtagatcacacgacgttagaaaactttatcgcctagattatcgtaatagttttgccatgatgccagattctatttgggatggtaagattaaagat

SEQ ID NO: 19378 - protein, 870 aa, Streptococcus agalactiae; identical to SEQ ID NO: 1270

SEQ ID NO: 19379 - DNA, 3315 bp, Streptococcus agalactiae
ttgaataataaaggtgtcggtggcgatggtgtccaaatttatcaatactatatcaaaatggacaacaataaaccttacttaagtcccaaagataagactactgtagagaagttagaagatcgctggaaaaaaattactttcaaagttcaggatactggcattggtttgaaagacgtttatcttcaatctgttaagtatgttggtggtggcaataataatttagaccttatcacacctccaggatttaaaaaagaagataaaaaagttgaaaaaccaaaattagaccgtccaccaggaattgatttaccagcaccaacttcaatgagaagttttgattattcaaccccaccgggaactaagccaagcaaacccaaagatagtttatcaactcctccaggtttcccagatttaaacacgccgccggatgaagcactaaaggatagtaaaaaagacgctattgaagataaatcaggagcaattaaatatgctaagtctcttcaacttagctttgttgatgaccctattttagctagcaaagtaaatggcaaaatattacaagtcgaatctgatggcaaattagtcattcctagaaatgctttgtcagctaatcaatttgatgacactagtcttaaaatttatcgtaataataatcgcaataaagaaattactatcacaacagattattttgcagatacaaaatatgtcaatatcacagcggttgactatttgagcaatactacttttgagcaattagctactggtgaaacagtagattaccatgccattgtattttcaagctttgctgctattaaagacaagggtggtaagatttatgtcaacgataaattgcaagaaacttctcgtatagcgcttaaagataaatctgttaagattggtattgaattaccaaatgatgtcagacatattgatagtttatctgttcgtcgtttgaatgaggttaaaactgttgataatatcttgaaaaatgatgaacaagacattaatctcagcaaaacttaccaattaaaatacaacccgacaaatcgtcgtctagagtttactattaataacattaactcaagttcagaaatcatgaccactttcaaagatggaaagatgccagaattggttgaacaaaaagatgtttctttggatataaacgatatggacatgagtaagtttaaaactattcgacttggacgaaaggattctgaatttaagggacaacttattgcaaaaactggaacagttgaattagatatgtttttcaaacaatctcaagacccagcttcaattattaaaaaaatataccttatccaaaatggtgttccaaatgaattgaaaaaatttgactctagttttggtttaactgaaagtcagatagatggatactatatttataaagatgcaattaaccttaaatttaaattaaccagtggtgcaagtcttaaagttgtttataaagggcaagaagatccatatagtcatcagaaagaagatatgactaaaaaaggtgaacagctcagtcattcaactcaagccaatgaaaatacagcaaaagtaacctttgctaatattgactggtcacattatagtaaggttactgtgaatggaaaagaagttggtaaaggtagtgagttacctttaactaaaggatggacaacatttgtattacataaaacagaaaattcattaaatgttaaaagtttgattatggagacgggtagtgtaagtaagaaagttcaacaacttcctttaagtcctagattatctaaaaataagcatatgagggatatgctacttactatgcaaaaagattcagcgtattacgaaacaagtgacagtctagtccttcgaattaatctcactgcagatactaaacttaattttaatgctgttaaaggagcgagtgctcttactgaaaatatgatgatgagacagtttgcagttgctggaccacaagatgatcctgttagtgaacataaatacccatcagtatttctcttaactcctgccttattggaaactgctagtgaggcaactctaaatggtaaggaaatcacagcatctggtattatcggtcacatcaaggatggtgataaaagcaagcatgttgaagtcaaaatggtgaatgaaaatggagacatgctaggaacccctgttattattcaaggtaaagacttgactaatcgaacaaaaccattaatgagtggacgtagagtactttatgccggtaaacaatatgagttccgggctaaattaccacttagtcgttttaacacttggattagggttgaagtggtaacagaagcaggagagaaagcaagtattgttcgtcgcatgttctttgaccaatcagttccagagcttaacacagcagttgctaaacgtgatttgacttctgatactgctcttatccacatcgttgccaaagatgactctctaaaactaaaattatatcaagatgattcattacttgaatctgttgataaaaccggtctttatagttttagaaatggtgtagaaatcactaaagatatgacagtaccactagaatttggagataatattactaagttatctgctgttgacttatcaaattatcgtcgtaatgagacccttcatatctatagaaaccgttttgatgttaaagcaagccaaatgacagctgacaaaggagctaaagtaactgtggatatgttgatgaagcacttagttgttccagaaatggcaggagcttatacattaacaatcgacgaagctccaaacacaaatgaatcaggaatgttaacaaacgctaaagtatcgattcattatgtaaatggtggtgttgataaagttgatgttccgattaaagtagttgacttagaagctattcgtaaagctgaagaagcacataaagctgacgaagcacgtaaagctgaagaagcacgtaaagctgacgaagcacataaagctgaagaagtacgtaaagctgaagaagcacataaagtcgaagaagcacgtaaagctgaagagggacataaaacccaagaagcacctatagttgaagaaggctacaaggttaataacgttcatcaaactgatactacagttaaagcgtctgatttaccaaagactaagacagtttccgcagttcatatggctagaacagacaataaacagataacttcacatcagacacatgttgaaaaacaaattaaaaatacattgccatccactggtgacagcaaacgtggttattatatcactggaatggctatcgttatgctgagtgtattatttagtttagctaaaaagtttaaaagcaaatat

SEQ ID NO: 19380 - protein, 1105 aa, Streptococcus agalactiae
MNNKGVGGDGVQIYQYYIKMDNNKPYLSPKDKTTVEKLEDRWKKITFKVQDTGIGLKDVYLQSVKYVGGGNNNLDLITPPGFKKEDKKVEKPKLDRPPGIDLPAPTSMRSFDYSTPPGTKPSKPKDSLSTPPGFPDLNTPPDEALKDSKKDAIEDKSGAIKYAKSLQLSFVDDPILASKVNGKILQVESDGKLVIPRNALSANQFDDTSLKIYRNNNRNKEITITTDYFADTKYVNITAVDYLSNTTFEQLATGETVDYHAIVFSSFAAIKDKGGKIYVNDKLQETSRIALKDKSVKIGIELPNDVRHIDSLSVRRLNEVKTVDNILKNDEQDINLSKTYQLKYNPTNRRLEFTINNINSSSEIMTTFKDGKMPELVEQKDVSLDINDMDMSKFKTIRLGRKDSEFKGQLIAKTGTVELDMFFKQSQDPASIIKKIYLIQNGVPNELKKFDSSFGLTESQIDGYYIYKDAINLKFKLTSGASLKVVYKGQEDPYSHQKEDMTKKGEQLSHSTQANENTAKVTFANIDWSHYSKVTVNGKEVGKGSELPLTKGWTTFVLHKTENSLNVKSLIMETGSVSKKVQQLPLSPRLSKNKHMRDMLLTMQKDSAYYETSDSLVLRINLTADTKLNFNAVKGASALTENMMMRQFAVAGPQDDPVSEHKYPSVFLLTPALLETASEATLNGKEITASGIIGHIKDGDKSKHVEVKMVNENGDMLGTPVIIQGKDLTNRTKPLMSGRRVLYAGKQYEFRAKLPLSRFNTWIRVEVVTEAGEKASIVRRMFFDQSVPELNTAVAKRDLTSDTALIHIVAKDDSLKLKLYQDDSLLESVDKTGLYSFRNGVEITKDMTVPLEFGDNITKLSAVDLSNYRRNETLHIYRNRFDVKASQMTADKGAKVTVDMLMKHLVVPEMAGAYTLTIDEAPNTNESGMLTNAKVSIHYVNGGVDKVDVPIKVVDLEAIRKAEEAHKADEARKAEEARKADEAHKAEEVRKAEEAHKVEEARKAEEGHKTQEAPIVEEGYKVNNVHQTDTTVKASDLPKTKTVSAVHMARTDNKQITSHQTHVEKQIKNTLPSTGDSKRGYYITGMAIVMLSVLFSLAKKFKSKY

SEQ ID NO: 19381 - protein, 237 aa, Streptococcus agalactiae
ATGCAAAGAAAATCCTATTTAAAATCCATGAGTGTTCTTACTTTAACAGCTTGTCTTATATCAGGATATGTGGTTAAAGATATTGCTATGTTACATGCAGTATCTGCCAGTGAGAAGAAAGCAAATAATGTCAGTCCGAGAGAAAATCTCTACAGGGCTGTCAATGATAATTGGCTAGCCAATACAAAACTCAAACAAGGGCAGATTAGTGTTAATATTTTCAGAAATAGGATAAAT

SEQ ID NO: 19382 - protein, 80 aa, Streptococcus agalactiae
MQRKSYLKSMSVLTLTACLISGYVVKDIAMLHAVSASEKKANNVSPRENLYRAVNDNWLANTKLKQGQISVNSFSEMRIN

SEQ ID NO: 19383 - protein, 663 aa, Streptococcus agalactiae
ATGAAAGACTTTCAAAGTTTGGCCCATGATTTTGTGATGAGTGGTTTTGTTTTACCATTTGGTTTGACTGTGGAAACCAATGCTCGAGATAATAGCCAAAAGCAATTGGTGCTTCGTCAAGCACCCGCATTACTTGAATCACCTGACCAATATAAGAAGGGCAATAAAGAAGGTGAGGCTAAATTATCAGCTTACCGTACTTCAGCAATGGCTTTGCTTAAACAAGCTGGAAAAAGTAACATTGAAGATAGAAAACTAGTTAAACAAGCTATAGCATTTGATAGACTCTTATCAGAAAAAACGCAAGTTGATCAAAGTAAAATCACAGCTGAAAGTGAGACAGCTGCGGGGCGATATAACCCTGAAAGTATGGAAACGGTTCACAATTACGCCAAGGAATTTGACTTTAAAGAATTGATTGAAAAACTAGTTGGGCCAACGAATAAGGCAGTCAATGTAGAAGATAAAACTTATTTTAAACAGGTTAATGATGTTATAAATAGTAAACAATTAGCCAATATGAAAGCATGGATGATGATTTCTATGCTAGTTGATCAATCAGATTTTCTAGGAGAACAAAATCGTCAAGCAGCGAGTGCTTTTAAGAATGTTGCGTCTGGTTTGACTCAGATTGAATCGAAAGAAAAAATGCTTACACCCAAT

SEQ ID NO: 19384 - protein, 221 aa, Streptococcus agalactiae
MKDFQSLAHDFVMSGFVLPFGLTVETNARDNSQKQLVLRQAPALLESPDQYKKGNKEGEAKLSAYRTSAMALLKQAGKSNIEDRKLVKQAIAFDRLLSEKTQVDQSKITAESETAAGRYNPESMETVHNYAKEFDFKELIEKLVGPTNKAVNVEDKTYFKQVNDVINSKQLANMKAWMMISMLVDQSDFLGEQNRQAASAFKNVASGLTQIESKEKMLTPN

SEQ ID NO: 19385 - protein, 816 aa, Streptococcus agalactiae
TTGGGTGATTATTATGGTAAGAAATATTTTGGTGAGGCAGCTAAAAAAGACGTCGAACATATGGCTAAGAAAATCATTAATGTCTATAAAACACGGTTAAAAAACAACACTTGGTTATCAGAAAATACAAAAGCAATGGCCATTAAGAAACTTGATAACATGAGATTAATGATTGGCTATCCAGAAGATTATCCTGATCTTTATCGTCAGTACCAATTTGATAGTAAAGCAAGCTTCTTTGAAAACAATGATAACTACAGAAAATTATCGAACAAGAAAACATTTGAAGAATTTAACCAGTCTAATCAACGTGAACATTGGCAAATGAGTGCCAATGCTGTAAATGCTTATAATGATCCTAATACCAATTCCATAGTCTTTCCAGCAGCGATTTTTCAATCACCACTCTACGATAAAACTAAAACAGTTAGTCAAAATTATGGAGCTATCGGAGCAATTATTGGTCATGAAATTTCACACTCATTTGATATTAATGGTATGAAATATGACGAGAAAGGGAATCTTCACGATTGGTGGACTAAAGAAGATTTAAAACATTATAAGAAAAAAACACAAGCTATGATTGACCAATGGGATGGCCTTAAAGCAGATGGCGGTAAAGTTGATGGTAAATTAACTTTAGCAGAAAATATTGCAGATAATGGTGGTGTTATGGCATCTCTAGAAGCTCTTAAGACTGAAAAAATCCAAACTATAAAGAATTTTTTGAATCATGGGCAAGTATTTGGCGTTAAAAAGCAACCAAAGAACAAAGTAAGTCCTCAATTCAGTCAGATGTTCATGCACCATATGAAT

SEQ ID NO: 19386 - protein, 272 aa, Streptococcus agalactiae; identical to SEQ ID NO: 1276

SEQ ID NO: 19387 - protein, 108 aa, Streptococcus agalactiae; identical to SEQ ID NO: 10147

SEQ ID NO: 19388 - protein, 36 aa, Streptococcus agalactiae; identical to SEQ ID NO: 1278

SEQ ID NO: 19389 - protein, 759 aa, Streptococcus agalactiae
ATGAAGAATATAACAAAGCTATCAACTGTTGCTTTAAGCCTACTACTTTGTACGGCGTGTGCTGCATCAAACACGTCTACATCTAAAACACAGTCTCATCATCCTAAACAAACTAAACTCACAGATAAGCAAAAAGAAGAACCCAAAAACAAAGAAGCTGCTGATCAAGAGATGCATCCCCAAGGCGCTGTTGATTTGACAAAATATAAGGCAAAACCGGTCAAAGATTATGGTAAAAAAATCGATGTTGGTGATGGCAAGAAAATGAACATTTATGAAACTGGTCAGGGAAAAATTCCAATTGTTTTTATTCCTGGTCAAGCTGAGATTTCGCCACGCTATGCTTATAAGAATTTAATTGAGCGGTTAAGTAAAAAATATAAAATTTATACAGTAGAACCATTAGGCTATGGTCTCAGTGATATTCCTACTAAACCACGTACGCTAGAAAACATTACAAAAGAAATTCACACAGGCCTAAATAAAATTGGAGTTAAAAATTTCTACCTTGCAGCTCACTCACTTGGCGGTATGTATTCTTTAAATTATGCTAAAAATTATCCAGAAGAAGTCAGAGGATTTATTGGTATGGATACCAGTACACCTTGGATGGAAGGGGAACAAAAAACAAAGTATGACCCTGAAAGTGCTAAATGGGCAATGAAATTACCAGATGTTGATGATAAGACTAACGAACAGTATCTGTCAATTGCGAAAAAATTAACGGCAATAAGTCTCAACGAGATGAAGATGAGCGCT

SEQ ID NO: 19390 - protein, 253 aa, Streptococcus agalactiae
MKNITKLSTVALSLLLCTACAASNTSTSKTQSHHPKQTKLTDKQKEEPKNKEAADQEMHPQGAVDLTKYKAKPVKDYGKKIDVGDGKKMNIYETGQGKIPIVFIPGQAEISPRYAYKNLIERLSKKYKIYTVEPLGYGLSDIPTKPRTLENITKEIHTGLNKIGVKNFYLAAHSLGGMYSLNYAKNYPEEVRGFIGMDTSTPWMEGEQKTKYDPESAKWAMKLPDVDDKTNEQYLSIAKKLTAISLNEMKMSA

SEQ ID NO: 19391 - DNA, 249 bp, Streptococcus agalactiae
ttgaagaatgtaaaattccctaaagggatgccaactaagtattttcttgctgatcaatctgtggagggaatcaagctacgtcaagcagattttaaaggtttgaaaaattgggatcagcagcatattgatttatctgaagatccaaaagatgcttccgttgaaattcttaaaggtagtcacaatattttccaaacacaatatgaacatatggctaaagctattgatggatttatccaatcccatcaaaag

SEQ ID NO: 19392 - protein, 83 aa, Streptococcus agalactiae
MKNVKFPKGMPTKYFLADQSVEGIKLRQADFKGLKNWDQQHIDLSEDPKDASVEILKGSHNIFQTQYEHMAKAIDGFIQSHQK

SEQ ID NO: 19393 - DNA, 1017 bp, Streptococcus agalactiae
atgaataaaataacgaaattatcaaccgttgccctcgctttgatgctttgcgttggatgttctgccaataaagataatcaaaaaactaaaactgagcagcctaagcaagaaaagtcaatcgctaagcaaaaacaagagagagaagcagaaaaagctatgattgctaaaggtgctattgacctaactaaatataaagcgaaaccaattgaagattacggacaaaaaattgatgtcggtgacggtaaaaaaatgaacatatatacaatgggtcaagggaaaattccgctagtagtcttccctggtcaagctgaaatttcaccacgttatgcttacaaaaacttgcttgatagattagggaaaaaatataaaatttatacggttgaaccgctcggttatgggcttagtgatatgacagataagccacgtacgattgaaaatattaccaaagagattcatacagctcttgaaaaagtcggtgtcaaaaatttctatcttatggctcactcgttaggtggcatatacggtctaaattatgctaagacatattctaacgatgtcaaaggtttcattggcatggatacaagcacaccaaatatggaaggtgatggcacaactggagaatcttcagcttcaaccttaaaatgggcagaatccattccagaagttgataagaaaaccaatgaacaatacttatcaatcggtgctaaaaaatcaggtaataaaacagagcgcgatgaagataggcgtgttagtgacaatcttcataaaatggaaaaagttaagttccctaaaggtatgccagctaagtatttcttagctaatgagtcagcagaagatataaaaatgcgtaaaaaaatattccctaagcttaaaagctgggaacaacaacatattgacttatctgaagatccaaaagacgtttctgttgagacactagatgctagccacttgatttatcatacgcaatataaacatatggcgaaggctattgacgagtggattcaatcgcataaaaaa

SEQ ID NO: 19394 - protein, 339 aa, Streptococcus agalactiae; identical to SEQ ID NO: 10152

SEQ ID NO: 19395 - DNA, 1059 bp, Streptococcus agalactiae
atgaataaaataacgacattatcaaccatcgccctgactttaatgctttgcgttggatgttctgccaataaagataatcaaaaaactaaaactgaggatcctaagcaagaaaacgtaactgcaaatccgaaggaagacaaggcaacagcagccaagcgaatgaagttaacgaaagaacttgaaaaatataataaaggcacagagagctttattagtaacaaacaatatcaaaaatatatcaaaacacctatcaaagaatatggtcaaaaggttgaagtcaaaggcaagaagatgaatgtctatactgttggagaaggtaaagtaccaattgtctttattcctggtcaagggacggtgactgccaaacatcagtaccataatttgattagtaatttaagtaaaactcataaggttgtggtagttgagccatttggttcaggtttaagtgatgtcattgaccaaccacgaaatctagctaatattacctcagatatccacgaagctttacaaaaagttggtattaccggaaaatatgtaattgcctctcattcaattggtggtgtttatgcccttaaatacatcagtacttatccaaaggaagtgctaggattaataggtttagatacatcaacgccgggtatggaaggtggtaagcaagttgatttcgctgctccagtgttaaaagaattacctaaaattcctaaagtatccgacgatattaatgcacaattttttgctattggacataagatacttaataattctaatatgaaagaagaagcgaagaattcttctaatatgattaacgaaagtgccaactataagattccaaagggaattcctgctatgtatttattagcacgtgaaagtgacttagggcttcaattacgtagtttagatataccaattaaaggcagttggcaagagcaacataaggagttatcagaagatccaaaagaagtctctattcatacactagacggaactcaccaaatttatgatactaaccttaaagaagtaattgattatactaaccaatttatgaaaacatttgagaaa

SEQ ID NO: 19396 - protein, 353 aa, Streptococcus agalactiae; identical to SEQ ID NO: 1284

SEQ ID NO: 19397 - DNA, 1227 bp, Streptococcus agalactiae
gtgaacctatggacattaagtttagcttatttgaaacgtcaaaaaatgaaaacagtaaccttgttcttagtttttctaactataggcacatgtttaatcagtctgatgagtattcagcattctttggaaaaaaatatcctaacaaaacaagggaaaagcatttatttaacctccaaagaaaaggcttattggcctgaacaagcatacgaagctttgaaaaaagcaaaaatggttgagtcagtagaggcaagtttaagcattgatgttggtagccgtttaaaatctgtatcaccatataactcttctaaagaagagaatcaagttacattagcaggttatcaaagtacagaagatttacgagcttttcagacaaaagcattggtcttaaagaaaggaagccatttagcggccgataatacaaaacaagtactagtttcattgaaattagcacaaaagaatcatttaagtgtgggtaacaaattgagattaggcaaagaaaatgttactattgcaggaatttatgatgcgaatagtgctaagtctaaaaatacttttaatcccaatattgataatacattgattgctcaggcaacattggttaggaagattagtaaacaaaaaggttatcagacggttgcagtgcgcttaagtgataaacgtttagtggatacagttatccaaaacatcaaacaatggccgcttgatttcgggaaattagatgttcaaacagctaaagagttttatggagattcttatcgtaatatcaagacattgcatcgtctagtgggacgaatcattcttattgttagtctcgtggcgatggcaatattagttgtcatgctaacattttggattaataaccgcattaaagagacgggaattttactcgctatcggaaaaactaagtttgaaatcataggtcattatctgatagaagtactgttagtagcaggtgctgccttcacactatctattattggtggtgtctttcttggaaaaacatttgcagctggccttttatcacaagttaatggtggtgtgagttcacaaattgtacaaaatagtagtctaattattgatagaattgataacctcgctgtttctgttggagtaatggatgtctttagactctatgctcagggtgctttaatttgcttatttgcagttgtattatctagttattctattcttaaactacaaccaaagcaaatattgtcacgaatgtca

SEQ ID NO: 19398 - protein, 409 aa, Streptococcus agalactiae
MNLWTLSLAYLKRQKMKTVTLFLVFLTIGTCLISLMSIQHSLEKNILTKQGKSIYLTSKEKAYWPEQAYEALKKAKMVESVEASLSIDVGSRLKSVSPYNSSKEENQVTLAGYQSTEDLRAFQTKALVLKKGSHLAADNTKQVLVSLKLAQKNHLSVGNKLRLGKENVTIAGIYDANSAKSKNTFNPNIDNTLIAQATLVRKISKQKGYQTVAVRLSDKRLVDTVIQNIKQWPLDFGKLDVQTAKEFYGDSYRNIKTLHRLVGRIILIVSLVAMAILVVMLTFWINNRIKETGILLAIGKTKFEIIGHYLIEVLLVAGAAFTLSIIGGVFLGKTFAAGLLSQVNGGVSSQIVQNSSLIIDRIDNLAVSVGVMDVFRLYAQGALICLFAVVLSSYSILKLQPKQILSRMS

SEQ ID NO: 19399 - DNA, 504 bp, Streptococcus agalactiae
ttgatggcttatgctggactaacctcggaaaaaatggttacacgaccaaatgataaagaacaatataaagaacaagttttacaagttcatggtaatagttactccgatacagatcctaaatacacagcggggatgatttctcttaagggagggcgacatatcacgccgaaagatcagcgagttataattgttcatcaggcttttgcgaagacaaatcatcttaaagttggcgataagttaatgttttcaaaagaccccgttagaaacagtaaggataaaacattagttgaagcaactattgttggcatatataaaggtaaaacggtacaaaaatcaaattacccttatgagatgctagaaaatacagccttttcagatacgcaattgattaaggatttatacggctattctaaaggtaaggccttttatcgccaaacaactgtatatcctaaaaagaatgctgatatagaaactcttaaaagttttatcaaaaaacaatcctat

SEQ ID NO: 19400 - protein, 168 aa, Streptococcus agalactiae
MMAYAGLTSEKMVTRPNDKEQYKEQVLQVHGNSYSDTDPKYTAGMISLKGGRHITPKDQRVIIVHQAFAKTNHLKVGDKLMFSKDPVRNSKDKTLVEATIVGIYKGKTVQKSNYPYEMLENTAFSDTQLIKDLYGYSKGKAFYRQTTVYPKKNADIETLKSFIKKQSY

SEQ ID NO: 19401 - protein, 192 aa, Streptococcus agalactiae; identical to SEQ ID NO: 10161

SEQ ID NO: 19402 - protein, 64 aa, Streptococcus agalactiae; identical to SEQ ID NO: 1292

SEQ ID NO: 19403 - protein, 192 aa, Streptococcus agalactiae; identical to SEQ ID NO: 10163

SEQ ID NO: 19404 - protein, 64 aa, Streptococcus agalactiae; identical to SEQ ID NO: 10164

SEQ ID NO: 19405 - protein, 669 aa, Streptococcus agalactiae
ATGTTCGAATTAAAAAATATTGCTTATCGTTATAAGGGGAACGACAATAAAACATTAGAAAATATCAATTATAGTTTTCAGTCAGGGGTATTTTATACTATATTAGGGAATTCTGATTCAGGTAAAACAACCCTTCTATCCTTGATGGCAGGTCTTGATTCGCCCACTGAGGGACAAGTATTATTTAACAAAAAAGATATTAAAGAAGCAGGTTATGCTCAGCATCGCAAAAAGAATATAGCTTTGGTCTTTCAAAATTATAACCTTTTAGACTATCTAACCCCATTGGAAAATGTTCAGTTGGTAAAACCTACTGCAGATAAACAATTATTGTTGGATTTAGGTTTAAAAGAAGATATATTAACGCGAAATATCTTGAGATTATCAGGAGGGCAACAACAACGTGTAGCTATTGCGAGGGCTTTGGTTGCAGGAACACCAGCTATTTTACTTGATGAACCTACGAGGAATTTAGATTTTGACATTGCACGTGATATTACGATGCGTCTTAAAGATTTTGCGCATAAGGAAAAACGATGTGTTATTATGGTGACACATAGTAGAGAAATCGCTCATATGGCTGATACTGCTTTACAATTGACAGGAGATAACTTAAAAGAATTATCAAAAGAAAGTATAGCACAGTCTATATTACAACAAAGGAATTTA

SEQ ID NO: 19406 - protein, 223 aa, Streptococcus agalactiae
MFELKNIAYRYKGNDNKTLENINYSFQSGVFYTILGNSDSGKTTLLSLMAGLDSPTEGQVLFNKKDIKEAGYAQHRKKNIALVFQNYNLLDYLTPLENVQLVKPTADKQLLLDLGLKEDILTRNILRLSGGQQQRVAIARALVAGTPAILLDEPTRNLDFDIARDITMRLKDFAHKEKRCVIMVTHSREIAHMADTALQLTGDNLKELSKESIAQSILQQRNL

SEQ ID NO: 19407 - protein, 1229 aa, Streptococcus agalactiae
ATGTCTGACTTCATGGATTGTTAGAAGAAAATTACTATGACACAAATCTAACCTATGTATCAAGGACACTTTACGGACAATACCTTTCAGAAAGAACTAAATTACTTTTAGATAAACTCCCTGTCACGGTTATTAAAACAAGAGTGGATAAACTAAACTATTTATCAGATAAGCAACAATGGCAAGTCTATATTCAAGATAAGCTTTTTCCTGTCACATTTGATGAATTACATTTAGCTTGTGGTGCTCTGCCTGTTATAGACCCTTATCATTTGGAAGGGAAGACTGATTATATCAAAGACCCTTATCCTATCAAACACTTGGCTCAGGAAAATTGGAAGGGAAAAACAGTTGCTATCATCGGGACTGGTCTAGCTGCAATTGATGTTATAAAATGGTTGCTACTCAATACACAATCTTCTGTTAAAGCATTTTCAAGAACCAACTACTTCCCTAGCGTCCGTATTGTTAATGATTTACCACTTACTTGGCACTTTTTTACCAATGATAACCTTAAAGCATTTCTATCACATCCTTCAAAAACCTTCACTATTGCCGATTTTAATGATTTGATGTCTGGTGAATTGGAGCATCTTGGCTTTAAAAACTGGAAAAATACAACAGAAACCTTTTTATCCCCAGGAATTGATGGTCTCAAGCGAGCCTTTAAGTACCCTAAGCAACTCTATCTATTACAACAACTAGCTTCACGAATCACTGTCTGGTTAACTGACCTTTGGCCACTCATGTCATTATCAGATAAGAAAGAGTATAAAGCACTATATGGAAAAGCGATTATTAACTTGCGAAATCCTATGCCTGATGAATCTGCTAAAGTAATTTTGAAAGCTGCACAAAAAGGGACTTTTTCCCTGATCAATAACGTCAAGACAATTGCAAAAAATGACGAAGGATTTTCAATAGAAAAAGAAAAACAAAATCATATATCTGTCGATCGCGTCATTAATGCTACTGGTTACCAGTTAAATACTAAAAACTGGACAAAAGCCAATCCACTCCTAAAATCGCTCATCAATCAAGAATTTTGTCAAATTGACGATCAAGGAGGGATTACTATTTTAACTGAAAATGCACAAGTTTTGTCTCCAAAATATGGTCCAATGCCAGGTTTATATGCGCATGGTGCACTGGTTAATGGTGTCGTTTATCAGAATAACTCTACAATTAAAATTCAACAAATGGCAGAGCGAGCCTTTTCTGATAATAAA

SEQ ID NO: 19408 - protein, 410 aa, Streptococcus agalactiae
  VARIANT 7: Xaa = Any Amino Acid
MSDFMDXLEENYYDTNLTYVSRTLYGQYLSERTKLLLDKLPVTVIKTRVDKLNYLSDKQQWQVYIQDKLFPVTFDELHLACGALPVIDPYHLEGKTDYIKDPYPIKHLAQENWKGKTVAIIGTGLAAIDVIKWLLLNTQSSVKAFSRTNYFPSVRIVNDLPLTWHFFTNDNLKAFLSHPSKTFTIADFNDLMSGELEHLGFKNWKNTTETFLSPGIDGLKRAFKYPKQLYLLQQLASRITVWLTDLWPLMSLSDKKEYKALYGKAIINLRNPMPDESAKVILKAAQKGTFSLINNVKTIAKNDEGFSIEKEKQNHISVDRVINATGYQLNTKNWTKANPLLKSLINQEFCQIDDQGGITILTENAQVLSPKYGPMPGLYAHGALVNGVVYQNNSTIKIQQMAERAFSDNK

SEQ ID NO: 19409 - protein, 324 aa, Streptococcus agalactiae
TTGCAACTTGATTTATACCTCCTGAAGATTGCTACGTCAAGTATCGCTTTTGGACCCAAACAATCTGGTGCTGTTATCTATATTTTTTATATGTTTAATGACTTTGCTAAGTATCCTGTCGCAATATATAATAATCTATTGCGTTGGATCATTAGTTTTGTCATTCCATTTGCTTTTACAGCTTATTATCCCGCTGCTTACTTCTTACAAGATAGAAATGTCTATTTTAATATTGGTGGGGTTATCTTGATTTCCTTGATTTCTTTTATGGTATCACTAATACTTTGGCATAAAGGAGTAGAAGTATATGAGAGTGCGGGTTCT

SEQ ID NO: 19410 - protein, 108 aa, Streptococcus agalactiae
MQLDLYLLKIATSSIAFGPKQSGAVIYIFYMFNDFAKYPVAIYNNLLRWIISFVIPFAFTAYYPAAYFLQDRNVYFNIGGVILISLISFMVSLILWHKGVEVYESAGS

SEQ ID NO: 19411 - protein, 90 aa, Streptococcus agalactiae
TTGATTAAATTACTCTTGATGAACACTGCACAGCCAATTATCTATAAACAATCAGAAAGATGGCTAAACACCTTAGCTTTNNNNNTTAAT

SEQ ID NO: 19412 - protein, 30 aa, Streptococcus agalactiae
  VARIANT 27, 28, 29: Xaa = Any Amino Acid
MIKLLLMNTAQPIIYKQSERWLNTLAXXXN

SEQ ID NO: 19413 - protein, 471 aa, Streptococcus agalactiae; identical to SEQ ID NO: 10173

SEQ ID NO: 19414 - protein, 157 aa, Streptococcus agalactiae; identical to SEQ ID NO: 10174

SEQ ID NO: 19415 - protein, 315 aa, Streptococcus agalactiae
ATGTTTTTAATCGATTTTATTTTACATATTGATACTCATATCTATGCTATGGCTAACACTGTTGGTAATTGGACCTATCTATTGCTCTTCCTCGTTATTTTCGTTGAAACTGGGGCTGTCATCTTTCCATTTTTACCAGGTGATAGTTTATTATTTGCTGCTGGAGCCCTTGCTGCAAATCCAAAAATGTCCTTCAATATTGTAACTTTCCTTATTATTTTCTTTATTGCAGCATTTATTGGTGATAGTTGCAATTTCTTGATTGGTCGTACATTTGGTTACCGTTTTATCAAACATCCTTTCTTTCGTCGGACA

SEQ ID NO: 19416 - protein, 105 aa, Streptococcus agalactiae
MFLIDFILHIDTHIYAMANTVGNWTYLLLFLVIFVETGAVIFPFLPGDSLLFAAGALAANPKMSFNIVTFLIIFFIAAFIGDSCNFLIGRTFGYRFIKHPFFRRT

SEQ ID NO: 19417 - protein, 385 aa, Streptococcus agalactiae
ATGTCCTATTTAACCTTTAAACACGTTGATTTTAAAACGGATGATAAGTTGGTTAAATGATATCAACTTTGCAATTGATGAAGGTGATTTTGTTTCTATTGTAGGACCATCTGGAAGTGGTAAGAGTACTGTTTTAAAATTGGCCAGTGGTTTAATGAGTCCTACTGCAGGTCATATTTTCTTTGATGGAAAAGATTTGAACCAATTAGAACCGATTGAAAGTCGAAAAATGATTTCTTACTGTTTTCAAACGCCACATTTATTTGGTAATACAGTGGGAGACAATATTAGTTTTTCTTTACACATTCGACACGAAAAAGTAGATTATAGACGCGTTGATGATTTATTTTCACGCTTTGAAATGGACCAGTNNNNNTTAATTAAT

SEQ ID NO: 19418 - protein, 129 aa, Streptococcus agalactiae
  VARIANT 18, 125, 126: Xaa = Any Amino Acid
MSYLTFKHVDFKTDDKLXLNDINFAIDEGDFVSIVGPSGSGKSTVLKLASGLMSPTAGHIFFDGKDLNQLEPIESRKMISYCFQTPHLFGNTVGDNISFSLHIRHEKVDYRRVDDLFSRFEMDQXXLIN

SEQ ID NO: 19419 - protein, 378 aa, Streptococcus agalactiae
GTGGAAGACAATATTAGTTTTCCTTACCACATTCGACACGAAAAAGTAGATTATAGACGCGTTGATGATTTATTTCAACGTTTTGAAATGGACCAGTCTTACCTGAAACAGGATGTCAAAAAACTATCAGGAGGAGAAAAGCAACGTATTGCTCTGATTAGGCAATTATTGTTTGAACCTAAAGTTTTACTCTTAGATGAAGTTACTTCGGCTTTAGACAATCATAATAAAGCTATTGTTGAAAAGGTTATTAAATCATTACATGACAAAGGAATAACGATTTTGTGGATTACGCATGATGAGGAGCAGAGTCGTCGATTTGCCAATAAAGTCTTAAAAGTTGTCAATGGTAGTATTGAAGCAATGGAGGTTATAAAA

SEQ ID NO: 19420 - protein, 126 aa, Streptococcus agalactiae
MEDNISFPYHIRHEKVDYRRVDDLFQRFEMDQSYLKQDVKKLSGGEKQRIALIRQLLFEPKVLLLDEVTSALDNHNKAIVEKVIKSLHDKGITILWITHDEEQSRRFANKVLKVVNGSIEAMEVIK

SEQ ID NO: 19421 - protein, 771 aa, Streptococcus agalactiae; identical to SEQ ID NO: 5747

SEQ ID NO: 19422 - protein, 257 aa, Streptococcus agalactiae; identical to SEQ ID NO: 1306

SEQ ID NO: 19423 - protein, 816 aa, Streptococcus agalactiae; identical to SEQ ID NO: 5749

SEQ ID NO: 19424 - protein, 272 aa, Streptococcus agalactiae; identical to SEQ ID NO: 5750

SEQ ID NO: 19425 - protein, 651 aa, Streptococcus agalactiae
ATGGTTACGGAAATCCAGCAATTAAATCAAGAAAAAAAGGAAGGTATCCGTGTAGGGCTTACTTCTCTTTTTGCTATTCAATTTATGAAACAGATTTCAACTTTTATGGCTACACATTCAAATGTTGAAGTATCTTTGATTCAAGATGGTTCCCGTAAATTACAAGAATTGTTAGCAAAAGGAAAGATCGATATTGGCTTATTGTCCTTTCCAAGTACCCGCAATGATATCACTATCGAACCACTGCAAACCTCAACTAAAGGATATAAAGTAAGCATTGTCATGCCAAAATCGCATCCTCTTGCAACACTTCCTGAAATTGAACTTAATGATTTAAGAGATTACAAAGTTGCCTCACTCAACGAACATTACATGCTAGGAGAGATGTTGCCTCGTAAATGTCGTGCTTTAGGATTTGACCCCCATATCGTCTTTAAACACAATGACTGGGAAGTTCTTATTCATAGTTTACAAGACCTCAATGCAGTCACTATTTTACCAAGTGAATTTGAAAGCATTAGCCAAGTTCAAGATTTATGCTGGGTCCCACTTAAGGATAAAAATAATTTTTATCCGATTGGTATTGCTTACCGAAATGATACTTCTTTTAGTCCTATGATTGAAGAATTTTTAAGTCTTTTAAAGACCAAT

SEQ ID NO: 19426 - protein, 217 aa, Streptococcus agalactiae
MVTEIQQLNQEKKEGIRVGLTSLFAIQFMKQISTFMATHSNVEVSLIQDGSRKLQELLAKGKIDIGLLSFPSTRNDITIEPLQTSTKGYKVSIVMPKSHPLATLPEIELNDLRDYKVASLNEHYMLGEMLPRKCRALGFDPHIVFKHNDWEVLIHSLQDLNAVTILPSEFESISQVQDLCWVPLKDKNNFYPIGIAYRNDTSFSPMIEEFLSLLKTN

SEQ ID NO: 19427 - protein, 210 aa, Streptococcus agalactiae
ATGGATATTAGACAACTTACTTACTTTATTGCTGTTGCAGAAGCAAAAAATTATTCACACGCTGCAAAAAGTCTTTTTGTGACCCAACCTACACTTTCACAATCCATTAAAAAATTAGAAGCAGAATTAAATACTATTTTATTCTTACAAAATGGTCGTCAACTCGCTTTAACTGAAGCAGGAGAAATTCTCTATGAGAAAGGACTTGTA

SEQ ID NO: 19428 - protein, 71 aa, Streptococcus agalactiae
  VARIANT 71: Xaa = Any Amino Acid
MDIRQLTYFIAVAEAKNYSHAAKSLFVTQPTLSQSIKKLEAELNTILFLQNGRQLALTEAGEILYEKGHCX

SEQ ID NO: 19429 - protein, 510 aa, Streptococcus agalactiae; identical to SEQ ID NO: 10185

SEQ ID NO: 19430 - protein, 170 aa, Streptococcus agalactiae; identical to SEQ ID NO: 10186

SEQ ID NO: 19431 - protein, 1056 aa, Streptococcus agalactiae; identical to SEQ ID NO: 10187

SEQ ID NO: 19432 - protein, 352 aa, Streptococcus agalactiae; identical to SEQ ID NO: 5756

SEQ ID NO: 19433 - protein, 990 aa, Streptococcus agalactiae; identical to SEQ ID NO: 10189

SEQ ID NO: 19434 - protein, 330 aa, Streptococcus agalactiae; identical to SEQ ID NO: 5758

SEQ ID NO: 19435 - protein, 1548 aa, Streptococcus agalactiae
ATGGAGAAAACAATGGATATGGAACAACGTGAAGAAGTTGTATCTTATAACCGAGCGAAAGTATGGCAGTTAGTTATGTTTGCCATGAACAATGCTTCTACAAATATATACTTATTTACGTTTATGTTTGTTACCTATTTCTCAACTGGCGTTCTTGGCTTGGCAGCCATTTTTGTCAGTCAAATTATGGGTTATATCCGTATTTTTGATGGTTTTATTGATCCAGCTATTGGTATTATGATTGATAAAACTGATACAAAATTTGGTAAGTATCGTCCTATTTTGATTATTGGGAACGTTATTACGGCTTTGTCATTGATTTTTCTTCTTGCATTGAGAGGTGTCGATGAAAATATTCGTTTCCCATTATTTATCCTTGTTCTAATTATCCATAAAATTGGATACTCAATGCAACAGACAATAACTAAAGCAGGGCAAACAGCACTGACAAATGACCCTAAGCAACGTCCTATTTTTAATATCGTTGATGCAGTTATGACAACATCATTAATGACAGGCGGTCAGTTTGTCGTTTCAGGTTTCTTAGTACCAAAATTTGGTAATTTTACACCTCAATTCTTCAATGTCCTTATTTTTGGAACAATTCTTATTTCAGCTATTTTAGCAATCGTTGCAATTATTGGGATTTGGGCAAAAGACAGAAAAGAATTCTTTGGTTTAGGAGAAAATACCCAAAAGACTGCTCTAAAAGATTACTGGAAGGTGTTGAAAGGAAATAAACCGCTTCAGATATTATCCATTGCTGCAGCTTTGGTAAAATTTGCCATCCAATTCTTTGGCGATTCCGTTGTTATGGTTCTATTGTTTGGTATTTTATTTGGTAATTATGCTTTATCAGGACAATTCTCACTTCTTTTCATTGTTCCTGGTGTTATTATTAATATTTTGTTCTCAACAATTGCTCGTAAAAAAGGTCTTCGTTTTTCATATGTCAGAGCAATTCAGATCGGTATGATTGGTTTACTTGCTTTTGGTGCAGTTCTTTACGTTGGTAAGCCTGGTGACCTTAGTTTAACAAGCCTAAATCTTTATACTATTTTATTTATCGTTACTAATATTATTGCGAGATACGCTTCACAAGCACCTGCTAGTTTAGTATTGACTATGGGAGCAGATATTTCTGACTATGAAACTTCTGAATCCGGTCGTTATGTATCAGGAATGATTGGAACTATCTTCTCCTTAACAGATTCGATTGCTTCTTCATTTGCTCCTATGGTAGTAGGTTTTGTGTTAGCAGGAATTGGATTTTCAAAATCGTTTCCAACTATCGAAACACCACTGACCCCTGATTTAAAAATGGCAGCTATTAGTCTCCTTGTGGCCATTCCATTTATAGCTTTGTCTATAGCCCTTCTTTTAATAAAATTTTACAAACTAGATAAAGAAGAAATGGTTCGTATTCAAGAGAAGATTCAAGTTATGAAAGCAGCAACTACTAAGGAACGTGCTAAAGATATTGCTCGTAATGTTCCTTTGACAGATATGGATTATGTTGATGTAACAAAATATCCTATTGATAAAGAT

SEQ ID NO: 19436 - protein, 516 aa, Streptococcus agalactiae
MEKTMDMEQREEVVSYNRAKVWQLVMFAMNNASTNIYLFTFMFVTYFSTGVLGLAAIFVSQIMGYIRIFDGFIDPAIGIMIDKTDTKFGKYRPILIIGNVITALSLIFLLALRGVDENIRFPLFILVLIIHKIGYSMQQTITKAGQTALTNDPKQRPIFNIVDAVMTTSLMTGGQFVVSGFLVPKFGNFTPQFFNVLIFGTILISAILAIVAIIGIWAKDRKEFFGLGENTQKTALKDYWKVLKGNKPLQILSIAAALVKFAIQFFGDSVVMVLLFGILFGNYALSGQFSLLFIVPGVIINILFSTIARKKGLRFSYVRAIQIGMIGLLAFGAVLYVGKPGDLSLTSLNLYTILFIVTNIIARYASQAPASLVLTMGADISDYETSESGRYVSGMIGTIFSLTDSIASSFAPMVVGFVLAGIGFSKSFPTIETPLTPDLKMAAISLLVAIPFIALSIALLLIKFYKLDKEEMVRIQEKIQVMKAATTKERAKDIARNVPLTDMDYVDVTKYPIDKD

SEQ ID NO: 19437 - protein, 1023 aa, Streptococcus agalactiae
ATGGCAAAAATTATTTCATTAGGTGAGGTTCTTTTGCGATTATCTCCACCTCAATATCACACACTGATGCAGGCTAATCACCTAAAATGCCAATTCGGCGGTTCAGAACTTAATGTCTTAGCAAGCCTTGCTCAACTAGGTCACCATGTAGGATTGGTCTCAGCTTTGCCTGATAATGATTTGGGCAAGATGGCAAGACAATTTATATTGTCACAGCAAATTAGTCCAGCTGCTATAATTAAAAAAGAAGGACGACTAGGAATTTATTATTATGAACAAGGATTTTCGGTAAGAACAAATAAGGTTATCTACGATCGTAACTATTCATCTTTTTGGGAAAGTACCTTGAGTGATTATGATTTTACTTCTATTTTTAAGGGAGTGGATTGGTTTCATGTTTCTGGAATTACTCCAGCACTAACCAAGGACTTATATGAGGTGACTCGGTTCCTTATGACAAAAGCTAAAGAAGGAGGTGTAAAAGTATCGATTGATCTCAATTTTCGTGAGAGTTTATGGTCATCTTTTCAAGAGGCGCGTGAGCAATTATCGCCACTATTAGGATTATCAGATGTTTGCTTTGGCTTAGAGCCGATTTATTTAGCTGGCGAAAGTGAAGATTTAAAAGATGAGTTGGGCTTATCCAGACCTTACCTTGATATTGAATTACTTGAAAAGATAACTCAAAAGATTGTTCAAGAATATGGGTTAGACTATATTGCCTTTACTCAAAGGGAAATGGGATATACTAATCAGTATATGTTAAAATCATATTTGTATCATAATAATATGTTATATCAAACTGATAAAACTGGCGTTGAAGTATTAGATCGTGTGGGGACGGGAGATGCCTTTGCTGCAGGTTTAATTCATGCGCTTCTGGAAAAAGAAACTCCTCAAAGGGCCTTAGAAATTGCTATGACTACATTTAAATACAAACATACCATTCAAGGAGATATCAATATCATGACACGAGATGATATTGCTTACCTCATTGAAAAAGAAACAAATGATATTAAACGA

SEQ ID NO: 19438 - protein, 341 aa, Streptococcus agalactiae; identical to SEQ ID NO: 5764

SEQ ID NO: 19439 - protein, 1796 aa, Streptococcus agalactiae
ATGTTATATCCATTATTGACAAAACAAGAAATACTTATGATTTAGGCGGTATTTGGAACTTTAAATTAGGAGAACATAATCCAAATGAATTACTACCTTCAGATGAAGTCATGGTTATCCCGACTTCATTTAATGATTTGATGGTAAGTAAAGAAAAACGTGATTATATAGGTGATTTTTGGTATGAAAAAGTCATTGAAGTACCTAAAGTATCAGAGGGTGAAGAGATGGTGCTACGTTTTGGCTCAGTGACACATCAAGCTAAAATTTATGTTGACGGTATATTGGTAGGGGAGCATAAGGGAGGTTTTACTCCTTTTGAAGTTCTTGTTCCTGAATGTAAGTACAATAATGAGAAAATTAAGGTATCAATTTGTGCTAATAACGTTTTAGACTATACCACGCTTCCGGTCGGAAATTATAGTGAAATCATTCAAGAAGATGGTAGCATTAAGAAGAAAGTACGTGAGAATTTTGATTTCTTCAATTATGCAGGTGTGCATCGTCCTCTTAAGTTGATGATACGTCCTAAAAATCATATTTCTGATATTACAATTACAAGTCGTCTATCAGATGATTTACAGTCAGCAGATTTACATTTTTTAGTTGAGACTAATCAAAAGGTTGACGAAGTTAGAATTAGCGTTTTTGATGAAGATAACAAACTAGTGGGTGAAACGAAGGATAGCAGATTATTTCTTAGTGATGTCCATCTTTGGGAAGTTTTAAATGCCTATCTGTACACAGCGCGTGTTGAAATTTTTGTTGATAATCAACTCCAAGATGTCTATGAGGAAAATTTTGGTCTTAGAGAAATAGAAGTGACAAATGGTCAATTCCTATTGAATCGCAAACCTATTTATTTTAAAGGATTTGGTAAACATGAAGATACGTTCATTAATGGCAGAGGTTTGAATGAAGCTGCTAACTTAATGGATTTGAACCTTTTGAAGGATACAGGGGCAAACTCTTTTAGAACATCCCATTATCCTTATTCTGAAGAAATGATGCGTTTAGCAGATCGAATGGGAGTGTTAGTGATAGATGAGGTTCCAGCAGTAGGGTTATTTCAAAACTTTAACGCTTCCTTAGATTTGTCACCAAAAGACAATGGTACGTGGAGTTTGATGCAAACAAAAGCTGCGCATGAACAAGCTATCCAAGAATTAGTGAAGCGTGATAAAAATCATCCTAGCGTCGTGATGTGGGTAGTCGCTAACGAACCGGCTAGTCATGAAGCGGGAGCACACGATTATTTTGAGCCGTTAGTAAAACTTTATAAAGATTTAGACCCTCAAAAACGTCCTGTCACCTTGGTTAATATTTTAATGGCAACCCCAGATAGAGACCAAGTGATGGACCTGGTTGATGTTGTCTGCCTTAATCGTTACTATGGTTGGTACGTTGACCACGGTGATTTAACAAATGCAGAAGTAGGTCTAAGAAAAGAGTTATTAGAATGGCAAGATAAATTTCCTGACAAACCAATTATCATAACGGAGTATGGCGCTGATACGTTGCCGGGATTACACTCTACTTGGAATATTCCATATACAGAAGAATTTCAATGTGATTTTTATGAAATGAGTCATCGTGTTTTTGATGGTATTCCTAATTTAGTTGGTGAGCAAGTCTGGAACTTTGCAGACTTTGAAACTAATCTGATGATACTTCGTGTACAGGGGAATCACAAAGGTCTCTTTTCAAGGAATCGTCAGCCGAAACAAGTCGTCAAAGAATTTAAAAAACGCTGGATGACTATTCCTCATTACCATAATAAAAAAAATAGTGTAAAA

SEQ ID NO: 19440 - protein, 599 aa, Streptococcus agalactiae
  VARIANT 9: Xaa = Any Amino Acid
MLYPLLTKXRNTYDLGGIWNFKLGEHNPNELLPSDEVMVIPTSFNDLMVSKEKRDYIGDFWYEKVIEVPKVSEGEEMVLRFGSVTHQAKIYVDGILVGEHKGGFTPFEVLVPECKYNNEKIKVSICANNVLDYTTLPVGNYSEIIQEDGSIKKKVRENFDFFNYAGVHRPLKLMIRPKNHISDITITSRLSDDLQSADLHFLVETNQKVDEVRISVFDEDNKLVGETKDSRLFLSDVHLWEVLNAYLYTARVEIFVDNQLQDVYEENFGLREIEVTNGQFLLNRKPIYFKGFGKHEDTFINGRGLNEAANLMDLNLLKDTGANSFRTSHYPYSEEMMRLADRMGVLVIDEVPAVGLFQNFNASLDLSPKDNGTWSLMQTKAAHEQAIQELVKRDKNHPSVVMWVVANEPASHEAGAHDYFEPLVKLYKDLDPQKRPVTLVNILMATPDRDQVMDLVDVVCLNRYYGWYVDHGDLTNAEVGLRKELLEWQDKFPDKPIIITEYGADTLPGLHSTWNIPYTEEFQCDFYEMSHRVFDGIPNLVGEQVWNFADFETNLMILRVQGNHKGLFSRNRQPKQVVKEFKKRWMTIPHYHNKKNSVK

SEQ ID NO: 19441 - protein, 669 aa, Streptococcus agalactiae
ATGGCTAGACCCTTAGTAGAACAAACAGCAGATCGTCTATTGCATTTAATTTTAGAAAGAGAATACCCTGTTGGTGCTAAGCTCCCCAATGAATATGAATTAGCAGAAGATCTAGATGTTGGTCGCAGCACAATCCGAGAAGCAGTCAGAAGTTTAGCAACGCGTAATATTTTAGAAGTCAGACAGGGCTCTGGAACATATATTAGTTCTAAAAAGGGTGTTTCTGAGGATCCATTAGGGTTCTCTCTAATAAAGGACACAGATAGGTTGACATCAGATCTCTTTGAACTACGCCTTTTATTGGAACCTCGAATAGCGGAGCTGGTAGCTTATAGAATTACAGATGATCAGTTACAATTACTCGAAAAGCTTGTTGGAGATATTGAAGATGCTGTTCACGCAGGCGATCCGAAACATTTACTTTTAGACGTGGAATTTCATTCCATGCTAGCTAAATACAGTGGTAATATTGCAATGGATAGTCTTTTGCCAGTCATCAACCAGTCAATTCATCTGATAAATGCGAATTATACAAATCGTCAGATGAAGTCGGATAGTTTAGAAGCACATAGAGAAATTATCAAAGCAATCCGAGAAAAAAATCCAGTAGCTGCACATGATGCTATGCTTATGCATATCATGAGTGTTAGACGTTCAGCATTGAAAGCT

SEQ ID NO: 19442 - protein, 223 aa, Streptococcus agalactiae; identical to SEQ ID NO: 1324

SEQ ID NO: 19443 - protein, 615 aa, Streptococcus agalactiae
ATGTTAAATCAATTGAAAAACAACTATTTCTTCGCTGTTATTCGAGGAAAATCATCTGAGGATGCGCTCGAAATCGCAAAGCATGCTATTTTGGGTGGTATTCGAAATATTGAAGTAACTTTTTCGACTCCTGAAGCAAGCAAAGTCATCAAACAATTATCAGATGATTTTAAAAATAATAAAGAAATTATTGTGGGGGCCGGAACGGTTATGACAACTGAACTTGCTAAAGAGGCTATTGATGCTGGAGCTAAATTTTTGGTTAGCCCACACTTTGATTCAGATATTGCTAATTTAGCTAATGAAAACAAGGTTTATTATTTCCCAGGCTGTGCAACGGCAACAGAAATCGTGGTAGCTAGAAAGTATAAATGTCAGATTATAAAGCTTTTTCCAGGTGGAGTTGTGGGTCCAGGTTTTATCAAAGATATTCATGGTCCTATTCCAGATGTTGATTTAATGCCATCAGGTGGCGTCTCTGTTTCAAATGTAGCTGAATGGAGAAAAGCAGGAGCAGTTGCGGTTGGTGTTGGCTCAGCATTATCTAGTAAAGTCGCCACAGAAGGTTATGATAGTGTTACTAAAATAGCTAAACAGTTTGTTTCTGCACTTAAT

SEQ ID NO: 19444 - protein, 205 aa, Streptococcus agalactiae
MLNQLKNNYFFAVIRGKSSEDALEIAKHAILGGIRNIEVTFSTPEASKVIKQLSDDFKNNKEIIVGAGTVMTTELAKEAIDAGAKFLVSPHFDSDIANLANENKVYYFPGCATATEIVVARKYKCQIIKLFPGGVVGPGFIKDIHGPIPDVDLMPSGGVSVSNVAEWRKAGAVAVGVGSALSSKVATEGYDSVTKIAKQFVSALN

SEQ ID NO: 19445 - protein, 1398 aa, Streptococcus agalactiae
ATGACGTTTAATACTGAAACATTTATGTTAAAAAATCAAGCAGCTTTACAGCTGTATGAAGAGGTCAAGAGACAACCTATTTTTGATTATCATTGCCACTTAGATCCAAAGGACATTTTTGAAGATCGTATTTTTGATAATATTGTGGATTTGTGGCTTGGTGGTGACCACTATAAATGGCGTCTTATGAGGGCTAATGGTATTTCTGAAGCAGAAATTACAGGTCCAGCATCCAACCTTGAGAAATTTAAAGCATTTGCTAGAACACTAGAAAGAGCATATGGTAATCCTGTTTACCATTGGTCTGCTATGGAATTGAAAAATGTCTTTGGTGTTAATGAGATTTTGACAGAATCAAATGCTGAGGAAATTTATCATCGTTTAAATCATTTCTTGAAAGAGCATAAAATAAATCCTAGACGTTTAATTGCAGATAGCAAAGTTATGTTTATTGGTACTACAGACCATCCTCTTGATACTCTCGAGTGGCATAAAAAGTTGGCTGCTGATGAGAGTTTTAAAACAGTTGTTGCTCCGACATTTAGGCCAGATGAAGCTTTTATTGAACATCGACATTTTGTTGATTTTATAACTAAACTGGGTGACATTACTCAAAAAGAGATTACAGATTTTTCAACATTTATAGCAGCAATGGAAGAACGCATTGCGTATTTTGCTCAAAATGGTTGTAGGGCTAGCGATATCAGTTTTACGGAAATCGTCTTTGAACAAACTGATGAATTGGAGTTGAACGATTTATTTAATAAAGTTTGTGAAGGCTATATCCCAAATCAATCAGAAATCAGCAAATGGCAAACAGCTGTTTTTATGGAACTTTGCCGATTATATAAAAAATATGGTTTTGTAACACAGGTGCATTTTGGAGCTTTGAGAAATAATCATTCTACTATTTTTGAAAAATTGGGAGCTGACGTGGGTGTGGATTCACTTGGTGACCAAGTGGCTTTAACTGTTAATATGAACAGTTTATTGGATTCCTTAGTTAAAAAAGATAGTCTGCCTAAAATGATTTGGTATAATCTCAATCCAGCTTACAATATAGCAGTAGCTAACACTTTGGCAAATTTTCAAGCTAACGAACTTGGAGTGAGATCTTACCTTCAATTTGGTGCAGGTTGGTGGTTTGCAGATACTAAATTAGGGATGATTAGTCAAATGAATGCCTTAGCAGAGCAAGGCATGTTGGCGAATTTTATTGGTATGTTAACAGATTCTAGAAGTTTTCTATCTTATCAACGTCATGACTATTTTCGACGTATTTTATGTACCTACTTAGGAGAATGGATTGAAGAAGGAGAAGTTCCAGAAGATTATCAAGCTTTAGGAAGTATGGCTAAAGACATTGCTTATCAAAATGCAGTTAATTATTTTAAGAAC

SEQ ID NO: 19446 - protein, 466 aa, Streptococcus agalactiae
MTFNTETFMLKNQAALQLYEEVKRQPIFDYHCHLDPKDIFEDRIFDNIVDLWLGGDHYKWRLMRANGISEAEITGPASNLEKFKAFARTLERAYGNPVYHWSAMELKNVFGVNEILTESNAEEIYHRLNHFLKEHKINPRRLIADSKVMFIGTTDHPLDTLEWHKKLAADESFKTVVAPTFRPDEAFIEHRHFVDFITKLGDITQKEITDFSTFIAAMEERIAYFAQNGCRASDISFTEIVFEQTDELELNDLFNKVCEGYIPNQSEISKWQTAVFMELCRLYKKYGFVTQVHFGALRNNHSTIFEKLGADVGVDSLGDQVALTVNMNSLLDSLVKKDSLPKMIWYNLNPAYNIAVANTLANFQANELGVRSYLQFGAGWWFADTKLGMISQMNALAEQGMLANFIGMLTDSRSFLSYQRHDYFRRILCTYLGEWIEEGEVPEDYQALGSMAKDIAYQNAVNYFKN

SEQ ID NO: 19447 - protein, 1044 aa, Streptococcus agalactiae
ATGGAAATGTCATTTAGGTGGTATGGTGAAGACGACCCCGTTACTTTAGAAAATATTGGTCAAATTCCAACAATGAAAGGGATTGTTACAGCGATATATGATGTACCAGTAGGAGAAGTTTGGTCACGTGAGCGCATTCAACAGCTGAAAGAAAAGGTAGAGGCAGCAGGGCTTAAAATTTCGGTTATCGAATCAGTTCCTGTTCATGAAGATATCAAATTGGGACGTCCAACACGTGACCTCTTGATTGATAATTATATTCAAACCGTCAAAAATTTGGCTGCGGAAGGTATTGATACTATTTGCTATAATTTTATGCCAGTATTTGACTGGACACGCACTGATTTAGCATATCAATATCCAGATGGTTCTACAGCTTTGATATTTGATGAGACGGTTTCTAAAAAAATGGATCCAGTAAACGGTGAATTATCTTTGCCAGGATGGGATGCCAGCTATAGTAAAGAAGAAATGAAGGCTATCATGGATGCCTATGCTGAAATTGATGAGGAAAAACTTTGGGAAAATCTCACTTATTTTATTAAACGTATTATTCCTGAAGCGGAAGCCGTAGGCGTTAAAATGGCCATTCATCCGGATGACCCACCATACTCTATTTTTGGTTTACCTCGCATTATTACTGGGTTAGAGGCTATTGAGCGTTTTGTGAAATTGTACGATAGTAAAAGTAATGGCATCACTTTATGTGTGGGTTCTTACGCTTCTGATCCCCAGAATGATGTTTTAGAGATTTCGCGACGTGCTTTTGAGTTAGAACGTGTAAACTTTGTTCATGCTCGCAATATTAAATTAGGTGATGGAAAGTCATTTAAAGAATCGGCTCATCCATCAGAATACGGGTCAATAGACATGTATGAAGTTATCAAGTTATGCCATGAATTTGGGTTTGAGGGTGCTATTCGACCTGACCACGGGCGTATGATTTGGGGAGAAACAGGTCGTCCAGGATATGGCCTATACGATAGAGCATTAGGAGCCACTTACCTTTCTGGTTTATACGAAGCTGTGATTAAAGGTTCAAAA

SEQ ID NO: 19448 - protein, 348 aa, Streptococcus agalactiae
MEMSFRWYGEDDPVTLENIGQIPTMKGIVTAIYDVPVGEVWSRERIQQLKEKVEAAGLKISVIESVPVHEDIKLGRPTRDLLIDNYIQTVKNLAAEGIDTICYNFMPVFDWTRTDLAYQYPDGSTALIFDETVSKKMDPVNGELSLPGWDASYSKEEMKAIMDAYAEIDEEKLWENLTYFIKRIIPEAEAVGVKMAIHPDDPPYSIFGLPRIITGLEAIERFVKLYDSKSNGITLCVGSYASDPQNDVLEISRRAFELERVNFVHARNIKLGDGKSFKESAHPSEYGSIDMYEVIKLCHEFGFEGAIRPDHGRMIWGETGRPGYGLYDRALGATYLSGLYEAVIKGSK

SEQ ID NO: 19449 - protein, 837 aa, Streptococcus agalactiae
ATGTCAAAAATAATTACATTTACCAATAAAGTTGTCGTCATAACAGGTGCAGGCGGTGTTCTCTGTGGTTATATGGCTAAAGAATTTGCGAAAGCAGGCGCTAAAGTGGCATTATTAGATTTGAATCAAGAAGCTGCTCAAACATTTGCTGATGAAATTGTAGAAGAAGGTGGTATCGCCAAGGCTTATAAAGCTAACGTTTTGTCTAAAGAAAACCTTGAAGAAGTGCATCAAGCCGTTTTAGAGGATCTTGGACCAACTGATATTTTAGTTAATGGTGCAGGAGGCAACAATCCTAAAGCTACAACTGATAATGAATTTCACGAATTAGACTTACCTTCAGAAACAAAAACCTTCTTTGAGTTAGATGAAGCTGGTATTAGCTTTGTTTTTAACTTAAATTATTTAGGAACATTATTGCCAACGCAAGTATTTGCCCAAGATATGGTTGGACGTGAAGGAGCGAATATTATTAATATCTCTTCAATGAATGCTTTCACCCCTCTGACCAAAATACCAGCTTATTCTGGAGCTAAAGCAGCTATTAGTAACTTCACACAATGGCTAGCTGTTCATTTCTCAAAAGTTGGTATCCGTTGTAATGCTATTGCACCTGGTTTCTTGGTAACAAATCAGAACCGAAGCTTGTTATTTACTGAGGACGGTCAGCCAACTGCGCGTGCTGAGAAAATTCTTAATAATACACCAATGGGAAGATTTGGAGAAGCAAGTGAGCTGATTGGCGGATTGTTCTTTTTAGCAGATGAAAAATCATCAAGTTTTGTTAATGGCGTTGTCCTTCCGATTGATGGTGGATTTGCTGCTTACTCTGGTGTT

SEQ ID NO: 19450 - protein, 279 aa, Streptococcus agalactiae; identical to SEQ ID NO: 10206

SEQ ID NO: 19451 - protein, 810 aa, Streptococcus agalactiae
ATGGTAGATACAAATCACAAAATCGCTTTTTGCATAGATTCCGATGGTTGCGCAATGGATACAATGACATATAAGCATCAACTCTTTTTTGGTCCAATTGCTGCAGATATATTTGGGATATCAGAACAAGAAAGAACAAGTTTTTTAAAAGAGTGGGATAGAGTCAATCTTTATTCAAGAACTCGTGGAGTTAATCGGTTTGTGGGATTGGTTATGGGCCTTGAGTTTGCCGGAGTAGAACATATTGATAAATTAAAAGAATGGGTCGAAACGACAGACTCATTGTCCAATAATTCCTTAGAGTTAGCGCTTGCCAACGATTTTAGTAGAGATTTAGAGAAGGCTTTAGAATGGTCCGATGAAGTGAATCGCCAAATCAAAAATTATGAGGGAGATTCTTTAGCGTTTTCAGGTGTGTTAGAAAGTTTAGAACGATTAAGTCAATTTGGTAATGTTTATGTCGTGAGTTCTGCTAACAAGGAAGCTGTTTGGCAAGAGTGGGAAGAACAGGGATTGCTAAAGTATGTTGATGATATCTATTGTCAAGATAGAGGTAAAAAAGAAGATGTTATCGCTACTTTAATTGCAAGTGGTTACTGCCGTGAAACTATTTTGATGGTAGGAGATTCCCCGGGTGATTTGGCTGCAGCAGAACAAAATGGTATTGCATTTTACCCAGTACTTGTTGGTAAGGAAGTCAAATCATGGGAAATTCTTAGAGAAGATATTGGTGAAGCTTTTGCAAAAGGTCAATTCGAACAGCAAAGGCAAAAAGAATCTATTAATACCTTTTGGGCTAATTTAGATAAC

SEQ ID NO: 19452 - protein, 270 aa, Streptococcus agalactiae
MVDTNHKIAFCIDSDGCAMDTMTYKHQLFFGPIAADIFGISEQERTSFLKEWDRVNLYSRTRGVNRFVGLVMGLEFAGVEHIDKLKEWVETTDSLSNNSLELALANDFSRDLEKALEWSDEVNRQIKNYEGDSLAFSGVLESLERLSQFGNVYVVSSANKEAVWQEWEEQGLLKYVDDIYCQDRGKKEDVIATLIASGYCRETILMVGDSPGDLAAAEQNGIAFYPVLVGKEVKSWEILREDIGEAFAKGQFEQQRQKESINTFWANLDN

SEQ ID NO: 19453 - protein, 1788 aa, Streptococcus agalactiae
ATGACACATTTAGTTGACTTAACAAAAAAACCCTTTAACCTAAATCAAGAAGCAATTGAGTGGATTGAAAAAACAATTAATGAGATGACATTGGATGAGAAAATTGGGCAACTTTTTTTCAATATGGGAGCTAGTCGTTCAGAAGAATATTTAACAGATGTTTTGGATCGGTATCATATTGCTGCTGTTCGCTATAATAGAGGTAGTTCAAGTGAAATCTATGATCAGAATTTAATTTTACAGACAAAGTCGAAATTGCCGATGTTGATTGCTGCAAATACAGAAGCTGGTGGAGACGGTGCTGTCACAGATGGAACTAAAGTTGGCGATGAAATAAAAGTGGCTGCTACAAATGATCCGAAATATGCTTATGAAATGGGAAGAATCGCAGGGATGGAGGCATCTGCTGTGGGTTGTAATGCTTCATTTGCTCCAATTGTAGATTTGACACGTAATTGGCGTAATCCTATCATAGCTAGTCGAAATTGGGGTGCTAACGTTGATCAAATTATTTCACTTTCAAAAGAGTATATGAAAGGAATCATGCAATATAATATTGTACCTTTCGCTAAACATTTTCCAGGGGATGGCATTGATGAGCGTGATCATCATTTGTCATTTGCTTCCAATCCTATGAGTAAAGAGGAGTGGATGTCGACATTTGGCCGCATTTATGGTGAATTGGCTGACGCAGGTTTACCAGGAGTCATGGCAGGTCACATACATTTACCAAACGTTGAAAAAGAAATGCATCCAGAGCGAGACCTTGATGATATGTTACCAGCTTCATTGAATAAAACACTTTTAGATGAGTTATTGAGAGGAGAGTTAGGTTATAATGGAGCTATTGTAACGGACGCTTCTCATATGGTTGGAATGACTGCTTCAATGGCAAGGAGAGATTTGTTGCCAACGGCGATTGAAGCAGGTTGTGATTTATTCTTATTCTTTAATGACCCTGATGAAGACATTCAATGGATGAAAGAAGGTTACGAAAAAGGTATTCTAACAGAGGAACGTCTCCATGACGCTTTACGTCGTACTCTCGGTCTAAAAGCGAAATTAGGCTTGCATAACTATGAGGGACGTCGCCAAGAACTCTTTATGCCTAAAGATAAGGCTATGGCTTTAATCAACACATTAGAGTCGCAAAAAATAGCTGATGAAGTTGCTGATAAAGCAGTAACTCTGGTAAAAGATAAACAAAAAGATATCTTTCCAGTAAATCCAGAACGTTATCGTCATATCTTACTTGTTAACGTTGAAGGATATAAGGGAGGTTTTGGTGCGATGATTGCTGGAAACAAGCAACGTGCATCGGATTACATGAAAGAGTTACTTGAGGCACGTGGCCATGAAGTAACTGTCTGGGAGTCTACCGAAGAGCGTATTATGAAATTGCCACAAGAGGAGCGGGCAGCAGCTATCGCTAATGTTTACGCACAAAAACAGCCAATCGCAAATCTAACAGAACACTATGACTTGATTATTAACTTGGTAGATGTCAATGCTGGAGGAACAACACAACGTATTATTTGGCCAGCAGCTAAAGGCACCCCTGATCAGCCTTTTTACGTTCATGAAATACCATCTATTGTGATTTCAGTACAACATGCATTTGCTTTAGCAGATATGCCACAGGTAGGGACTTATATTAATGCTTATGATGGGCTTCCTAGCACGATAAGTGCAGTAGTTGCGAAATTGGCTGGAGAATCAGAATTTACAGGAGTTTCACCAGTAGATGCTTACTGTGGTTTAATTGATACACATTTATGGCGCCAATGC

SEQ ID NO: 19454 - protein, 596 aa, Streptococcus agalactiae
MTHLVDLTKKPFNLNQEAIEWIEKTINEMTLDEKIGQLFFNMGASRSEEYLTDVLDRYHIAAVRYNRGSSSEIYDQNLILQTKSKLPMLIAANTEAGGDGAVTDGTKVGDEIKVAATNDPKYAYEMGRIAGMEASAVGCNASFAPIVDLTRNWRNPIIASRNWGANVDQIISLSKEYMKGIMQYNIVPFAKHFPGDGIDERDHHLSFASNPMSKEEWMSTFGRIYGELADAGLPGVMAGHIHLPNVEKEMHPERDLDDMLPASLNKTLLDELLRGELGYNGAIVTDASHMVGMTASMARRDLLPTAIEAGCDLFLFFNDPDEDIQWMKEGYEKGILTEERLHDALRRTLGLKAKLGLHNYEGRRQELFMPKDKAMALINTLESQKIADEVADKAVTLVKDKQKDIFPVNPERYRHILLVNVEGYKGGFGAMIAGNKQRASDYMKELLEARGHEVTVWESTEERIMKLPQEERAAAIANVYAQKQPIANLTEHYDLIINLVDVNAGGTTQRIIWPAAKGTPDQPFYVHEIPSIVISVQHAFALADMPQVGTYINAYDGLPSTISAVVAKLAGESEFTGVSPVDAYCGLIDTHLWRQC

SEQ ID NO: 19455 - protein, 1083 aa, Streptococcus agalactiae
ATGTCAAAACTTAATCGTATACGCCATCACTTACATTCAGTCCAAGCTGAACTTGCTGTCTTTTCTGATCCTGTGACAGTCAACTATTTAACAGGTTTCTTTTGCGATCCCCATGAAAGACAAATGTTTTTATTTGTCTATGAAGATCGCGATCCTATTTTATTTGTACCAGCACTAGAAGTATCGCGTGCAAAACAAAGTGTACCATTTCCCGTCTTTGGTTACATAGATTCAGAAAATCCTTGGCAAAAAATAGCTAGCAACTTACCATCCTTTTCTGTTTCTAAAGTTCTAGCCGAATTTGATAATCTTAATGTTACTAAATTCCAGGGTCTCCAAACCGTTTTTGATGGTCATTTTGAAAACCTAACACCTTATATTCAAAACATGCGCCTAATTAAATCACGAGATGAAATTGAGAAAATGTTAGTCGCTGGAGAATTTGCTGATAAAGCTGTTCAAGTTGGATTTGACAATATCTCGCTAAACAACACTGAAACCGATATTATCGCTCAAATCGAATTTGAAATGAAAAAACAAGGTATCAATAAAATGAGTTTCGACACTATGGTTTTGACTGGCAATAATGCAGCAAATCCACATGGTATCCCAGGAACTAATAAAATCGAAAATAATGCTTTGTTATTATTTGATTTAGGTGTAGAAACACTAGGTTATACGTCAGATATGACCCGTACAGTAGCAGTGGGGAAACCTGATCAATTCAAAAAAGATATTTACCATTTATGTCTTGAAGCACATCAAGCGGCTATTGATTTTATTAAGCCAGGAGTCCTTGCTTCTGAAGTTGACGCAGCAGCAAGAAATGTTATTGAAAAGGCTGGTTATGGACAATACTTTAACCACCGCCTTGGTCATGGATTAGGTATGGATGTCCATGAATTTCCATCTATTATGGCTGGTAACGATATGGAGATTCAAGAAGGCATGTGCTTCTCTGTTGAACCAGGTATTTATATACCAGATAAAGTTGGTGTGCGAATTGAAGACTGCGGTTATGTGACTAAAACCGGCTTTGAAGTATTTACCAAAACACCCAAGGAACTACTCTATTTTGAAGGA

SEQ ID NO: 19456 - protein, 361 aa, Streptococcus agalactiae; identical to SEQ ID NO: 1338

SEQ ID NO: 19457 - protein, 945 aa, Streptococcus agalactiae
ATGGCAACTGTTAGTCGTGTGGTAAATGGAAATAAAAATGTCAAGGAAAATACACGTAAGAAAGTCCTTGAAGTTATTGATCGTCTTGACTATCGTCCAAATGCTGTGGCGCGTGGTTTAGCAAGTAAAAAAACGACAACTGTTGGTGTTGTCATTCCTAATATCGCAAATAGCTACTTTTCAATTTTAGCGCGTGGTATTGATGATATTGCAGCAATGTACAAATATAACATTGTCCTTGCTTCAAGTGATGAAGACGATGATAAAGAGGTTAATGTTGTTAATACTTTGTTTGCTAAGCAAGTAGACGGTATTATTTTTATGGGACACCACTTAACTGAAAAGATTCGTGCAGAGTTCTCTCGTTCACGCACACCGATTGTTTTAGCAGGTACTGTGGACCTTGAGCATCAATTACCAAGTGTTAATATCGATTACAAAGCAGCAGCAGTTGATGTTATTGATATTTTAGCTGGCAATCATAAAGACATTGCTTTTGTATCAGGACCACTTATTGACGATATTAATGGCAAGGTTCGTTTGGCAGGATACAAAGAAGGTCTCAAGAAAAATGGCTTAAACTTTAAAGAGGGGTTGGTTTTTGAAGCCAACTACCGTTATGCTGAAGGCTTTGCATTAGCTCAACGCGTGATTAATGCTGGAGCAACAGCAGCATATGTTGCTGAGGATGAGTTAGCGGCAGGTTTGTTAAATGGTCTTTTTGAGGCAGGTAAACGTGTTCCTGAAGATTTTGAAATTATCACAAGCAATGACTCGCCAATCGCACAATATACACGTCCTAACTTAACTTCTATCAGTCAACCGGTCTATGATTTGGGTGCTGTTAGCATGCGTATGCTAACAAAAATTATGCACAAAGAAGAGTTGGAAGAAAAAGAAATAGTGCTTAATCACGGGATTGTTAAACGTGGCACAACAAATAAT

SEQ ID NO: 19458 - protein, 315 aa, Streptococcus agalactiae; identical to SEQ ID NO: 1340

SEQ ID NO: 19459 - protein, 1463 aa, Streptococcus agalactiae
ATGACAAATGAATTGATAATGCAAGCTTTTGAGTGGTATTTACCTAGTGATGGGAATCACTGGAAGAAATTAGAGGAGTCTATATCAGACCTTAAAAAACTTGGAATTAGTAAAATCTGGTTACCACCAGCATTTAAGGGAACTAGCAGTGATGATGTAGGATATGGTGTTTATGATCTCTTTGATTTAGGAGAATTTGACCAGAATGGAACAATTAGAACAAAATATGGTAGGAAAGAAGAGTATCTAAAGCTTATTAAGTCGTTAAAGGCAAATGGCATTAAACCGTTTGCAGATATCGTTCTTAACCATAAAGCCAATGGTGATCATAAAGAAAAATTTCAAGTCATCAAAGTCAATCCTGAAAATCGTCAAGAAGCATTAAGTGAACCCTATGAGATTGAAGGATGGACGGGATTTGATTTCCCAGGTAGACAGGGTGAGTACAATGATTTTAAATGGCACTGGTACCACTTTACTGGTTTAATTACGATGCTAAAAATAATGAAACAGACATCTTTATGATTGTAGGCGATAATAAAGGTTGGGCAGACGATGATTTGATTGATGATGAAAATGGTAATTTCGATTATCTCATGTACAATGACATTGATTTTAAGCATCCTGAAGTTATAAAAAACTTACAAGATTGGGCTAAGTGGTTTATTGAAACTACAGGCATTGAAGGTTTTCGTTTGGATGCTGTGAAACATATCGATTCTTACTTTATTCAAACTTTCATTAATGATATTCGTACAAAAATAAAACCCGATTTAGAGGTCTTTGGCGAATATTGGAAATCTGACCAAACATCAATGAAGGACTATTTAGAGGCAACACAATTTCAATTTTCTCTTGTTGATGTTACCTTACATATGAATTTTTTTGATGCCAGTCACCAAAACCGTGATTTTGATATGCGAACAATTTTTGATGATAGTCTTGTTATTGATAATCCTGAGTATGCTGTTACATTCGTAGAAAATCATGATACGCAAAGTGGACAAGCTCTAGAAAGTAGAGTGGAAGATTGGTTTAAACCTTTAGCTTATGGCTTGATACTTTTACGCCAACAAGGGACTCCATGTCTTTTTTATGGTGATTACTATGGCATTCAAGGAGAATTTGGTCAACCATCCTTTAAAGAGGTTATTGATAAAATGGCTGAGCTACGCCAAAACTATGTATTTGGCAAACAAGTCGATTATTTTACGCATTCAAATTGTATTGGTTGGACTTGTCTTGGGGATGAGGAACATAATTCTTGTTTAGCTGTGGTCCTAACAAATGGTGATCAGGGATGGAAACATATGGAAGTAGGGGAAATTTATGCAGGCAAAACGTTTGTTGATTATTTAGGTAATTGTGAACAAGAGGTTGTTATAGGAGATGATGGTTGGGGTGATTTTTTAGTTGAATCTGCGTCTATCTCGGCTTGGGTTCCTAAAATAGAGGAAGCTAAC

SEQ ID NO: 19460 - protein, 488 aa, Streptococcus agalactiae
  VARIANT 163: Xaa = Any Amino Acid
MTNELIMQAFEWYLPSDGNHWKKLEESISDLKKLGISKIWLPPAFKGTSSDDVGYGVYDLFDLGEFDQNGTIRTKYGRKEEYLKLIKSLKANGIKPFADIVLNHKANGDHKEKFQVIKVNPENRQEALSEPYEIEGWTGFDFPGRQGEYNDFKWHWYHFTGLXYDAKNNETDIFMIVGDNKGWADDDLIDDENGNFDYLMYNDIDFKHPEVIKNLQDWAKWFIETTGIEGFRLDAVKHIDSYFIQTFINDIRTKIKPDLEVFGEYWKSDQTSMKDYLEATQFQFSLVDVTLHMNFFDASHQNRDFDMRTIFDDSLVIDNPEYAVTFVENHDTQSGQALESRVEDWFKPLAYGLILLRQQGTPCLFYGDYYGIQGEFGQPSFKEVIDKMAELRQNYVFGKQVDYFTHSNCIGWTCLGDEEHNSCLAVVLTNGDQGWKHMEVGEIYAGKTFVDYLGNCEQEVVIGDDGWGDFLVESASISAWVPKIEEAN

SEQ ID NO: 19461 - protein, 996 aa, Streptococcus agalactiae
ATGAAAGTTTTACTGTATTTAGAGGCTGAAGAATACTTGAAAAAGTCAGGTATCGGTCGTGCTATCAAACATCAAGAGAAAGCTCTTCAAATTGCTGGGATAGATTATACCACTAATCCTACAGATGACTTTGACCTTGTTCATATGAATACCTATGGTATTAGAAGTTGGCTTTTGATGAGTAAAGCTAAAAAAACTGGGAAAAAAGTAATTATGCATGGCCATTCCACTGAAGAGGACTTTAGAAATTCTTTTATTGGCTCAAATTTAGTATCCCCGCTTTTTAAATGGTACCTTTGCCGTTTTTATCAAAAAGCAGATGCCATTATAACCCCAACTGATTATTCTAAACAACTAATAAAAGCATATGGCATCAAGAAACCAATTTTTGTTTTATCTAACGGGATTGATCTAAGTCGCTATCAGAGGTCAGAAAAGAAAGAATCTGCATTTCGTCACTATTTTCACTTAAGTAAGGATGATAAAGTTGTTATGGGGGCCGGTCTTTATTTCATGCGTAAGGGAATTGACCAATTTGTTGAAGTAGCTGCAAAAATGCCTGATATTCGTTTTATTTGGTTTGGAGAAACAAATAAATGGGTTATTCCTCGAAAGGTTAGGCAAATCGTTACCAAGCAACATCCCTCAAATGTTACTTTTGCTGGTTACATAAAAGGTGATGTTTATGAAGGTGCCATGAGTGCTAGCGATGCTTTCTTCTTTCCGAGTCGTGAAGAGACAGAAGGGATAGTAGTTTTAGAGGCTTTAGCTAGTCATCAGCATGTGGTTTTAAGAGATATCCCTGTGTATCACGGTTGGGTGACCGAAGACAGTGTTGAATTAGCGACTGATGTTGATGGTTTTGTTGAAAAGTTGGATAAAGTCTTATCTGGTAAGAGTGATAAGATTAAAGAAGGTTATCATGTGGCTGAGAGTCGAAGTATCGAACGAATTGCCCATGAATTGGCAAGTGTTTATCAAAAAGTAATGGAGTTG

SEQ ID NO: 19462 - protein, 332 aa, Streptococcus agalactiae
MKVLLYLEAEEYLKKSGIGRAIKHQEKALQIAGIDYTTNPTDDFDLVHMNTYGIRSWLLMSKAKKTGKKVIMHGHSTEEDFRNSFIGSNLVSPLFKWYLCRFYQKADAIITPTDYSKQLIKAYGIKKPIFVLSNGIDLSRYQRSEKKESAFRHYFHLSKDDKVVMGAGLYFMRKGIDQFVEVAAKMPDIRFIWFGETNKWVIPRKVRQIVTKQHPSNVTFAGYIKGDVYEGAMSASDAFFFPSREETEGIVVLEALASHQHVVLRDIPVYHGWVTEDSVELATDVDGFVEKLDKVLSGKSDKIKEGYHVAESRSIERIAHELASVYQKVMEL

SEQ ID NO: 19463 - protein, 1332 aa, Streptococcus agalactiae
ATGCGTATAGGTCTATTTACAGATACATACTTCCCCCAAGTTTCGGGAGTTTCAACAAGTATCCGCACTTTAAAGGAAGGGTTGGAGAAGGAAGGACACGAAGTTTATATTTTCACAACTACCGACCGTAATGTCAAACGTTTTGAAGACCCTACAATTATTCGTTTACCAAGTGTCCCTTTTATTTCTTTTACGGATCGTCGAGTAGTTTATAGAGGTTTAATTTCTGCTTATAGGATAGCTAAAGACTACGAACTTGATATTATTCATACTCAAACAGAATTCAGCTTAGGGCTTTTAGGAAAATTAGTTGCAAAAGCTTTAAGAATACCTGTTGTGCATACTTATCATACTCAATATGAGGATTACGTTGGTTATATCGCAAAAGGCAAATTGATTAAGCCAAGTATGGTCAAATATATCATGCGTACCTACCTAAGTGATTTGGATGGTGTCATATGTCCTTCTCGAATTGTTCTCAATCTTCTAGATGGTTACGGTGTCAAAATTCCAAAACAAGTTATTCCGACAGGTATTCCTGTTGAGAACTATCGTCGAGAGGATATCTCTGAAGAAACAATCAAGAATCTACGAACGGAGCTTGGACTTGCGGATAATGATACAATGCTATTGAGTTTATCACGGGTATCTTTTGAAAAAAATATTCAAGCAATCTTGATGCATTTATCAGCTGTCGTTGATGAAAATCCTCACGTAAAATTAGTGATAGTTGGAGATGGTCCTTATCTTTCAGATCTAAAAGAACTTGTTCACTCTTTAGAACTTGAAAATTCAGTTATTTTTACAGGTATGGTTGAGCATAGCCAAGTGGCTATCTACTATAAAGCATGTGATTTCTTTATTAGTGCTTCAACAAGTGAAACGCAAGGATTAACTTACATTGAGAGTCTGGCGAGTGGACGTCCAATCATTGCGCAAAGTAATCCTTATCTAGATGATGTTATTTCAGATAAAATGTTTGGAACTCTGTACAAGAAGGAAAGTGATTTGGCAGATGCTATCCTAGATGCAATAGCAGAGACACCCAAAATGACTCAAGAAGCTTATGAACAGAAATTATATGAGATTTCTGCTGAGAATTTCAGCAAGTCTGTATATGCTTTTTACCTAGACTTTCTGATTTCACAAAAAGCTAGTGTGAAAGAAAAAGTCTCTCTGACAATAGGAAATAAGGATAGCCATTCTACTCTTCGTTTTGTCAGAAAAGCGGTATATTTACCTAAGAAAGTTTTTACCTTTACAGGAAGAGCCTCTAAAAAAGTGGTAAAAGCACCTAAACGTCGTATTTCATCTATTCGAGATTTTTTAGAT

SEQ ID NO: 19464 - protein, 444 aa, Streptococcus agalactiae; identical to SEQ ID NO: 10220

SEQ ID NO: 19465 - protein, 1941 aa, Streptococcus agalactiae
ATGATTAAAATCACTTTCCCAGATGGTGCAATTCGTGAATTTGAATCTGGCATCACAACATTTGAAATTGCACAATCAATTTCTAACTCTTTAGCTAAAAAAGCTTTAGCTGGTAAATTTAATGGTCAACTTATTGATACAACACGTGCTATCGAAGAAGATGGTAGTATTGAGATTGTAACACCTGACCACGAAGATGCTTTAGGAGTTCTTCGTCACTCAGCAGCGCATTTATTTGCTCAAGCTGCAAAACGCCTTTTTCCAGACTTATGTTTAGGTGTAGGTCCAGCTATTCAAGATGGTTTTTACTACGATACTGATAATAAATCAGGTCAAATTTCAAATGATGATCTTCCTCGTATTGAAGAAGAAATGAAAAAAATTGTTAAGGAAAATCACCCTTGTATTCGTGAAGAAATCAGTAAAGAAGAAGCGTTAGAACTTTTTAAAGATGACCCTTATAAAGTTGAATTAATTAGTGAACATGCTGAAGATGGTTTAACTGTTTATCGTCAAGGTGAATTTGTAGACCTTTGTCGTGGACCTCATGTCCCATCAACAGGACGTATTCAAGTCTTTCATCTTCTAAATGTCGCTGGTGCTTACTGGCGTGGTAACAGTGATAATGCTATGATGCAGCGTGTCTATGGTACTGCTTGGTTTGATAAAAAAGATTTGAAAGCATATCTTAAACGCCGTGAAGAAGCTAAGGAACGTGACCATCGCAAATTAGGTAAAGAACTTGATTTATTTATGGTTAATCCTGAAGTAGGTCAAGGATTGCCATTCTGGTTGCCAAATGGAGCAACTATTCGCCGCGAATTGGAACGTTACATTGTTGATAAGGAGATTGCTTCAGGTTATCAACACGTTTACACACCTCCGATGGCATCTGTTGAATTTTACAAGACTTCTGGGCACTGGGACCACTATCGTGAAGATATGTTCCCAACAATGGATATGGGAGATGGAGAGGAATTCGTTCTTCGTCCAATGAACTGCCCACACCATATTGAAGTTTATAAACATCATGTTCATTCATATCGTGAATTGCCAATTCGTATCGCTGAACTTGGTATGATGCACCGTTATGAAAAATCAGGGGCCCTCACAGGATTGCAACGTGTACGCGAAATGACACTCAACGATGCCCATATTTTCGTTACACCTGAGCAAATTAAAGATGAATTTCTTAAAGCTCTTAATCTTATAGCAGAAATTTATGAAGATTTTAACTTAACAGATTACCGTTTCCGCTTATCTTATCGTGACCCAGAAGATAAACATAAGTATTATGATAACGATGAGATGTGGGAAAATGCACAAGCTATGCTAAAAGAGGCTATGGATGATTTTGGATTAGATTATTTTGAAGCAGAAGGCGAAGCAGCCTTTTACGGTCCTAAATTGGATATCCAGGTGAAAACTGCTCTTGGTAATGAAGAAACACTATCTACTATCCAACTAGATTTCCTTCTTCCAGAACGCTTTGATCTCAAATACATCGGTGCAGATGGTGAAGAACATCGTCCAATTATGATTCACCGCGGTGGTATTTCAACAATGGAGCGCTTTACAGCTATTTTAATTGAAACTTACAAAGGTGCCTTTCCAACTTGGCTTGCTCCACAACAAGTTTCTGTTATTCCAATTTCAAATGAAGCCCACATTGATTATGCTTGGGAAGTGGCTCGTGTCCTTAAAGATCGTGGTATTCGTGCTGAAGTAGATGACCGTAACGAAAAGATGCAATATAAGATTCGTGCGGCTCAAACCCAAAAAATTCCATATCAATTGATTGTTGGTGATAAGGAAATGGAAGAAAAAGCCGTAAATGTGCGCCGCTATGGAAGCAAAGCGACTGAAACAAAATCTATAGAGGAATTTGTAGAAAGTATTTTAGCTGATATTGCAAGAAAATCTAGACCTGACGAAGTTAAA

SEQ ID NO: 19466 - protein, 647 aa, Streptococcus agalactiae; identical to SEQ ID NO: 1350

SEQ ID NO: 19467 - protein, 684 aa, Streptococcus agalactiae; identical to SEQ ID NO: 10223

SEQ ID NO: 19468 - protein, 228 aa, Streptococcus agalactiae; identical to SEQ ID NO: 5794

SEQ ID NO: 19469 - protein, 1017 aa, Streptococcus agalactiae
ATGGCAAAGACCGCTCTTAATATTCCTTTTACAGTTGAAGGGATAGAAAATTATTATCAAAATATAAAAATGATACTGTCTTTAGCAGATAAATGGAGCATACCTAAAGATGATCTATTACTTTTTTTAAAGGGCCTCAAGGCTATTGATGATATAAAAGTTGGCTCTCCTATTTTTAAGTATTTTTGGACTTCTTTAAGTTTACAAGCACCCCTCAAAGCTTTAGAATTCGTGTTAGAGCAGGCTAAAATGCCAACTGAATTGTCAGGAGAATTATCAGAAACACAATACTTGGTCGCACAGTTTTCAGATGAGTTAGCTCCACATGATGATTTCTGGATAGCCTTATCACAAGTTATTTATGATTCTTTTCCTGGGAATAGTCTAGCCGAAGATACTGTATTAAATAGGAAACTCCATCAATTCCGCTATTTGATTTCTAGTCAGCAAGCACAGTATGTTCGACGATACTTTAAAGATGTTGGTATGACTGATAGAGATGCTTTAGTAAACTACCTATCATGTTTAAGAGAACCAGATAGTATCGCCTACTATGAATCTGCTCGCTTGCATAATAAACGTCGGAGAAATGGTGAAATCTTTGGTTTCCCAGATGATGAGCCGGTTATTAATAGTAAGCTTTTAATTTCATTCCATACGGAATTTATTATTGATGACAAAGGAAACTTTTTAAACGAGATTGACGCAGAAGTAATAACACGTAATGGTATTATCAATGGAGCTAGCTTTAATTATGCTTTTAAAAATAATACACGTCATAAAGAATTAGATGTTGATCCTGTAAAGTTAGACCCAAAATTTCGAAACGATATGACTAGAGGTTATAGATCGCCAAATCTATCTAGAAGGAAATGGTTTTTCTTTAAAGAAGAGGATTACGATTGTAGTTATTTCAATAAAAAAGGATATTACGCATTTGGAAGGCGTAGTGCTAAGCAATCGGTTGATAAACAAGTCAAATACTTGAAGAAGGCTGTGCAGAAAATGCGCATCAAC

SEQ ID NO: 19470 - protein, 339 aa, Streptococcus agalactiae
MAKTALNIPFTVEGIENYYQNIKMILSLADKWSIPKDDLLLFLKGLKAIDDIKVGSPIFKYFWTSLSLQAPLKALEFVLEQAKMPTELSGELSETQYLVAQFSDELAPHDDFWIALSQVIYDSFPGNSLAEDTVLNRKLHQFRYLISSQQAQYVRRYFKDVGMTDRDALVNYLSCLREPDSIAYYESARLHNKRRRNGEIFGFPDDEPVINSKLLISFHTEFIIDDKGNFLNEIDAEVITRNGIINGASFNYAFKNNTRHKELDVDPVKLDPKFRNDMTRGYRSPNLSRRKWFFFKEEDYDCSYFNKKGYYAFGRRSAKQSVDKQVKYLKKAVQKMRIN

SEQ ID NO: 19471 - protein, 564 aa, Streptococcus agalactiae
ATGATTAAGAAAAATAAAGTTTTTTTAGGAGTTCTTTTAGTCCTTGTTGTTATCCTTGGAGGTGGTGTATTATTTTACCAATCACAATTCCAAAAGACAACTAATCAAGCGTTAGCTATTGCTTATAAAGATGCTAAAGTGGCTAAGAAGGATGTCATACATCAAAAAATTGACAAAGAATTTGAAAACTTTAGAGGGAGCTACGAAATTGAATTCAATACCAAAAGCGCAGAATACAGCTATCATGTAGATGTTAAGACTGGACAAATCCTTGAGCGGGACATGGATAATAATGGCTTTTCAAAATCGACTTCTCAGTCAAGTTCATCGTCAAGTCAAAAATCTCATAAAATAAGTCAAGAAGAAGCCAAAAAGATTGCATTTAAAGATGCTAATATAGAGGAATCAGAAGTCAGTAATCTTAAGATCAAAGAAGAAATTGAAAATGGAAAATCAGTTTATGATATTGACTTTGTGGACCTGAAAAATAAAAATGAAGTTGATTATCAAATTGATGCAGAAACTGGAAAAATCATTGAACGTTCTAGAGATCATATGAATGAT

SEQ ID NO: 19472 - protein, 188 aa, Streptococcus agalactiae; identical to SEQ ID NO: 1354

SEQ ID NO: 19473 - protein, 645 aa, Streptococcus agalactiae
ATGTCATCAGTCTTAACACTAACAAAGATACTATTTCTCCTTCAAGGGTTCGGTTAACCTTATATATATCTTTTATTTCCATTTTACTATCAATGTTTTTTGGAACTCTATTAGCAATTATGAGAAATAGCAAAAATCCTATCTGGAAATTAATAGCTAGTATCTATATCGAATTTGTCAGAAATGTTCCAAATCTACTTTGGATTTTTATCATTTCTAGTATTCCAGATGAAATCAGTCAGCGCTGGTATTACTTCGTTTACAATTTTTACCTCCGCTGCTTTAGCAGAAATTATTCGGGGAGGTTTAAATGGAGTCGATAAAGGACAAACAGAAGCTGGACTTTCTCAAGGATTCACTTATTTGCAAGTTTTCATTATTATTATTTTCCCACAAGCTTTTCGCAAAATGTTGCCAGCCATTATTTCTCAGTTTGTAACGGTTATAAAAGATACATCACTACTTTATTCTGTTATAGCTATTCAAGAAATCTTCGGAAAAAGTCAAATTCTAATGGGAAGATATTTCGAAGCTGGACAAGTTTTTACACTCTACGCTATTATAACTGCTGTCTATTTCATTACAAACTTTATCATCTCAAGTTTTTCACGTAAACTTTCAAAACGTTGGGAGCAAGCTACTGAG

SEQ ID NO: 19474 - protein, 216 aa, Streptococcus agalactiae
  VARIANT 73, 74: Xaa = Any Amino Acid
MSSVLTLTKILFLLQGFGLTLYISFISILLSMFFGTLLAIMRNSKNPIWKLIASIYIEFVRNVPNLLWIFIIXXVFQMKSVSAGITSFTIFTSAALAEIIRGGLNGVDKGQTEAGLSQGFTYLQVFIIIIFPQAFRKMLPAIISQFVTVIKDTSLLYSVIAIQEIFGKSQILMGRYFEAGQVFTLYAIITAVYFITNFIISSFSRKLSKRWEQATE

SEQ ID NO: 19475 - protein, 261 aa, Streptococcus agalactiae
ATGCAACTTATCATTTTGCCTCAAGCTGTCAGAACAATTTTACCACCAATGACCAACCAAGTTGTTAATCTAATCAAGAATACCTCTACCGTAGCAATCATTTCTGGAGCCGATATCATGTTTGTAGCTAAGGCCTGGGCTTATGATACGACTAATTATATCCCAGCTTTTGCAGGAGCTGCTATCTTCTATTTTGTTATTTGTTTCCCACTAGCAAGCTGGGCAAGAAAACAAGAAGAATTAAATAAGAAAACTTATTCT

SEQ ID NO: 19476 - protein, 87 aa, Streptococcus agalactiae
MQLIILPQAVRTILPPMTNQVVNLIKNTSTVAIISGADIMFVAKAWAYDTTNYIPAFAGAAIFYFVICFPLASWARKQEELNKKTYS

SEQ ID NO: 19477 - protein, 675 aa, Streptococcus agalactiae
ATGAGAGGGAGAGTAGGGTATAAATGGAGCTATTGTAACGGACGCTTCTCATATGTTGGAATGACTGCTTCAATGGCAAGGAGAGATTTGTTGCCAACGGCGATTGAAGCAGGTTGTGATTTATTCTTATTCTTTAATGACCCTGATGAAGACATTCAATGGATGAAAGAAGGTTACGAAAAAGGTATTCTAACAGAGGAACGTCTCCATGACGCTTTACGTCGTACTCTCGGTCTAAAAGCGAAATTAGGCTTGCATAACTATGAGGGACGTCGCCAAGAACTCTTTATGCCTAAAGATAAGGCTATGGCTTTAATCAACACATTAGAGTCGCAAAAAATAGCTGATGAAGTTGCTGATAAAGCAGTAACTCTGGTAAAAGATAAACAAAAAGATATCTTTCCAGTAAATCCAGAACGTTATCGTCATATCTTACTTGTTAACGTTGAAGGATATAAGGGAGGTTTTGGTGCGATGATTGCTGGAAACAAGCAACGTGCATCGGATTACATGAAAGAGTTACTTGAGGCACGTGGCCATGAAGTAACTGTCTGGGAGTCTACCGAAGAGCGTATTATGAAATTGCCACAAGAGGAGCGGGCAGCAGCTATCGCTAATGTTTACGCACAAAAACAGCCAATCGCAAATGTAACAGAACACTATGACTTGNNNNNT

SEQ ID NO: 19478 - protein, 225 aa, Streptococcus agalactiae
  VARIANT 224, 225: Xaa = Any Amino Acid
MRGRVGYKWSYCNGRFSYVGMTASMARRDLLPTAIEAGCDLFLFFNDPDEDIQWMKEGYEKGILTEERLHDALRRTLGLKAKLGLHNYEGRRQELFMPKDKAMALINTLESQKIADEVADKAVTLVKDKQKDIFPVNPERYRHILLVNVEGYKGGFGAMIAGNKQRASDYMKELLEARGHEVTVWESTEERIMKLPQEERAAAIANVYAQKQPIANVTEHYDLXX

SEQ ID NO: 19479 - protein, 518 aa, Streptococcus agalactiae
GTGCATACTTATCATACTCAATATGAGGATTACGTTGGTTATATCGCAAAAGGCAAATTGATTAAGCCAAGTATGGTCAAATATATCATGCGTACCTACCTAAGTGATTTGGATGGTGTCATATGTCCTTCTCGAATTGTTCTCAATCTTCTAGATGGTTACGGTGTCAAAATTCCAAAACAAGTTATTCCGACAGGTATTCCTGTTGAGAACTATCGTCGAGAGGATATCTCTGAAGAAACAATCAAGAATCTACGAACGGAGCTTGGACTTGCGGATAATGATACAATGCTATTGAGTTTATCACGGGTATCTTTTGAAAAAAATATTCAAGCAATCTTGATGCATTTATCAGCTGTCGTTGATGAAAATCCTCACGTAAAATTAGTGATAGTTGGAGATGGTCCTTATCTTTCAGATCTAAAGAACTTGTTCACTCTTTAGAACTTGAAAATTCAGTTATTTTTACAGGTATGGTTGAGCATAGCCAAGTGGCTATCTACTATAAAGCANNNNNT

SEQ ID NO: 19480 - protein, 173 aa, Streptococcus agalactiae
  VARIANT 172, 173: Xaa = Any Amino Acid
MHTYHTQYEDYVGYIAKGKLIKPSMVKYIMRTYLSDLDGVICPSRIVLNLLDGYGVKIPKQVIPTGIPVENYRREDISEETIKNLRTELGLADNDTMLLSLSRVSFEKNIQAILMHLSAVVDENPHVKLVIVGDGPYLSDLKELVHSLELENSVIFTGMVEHSQVAIYYKAXX

SEQ ID NO: 19481 - protein, 638 aa, Streptococcus agalactiae
ATGACTTTATTAAACATCAGTCCTTTTGCCATTTCAAGGTGGGGCGCTTTCTTTAACCATTTCGACCTATTCTTTAAAGGCTTCTTATATACTCTAGGTATTTCGTTTGGTGCACTCCTACTTGCTCTGATATTAGGAATTCTCTCTGGTGGTTTATCAACTTCTAAAAGTAAAGTTGGTAAGTTGATATCACGTATCTATGTTGAAGTTTTTCAAAACACACCTCTTTTAGTTCAAATGGTTTTTGTCTACTATGGACTAGCAATCATTAGTAATGGACATGTTATGATTAGTGCTTTTTTCACCGCCGTTTTGTGCGTTGGACTATACCATGGTGCCTATATTTCTGAAGTTATTCGCTCAGGAATTGAAGCTGTCCCTAAAGGACAAACAGAGGCTGCTTTAGCTCAAGGATTCACAGCTAATCAAACCATGCAACTTATCATTTTGCCTCAAGCTGTCAGAACAATTTTACCACCAATGACCAACCAAGTTGTTAATCTAATCAAGAATACCTCTACCGTAGCAATCATTTCTGGAGCCGATATCATGTTTGTAGCTAAGGCCTGGGCTTATGATACGACTAATTATATCCCAGCTTTTGCAGGAGCTGCTATCCCTATTGGTATTTGTTCCAC

SEQ ID NO: 19482 - protein, 214 aa, Streptococcus agalactiae
  VARIANT 212: Xaa = Any Amino Acid
MTLLNISPFAISRWGAFFNHFDLFFKGFLYTLGISFGALLLALILGILSGGLSTSKSKVGKLISRIYVEVFQNTPLLVQMVFVYYGLAIISNGHVMISAFFTAVLCVGLYHGAYISEVIRSGIEAVPKGQTEAALAQGFTANQTMQLIILPQAVRTILPPMTNQVVNLIKNTSTVAIISGADIMFVAKAWAYDTTNYIPAFAGAAILYLVFXSH

SEQ ID NO: 19483 - protein, 410 aa, Streptococcus agalactiae
TTGGTGCGTAAAAATAGTCATATCAAACTATAAAAGAATTGGATGGTAAACACATTGGTGTGGCTCAAGGTGCCACTACAAAAGTCAATTTAGAAAAATATGCTAAAGAACACAAGCTAAAATTTAGCTATGCTCAATTAGGGAGTTTCCCAGAATTAGCGATATCGCTGTACGCTAATCGTATTGATGCTTTTTCAGTTGATAAATCTATCCTTAGCGGCTACCTTAGCCCTCATACAACCATATTAAAAGAAGGGTTCAATACGCAAGAATACGGTATTGCAACCAGTAAACAGGACAAAGTCTTGATTCCCTACGTTAATAAGTTACTGGTATCATGGGAAAAAGATGGTAGTTTAAAACACATTTATCAAAAATTTAAGCTTAAACCCGCTAAAGTAAAAAAAGAA

SEQ ID NO: 19484 - protein, 137 aa, Streptococcus agalactiae
  VARIANT 9: Xaa = Any Amino Acid
MVRKNSHIXTIKELDGKHIGVAQGATTKVNLEKYAKEHKLKFSYAQLGSFPELAISLYANRIDAFSVDKSILSGYLSPHTTILKEGFNTQEYGIATSKQDKVLIPYVNKLLVSWEKDGSLKHIYQKFKLKPAKVKKE

SEQ ID NO: 19485 - protein, 357 aa, Streptococcus agalactiae
ATGCTGAGACGAAAAAGATTAACGTTCTATCTATTATCCTGTATTTTTATTTTCCTGTTATTTTATCCTAACTCAACGTCAGCTAATCAATTATCAGAAATCAAAAAATCGGGCGTCCTTAAAGTTGGAGTCAAACAAGATGTGCCTAACTTTGGTTATTATAATGCTGAGACGAATCAATACGAAGGAATGGAAATTGATATTGCCAAAAAAATTGCCAAATCCTTAAGTGTCAAACCAGTTTTTGTACCGACAACCGCACAAACCAGAGAGCCTCTGATGGAACATGGGCAAATTGATATTCCTAATCGCACATACACTATCACGCCCGAAAGAAAAGCTAACTATAATATTTTC

SEQ ID NO: 19486 - protein, 119 aa, Streptococcus agalactiae
MLRRKRLTFYLLSCIFIFLLFYPNSTSANQLSEIKKSGVLKVGVKQDVPNFGYYNAETNQYEGMEIDIAKKIAKSLSVKPVFVPTTAQTREPLMEHGQIDIPNRTYTITPERKANYNIF

SEQ ID NO: 19487 - protein, 753 aa, Streptococcus agalactiae
ATGTCACTCATATCTTATAAGAATGTTAACAAGTATTATGGAGATTATCACGCCCTTCGTCAGATTAATTTGGAAATAGAGCCAGGGCAAGTGGTTGTTCTATTAGGACCTTCTGGATCAGGTAAATCAACACTTATTAGAACAATGAACGCTCTCGAATCTATTGACGATGGTAGTTTGGTCGTGAATGGACATGAATTAGCAAATATTTCATCTAAAGAATTGGTCAACCTCCGTAAAGAAGTTGGTATGGTTTTTCAACATTTTAACCTTTATCCTCACAAAACCGTGTTAGAAAATATTACATTAGCTCCTATTAAAGTATTAAAACAATCTAAAAAAGAAGCTATGGAAATTGCTGAAAAATATTTAAAATTTGTCAATATGTGGGAAAGAAAAGATTCCTACCCATCTATGCTATCAGGTGGTCAAAAACAAAGAATTGCTATTGCTAGAGGGCTTGCCATGCATCCAAAACTCCTCCTCTTTGATGAGCCTACCTCTGCCCTTGATCCCGAAACCATCGGAGACGTTCTTTCAGTGATGCAAAAATTGGCAAATGACGGAATGAATATGGTCGTTGTAACTCATGAAATGGGATTTGCACGAGAAGTTGCTGATCGTATTATTTTTATGGCTGATGGGGAAATTTTAGTGGATACTACAGATGTACAAGACTTTTTTGATAATCCCAGAGAACCACGTGCTAAACAATTTTTAAGCAACATTATCAACCATACCAGTACTGACCTT

SEQ ID NO: 19488 - protein, 251 aa, Streptococcus agalactiae; identical to SEQ ID NO: 1362

SEQ ID NO: 19489 - protein, 707 aa, Streptococcus agalactiae
ATGAAAAAATACTTATCGTTGATGATGAAAAACCAATTTCAGATATTATCAAATTTAATTTAACCAAAGAAGGATATGAGACGGCGACAGCTTTCGATGGCCGTGAAGCTTTAGTACAATATGCAGAATTTCAACCAGATTTAATCATTTTGGATTTAATGCTTCCTGAACTAGATGGTTTAGAAGTGGCTAAGGAAGTTCGTAAAACCAGCCATATTCCTATTATTATGCTTTCTGCAAAAGACAGTGAGTTTGACAAAGTCATTGGTTTAGAAATCGGTGCAGATGATTATGTTACTAAACCTTTTTCAAATCGTGAACTTTTGGCACGGGTCAAAGCACATTTACGACGTACTGAAAATATTGAAACAGCTGTAGCAGAAGAAAGTGCTCAAAATGCTTCTTCAGATATTACTATTGGTGAGTTGCAAATTTTACCAGATGCCTTTATTGCTAAGAAACGTGGCGAAGAAATTGAATTAACGCACCGAGAATTTGAATTACTTCACCATTTAGCGACACATATCGGACAAGTCATGACACGCGAACATTTATTGGAAACAGTTTGGGGATATGATTATTTTGGAGATGTCCGTACAGTTGATGTGACGGTGAGACGTTTACGTGAAAAGATTGAAGATACTCCTGGTCGTCCAGAATATATTTTGACTCGACGTGGTGTAGGTTATTACATGAAGTCTTATGAA

SEQ ID NO: 19490 - protein, 236 aa, Streptococcus agalactiae; identical to SEQ ID NO: 1364

SEQ ID NO: 19491 - protein, 1005 aa, Streptococcus agalactiae
ATGAATAATAGTGCTGCAAATATTAGGTCGTTTGAGCTAGCCTTACTTTTTTTACTAGTTTTTGTTGCTGTTTATTTTGTTTATCTAGCGGTTAGAGATTTTAAAATGTCTAAAAATATCCGGCTTTTGAATTGGAAAGTCAGAGATTTGATAGCAGGAAATTATTCAGATAGTATTCTAATTCAAGGTGATGCAGATTTGGTAGAATTAGGTGAAAGTCTAAATGATTTATCTGATGTCTTCCGAATGGCACATGATAACTTAGAACAAGAAAAGAATCGCTTAGCAAGTATCTTAACTTATATGACTGACGGTGTGCTGGCTACAGATCGTTCAGGAAAAATCGTTATGATTAATGAGACAGCCCAACAGCAGTTCAATCTAGCATATGATGAAGCTTTATCAATGAATATTGTTGATATGTTAGGGTCGGGAAGTCCATATTCGTTCCAAGATTTAGTCTCTAAAACGCCAGAGGTAGTTCTTAATAGACGTGATGAAAACGGTGAATTTGTTACCTTACGGATTCGATTTGCTTTGAACCGTCGTGAAAGTGGTTTTATTTCCGGTTTAGTTGCAGTGTCACACGATGCTACTGAGCAAGAGAAAGAAGAGCGTGAAAGAAGACTTTTTGTATCTAATGTTTCTCATGAACTTCGTACACCTTTGACATCTGTAAAATCTTATTTAGAAGCTTTAGATGAGGGAGCGCTTATGAAGAAGTTGCTCCAAGCTTCATTAAGGTATCTCTAGATGAAACAAATCGTATGATGCGTATGATATCAGATTTATTAAGTTTATCGCGCATTGATAATGAAGTACGCATTTAGATGTTGAAATGACGAATTTTACAGCTTTCATGACCTCAATTTTGAATCGATTTGATCAGATTAGAAATCAAAAAACAGTCACAGAAAAGTTTATGAAATTGTCAGAGATTATCCTCTTAAGTCAATTTGGGTGGAAATTGATACAGATAAGATGACTCAAGTGATTGATAACATT

SEQ ID NO: 19492 - protein, 336 aa, Streptococcus agalactiae
  VARIANT 239, 275: Xaa = Any Amino Acid
MNNSAANIRSFELALLFLLVFVAVYFVYLAVRDFKMSKNIRLLNWKVRDLIAGNYSDSILIQGDADLVELGESLNDLSDVFRMAHDNLEQEKNRLASILTYMTDGVLATDRSGKIVMINETAQQQFNLAYDEALSMNIVDMLGSGSPYSFQDLVSKTPEVVLNRRDENGEFVTLRIRFALNRRESGFISGLVAVSHDATEQEKEERERRLFVSNVSHELRTPLTSVKSYLEALDEGALXEEVAPSFIKVSLDETNRMMRMISDLLSLSRIDNEVXHLDVEMTNFTAFMTSILNRFDQIRNQKTVTGKVYEIVRDYPLKSIWVEIDTDKMTQVIDNI

SEQ ID NO: 19493 - protein, 265 aa, Streptococcus agalactiae
ATGATTTTATCAATATCAGACCAAGGCTTAGGTATTCCCAAAAAAGATTACCTCTCATCTTTGATCGTTTTATCGTGTTGATAAGGCGAGAAGTCGTCAACAGGGTGGGACTGGACTTGGTTTGTCAATTGCAAAAGAAATTGTTAAGCAGCATAAGGGATTTATTTGGGCTAAGAGTGAGTATGGTAAAGGGTCTACTTTTACAATAGTCTTGCCTTATGATAAAGATGCTGTAACTTATGAAGAATGGGAGGACGTTGAAGAT

SEQ ID NO: 19494 - protein, 89 aa, Streptococcus agalactiae
  VARIANT 17: Xaa = Any Amino Acid
MILSISDQGLGIPKKDXPLIFDRFYRVDKARSRQQGGTGLGLSIAKEIVKQHKGFIWAKSEYGKGSTFTIVLPYDKDAVTYEEWEDVED

SEQ ID NO: 19495 - protein, 807 aa, Streptococcus agalactiae
ATGTCAGAAATAGGATTTAAATATAGTATCTTAGCTTCAGGTTCAACTGGAAATTGTTTTTATATTGAGACACCCCAAAAACGTCTTTTAATTGACGCTGGTTTAACAGGCAAGAAAGTGACTAGCCTTCTTGCAGAAATTAATCGTAAACCAGAAGATTTAGATGCTATACTAGTTACCCATGAACATTCTGACCACATTAAAGGTGTTGGCGTATTGGCTAGGAAATATCACCTTGATATTTATGCCAATGAGCAGACGTGGAAAGTTATGGATGAGCGTAACATGTTAGGCAAAGTTGATGTTAGTCAAAAGCATGTTTTTGGACGCGGTAAAACCTTAACTTTCGGGGATTTAGATATTGAGAGCTTTGGTGTAAGTCATGATGCTGTGGATCCCCAATTTTACCGTATGATGAAAGATGATAAGAGCTTTGTGATGTTGACAGATACAGGATATGTTAGCGACCGAATGGCAGGCTTGATTGAGAATGCAGATGGTTATTTGATCGAGTCAAATCACGACATTGAGATTCTACGTTCGGGTTCTTATCCTTGGACACTTAAGCAACGTATTTTATCAGATAAAGGACATTTATCTAATGAAGATGGTTCAGAAACCATGATTCGCACTATAGGTAACCGTACTAAACACATCTATTTAGGACACTTGAGTAAGGAAAATAATATTAAGGAACTTGCTCACATGACTATGGAAAACAATTTAATGAGAGCTGACTTTGGTGTGGGCACAGATTTTTCTGTTCACGATACTTCACCTGATTCAGCTACCCCACTGACGAGGATT

SEQ ID NO: 19496 - protein, 269 aa, Streptococcus agalactiae; identical to SEQ ID NO: 1368

SEQ ID NO: 19497 - protein, 366 aa, Streptococcus agalactiae; identical to SEQ ID NO: 10243

SEQ ID NO: 19498 - protein, 122 aa, Streptococcus agalactiae; identical to SEQ ID NO: 1370

SEQ ID NO: 19499 - protein, 684 aa, Streptococcus agalactiae; identical to SEQ ID NO: 10245

SEQ ID NO: 19500 - protein, 228 aa, Streptococcus agalactiae; identical to SEQ ID NO: 1372

SEQ ID NO: 19501 - protein, 3357 aa, Streptococcus agalactiae; identical to SEQ ID NO: 10247

SEQ ID NO: 19502 - protein, 1119 aa, Streptococcus agalactiae; identical to SEQ ID NO: 10248

SEQ ID NO: 19503 - protein, 795 aa, Streptococcus agalactiae
ATGATAAAATTAGTAGCAACCGATATGGACGGTACATTCTTAGATGAAAACGGTACCTATGATAAAAAACGTTTAGCAAATGTGCTAAAAAAATTTAAAGAACAAGGAATTGTCTTTACGGCAGCAAGTGGGCGTTCCTTATTATCACTTGAACAATTATTTGCTGACTTTCGTGATCAGATGGCTTTTATAGCAGAAAACGGAAGTGCAGCAGTCTTATTTAATCGCTTGGCATATGAACAGCACTTGAGTCGAGAACAATACTTAGATATTATTGACCATTTGAGTAAGAGCCCTTATATGGAGAATAATGAATATGTCTTATCTGGCAAGGATGGTGCATATATTCTAAGTGATGCCAATCCAGATTATATTGAATTCATCACTCATTATTATGATAATTTGCAAAAAGTTTCTCACTTTGAAGATGTTGATGATATTATTTTCAAAGTAACGGCTAACTTTACTGAAGAGACTGTTAGACAAGCTGAGGAGTGGGTAAATCAAGCTATACCGTATGCCACAGCAGTGACAACAGGTTTTAAATCCATTGATATTATTCTAAGCTCAGTTAATAAACGAAATGGTTTAGAGCACCTCTGTGAACAATACGGTATTAGAGCAGAAGAAGTCTTATCTTTTGGTGACAATATTAATGATTTAGAAATGCTAGAGTGGTCAGGAAAAGCTATCGCAACAGAAAATGCTAGACCAGAAGTTAAAGAGATAGCAGATTGTATTATAGGTCATCACAATAATCAAGCTGTAATGGCTTATTTAGAAAGTATGGTGGAT

SEQ ID NO: 19504 - protein, 265 aa, Streptococcus agalactiae; identical to SEQ ID NO: 1378

SEQ ID NO: 19505 - protein, 822 aa, Streptococcus agalactiae; identical to SEQ ID NO: 10251

SEQ ID NO: 19506 - protein, 274 aa, Streptococcus agalactiae; identical to SEQ ID NO: 1380

SEQ ID NO: 19507 - protein, 1608 aa, Streptococcus agalactiae; identical to SEQ ID NO: 10253

SEQ ID NO: 19508 - protein, 536 aa, Streptococcus agalactiae; identical to SEQ ID NO: 1382

SEQ ID NO: 19509 - protein, 810 aa, Streptococcus agalactiae; identical to SEQ ID NO: 10255

SEQ ID NO: 19510 - protein, 270 aa, Streptococcus agalactiae; identical to SEQ ID NO: 5828

SEQ ID NO: 19511 - DNA, 900 bp, Streptococcus agalactiae
atggatatctttaatcaattaccggatagtgtccttcaatggtttgccattttcatttccattattattgaggcacttccttttgttttgcttggaactattttatcaggaattattgaagtctttataacacctgatatagtcaataagttcttaccgaaaaataaatttctcagagtcttatttggaaccttcgttggctttgtctttccttcttgcgaatgtggtatcattcctattattaatcgattccttgaaaagaaagtgccttcatacacggcagttccgtttcttgctactgcccctattattaatcctattgttttatttgcgacctactcagcatttggaaattccatacgcttcctgatattacgctttgtaggtgctaccattgtagccattgctttaggagtcatgcttgcctttttagtagatgataatattctaaaagaagacgctaaacctactcattttcatgattattctgataagaagtggtatcaaaaaatctttctagccttagctcatgccatcgatgaattttttgatacaggacgctatctagtatttggtactttaattgcttcagctatgcaaatttatttaccaactcgagttcttactactatcggacatagccctatcacagccatcttagttatgatgttgcttgctttcatcttgtcattgtgtagtgaagctgacgcttttataggtgcttctttattatcaacctttggaatcgcgccagtgatggctttccttttaattggacccatgattgatattaagaatttaatgatgatggtaaattcttttaaaacaaggtttattgtccaattcattagtgtatcttctcttattattattatctattgtttatttgtgggggtaata

SEQ ID NO: 19512 - protein, 300 aa, Streptococcus agalactiae; identical to SEQ ID NO: 1386

SEQ ID NO: 19513 - DNA, 126 bp, Streptococcus agalactiae
atggctattacgcacaaacgtcaagatgacttagaaagtatgttcgctagttttgctaaagtaccaaaacctaaaaaagttgattctgattcaaaacctgaacagaaagatgattctcagaaagat

SEQ ID NO: 19514 - protein, 42 aa, Streptococcus agalactiae; identical to SEQ ID NO: 1388

SEQ ID NO: 19515 - DNA, 1041 bp, Streptococcus agalactiae
atgattgaattaggtattacaacattcggagagacaacaatccttgaagaaacaaaccaaagctattcacatcctgagaggattcgccaattagttgctgagattgaactagctgatcaagttggtttagatgtatatggtattggagagcaccatcgtgaagattttgcggtctctgcacccgaaattgtcctagcagcaggagcggttagaactaataatatccgtttatctagtgcagtaacgattctctcttccaatgatcctattcgcgtctaccagcaattttcaacgattgacgcactttcaaatggtagagcagaaattatggcagggcgtggttcctttattgagtcttttccattgtttggatacgatttagcggattatgatgatttatttaatgaaaaaatggatatgttgttagcaattaactcagcgacaaatctcgattggaaaggtcatttgacacaaacagttaatgagcgaccaatttatccaagagcattacagagacagttaccaatatgggtggcaacaggaggaaatgttgattctacaattcgtattgcagaacaaggtttgccaattgtttatgcaactattggtgggaatcccaaagcatttcgtcaattggtccatatttataaagaagttggtagtcgtaatggacacaaaccagaacaactaaaagttgctgctcactcttggggatggattgaagaggataatcaaaccgctattgaccgttattttttccctacgaaacagaccgtcgataatattgctaagggacgccctcattggtctgaaatgaccaaagagcagtatttacgttcagtaggtccagaaggtgctatttttgtaggaagtcctgaagtggttgcacataaaattataggacttgttgaagcacttgagttagaccgttttatgttacatctaccagttggctctatgcctcacaaagacgtcctaaatgctatcaaactttatggtaaggaagtagcaccaattgttcgaaaatattttgaaaagaat

SEQ ID NO: 19516 - protein, 347 aa, Streptococcus agalactiae; identical to SEQ ID NO: 1390

SEQ ID NO: 19517 - DNA, 1944 bp, Streptococcus agalactiae
ttgttagattataaaaacgctatcttgaaatcgctttttaaaactcttcgtaagtcaaaaatatgctataataaaagcgttatggaaaatttaaatattacacaaattgctattgatttaggtattaaagcgtcacaaatcgaaaaggttttagaattaacagatgaaggaaatactattccttttattgcccgttatcgtaaagaaatgacaggtaatttggatgaagttcaaatcaaatcaattattgaccttgataagagtatgacagctctttcagatcgtaaaactacggtcttagccaaaattgaagaacaaggaaagttgactcaagaactcaaaaaggctattgaagaagcaactaaactagcagatgttgaggaactctacctaccttataaagaaaaacgtcgtacgaaagctacgattgcacgtgaagcaggtctttttcctttagcacgtcttattttacaaaataaggataaccttgaggaagaagctcaaaactatcttacagatggttttgagacaactacgaaggcactttctggagcagtagatattcttatcgaagctttttctgaggataataaattacgttcatggacatataatgagatctggaactacagctcaatcactgcagttgttaaagatgagtcacttgatgaaaaacaggtcttcaaaatctactatgacttttctgaaaaaataagtaaactccatggctatcaagttttagcattgaatcgtggtgagaaaatgggtgttcttaaggttaattttgagcataaccttgaaaaaatgtttcgcttttttgctgttcgatttaaagaaactagccaatatatagatgaccttattgtacagactgtcaagaaaaaaatcgttccagctatggaacgccgtatccgtacagaactaagtgaaggagcagaagatggtgcaatttcactgttttcagagaatcttcgtaacttattgttagtctcaccgcttaaggggaaaatggtgttaggttttgaccctgcctttcgtacaggagcaaaattagcagtagtagaccaaactggaaaattaatgacaacacaagtgatttatccagttcctccagctaatcaagcaaaaatcgaacaatcaaaaatagagttagcaaaacttatcaaagaattcaatatagaaattattgctatagggaatggaacagcgagtcgtgaatcagaagcatttgttgcagaagttttacaagattttccagacgtatcctatgtgattgttaacgaaagtggtgcctctgtttattcagcctcagaattggcacgtcatgaatttccagacttaacggttgaaaaacgttcggccatctcaattgcaagacgtctgcaagacccattagcagaactagtcaaaattgatccaaaatctattggtgtgggtcaatatcaacatgatgttagccaaaaaaaattagcagaaaatcttgattttgttgttgaaactgtagttaaccaagtaggtgttaatgttaatacagcaagtccagccttgttagctcatgtttcaggtttaaataaaacaatatctgaaaatattgttaaatatcgtgaagagaatgggcaaattaagtcacgtgctgaaattaagaaagtgcccagattaggagcaaaagcttttgagcaagctgctggattcttacgtattcctaatgctaaaaatttcttggataatacaggtgttcaccctgagtcttatgaagctgttaaaaagttgcttgaccaactgactatcaaagaattagatgatcttgctaaagagaagttacaaaaccttgacttaattgcaacagcagaaagtattggggtaggtcaagaaacattaaaagacattatagaagatcttttgaaacacgtcgtgatttgcgtgatgattttgaagcgcctgttt

SEQ ID NO: 19518 - protein, 648 aa, Streptococcus agalactiae
MLDYKNAILKSLFKTLRKSKICYNKSVMENLNITQIAIDLGIKASQIEKVLELTDEGNTIPFIARYRKEMTGNLDEVQIKSIIDLDKSMTALSDRKTTVLAKIEEQGKLTQELKKAIEEATKLADVEELYLPYKEKRRTKATIAREAGLFPLARLILQNKDNLEEEAQNYLTDGFETTTKALSGAVDILIEAFSEDNKLRSWTYNEIWNYSSITAVVKDESLDEKQVFKIYYDFSEKISKLHGYQVLALNRGEKMGVLKVNFEHNLEKMFRFFAVRFKETSQYIDDLIVQTVKKKIVPAMERRIRTELSEGAEDGAISLFSENLRNLLLVSPLKGKMVLGFDPAFRTGAKLAVVDQTGKLMTTQVIYPVPPANQAKIEQSKIELAKLIKEFNIEIIAIGNGTASRESEAFVAEVLQDFPDVSYVIVNESGASVYSASELARHEFPDLTVEKRSAISIARRLQDPLAELVKIDPKSIGVGQYQHDVSQKKLAENLDFVVETVVNQVGVNVNTASPALLAHVSGLNKTISENIVKYREENGQIKSRAEIKKVPRLGAKAFEQAAGFLRIPNAKNFLDNTGVHPESYEAVKKLLDQLTIKELDDLAKEKLQNLDLIATAESIGVGQETLKDIIEDLLKHVVICVMILKRLF

SEQ ID NO: 19519 - DNA, 126 bp, Streptococcus agalactiae
  misc_feature 113, 114, 115, 116, 117: n = A,T,C or G
ttgcgtgatgattttgaagcgcctgttttgagacatgatggtttagatgtcagtgatttaaaagttggacgggattgcaggaactggtcaaacgccgttgatttggggctttnnnnnttaattaat

SEQ ID NO: 19520 - protein, 42 aa, Streptococcus agalactiae
  VARIANT 38, 39: Xaa = Any Amino Acid
MRDDFEAPVLRHDGLDVSDLKVGRDCRNWSNAVDLGLXXLIN

SEQ ID NO: 19521 - protein, 180 aa, Streptococcus agalactiae
TTGCCAATTGTTTATGCAACTATTGGTGGGAATCCCAAAGCATTTCGTCAATTGGTCCATATTTATAAAGAAGTTGGTAGTCGAATGGGACACAAACCAGAACAACGTAAAAGTGCTGCTCACTCTTGGGGAAGGATTGAAGAGGATAATCAAACCGCTATTGACCGTTANNNNNTTAAT

SEQ ID NO: 19522 - protein, 60 aa, Streptococcus agalactiae
  VARIANT 57, 58, 59: Xaa = Any Amino Acid
MPIVYATIGGNPKAFRQLVHIYKEVGSRMGHKPEQRKSAAHSWGRIEEDNQTAIDRXXXN

SEQ ID NO: 19523 - protein, 195 aa, Streptococcus agalactiae
ATGACAACACAAGTGATTTATCCAGTTCCTCCAGCTAATCAAGCAAAAATCGAACAATCAAAAATAGAGTTAGCAAAACTTATCAAAGAATTCAATATAGAAATTATTGCTATAGGGAATGGAACAGCGAGTCGTGAATCAGAAGCATTTTGGTTTGGGCAAAGGGAAAAAAAGGGGTTTTTTTTNNNNNTTAAT

SEQ ID NO: 19524 - protein, 65 aa, Streptococcus agalactiae
  VARIANT 62, 63, 64: Xaa = Any Amino Acid
MTTQVIYPVPPANQAKIEQSKIELAKLIKEFNIEIIAIGNGTASRESEAFWFGQREKKGFFXXXN

SEQ ID NO: 19525 - protein, 923 aa, Streptococcus agalactiae
TTGGCACGTTACCAATTCCAGACTTAACGGTTGAAAAACGTTCGGCCATCTCAATTGCAAGACGTTGCAACCCATTAGCAGAACTAGTCAAAATTGATCCAAAATCTATTGGTGTGGGTCAATATCAACATGATGTTAGCCAAAAAAAATTAGCAGAAAATCTTGATTTTGTTGTTGAAACTGTAGTTAACCAAGTAGGTGTTAATGTTAATACAGCAAGTCCAGCCTTGTTAGCTCATGTTTCAGGTTTAAATAAAACAATATCTGAAAATATTGTTAAATATCGTGAAGAGAATGGGCAAATTAAGTCACGTGCTGAAATTAAGAAAGTGCCCAGATTAGGAGCAAAAGCTTTTGAGCAAGCTGCTGGATTCTTACGTATTCCTAATGCTAAAAATTTCTTGGATAATACAGGTGTTCACCCTGAGTCTTATGAAGCTGTTAAAAAGTTGCTTGACCAACTGACTATCAAAGAATTAGATGATCTTGCTAAAGAGAAGTTACAAAACCTTGACTTAATTGCAACAGCAGAAAGTATTGGGGTAGGTCAAGAAACATTAAAAGACATTATAGAAGATCTTTTGAAACCAGGTCGTGATTTGCGTGATGATTTTGAAGCGCCTGTTTTGAGACATGATGTTTTAGATGTCAGTGATTTAAAAGTTGGACAGGAATTGCAAGGAACTGTTCGAAACGTCGTTGATTTTGGTGCTTTTGTTGATATTGGTGTTCATGAAGATGGTCTAATCCACCAGTCTCGCCTTATTAAGCGAAAACGCGATAAAAAAACTAGAAAAATGCCTCCTTTACAACATCCAAGCAAATATCTCTCTGTTGGTGATATTGTAACTGTTTGGGTTGTAGAGGTAGATGCGGAGCGTAGCAGAATTGGACTTAGTCTTATCAAGCCAGACGGACTTGAC

SEQ ID NO: 19526 - protein, 309 aa, Streptococcus agalactiae
  VARIANT 24, 25: Xaa = Any Amino Acid
MARYQFPDLTVEKRSAISIARRLXXPLAELVKIDPKSIGVGQYQHDVSQKKLAENLDFVVETVVNQVGVNVNTASPALLAHVSGLNKTISENIVKYREENGQIKSRAEIKKVPRLGAKAFEQAAGFLRIPNAKNFLDNTGVHPESYEAVKKLLDQLTIKELDDLAKEKLQNLDLIATAESIGVGQETLKDIIEDLLKPGRDLRDDFEAPVLRHDVLDVSDLKVGQELQGTVRNVVDFGAFVDIGVHEDGLIHQSRLIKRKRDKKTRKMPPLQHPSKYLSVGDIVTVWVVEVDAERSRIGLSLIKPDGLD

SEQ ID NO: 19527 - protein, 456 aa, Streptococcus agalactiae; identical to SEQ ID NO: 10265

SEQ ID NO: 19528 - protein, 152 aa, Streptococcus agalactiae; identical to SEQ ID NO: 5838

SEQ ID NO: 19529 - protein, 261 aa, Streptococcus agalactiae; identical to SEQ ID NO: 5839

SEQ ID NO: 19530 - protein, 87 aa, Streptococcus agalactiae; identical to SEQ ID NO: 5840

SEQ ID NO: 19531 - DNA, 132 bp, Streptococcus agalactiae
atgatgacggttggttctggtaattcatataaaggagatttgctagatgaatctccttttttcttagctttatttagaccactttttcaaaatatcttctttttttcagaaaaacgcgttagcgcttacttt

SEQ ID NO: 19532 - protein, 44 aa, Streptococcus agalactiae; identical to SEQ ID NO: 10270

SEQ ID NO: 19533 - DNA, 933 bp, Streptococcus agalactiae
atggcagttactgttcaaatgttagttgaccgcttaaagttaaatgtcatctatggtgatgaacatctattatctaagcggattacaacagctgacatttcacgtcctggtctagaaatgacagggtattttgattattatgcaccagagcgtttgcaacttgttggtatgaaagagtggtcatatttaatggctatgacaggacataatcgttatcaagtgttacgtgaaatgttccaaaaagaaacaccagctattgttgtagcacgtgatttagaaatcccagaagagatgtatgaggcggctaaagataccggtattgctattcttcaaagtaaggcccctacaagtcgtttatcaggtgaagtttcttggtatttagattcttgcttagctgagaggacaagtgttcatggtgtcttgatggatatctatggtatgggtgttctgattcaaggtgattccggtattggtaagagtgagacaggactagagctagttaagcgaggacatcgtttggtagcagatgatcgtgttgatgtttatgctaaagacgaagagacgctttggggagagcctgctgagatattacgtcatttacttgaaattagaggtgtgggaatcattgatattatgagcctatatggagctagtgcggttaaagattcatcgcaagtgcaattagctatataccttgaaaactttgaaactggaaaagtttttgatagactcgggaatggcaatgaagagatcgaattatctggagttaaggttcctcggatacgtattcctgttaaaacaggccgaaacgtgtcagtagttattgaagcagcggctatgaatcacagagctaaacaaatggggtttgatgctacccagacttttgaggatcgtttaacacatttgattagtcagaacgaggtcaatgatgat

SEQ ID NO: 19534 - protein, 311 aa, Streptococcus agalactiae; identical to SEQ ID NO: 1396

SEQ ID NO: 19535 - DNA, 771 bp, Streptococcus agalactiae
atgattaatccagtagcaatacgattaggccccttttctattcgctggtatgctatttgcatagtgtctggtatgttgttagcagtttacttagcaatgaaagaggcccctcgtaagaacattaagtcggatgatattctagatttcattctcatggcttttccactatccattgttggagctcgtatttattatgttatcttcgaatgggcttattactctaagcacccagtagagattatcgccatctggaatggcggtattgctatttacggagggttaattaccggggccattctccttgtgattttttcatatcgtcgcttgattaatcccattgattttctggatattgctgctccaggagtgatgattgcccaagccataggtaggtgggggaattttattaatcaagaagcatacggtagggcagtaaaaaatctgaattacgtaccaaactttataaaaaatcaaatgtatattgatggagcttaccgagtacctacatttttatatgagtctctttggaacttcctaggttttgtcatcatcatgtctattcgtcatcgaccgcgcactttaaaacaaggtgaagtggcatgtttttatttagtttggtatggatgtggacggttcattattgaagggatgaggacagatagcctttatttggcgggtttgcgcgtgtcacaatggttatcagttattttagttattatcggaattgtcatgattatttatcgtcgtcgtgaacaacatatttcatattat

SEQ ID NO: 19536 - protein, 257 aa, Streptococcus agalactiae; identical to SEQ ID NO: 10274

SEQ ID NO: 19537 - DNA, 396 bp, Streptococcus agalactiae
atgatagaaattgctgtattaattattgccattgcgtttgttgttttagttttaggaatacttttcgttctgaaaaaagtatcagaaacgattgaggaaaccaagcaaactattaaagtattaacaagcgatgttaacgtgactctttaccaaactaatgaaattttagccaaagctaatgttttagttgatgatgttaatggtaaagtatctactattgatcctctttttgtagctattgctgacttatcagaatctgtatctgatttaaacctacaggcaagacatattggacaaaaggcaagtagtgcaacctcaagtgttactaaggcaggttcagctttagctattggaaaagcggcttcaaaaatttttcgtaaaaaaggagacaaaaaa

SEQ ID NO: 19538 - protein, 132 aa, Streptococcus agalactiae; identical to SEQ ID NO: 5848

SEQ ID NO: 19539 - DNA, 429 bp, Streptococcus agalactiae
atgagtaaattatttaaaactttagttatcagtgctgcatcaggtgcagcagcagcttattttttaacaacaaaaaaaggaaaagagctaaggaaaaatgcagaaaaattctatggagaatataaagaaaatccagaagaatatcatcaaatagctaaagataaagcaagtgaatattcaaatttagctgttgatacttttaaagattataaaggtaaatttgaatcaggtgaattgacaacagaggatatcgtctcagccgttaaggaaaaaagcggagaagtagttgactttgctaatgattttgtcaatcaagctaaatcaaaattctcagacgaggatactgctaaaaaagaagataaggctcctgaaacaaaagtagaagatattgtcattgattataaagaaaacacagaagataaagaaaaa

SEQ ID NO: 19540 - protein, 143 aa, Streptococcus agalactiae; identical to SEQ ID NO: 1402

SEQ ID NO: 19541 - protein, 273 aa, Streptococcus agalactiae; identical to SEQ ID NO: 5851

SEQ ID NO: 19542 - protein, 91 aa, Streptococcus agalactiae; identical to SEQ ID NO: 5852

SEQ ID NO: 19543 - protein, 924 aa, Streptococcus agalactiae
ATGGAAAAAATAATTTTGACAGCGACAGCTGAATCTATTGAACAAGTAAAGCAATTGCTAGCAATAGGAATTGACCGCATCTATGTAGGGGAAGAAAATTACGGTCTTCGTTTACCACATTCATTTTCAGACGATGAATTGCGTGAAATCGCTAAATTAGTACATGATGCTGGTAAAGAATTGACAGTAGCTTGTAATGCACTCATGCATCAAGAGATGATGGATAATATCAAACCATTTTTGGAGTTGATGAAAGAAATTAATGTGGATTATTTGGTAGTTGGTGATGCAGGAGTATTTTATATCAACAAGCGTGATGGTTATAACTTCAAACTTATCTACGACACTTCTGTCTTCGTTACATCAAGTCGTCAAGTTAATTTTTGGGGACAACATGGAGCAGTAGAAACGGTTTTAGCACGTGAAATACCTTCTGAAGAACTTTTTAAGATGTCTGAGAATCTTGAATTTCCTGCTGAGATTTTAGTTTATGGGGCTTCTGTAATTCATCACTCTAAGCGTCCGTTATTGCAAAACTATTATAATTTTACTCATATCACTGATGAAAAAACACGTGAGCGTGGTCTTTTTTTAGCAGAACCAGGTGATCCAGAAAGTCACTATTCTATTTACGAAGATAAGCATGGGACTCATATTTTTATTAACAATGATATCAATATGATGACTAAAGTGACTGAACTAGTTGAACATCACTTTACTCACTGGAAATTAGATGGTATTTATTGTCCAGGAGATAATTTTGTTGCTATTGCTGAAATTTTTGTCGAAACAGCTCGTTTGATTGAAAATGGAACATTCACTCAGGATCAGGCTTTCTTGTTTGATGAACGAATTAGAAAACTGCACCCTAAAGGACGTGGTTTAGATACTGGATTTTATGATTTTGACCCATCAACAGTAAAA

SEQ ID NO: 19544 - protein, 308 aa, Streptococcus agalactiae; identical to SEQ ID NO: 1404

SEQ ID NO: 19545 - protein, 1283 aa, Streptococcus agalactiae
ATGTCTAATGTAAAAAAACGCCCTGAGGTTTTATCACCTGCAGGAACACTAGAAAAATTAAAAGTTGCTATTGATTATGGAGCAGATGCTGTATTTGTTGGAGGTCAAGCGTATGGTCTTCGAAGTAGAGCTGGTAACTTTTCTATGGAAGAGTTACAAGAGGGAATAAACTATGCTCATGCAAGAGATGCTAAAGTTTATGTAGCGGCTAATATGGTTACTCATGAAGGTAATGAGCTTGGGGCAGGTCCGTGGTTTCGTGAATTACGTGATATGGGACTAGATGCAGTCATTGTTTCAGATCCTGCTCTTATTGTTATTTGTGCTACAGAAGCACCAGGCTTAGAAATTCATTTGTCAACTCAAGCCTCTTCCACGAACTATGAAACTTTTGAATTTTGGAAAGAGATGGGGCTTACTCGTGTCGTATTAGCACGTGAGGTTACTATGGCAGAGTTGTCTGAAATCAGGAAGAGGACAGATGTTGAGATAGAAGCATTTGTTCATGGCGCGATGTGTATTTCATACTCAGGACGATGTGTTCTATCAAACCATATGAGCCATCGTGATGCTAATCGTGGCGGTTGCTCTCAGTCATGTCGTTGGAAATATGACCTCTACGATATGCCATTTGGACAAGAACGTCAATCGTTAAAAGGCGAGATTCCAGAACCTTTCTCAATGTCAGCTGTGGATATGTGTATGATTGAGCATATTCCAGATATGATTGAAAATGGTGTAGATAGTTTAAAAATAGAAGGACGTATGAAATCCATTCATTATGTTTCTACAGTAACTAATTGCTATAAAGCTGCTGTAGATGCCTATATGGAAAGTCCAGAAGCTTTTGAAGCTATTAAAGAAGACTTGATTGATGAACTTTGGAAGGTTGCACAACGCGAATTAGCAACAGGTTTCTACTACCATACACCAACTGAAAATGAACAACTCTTTGGAGCTCGTCGTAAAATTCCTCAATACAAATTTGTTGGGGAAGTGGTTTCATTTGACAATGCTAAAATGGAGGCTACAATTCGTCAGCGTAATGTTATTATGGAAGGAGATCGCGTAGAATTCTATGGTCCTGGCTTCCGTCACTTTGAATGTTTTATTGATGGTCTGCGTGATGCTGAAGGAAATAAAATAGACCGTGCTCCAAATCCGATGGAATTATTAACCATAACATTACCAAATCCAGTAAAAAAAGGGGATATGATTCGTGCTTGTAAAGAAGGATTAGTGACCTTTATCAAAATGATGGTACTAGCAAGACTGTAAGAGCT

SEQ ID NO: 19546 - protein, 428 aa, Streptococcus agalactiae
  VARIANT 415: Xaa = Any Amino Acid
MSNVKKRPEVLSPAGTLEKLKVAIDYGADAVFVGGQAYGLRSRAGNFSMEELQEGINYAHARDAKVYVAANMVTHEGNELGAGPWFRELRDMGLDAVIVSDPALIVICATEAPGLEIHLSTQASSTNYETFEFWKEMGLTRVVLAREVTMAELSEIRKRTDVEIEAFVHGAMCISYSGRCVLSNHMSHRDANRGGCSQSCRWKYDLYDMPFGQERQSLKGEIPEPFSMSAVDMCMIEHIPDMIENGVDSLKIEGRMKSIHYVSTVTNCYKAAVDAYMESPEAFEAIKEDLIDELWKVAQRELATGFYYHTPTENEQLFGARRKIPQYKFVGEVVSFDNAKMEATIRQRNVIMEGDRVEFYGPGFRHFECFIDGLRDAEGNKIDRAPNPMELLTITLPNPVKKGDMIRACKEGLVXLYQNDGTSKTVRA

SEQ ID NO: 19547 - protein, 210 aa, Streptococcus agalactiae; identical to SEQ ID NO: 10285

SEQ ID NO: 19548 - protein, 70 aa, Streptococcus agalactiae; identical to SEQ ID NO: 1410

SEQ ID NO: 19549 - protein, 795 aa, Streptococcus agalactiae; identical to SEQ ID NO: 10287

SEQ ID NO: 19550 - protein, 265 aa, Streptococcus agalactiae; identical to SEQ ID NO: 1412

SEQ ID NO: 19551 - DNA, 1338 bp, Streptococcus agalactiae
atgaatcaaaatcattccgtcaaaagatccttatccgaagttaatcagagcgttgaggttcctcacaatagctctttttggaacactttaagagcttttcttggacctggagctttggttgcagttggttatatggatccaggtaactggattactagcgttattggtggagctacctatcgttacttactattgtttgttgttttagtatcttctttgatggcgatgcaattacaacaaatggctggcaagcttggcattgttacacgacaggacttagcacaagcaacagcttctcgactcccaaaaccgcttcgttacctgctatttattatcattgagttagcccttatcgctactgatttagcagaagtcattggctctgccattgctcttcacttattatttggctggcccctgttactgtctatcatgattactattttggatgtattcttacttttactcttaatgaagttaggcgtccaaaaaattgaagcctttgtttctgttctcatattgacaattttgataatctttacatatttagttgttttatcacaacctgatttagatgctatgttcaaaggatttttaccacaccatgagctttttaacatatcacatgaagggaaaaatagtcctttaaccctcgctcttggcattatcggcgcaacagtcatgccacataatctttatttacattcttctttatctcagactagacgcgtggattatcataataaatcttcaataaaaaaagctgtacgtttcatgaccttagattctaacattcagctatcacttgcatttgtcgtgaattcgctactattagtcttaggagctagtctattttatgggcatgctaatgatatcagtgccttttctcaaatgtatcttgccctatctgataaaactattactggtgcagtagccagttctttcctttctaccctttttgcagttgccctactagcaagtggtcaaaattcaacgattacaggtactttaacaggacaaatcgttatggaaggtttccttcacttcaaattacctcaatggttaataaggctttgtactagattattaactcttcttccaatttttgttatcgccctactagttggaggcgaagaaaatacgttagatcaactaatcgtctattcacaagtttttctttccttagctttaccattttcaatctttccattgatttatttcacgtcgcaaaaatcaattatgggagagcatgctaatgctaaatggaatacctatttagcataccttgtcgccatcattttaacattactcaatttgaaattaatcatggatttactt

SEQ ID NO: 19552 - protein, 446 aa, Streptococcus agalactiae; identical to SEQ ID NO: 1414

SEQ ID NO: 19553 - DNA, 1086 bp, Streptococcus agalactiae
atggcattagccttgaaagaggctgagaaaggtatggggttcgttgctcccaacccattagtaggtgctgttattgttaaagatgatcgtataatttccaaaggttatcataaacgatttggagatttacatgcggaaagacaggctattaaaaatgctgatgaggatatctctggaagtactctgtacgtgactttagaaccatgctgtcatgttggtaagcaaccaccttgtactgaagctcttattaaatctggtatcaaaaaagtagtagttggaagtttagatccaaatcctttagtttcaggaaaagggattgccttgttgagaaaagaaggtttaaatgttgaagttggtatcttaagagaagaatgcgatgctctgaatgaaagatttatttttcacatgacctataagcagccttttgtttatttgaaatatgctatgactttagatgggaagatagctacaaagacgggcgattctaagtggatatcaaatgagcactcaagacaatctgttcagaaattgaggcaaaaatgtagtgctattatggtcggtatcaatactgtattagctgataatccacgtttaacttgccgtattcctaaaggtgaagcgcttgtgaggatcgtatgtgatagtcagttgaagatacctttagactcttacctagttaagagcgctaaaacaataccaacatggattgcaacatgttcagataatcttgctcagcaacaaacattaaaagaaatgggttgccgtttgattaaggtcccaagaaaagatggaaagctggatttgaaagtattaatgactattttaggacaagaagggattgatagccttcttattgaaggaggaagtagtttacatttttcagctttaaaagctggtattgttaacagactaattgtttttattgcacccaaaataataggaggtctgaaagcaaaaacagctatttctggagaaggtttggattggcttaaccaagctttcagagtaaaagatattgaacttagtcgtatggattctgacgttgttattgaaggaaaggtagaacattatgtttacaggaattat

SEQ ID NO: 19554 - protein, 362 aa, Streptococcus agalactiae; identical to SEQ ID NO: 1416

SEQ ID NO: 19555 - DNA, 624 bp, Streptococcus agalactiae
atgggtcaagtcagtcgtattcggaatggcataaagtcccaacaattaagtattgatgctcccaaactagtccctttattaagaaaaggggatagcgtagctgttaatggtgtttgtttgacggttcttgacaaaagtgaaacagcttttatagcagacgtcatgccagaaagtatgatgcgaacaagcttagctgctttacgacttcattctaaagttaacttagaattagcactcagaagtgactcaaggttaggggggcattttgttcttggacatgtggatggggttggaaaaatagaaaaaatccaaaaagatgatattgctgtcagattttcaattgatgctccacctagtattatgtcttatattatagagaaaggttcggtggctctagatgggattagcttaacagtggtatcatttacagagcattcttttgaagtttcggtcattccccacacgatggctcaaactaatctatccttaaaaaaggttggggatttattaaatatcgaagtggatgttttaggcaaatatgctgagaaatttttagcacccactaatagaactaatcacacttcatcggtaatggattggtcttttttatcagaaaatggctac

SEQ ID NO: 19556 - protein, 208 aa, Streptococcus agalactiae; identical to SEQ ID NO: 1418

SEQ ID NO: 19557 - DNA, 1191 bp, Streptococcus agalactiae
atggcctttagtccaataaaaaaacttttacaagacatcaaatcagggaaaatggtagtgttgatggatgacgaaaatagagagaatgaaggagaccttatttgtgcggctgaaatggtgacaaaagagtcgattaattttatggctaaatttgggaaaggattaatttgcttacctctgtctaattactatgctgaaaagttagaattagctcaaatggctagccataatactgataatcatgaaacagcttttaccatatctattgatcatctatcaactagtactgggatttctgcggaagatagagctttgacagctaagatggttgctaacgacagtagcaaagctaaagactttagacgtcctgggcacttatttcccttgttagccaaggaaggaggtgttttagctagaaatggacatactgaagcaaccgttgatctatgtcgtttagctggattaaaggaatgtggactttgttgtgaaataatggctgaagatggtagtatgatgagaaaggatgagttattagcatttgctcaaaagcacgatttagctatcgctaccataaaacaattgcaagactatagacgtcaagaagagggaggggtggttagagaaattgagattcagctaccaacgcaattcggtcattttacggcttatggatatagcgaagttgtggcaaataaggaacatgttgcccttgttaaaggggatattagtagtggtgaagatgttttatgtcgtttacactcagaatgtttgacaggtgatgtctttcattccttgagatgtgattgtggggaacaactggctaatgccctccaacaaatagaggctgaaggtcgtggagtccttctttatatgagacaggaaggtcgaggaattggtttgattaataagttaaaagcttatcatttgcaagaagaaggcttagatactttagaagctaatttggctttaggttttgaaggagatgagagagactatggagttagtgctcaacttttaaaagatttaggtataaattctataaacttactaaccaataatccagataaaatccaacaacttgaagcagaaggaatttgcgtcaaaaacagagtgccattacaggtggcagcaacagcttatgaccttaattatttaaaaactaaaaaagaaaaaatgggacatcttttagat

SEQ ID NO: 19558 - protein, 397 aa, Streptococcus agalactiae; identical to SEQ ID NO: 10296

SEQ ID NO: 19559 - DNA, 468 bp, Streptococcus agalactiae
atgacaattattgaaggacaattagtggcaaacgaaatgaaaataggaatcgtagtctcacgtttcaatgaattgattacatctaaattattatcaggagcagtagatggactgctgagacatggtgtttcagaagaagatatagatattgtatgggtacctggtgcttttgaaatcccctatatggctagaaaaatggcattatataaagattatgatgctattatctgtcttggggtagtcattaaaggcagcactgatcattatgattatgtttgtaatgaggtgacaaaaggtattggtcatttaaatagccagtcagatatccctcatatctttggtgttctaacaacggataacatcgaacaagctattgagagggcaggaacaaaagcaggaaataaaggttatgattgtgctctttcggctattgaaatggtgaaccttgataaaaaattgcgtgagcga

SEQ ID NO: 19560 - protein, 156 aa, Streptococcus agalactiae; identical to SEQ ID NO: 1422

SEQ ID NO: 19561 - protein, 1488 aa, Streptococcus agalactiae; identical to SEQ ID NO: 10299

SEQ ID NO: 19562 - protein, 496 aa, Streptococcus agalactiae; identical to SEQ ID NO: 1424

SEQ ID NO: 19563 - protein, 900 aa, Streptococcus agalactiae; identical to SEQ ID NO: 10301

SEQ ID NO: 19564 - protein, 300 aa, Streptococcus agalactiae; identical to SEQ ID NO: 1426

SEQ ID NO: 19565 - protein, 639 aa, Streptococcus agalactiae; identical to SEQ ID NO: 10303

SEQ ID NO: 19566 - protein, 213 aa, Streptococcus agalactiae; identical to SEQ ID NO: 1428

SEQ ID NO: 19567 - protein, 471 aa, Streptococcus agalactiae; identical to SEQ ID NO: 5877

SEQ ID NO: 19568 - protein, 157 aa, Streptococcus agalactiae; identical to SEQ ID NO: 1430

SEQ ID NO: 19569 - protein, 615 aa, Streptococcus agalactiae
ATGGAAATACTGATTGCAGGTGGTAGTGGTTTTTTAGGAAAGCAGATAATAAAAGCAGCGCTTACAAAAGGGCATAAAGTGGCTTACTTATCAAGACATGAAGGTAAAGGTGATATATTTAAGGATCCTAGATTAACCTACATTAGGGGAGATATTACAGAAGCTGATAAGATTCATTTAGAAGACAGAACTTTTGATATATTAATTGACTGTATTGGAGCGATTAAGCCCAATCAACTAGATGAGCTTAACGTTAAAGCAACCCAAAAAGCAGTAGCACTCTGTCACAAAAATCAAATACCAAAGTTAGTTTATATTTCAGCCAACAGCGGCTATTCAGCTTACATTAAAAGTAAAAGGAAGGCAGAGCAGATAATCAAAGCAAGCGGTCTGGATTATCTTTTTGTAAGACCAGGTTTGATGTATGGTGAAGAGCGACCTCTCTCGATTTTCCAAGCCAAGTGTATAAAGTTATTTAGTCATTTGCCTTTCTTAGGTATTGTTGTACAAAAGGTCTTTCCAACTAAGGTTGTGATAGTGGCAGAAGCAATCGTTACTACGCTTAGGAAAAAACCAACCCAAAAAATCCTTTCTATTGAAGAATTAAATAATAAA

SEQ ID NO: 19570 - protein, 205 aa, Streptococcus agalactiae
MEILIAGGSGFLGKQIIKAALTKGHKVAYLSRHEGKGDIFKDPRLTYIRGDITEADKIHLEDRTFDILIDCIGAIKPNQLDELNVKATQKAVALCHKNQIPKLVYISANSGYSAYIKSKRKAEQIIKASGLDYLFVRPGLMYGEERPLSIFQAKCIKLFSHLPFLGIVVQKVFPTKVVIVAEAIVTTLRKKPTQKILSIEELNNK

SEQ ID NO: 19571 - DNA, 846 bp, Streptococcus agalactiae
atgagaagaagaattaaacctattgttgttgcggtttttttcagtttatttggacttttattaattattggtcatttacattcgacaaatactttgaaaaaagaattagttgaagctaaaaagacaattccatccgtaaaagcttcaaaagtaccgcaaaaatcaacatcatcgaaagataaagagtttgttcttaaaccgattatcgatgtctctggttggcaacttcctaaggagattgattacgatacgctttcaaaaaatatttcaggtgttgttattcgtgtctttggtggatcaaagatatctaagactaataacgctgcttatacaactggaatcgataaatcgtttaagacccatatcaaagaatttcaaaagcgaaatatcccagtagctgtctacagttatgcacttggttcaagtgttaaagaaatgaaagaagaggctcagatattttataagaatgcagctccttacaaaccaactttttattggattgacgtagaagaggagacaatgtctaacatgaataaaggtgtccaagcattccgaaaagaattaaaaagacttggtgctaaaaatgttggtatctacattggtacttactttatgactgagcaaggcatctctgtaaaaggatttgacgctgtttggattccaacttatggtagcgattctggatactatgaagcggctccgcaaactgaacttaaatacgatttacaccaatacacctctcaaggttatctaccaggattcaatcaaccgcttgatttaaatcaaattgcagttaataaagacaagaagaaaacttatgagaaactttttggaaaagtaaaagag

SEQ ID NO: 19572 - protein, 282 aa, Streptococcus agalactiae; identical to SEQ ID NO: 10310

SEQ ID NO: 19573 - DNA, 522 bp, Streptococcus agalactiae
atgataaagaattcaactttaactaaattgactagagtcgctatattatctgctttgtgtgttgtgttgagatatgcttttgcgcctctgcctaacattcagccaattactgccatttttttgattacagttgtcttattcgatttaaaagaaggtgtagctactgtaactataacaatgctagtttcttcttttttaatgggctttgggccatgggtctttttgcaaatcatttccttcactttaattttatgcttgtggaaatttctgatatatccgctgacaaaagctgtatgttttggtaaaataacggaggtagtacttcaaactttctttgcaggagggttaggggttgtttatggcgtcattattgatacctgttttgcttggttatatcatatgccttggtggacttatgtattagcaggacttagttttaatatggcacacgctttatcaacttgtttattttatcctcttttgttaccgattttaaggagatttaggaatgaaaaaatacat

SEQ ID NO: 19574 - protein, 174 aa, Streptococcus agalactiae; identical to SEQ ID NO: 10312

SEQ ID NO: 19575 - DNA, 387 bp, Streptococcus agalactiae
atgaaaaaatacattaaattattcttgctaacagtattcgctacaactttagtagcttgcgggcaaccatctacatcgaataagacaacaactagctcaacgttagaagttggtaaggttgaattggtggttaaagaagatacgaacgtgttaagtgaaaaggttgtttaccataaaggtgatactgttttggatgtgcttaaagctaactataaagttaaagaaaaagatggtttcattacttcaattgatggcatcagccaagatgaaaccaaagggctttattggatgttcaaggtcaataataaattagctcctaaggcagcaaaccaaattaaagttaaaaagaatgacaaaattgaattttatcaggaagtttacaaaaaa

SEQ ID NO: 19576 - protein, 129 aa, Streptococcus agalactiae; identical to SEQ ID NO: 1436

SEQ ID NO: 19577 - DNA, 1797 bp, Streptococcus agalactiae
atgaaacttaaaaaacgctctgaattccctgaaaatgaactttgggatctgactgctctctacaaagatcgtcaagattttttactggctattgaaaaagctcttgaggatatcaaggttttcaaaaaaaattacgagggaaaacttaattgtgttgaggattttactagtgcccttatggaaatcgagcatatttatatccagatgagtcacattgatacgtatgcttttatgcctcaaactactgactttagcaacgaagagtttgcacaaatttctcaagcaggatcagacttcgcaactaaagctaatgtactactttctttctttaatactgccctagcaaatgcagatataaagattttagattctttagaaaataaccctcatttcaaagcaactattcgccaagctaaaattcaaaagcaacacttattaagtccagaagtcgaaaaagctttgacaaacttaaatgaagtcctaaatacaccatatgatatttatactaaaatgcgtgctggcgattttgatatggaagattttgaagttgacggaaaaacctacaaaaatagttttgtaacttatgaaaattactttcaaaatcacgaaaatgcagagatacgtgaaaaatccttccgttcattctcgaaaggtctacgtaagcaccaaaatgctgcagctgcggcttatcttgcaaaagtcaaatctgaaaagttaattgctgatatgcgtggttacgatagtgtttttgattatcttctttccgaacaagaagttgaccgttcaatgtttgacagacaaattgatcttatcatggatgaatttggtccagtagctcaacgattcctcaaacatatcgccgatgttaatggtattgaaaagatgacttttgcagattggaaattagacattgataacgaacttaatcccgaagtaagtatcaatgatgcttatgacttagtaatgaaatcagttgctcctttaggaaaagaatattctcaagaggttgagcgctatcaaaaagagcgttgggttgattttgcagctaacgctaataaagattctggaggatatgctgcggatccttacaaagttcatccctatgtactcatgagctggacggggcgtatgagcgatgtctacacacttattcatgagattggacattctggtcaatttatcttctcagataatcaccaaagttttttcaatactcacatgtccacttactatgttgaagctccatctacttttaacgaacttttacttagtgactacttagaaaaccaatttgatacagcacgtcaaaaacgctttgctcttgcacatcgcttaactgatacttacttccacaatttcattactcacttacttgaagctgctttccaacgtaaagtttacactctaattgaggagggaggaacttttggagcagaacaattaaatgctattatgaaggaagtattaacacaattctggggagatgctattgaaatagatgacgatgccgctttgacatggatgagacaagctcattactacatggggctctatagctatacttactctgctggattagtaatctcgacagccggctatctcaatctcaaaaataatccaaacggagcaaaagagtggttagcattcttgaaatctggtgggagccgtacccctttagaaacagctctattaatcagtgctgatatttctactgataagcctctgcgcgatactattaatttcttatctaacactgtagaccaaattattaattacagtaatcttattgagcaaggc

SEQ ID NO: 19578 - protein, 599 aa, Streptococcus agalactiae; identical to SEQ ID NO: 1438

SEQ ID NO: 19579 - DNA, 2793 bp, Streptococcus agalactiae
ttgtcccacccgaaattagaaagtagtagcaataaagaaatcattaccgaagaggtcggtttactgaagcagcttttggatgaagcaacgcaaaaattgattggtagtgaatcatttgacaagattgaaaaaatagtttcattatcattaactgacgattatactggtctgaaggaaactatttcggctttaagcaacgaggagatggttattgtttctcgttacttctctattttgccgctcttaattaatatttcagaagacgttgatttagcatatgaaattaattataaaaataatcttaaccaagattacctaggaaagttatcaacgactattgatgttgtagctggccatgaaaatgctaaagatattcttgaacacgtcaatgttgtgcctgtgctaacagctcatcctactcaggtgcagcgtaaaacggtgctcgaattaacgtctaagattcatgatttattacgtaaatacagagatgtcaaggcaggaatcgtgaatcaagaaaaatggtatgctgacttgcgtcgttacatcggcattatcatgcaaacagacactattcgcgagaaaaaattgaaagtcaaaaatgagataaccaatgtaatggaatattacaaccgttctcttattaaagcagttaccaaattaacagcagaatataaggcactggcagctaaaaaaggtattcacttggagaatcctaagcctctgactatggggatgtggattggtggtgatagagatggcaatccctttgtaactgctgagacactaagattatcagctatggtacaaagtgaagtgattattaaccattatattgagcagctaaatgaactttatcgtaatatgtcactttcaataaatctaactgaagtctctcccgaacttgttacattggcaaaccagtcacaagataattcggtatatagggaaaatgaaccttaccgtaaagctttcaattttatccaagataaactggtacaaaccctactaaatttaaaagttggttcttccccaaaagagaaatttgttagtcgccaagaatcttctgatattgtaggaaggtatataaaatcacatatcgctcaagtagcttctgacatacagacagaagaactaccagcatacgctactgctgaggagtttaaacaagatttgttacttgtgaagcaatctttagttcaatatggacaagattctcttgttgatggcgaattagcttgtcttattcaagcagtagatatctttggattttatttagctactattgatatgcgtcaagattctagtattaatgaagcttgtgtagcagaattattgaagtctgccaatattgtagatgattacagttctctttcagaagaagaaaaatgtcaacttctcttaaaagaattaacagaagatcctagaacattatcttctacgcatgctcctaaatccgagttacttcaaaaagaattggctattttccaaacagcacgtgagttaaaagatcaattgggtgaagacattataaaccagcatatcatttctcacacagagagcgtttcggatatgtttgagttagctatcatgttaaaagaagttggactaattgatgccaatcaagctcgtattcagattgtaccgttatttgaaaccatcgaagatttggataattcacgtgatattatgacccagtatctacattatgaattagttaaaaaatggattgctactaacaacaattatcaagaaataatgctaggttattcagatagtaataaagatggtggctatttatcatctggttggactctatataaagctcaaaatgagctaacaaaaataggtgaagaaaacggtattaaaatcacatttttccacggtcgtggtggaactgttggtcgtggtggtggtccatcttatgaagctatcacatcacaaccttttggttcaatcaaagatcgaattcgcctaacagagcaaggtgaaatcattgagaataaatatggtaatcaagatgcagcctattataaccttgaaatgcttatttcagcttccatagaccgcatggtaacacgtatgattactaaccctaatgaaattgataatttccgtgagacaatggatggtattgtgtctgaaagtaatgccgtttatagaaatttagtttttgataatccttatttctatgactatttctttgaagcaagtccaattaaagaggtatcaagtttaaatattggttctcggccagcagcacgtaaaacaattacagaaatttcaggtttacgtgcaattccatgggtattttcatggtcacaaaatcgtattatgtttccaggatggtatggtgttggatcagccttcaagcactttattgaacaagatgaggcaaacttagcaaaattacaaaccatgtatcaaaaatggccattctttaattctcttttatctaatgtagatatggttttatcaaaatcaaatatgaatattgcgcttcagtatgctcagttagctggaagtaaagaagttcgagatgtttttaatatcatccttaatgaatggcagttaactaaagatatgattttagctattgaacagcatgataatttattagaagaaaacccaatgttacatgcaagtttagattatcgtttgccatatttcaatgttttgaattatgttcaaattgaattgattaaacgtcttcgtagtaaccaactagatgaagactatgagaagttgattcatattactattaatggtattgcaacaggtttacgaaattcaggt

SEQ ID NO: 19580 - protein, 931 aa, Streptococcus agalactiae; identical to SEQ ID NO: 1440

SEQ ID NO: 19581 - protein, 1266 aa, Streptococcus agalactiae
ATGAAAATTGATAAAAGGCATCTTCTGAATTATTCCATCCTCATTCCCTATTTGATATTGTCTATTCTAGGCTTAATTGTAATTTATTCGACAACTAGTGCAACTCTAATTCAGCTTGGAGCTAACCCTTTTCGTTCAGTAATCAACCAGGGTGTCTTTTGGGCAGTCAGTTTGGTTGCAATTATCTTTATCTATAAACTGAAACTAAATTTTTTGAAAAATTCTAAAGTGTTGACTATGGCAGTATTGGTAGAAGTATTTTTACTACTAATAGCGCGCTTTTTTACACAAGAAGTTAATGGAGCACATGGTTGGATTGTTATTGGTCCTATTAGTTTTCAACCTGCTGAATATTTAAAAGTTATCATTGTATGGTATTTAGCGTTTACTTTTGCTCGAAGGCAAAAAAAGATAGAAATATATGATTATCAAGCTTTGACAAAAGGGAGATGGCTTCCGAGATCACTAAGCGACCTAAAAGATTGGCGATTTTATTCTTTATTTATGATTGGTTTGGTAATTGCACAACCTGATTTAGGAAATGGTTCGATAATTGTTCTAACGGTCATTATTATGTACTGTATTAGTGGTATTGGTTATCGATGGTTTTCAGCTTTACTTGGTCTAATCGTCGTGGGGTCAACTTTATTTATCGGAACTATTGCAGTTGTTGGAGTTGAGACAATGGCTAAAGTCCCTGTCTTTGGTTATGTAGCTAAGCGATTTAATGCTTTTTTTGACCCATTTAAAGATTTAACAGATTCAGGACACCAGTTGGCTAATTCGTATTATGCAATGAGCAACGGTGGCTGGTTTGGTCGAGGACTTGGGAATTCTATTGAAAAATTAGGGTACTTACCAGAAGCAACAACAGACTTTGTCTTTTCAATTGTTATTGAGGAATTAGGAGTTATTGGTGCAGGGTTTATTTTAGCTTTGGTTTTCTTCTTAATTTTACGTATTATGCACGTAGGTATAAAGGCTAAAGATCCTTTCAACTCAATGATCGCTCTTGGTATTGGAGCAATGCTATTGATGCAAGTTTTTGTTAACATTGGTGGTATTTCTGGGTTAATCCCCTCAACTGGAGTGACATTTCCTTTCTTATCCCAAGGAGGGAACAGCCTCTTGGTACTTTCTGTAGCTATCGGATTCGTGCTTAATATTGATGCTAACGAGAAAAAGGAACTCATAATGAAAGAAGCAGAAGAGCAATATAAGCCACAAGAAAAAAATGAAAAAATAATCAACCTTGATGCCTTTAAA

SEQ ID NO: 19582 - protein, 422 aa, Streptococcus agalactiae; identical to SEQ ID NO: 1442

SEQ ID NO: 19583 - protein, 1194 aa, Streptococcus agalactiae
ATGGCAAAAGAAAAATACGATCGTAGTAAACCACACGTTAACATTGGTACAATCGGACACGTTGACCACGGTAAAACTACTTTAACAGCAGCTATCACAACTGTATTGGCACGTCGCTTGCCTACTTCAGTTAACCAACCAAAAGATTACGCTTCTATCGATGCTGCTCCAGAAGAGCGCGAACGCGGAATCACAATCAACACTGCACACGTTGAGTACGAAACTGAAAAACGTCACTATGCCCACATCGACGCTCCAGGACACGCGGACTACGTTAAAAACATGATCACTGGTGCTGCTCAAATGGACGGAGCTATCCTTGTAGTTGCTTCAACTGATGGACCAATGCCACAAACTCGTGAGCACATCCTTCTTTCACGTCAAGTTGGTGTTAAACACCTTATCGTATTCATGAACAAAGTTGACCTTGTTGATGATGAAGAATTGCTTGAATTGGTTGAAATGGAAATTCGTGACCTTCTTTCAGAATACGACTTCCCAGGTGATGACCTTCCAGTTATCCAAGGTTCAGCTCTTAAAGCACTTGAAGGCGACGAAAAATACGAAGACATCATCATGGAATTGATGAGCACTGTTGATGAGTACATTCCAGAACCAGAACGTGATACTGACAAACCTTTACTTCTTCCAGTTGAAGATGTATTCTCAATCACTGGACGTGGTACAGTTGCTTCAGGACGTATCGACCGTGGTACTGTTCGTGTCAACGACGAAGTTGAAATCGTTGGTATTAAAGAAGATATCCAAAAAGCAGTTGTTACTGGTGTTGAAATGTTCCGTAAACAACTTGACGAAGGTCTTGCAGGGGACAACGTTGGTGTTCTTCTTCGTGGTGTTCAACGTGATGAAATCGAACGTGGTCAAGTTCTTGCTAAACCAGGTTCAATCAACCCACACACTAAATTTAAAGGTGAAGTTTACATCCTTTCTAAAGAAGAAGGTGGACGTCATACTCCATTCTTCAACAACTACCGTCCACAATTCTACTTCCGTACAACTGACGTAACAGGTTCAATCGAACTTCCAGCAGGAACAGAAATGGTTATGCCTGGTGATAACGTTACTATCGAAGTTGAATTGATTCACCCAATCGCCGTAGAACAAGGTACTACTTTCTCAATCCGTGAAGGTGGACGTACTGTTGGTTCAGGTATCGTTTCAGAAATCGAAGCT

SEQ ID NO: 19584 - protein, 398 aa, Streptococcus agalactiae; identical to SEQ ID NO: 1444

SEQ ID NO: 19585 - protein, 576 aa, Streptococcus agalactiae
TTGAAAATCGCTGCTCAAAATAGCTATTTTGAGAATTCAGGTGCATTCACTGGTGAAACACCCTAAAGTATTGGCTGAAATGGGTACAACTACGTTGTTATCGGTCACTCAGAACGTCGTGATTATTTCCATGAAACTGACCAAGATATCAACAAAAAAGCAAAAGCTATCTTTGCTAATGGTTTGACTCCAATCATTTGTTGCGGTGAGTCTCTTGAAACTTACGAAGCTGGTAAAGCGGTTGAATTCGTAGGTGCTCAAGTTTCAGCAGCTCTTGCAGGTTTGTCAGAAGAGCAAGTATCATCACTTGTTATCGCTTACGAACCAATCTGGGCTATTGGTACTGGTAAATCAGCAACTCAAGACGACGCACAAAACATGTGTAAAGCAGTTCGTGACGTTGTTGCAGCAGACTTCGGTCAAGCAGTTGCTGACAAAGTTCGCGTTCAATACGGTGGTTCAGTTAAACCTGAAAACGTTGCAGAATATATGGCTTGCCCAGACGTTGACGGTGCCCTTGTAGGTGGAGCTTCACTTGAAGCAGAAAGCTTCCTTGCCTTATTAGATTTTGTTAAA

SEQ ID NO: 19586 - protein, 193 aa, Streptococcus agalactiae
  VARIANT 21, 31: Xaa = Any Amino Acid
MKIAAQNSYFENSGAFTGENXPKVLAEMGTXYVVIGHSERRDYFHETDQDINKKAKAIFANGLTPIICCGESLETYEAGKAVEFVGAQVSAALAGLSEEQVSSLVIAYEPIWAIGTGKSATQDDAQNMCKAVRDVVAADFGQAVADKVRVQYGGSVKPENVAEYMACPDVDGALVGGASLEAESFLALLDFVK

SEQ ID NO: 19587 - protein, 690 aa, Streptococcus agalactiae; identical to SEQ ID NO: 10327

SEQ ID NO: 19588 - protein, 230 aa, Streptococcus agalactiae; identical to SEQ ID NO: 1448

SEQ ID NO: 19589 - protein, 2041 aa, Streptococcus agalactiae
ATGTTGAATCGTAAAAAAAGGTATCGTCTCACTGTAAAAAAGCAAAATGCTAGCATACCTAGACGATTAAATCTTCTATTTTTTATTATTGTTTATTATTTACTGTTCTAATTCTTCGTTTAGAGCAAATGCAGATTGGGCAACAATCATTTTACATGAAAAAACTGACAGCTCTTACGAGTTATACAGTGAAAGAATCAAAAGCGAGAGGTCAGATTTTTGATGCTAAGGGAGTTGTCTTAGTTGAAAATGATGAACGTCCTACTGTGGCGTTTTCTAGAGGAAACAATATTTCATCTCAGTCTATCAAAGAGTTAGCGAATAAATTATCACATTACATTACCTTAACCGAAGTTGCTTCAAGCGATAGAGCAAAGAGAGATTATTATTTAGCAGATAAAGCCAACTCAAAAAAGTTGTTGAAAGTTTACCAGATTCTAAACGTTACGATAAATTTGGTAACCATCTAGCCGAATCAACCGTATATGCAAATGCAGTTGCTGCAGTTCCAGTGAGCGCTATTAACTATTCTGAAGATGAGTTAAAAGTGGTTGCCTTATTTAACCAAATGAATGCGACACCAACGTTTGGTTCAGTGAAATTAAGTACAGGCGAATTAAGTGATGATCAAATCAAGAAACTGGATGCTGATAAGAAGGAACTGTTAGGAATTTCTGTAACAAGTAATTGGCATCGTCGTAAAAAAGGAACTTCTTTATCGGATATATTAGGTACTATTTCTACAGAAAAGGCAGGTTTACCAAGAGAAGAAGTTAAAAAATATTTGAAAAAAGGCTATTCACTGAATGACCGAGTGGGAACTTCTTACCTTGAAAAACAATATGAAGATGACTTACAAGGAATCAGACAAATTCGCAAAGTAGTTGTTAATAAAAAAGGTAAAGTTGTTTCAGATAATATTACGCAAGAAGGTAAGTCAGGAAGAAATCTTAAATTAACGATTGATCTTAATTACCAAAACAAAGTAGAAAGTATCTTGAAACAATACTATGGCAGTGAATTATCTAGTGGACGCGCTAGTTTTTCCGAAGGGATGTATGCAGTTGCTATAGAACCTTCAACTGGTAAAGTGTTAGCAATGGCTGGTCTGAAAAATGATCATGGGAATTTAGTTGATGACAGCCTAGGCACTATTGCTAAGAATTTCACGCCAGGATCTGTTGTGAAAGGTGCGACGCTATCATCAGGATGGGAAAATAAAGTTCTTAGAGGAAATGAAGTGCTTTATGACCAAGAAATTGCTAATATACGGTCATGGTTTACACGAGGTTTGACTCCAATATCTGCGGCACAAGCGCTAGAGTATTCATCTAATACTTATATGGTTCAAGTAGCACTTCGTTTAATGGGACAAGACTATAATACAGGAGATGCTTTAACTGATCGAGGCTATCAAGAAGCAATGGCTAAACTAAGGAAAACTTACGGCGAATATGGTTTAGGGGTTTCTACAGGATTAGATTTACCTGAATCAGAAGGTTATGTACCTGGAAAATACAGCTTAGGAACAACTCTAATGGAATCGTTCGGTCAGTATGATGCCTATACACCAATGCAACTTGGTCAGTATATCTCAACTATTGCGAATAATGGGAATCGTTTAGCACCTCACGTGGTTTCAGATATCTATGAAGGGAATGATTCTAATAAGTTCGCTCAATTGGTTCGTTCAATCACTCCTAAAACACTAAATAAGATAGCTATCTCAGATCAAGAGTTAGCCATTATTCAAGAAGGTTTTTATAACGTTGTCAATAGTGGAAGTGGCTATGCAACTGGTACGTCAATGAGGGGGAATGTGACAACCATTAGTGGTAAAACTGGTACCGCTGAAACATTTGCTAAAAATGTAAATGGACAAACAGTTTCTACCTACAACTTAAACGCTATTGCCTACGATACTAATCGTAAAATAGCAGTAGCGGTAATGTATCCGCATGTTACAACTGATACAACAAAATCCCATCAATTAGTTGCACGAGATATGATTGATCAATATATTTCACAGTTCACAGGACAA

SEQ ID NO: 19590 - protein, 681 aa, Streptococcus agalactiae
  VARIANT 31, 137: Xaa = Any Amino Acid
MLNRKKRYRLTVKKQNASIPRRLNLLFFIIXLLFTVLILRLEQMQIGQQSFYMKKLTALTSYTVKESKARGQIFDAKGVVLVENDERPTVAFSRGNNISSQSIKELANKLSHYITLTEVASSDRAKRDYYLADKANXKKVVESLPDSKRYDKFGNHLAESTVYANAVAAVPVSAINYSEDELKVVALFNQMNATPTFGSVKLSTGELSDDQIKKLDADKKELLGISVTSNWHRRKKGTSLSDILGTISTEKAGLPREEVKKYLKKGYSLNDRVGTSYLEKQYEDDLQGIRQIRKVVVNKKGKVVSDNITQEGKSGRNLKLTIDLNYQNKVESILKQYYGSELSSGRASFSEGMYAVAIEPSTGKVLAMAGLKNDHGNLVDDSLGTIAKNFTPGSVVKGATLSSGWENKVLRGNEVLYDQEIANIRSWFTRGLTPISAAQALEYSSNTYMVQVALRLMGQDYNTGDALTDRGYQEAMAKLRKTYGEYGLGVSTGLDLPESEGYVPGKYSLGTTLMESFGQYDAYTPMQLGQYISTIANNGNRLAPHVVSDIYEGNDSNKFAQLVRSITPKTLNKIAISDQELAIIQEGFYNVVNSGSGYATGTSMRGNVTTISGKTGTAETFAKNVNGQTVSTYNLNAIAYDTNRKIAVAVMYPHVTTDTTKSHQLVARDMIDQYISQFTGQ

SEQ ID NO: 19591 - DNA, 594 bp, Streptococcus agalactiae
atgctttacccaacaccaattgctaaattgattgacagcttttcaaaattaccgggtataggtactaaaacagcaacacgtttagctttttacaccattggtatgagtgatgaagatgttaatgaatttgctaagaatttattagctgctaagcgggaattaacctattgttctgtttgtggtaatttgactgatgatgatccttgcttaatttgtacagataagacgcgtgaccagtctgttatcttggttgttgaagatagtaaagatgtgtcagctatggaaaaaattcaagagtataatggtttgtatcatgtcttacatggcttaatttcacctatgaatggtattagccctgatgacattaatttgaaaagtttaattactcgattgatggatggtcaggtgacagaagttattgttgctaccaatgcgactgctgatggtgaagctacatcaatgtatatttcacgagtcttaaaaccagctggtatcaaagtgacacgattagcgagaggtttagctgttggttcagatatcgaatatgcagatgaagtaaccttgcttcgagcaatcgaaaatcgtacagagtta

SEQ ID NO: 19592 - protein, 198 aa, Streptococcus agalactiae; identical to SEQ ID NO: 1452

SEQ ID NO: 19593 - DNA, 1044 bp, Streptococcus agalactiae
atgtcaaaagaaacattgatcttgctttacggtggtcgctctgcggaacgtgaagtatctgtactgtctgcagaaagcgtcatgcgtgctattaattatgataaattttttgttaaaacttattttatcacgcaagtaggtcaatttattaaaacacaagaatttgatgaaatgccatcttcagatgaaaagttaatgacaaaccaaactgttgatttagacaaaatggttcgtccaagtgatatctatgatgataatgcaattgttttccccgttttacatggaccaatgggggaagatggttctatccaaggatttttagaagttttaaggatgccttatgttgggactaatattctatcttcaagcgtggctatggataaaattacaacaaaacaagtccttgcaacagtaggtgtacctcaggttgcatatcaaacttattttgagggtgatgatttggaacatgcgattaaactctctttagaaactttaagtttcccaatttttgtaaaaccggctaatatggggtcatcagtaggtatttcaaaagcgacagatgaatcctcacttcgctctgcaattgacttagctctcaagtatgatagccgtattttgattgaacaaggcgtgacagctcgtgaaattgaagtaggtattttaggcaataatgatgttaagacaacttttcctggcgaagtcgttaaagacgtcgatttctatgactatgacgccaaatatattgataataaaattactatggatattccagctaaagttgatgaagcaactatggaagcaatgcgtcaatatgcaagtaaagcttttaaagcaatcggggcttgtggtttatcacgctgtgatttctttttgacgaaagatggacaaatcttcttaaacgaactgaatacaatgcccggttttactcagtggtcaatgtatcccctgctttgggaaaatatggggctaacttatagtgatttgattgaaaagttagttatgttagctaaagaaatgtttgaaaaacgtgagagtcatttaatt

SEQ ID NO: 19594 - protein, 348 aa, Streptococcus agalactiae; identical to SEQ ID NO: 1454

SEQ ID NO: 19595 - DNA, 1365 bp, Streptococcus agalactiae
atgaagcttagtttgcatgaagttgctaaagtagttggcgctaaaaatcaagtatcagagtttgaagacgttcccctgggaaatattgaatttgatagtcgtaatatcagtgaaggtgacttatttcttcccttaaaaggagcaagagatggacatgagtttatagagatggcttttgataatggagcaatagcaaccatttcagagaaggaaatagagggtcatccttatcttttagtgtctgatgcacttaaagcatttcaagtcttggcacagtattatattgaaaagatgaacgttgatgttattgcagtaactggctcaaatggtaagacaacaactaaagatatgatagctgcaatcttatcaaccacatataagacttataaaacacaaggaaactacaataacgagattggcttaccctatactgtgctacacatgccagaagatactgaaaaaattattttggagatgggacaggatcatcttggagatatccatgtgttatctgaaattgcaaaaccacgtattgctgttgttactttgattggtgaagcacacttagaattttttggtagtcgagaaaagattgcagaagggaaaatgcaaatcacagatggtatgagttcagatggcatattaattgcaccgggagatccaattattgatccatatcttccagcaaaccagatgactattcgttttggtcatgaccaagaattgcaagtgacagaactcaaagaagaaaaacattccttaacttttaaaactaatgctttggagcaccaattacgtataccagtacctggtaagtacaatgcaactaatgcgatggtcgctgcctatgttggaaaattattagcagtagcagaagaagatatagtggatgctctagaaaatcttcaactaactcgtaatcgcaccgaatggaagaaatcagccaatggagcagatattttatcagatgtttacaatgctaacccaacggctatgcgattgatactagaaaccttttcagctattcccaataatgatggtggaaagaagattgctcttttagctgatatgaaagaactgggagaacaatctgtggatttacataatcaaatgattatgagtatcagacctgactctattgatactttgatttgttatggccaggatattgaggggttggctcaattagcaagccagatgttcccaattggtaaagtgtatttctttaaaaagaatcaagaagtagatcagtttgatcaattgcttgcaaaagtaaaagatactcttaaggagaaagatcaaatattattaaaaggttctaactcaatgaatctttctaaaatagttgatattcttgaagtagga

SEQ ID NO: 19596 - protein, 455 aa, Streptococcus agalactiae; identical to SEQ ID NO: 10336

SEQ ID NO: 19597 - DNA, 1218 bp, Streptococcus agalactiae
ttgaaaaatttaaatcgttatgtagttgcggtttctggagtcgttttacatttaatgctaggatcaacttatgcttggagtgtgtttcgtaacccaatcatctcagagactggttgggatatttcatcagtttcattcgcttttagtttggctattttttgtctaggaatgtctgcagcttttatgggacacttagtagagcgttttggtcctaggataatgggaatgatttctgctattttatatggagcagggaatgtgttaacaggtttagccattgaaactcagcagttatggttactgtatgttgcatacggtattttaggaggaatcggacttggttcaggttatattactccagtatcgactattattaaatggtttcctgataggaggggactagcaacaggattcgctattatgggatttggctttgcttctttagtaacaagtccgcttgcacaatccttaatgattaggattggtgtaggtaaaacattttatattttgggattagtatatttttttgtcatgatgattgcctcacaatttattaaacaaccacctcaggaaaaaataactattttgactcacgacggtaaaaagaatgctatgaattcacaaattattactggattaaaagcaaatgctgctataaaatcaaaaaccttttacatcatttggttgactttgtttattaatatttcgtgtggmttaggtttaatatcagcagcttcaccaawggcacaagatttagcaggctattccgcagaatctgcagccttattagtaggggtactagggatatttaacggttttggacgtctgttatgggcaagtctctctgactacattggacgcccgttgacctttataatattatttattgtgaactttattatgacttctagtttatttttgtcattcaatgctattgtatttgcaatagcaatgtctattttaatgacttgttatggtgcaggcttttcmtkawtacctgcttatctaagtgatatttttggaacaaaggaattagctactttacatggttatagtttaacagcatgggcaatagcaggtctgtttgggcccctattgttatcaaagacatattcatggggaaattcctatcaattgacattaatggtttttggttttttattcttattcggattattgttatctctatatttaagaaaattaacaactaaagttgtg

SEQ ID NO: 19598 - protein, 406 aa, Streptococcus agalactiae
  VARIANT 248, 331, 332: Xaa = Any Amino Acid
MKNLNRYVVAVSGVVLHLMLGSTYAWSVFRNPIISETGWDISSVSFAFSLAIFCLGMSAAFMGHLVERFGPRIMGMISAILYGAGNVLTGLAIETQQLWLLYVAYGILGGIGLGSGYITPVSTIIKWFPDRRGLATGFAIMGFGFASLVTSPLAQSLMIRIGVGKTFYILGLVYFFVMMIASQFIKQPPQEKITILTHDGKKNAMNSQIITGLKANAAIKSKTFYIIWLTLFINISCGLGLISAASPXAQDLAGYSAESAALLVGVLGIFNGFGRLLWASLSDYIGRPLTFIILFIVNFIMTSSLFLSFNAIVFAIAMSILMTCYGAGFSXXPAYLSDIFGTKELATLHGYSLTAWAIAGLFGPLLLSKTYSWGNSYQLTLMVFGFLFLFGLLLSLYLRKLTTKVV

SEQ ID NO: 19599 - DNA, 684 bp, Streptococcus agalactiae
atgatagaattcttttctaatatcagaacagagattccgcagatgcctttacttatccatagtttgatttwatctgtcttaccttttctgatgtggctgactttggttaatagagataagcctttgtataaaactatttggagtatccttttaggacttcagttaattacgatttatacttggtttttctgggcaaaattgcctttatctgaaagtcttcccctttaccattgtcgaataggcatgtttgtcgttctcttggcgaggcctggaatattaaaggattatttcgcattgttaggagtagtaggtggagtattggcaatgattcacccagacttttacccttaccagtttctacatgtgactaatattttcttctttattggacattttgctttatttgtccttagtttactacatctgatgacacagtccaatttggacaaattaaatccaaaattgattatacaactaacgcttctcattaatatgtctttgatttttattaacctcttgactggggggaattatggctttatgatgaagacaccaatactaggaataacaaatccctttttaaacctttttatagtgacaactctattaagttttctcgtcctatttgttaaacaaattttccaaaaagtgagaatgagagctagtcttaaaacagaagaatct

SEQ ID NO: 19600 - protein, 228 aa, Streptococcus agalactiae
  VARIANT 24: Xaa = Any Amino Acid
MIEFFSNIRTEIPQMPLLIHSLIXSVLPFLMWLTLVNRDKPLYKTIWSILLGLQLITIYTWFFWAKLPLSESLPLYHCRIGMFVVLLARPGILKDYFALLGVVGGVLAMIHPDFYPYQFLHVTNIFFFIGHFALFVLSLLHLMTQSNLDKLNPKLIIQLTLLINMSLIFINLLTGGNYGFMMKTPILGITNPFLNLFIVTTLLSFLVLFVKQIFQKVRMRASLKTEES

SEQ ID NO: 19601 - protein, 1201 aa, Streptococcus agalactiae
TTGGTAACTGTAGTTTTATTATCAGGTATTGTATTAACGTCTCAATTACCTGTGAACGCTAAAGCTGAGACACCAGTAATGGCAGCAAGTGCACAACAAGGTTTCCGTTTTGTAGCAACCGTTGTAGATAGTCAGACGCATGTCTTGCCGGGAAAATTGGTAACTTTGTCAGAGGTGACAAGTGGTCAGCCTAAAATTATTGCAAGTGTGAAAACGAATGATGCCGGACAAGCTATTTTTAATAATCTCCCTATAAAACGTAACCTTAGTGTGTCTGTTGATGGACAAGTAAAAGGATATACTATTCGAACTGACGTAGCAGGTTCTAGTAAAGCAGCTAGTTTTACAGCAACAGGAGTAGGGACAAATGAGCCAACGTATTCAAAAAAAACCATAGACATCACAGTGAGAGACCAGAATGCTGAACCTGTTTCAGGCAGGACAGTTACCTTAAAAACACAAGCTGGTCGTGAGATTGCTAGCTTGGTTTCTGGTGACAATGGATTAACTCGCTTTACTGATCGTTTACTAGATGGAACATTCTACCAATATTTTGTTGATGGGAAAAAAATTGGTGATATTGTACCTGGAGAATCAAGAAGTGCATATGTTAATGTTGCACCTAAAAAAGATTATTTTACCTTTACAGTCACTGCTTTAGATAAAGATGGACTTGTTGTTAAGGGAAAAGAAGTAACGTTGACTGATATTACTGATGGTAAAGCAGTAGCGCTTGCTTCTTTAAAAACGAATGATAATGGACAAGCTATCTTTACCAACCTACCATTATCAAGAAATATCAGTGTTTCAATTGATGGAAAATCAAAGGGCTATACTCTTCGAACTGATGTAGCAGGCTCTCATAAAGCGGCTGCATTCTATGTAGATGGTAAAGGTACCAAAGCACCTCAATTTAGTGCAGAAGCAGCGGTTGTAACTGTTTACGATGCTAATGGAAATACTATAGCAAACCAAGAAGTGACATTAACTAATTCAAATGGGACAATTGTGCAAAAGGTTTGACTGAAAAAGATGGCAAAGCAAGGTTCGCCAATAAATTAATGGCAGGAACGTTATACAATATTTTTGTAAATGGTATTGAGATGCCTAAAACTGCCCTTGTTGGTAGTGATGTCAGTGTTTTTCTAACAGTAAAAATTAAGAAAGAAAAACCTGTTACTCCTGATAAATTGATAAGAAA

SEQ ID NO: 19602 - protein, 402 aa, Streptococcus agalactiae
  VARIANT 337: Xaa = Any Amino Acid
MVTVVLLSGIVLTSQLPVNAKAETPVMAASAQQGFRFVATVVDSQTHVLPGKLVTLSEVTSGQPKIIASVKTNDAGQAIFNNLPIKRNLSVSVDGQVKGYTIRTDVAGSSKAASFTATGVGTNEPTYSKKTIDITVRDQNAEPVSGRTVTLKTQAGREIASLVSGDNGLTRFTDRLLDGTFYQYFVDGKKIGDIVPGESRSAYVNVAPKKDYFTFTVTALDKDGLVVKGKEVTLTDITDGKAVALASLKTNDNGQAIFTNLPLSRNISVSIDGKSKGYTLRTDVAGSHKAAAFYVDGKGTKAPQFSAEAAVVTVYDANGNTIANQEVTLTNSNGTIXAKGLTEKDGKARFANKLMAGTLYNIFVNGIEMPKTALVGSDVSVFLTDKQLRKKNLLLLINWIKK

SEQ ID NO: 19603 - protein, 308 aa, Streptococcus agalactiae
TTGATAAGAAATGAACCAGAGAAGGAAAAGGAGCTCTTAGATACTCCAAAACCAGTACCACCTACTTCGAAACCAACAGCACCAATTAAAAATAAAAAGGACGATTCCCCTAAGAAGTTCACGAAAAGTCAATCTTCTAGTTTGAAGTCAAGTGTTAAGGCTATAGGTGCTAAGCAAAAGCTATGACAGCCTTAGCTAAAAAATTGCCTAAAACTGGTGATCAAGCCATTAGTATTTTAACTTTGGTTGGTTTTATTGTAACAGGGTTAGCGATTATGTTAGGCTTCCTTAAAAAATCACGATCAAAA

SEQ ID NO: 19604 - protein, 104 aa, Streptococcus agalactiae
  VARIANT 7: Xaa = Any Amino Acid
MDKEMNXEKEKELLDTPKPVPPTSKPTAPIKNKKDDSPKKFTKSQSSSLKSSVKAIGAKPKAMTALAKKLPKTGDQAISILTLVGFIVTGLAIMLGFLKKSRSK

SEQ ID NO: 19605 - protein, 1542 aa, Streptococcus agalactiae
ATGACATTACAAGACGAAATCAAAAAACGCCGTACTTTTGCCATCATCTCTCACCCGGATGCTGGTAAGACGACTATTACTGAGCAATTATTATATTTTGGTGGTGAAATTAGAGAAGCAGGGACAGTAAAAGGGAAAAAATCAGGTACTTTTGCAAAGTCCGACTGGATGGATATTGAAAAGCAACGGGGTATCTCTGTTACTTCATCTGTTATGCAATTTGATTACGCGGGTAAACGTGTTAATATTTTGGATACACCTGGACATGAGGATTTCTCGGAAGATACATACCGGACCTTAATGGCTGTGGATGCAGCTGTCATGGTTGTAGATTCGGCTAAAGGTATTGAGGTTCAAACTAAAAAACTTTTTGAAGTTGTTAAGCATCGTAATATTCCGGTTTTTACGTTTATTAATAAATTGGACCGTGATGGACGTGAGCCATTGGATTTGCTTGAAGAGTTAGAAGAAGTACTAGGTATTGCTTCTTATCCAATGAATTGGCCGATTGGTATGGGGAAATCATTTGAAGGGCTTTATGATTTACATAATAAACGTTTAGAACTCTATAAGGGAGACGAGCGTTTTGCAAGTATTGAAGACGGTGATCAGCTGTTTGCCAATAATCCATTTTATGAACAAGTCAAAGAAGATATTGAACTTCTTCAAGAAGCAGGTAATGACTTTTCAGAACAAGCTATTCTTGATGGTGACCTAACTCCAGTATTCTTTGGCTCTGCCCTTACGAACTTTGGAGTTCAGACTTTTCTTGATACTTTCTTGGAGTTTGCTCCAGAACCTCATGGTCACAAGACTACAGAAGGTAATGTTATTGACCCCTTGGCTAAAGATTTTTCAGGTTTTGTCTTTAAAATTCAAGCTAACATGGACCCACGTCATCGCGACCGTATTGCTTTTGTTCGTATTGTTTCTGGTGAATTTGAGCGCGGTATGGGAGTTAATTTGACACGTACTGGTAAAGGTGCTAAGCTCTCCAATGTTACTCAATTTATGGCAGAATCACGTGAAAATGTGACGAATGCTGTTGCTGGGGATATTATCGGGGTTTATGATACAGGAACTTATCAAGTTGGGGATACCTTAACAGTTGGGAAAAATAAATTTGAATTTGAACCATTACCAACTTTTACCCCAGAATTATTTATGAAAGTATCAGCAAAAAATGTTATGAAGCAGAAATCATTCCACAAAGGTATTGAGCAATTAGTACAAGAAGGAGCAATCCAGCTTTATAAGAATTATCAGACAGGCGAATACATGCTGGGTGCTGTGGGTCAACTTCAGTTTGAAGTTTTTAAACATCGTATGGAAGGTGAATACAATGCTGAAGTTGTTATGACACCAATGGGTAAAAAGACTGTACGTTGGATTAACTCAGACGATTTAGACGAACGCATGTCTTCAAGCCGAAATATTTTAGCAAAAGATCGTTTTGACCAACCAGTTTTCCTATTTGAAAATGATTTTGCACTTCGCTGGTTTGCTGATAAGTATCCTGATGTGAAGCTTGAAGAAAAAATG

SEQ ID NO: 19606 - protein, 514 aa, Streptococcus agalactiae
MTLQDEIKKRRTFAIISHPDAGKTTITEQLLYFGGEIREAGTVKGKKSGTFAKSDWMDIEKQRGISVTSSVMQFDYAGKRVNILDTPGHEDFSEDTYRTLMAVDAAVMVVDSAKGIEVQTKKLFEVVKHRNIPVFTFINKLDRDGREPLDLLEELEEVLGIASYPMNWPIGMGKSFEGLYDLHNKRLELYKGDERFASIEDGDQLFANNPFYEQVKEDIELLQEAGNDFSEQAILDGDLTPVFFGSALTNFGVQTFLDTFLEFAPEPHGHKTTEGNVIDPLAKDFSGFVFKIQANMDPRHRDRIAFVRIVSGEFERGMGVNLTRTGKGAKLSNVTQFMAESRENVTNAVAGDIIGVYDTGTYQVGDTLTVGKNKFEFEPLPTFTPELFMKVSAKNVMKQKSFHKGIEQLVQEGAIQLYKNYQTGEYMLGAVGQLQFEVFKHRMEGEYNAEVVMTPMGKKTVRWINSDDLDERMSSSRNILAKDRFDQPVFLFENDFALRWFADKYPDVKLEEKM

SEQ ID NO: 19607 - protein, 378 aa, Streptococcus agalactiae; identical to SEQ ID NO: 10347

SEQ ID NO: 19608 - protein, 126 aa, Streptococcus agalactiae; identical to SEQ ID NO: 10348

SEQ ID NO: 19609 - protein, 732 aa, Streptococcus agalactiae
ATGATAATAGAATTAAAGAGTGTTGGAAAAATTTTTCCAAAATCACAGTTTAGATTAGATGATATTTCTTTTAATATAGAAGAAGGCGAGATAGTTGGTCTGATTGGTTCTAATGGTACTGGAAAGAGTACTATTTTGAAGATGATTAATGGCTTAATCCCTTATGATAAAGGAAATATTTATTATCAAGGAAAAGAAGTGAAGTCTTTTTCTGATAATAAGTTACGTCAGATGCGTAAAGATATTGCTTATATTTTTCAAAATCATAATTTGTTAGCAGGAGAAAGTGTATATTATCATCTAGCTTTAGTTTATAAATTAAATCATCAAAAAGTAAATCATGACGCAATTAATGATATCTTAGATTTTTTAGGTTTGATGGATTTAAAACAGGTGAAATGCCATAGTTTGAGTGGTGGGCAGCAACAAAAAGTTGCAATCGCTATGGCTGTTTTGCAAAAACCGAAACTTATTCTATGTGATGAGATCAGCTCTGCCTTAGATACTAATAGTGAAAAAGAGATATTTAACTTGTTGTCTGATCTTCGTGAAAAATATGGTATCTCTATCTTGATGATTGCTCATCACCTATCTCTTTTAAAACAATATTGTGATCGTGTAATGATTTTGGATCACCAGACTATTGTAGATACTGTTGTTCCAGTGAAAGCAACTCTGAATCAATTAAAGTCAAACTACGTAGATCAAGTAAAGGAGTTTTTGTTACATGAT

SEQ ID NO: 19610 - protein, 244 aa, Streptococcus agalactiae; identical to SEQ ID NO: 10350

SEQ ID NO: 19611 - protein, 660 aa, Streptococcus agalactiae; identical to SEQ ID NO: 10351

SEQ ID NO: 19612 - protein, 220 aa, Streptococcus agalactiae; identical to SEQ ID NO: 1466

SEQ ID NO: 19613 - protein, 828 aa, Streptococcus agalactiae
ATGAAAAAATTACTTTCCCTAACATGTCTAATCATGATGTCTTTATGTTTAGTGGCATGTACTAAGCAAGCAATGTCGTCTAAGAAAATTAAAGATAAGAATAGTAAAGAAAAGGTGATTACTGTTGCAACTTACAGCAAACCTACATCTACCTTTTTAGATTTGGTTAAAGATAATGTAAAAGAAAAAGGATATACTTTAAAGGTTGTCATGGTCTCTGACTATATTCAGGCTAACATTGCTTTAGAAAACAAAGAACATGATGCTAACCTTTTACAACATGAATTTTTCATGAGTATCTTTAATAAGGAAAATGATGGTCATCTAGTATCAATTACACCAATTTATCATTCATTGGCTGGTTTTTATGGTCAACATTTGAAAAATATTGCCGAGCTTAAAGACGGTGCTAATGTAGCGATTCCGTCTGATCCTGCCAATATGACTAGAGCTCTGCTATTATTGCAAGAAAAGAAACTTATCACCTTAAAGAATACGTCCAAAAAGACCAAGGCTATCGAAGATATTATTACTAACCCTAAAAAATTACGAATTGAACCTGTAGCATTACTTAACCTCAATCAGGCCTATTTTGAATATGACCTTGTCTTTAATTTCCCTGGATATGTGACAAAAATCAATCTAGTTCCTAAAAGGGATAGATTATTATATGAGAAAAAACCAGATATCCGTTTTGCAGGTGCCTTGGTAGCTCGTGAAGATAATAAAAATAGTGATAAAATAAAAGTACTTAAAGAAGTACTAACAAGTAAAGAGATTCGTCACTATATCACTAAGGAGATTCCAAGTGAAGCAGCCGTTGCGTTC

SEQ ID NO: 19614 - protein, 276 aa, Streptococcus agalactiae
MKKLLSLTCLIMMSLCLVACTKQAMSSKKIKDKNSKEKVITVATYSKPTSTFLDLVKDNVKEKGYTLKVVMVSDYIQANIALENKEHDANLLQHEFFMSIFNKENDGHLVSITPIYHSLAGFYGQHLKNIAELKDGANVAIPSDPANMTRALLLLQEKKLITLKNTSKKTKAIEDIITNPKKLRIEPVALLNLNQAYFEYDLVFNFPGYVTKINLVPKRDRLLYEKKPDIRFAGALVAREDNKNSDKIKVLKEVLTSKEIRHYITKEIPSEAAVAF

SEQ ID NO: 19615 - protein, 1584 aa, Streptococcus agalactiae
TTGAAATTTACAGAACTTAACTTATCGCAAGATATTCTTTCAGCGGTAGAAAAAGCAGGCTTTGTAGAGCCATCACCAATCCAAGAAATGACTATCCCACTTGCTCTTGAAGGCAAAGATGTCATTGGTCAAGCGCAGACAGGTACAGGAAAAACTGCAGCTTTTGGGTTACCAACTTTAAATAAAATTCATACTGAAGATAATACTATCCAAGCACTTATTATTGCTCCTACACGTGAACTTGCAGTACAATCACAAGAAGAATTGTTCCGTTTTGGACGCGATAAAGGTGTTAAGGTCCGCTCTGTTTATGGTGGGTCAAGTATTGAAAAACAAATCAAGGCATTACGTTCAGGAGCACACGTTGTTGTTGGAACTCCAGGTCGATTACTTGATTTAATTAAACGTAAAGCACTTAAACTTAATCACATTGAAACTCTTATTCTTGATGAAGCAGACGAAATGCTTAACATGGGATTTTTAGAGGACATTGAAGCAATCATTAGTCGTGTACCAGAAACACGTCAAACTCTTTTATTCTCAGCGACAATGCCTGATCCAATCAAACGTATCGGCGTTAAATTCATGAAAGATCCTGAGCATGTTAAAATTAAAGCAACTGAATTAACTAATGTGAATGTTGATCAGTATTATGTTCGTGTTAAGGAAAATGAAAAATTCGATACTATGACACGTTTGATGGACGTTGATCAACCAGAATTGTCAATTGTCTTTGGACGTACGAAACGTCGTGTAGATGAATTAACTCGTGGACTAAAATTACGTGGTTTCCGAGCAGAAGGAATTCATGGAGACTTAGATCAAAATAAACGTCTTCGTGTTATCAGAGACTTTAAAAATGACCATATTGATATTCTTGTTGCCACAGATGTTGCTGCGCGTGGTTTAGATATTTCAGGCGTTACACATGTTTACAACTATGATATTCCCCAAGATCCCGAAAGTTATGTTCACCGTATTGGACGTACTGGTCGTGCTGGTAAATCTGGTCAATCTATCACTTTTGTTTCACCAAACGAAATGGGATATTTGACAATTATTGAAAACTTAACTAAAAAACGTATGACTGGAATGAAGCCTGCTACTGCAAGCGAAGCATTTCAGGCTAAGAAAAAAGTTGCATTGAAACGTATTGCACGTGACTTTGAGGATCAGGAATTAGTTTCTAAATTTGATAAATTTAAAGCCGATGCTTTAGAATTAGCAACTCAATACACACCAGAAGAACTTGCTCTTTATGTCTTAAGCTTAACAGTTCAGGATCCAGAATCGTTACCAGAAGTTGAAATCACACGTGAAAAACCATTACCATTTAAACCATCAGGTGGTGGCTTTAAAGGTAAAGGTGGACGAGGCAATGGCCGTGGTGGCGATCGTCGACGCAATGATCGTGGTGATCGTCGTGGAAATCGTGACCGTGATGATCGTGGTGGTCGTTGTGATTTTAAACGTCGTGATGATAAGTTCAAGAAAGATAATCGTCGTCAAGAAAATAAAAAACCTCATAAAAACACTTCAAGTGAAAAACAAACTGGATTTGTTATTCGCAACAAAGGCGATAAA

SEQ ID NO: 19616 - protein, 528 aa, Streptococcus agalactiae; identical to SEQ ID NO: 1470

SEQ ID NO: 19617 - protein, 264 aa, Streptococcus agalactiae; identical to SEQ ID NO: 5925

SEQ ID NO: 19618 - protein, 88 aa, Streptococcus agalactiae; identical to SEQ ID NO: 1472

SEQ ID NO: 19619 - protein, 762 aa, Streptococcus agalactiae
ATGATAGATACAATTTTAAAAGAAAATGAACGCATTGATCAGCTTTTTTCAACTGATGTCAAAATCATCCAAAACAAAGAAGTTTTTTCCTATTCCATAGATAGTGTTTTATTGTCTCGGTTCCCTAAACTTCCTTCTCGTGGTCTTATCGTTGACTTATGTAGTGGTAATGGTGCTGTCGGTTTGTTTGCCAGCACCAAAACAAATGCGACAATTATAGAGATCGAACTACAAGAGAGCCTTGCGGATATGGCTAAGCGTTCGATTAAGCTCAATAAATTGGAAAAACAGGTTACTATGATTAATGATGATTTAAAAAATCTTCTTGATCATGTTCAACGTTCAAACGTTGATTTAATGCTTTGCAATCCACCTTATTTCAAAGCAAGCGAAACCTCTAAAAAAAATCTAAGCCCGCATTATCTCCTTGCAAGACACGAAATAACAACAAACCTTAGAGAGATTTGTCAAATTGCTCAACATACTCTAAAAACAAAAGGACGTATCGCTATGGTACATCGTCCAGACCGTTTCCTTGAAATTATTGATACGATGCGTCAGTTCAATTTAGCACCTAAACGTATCCAATTTGTTTATCCAAAATTAGGAAAAGATGCTAATATGCTTTTAATTGAAGCTATTAAAGATGGCTCGACAGAAGGTATGAAAATACTTCCTCCTCTTGTTGTTCATCAAGATAATGGAGACTATACTGAGACTATTTTTGATATATATTTCGGAGAAAACGGAAAATCTCATGAT

SEQ ID NO: 19620 - protein, 254 aa, Streptococcus agalactiae
MIDTILKENERIDQLFSTDVKIIQNKEVFSYSIDSVLLSRFPKLPSRGLIVDLCSGNGAVGLFASTKTNATIIEIELQESLADMAKRSIKLNKLEKQVTMINDDLKNLLDHVQRSNVDLMLCNPPYFKASETSKKNLSPHYLLARHEITTNLREICQIAQHTLKTKGRIAMVHRPDRFLEIIDTMRQFNLAPKRIQFVYPKLGKDANMLLIEAIKDGSTEGMKILPPLVVHQDNGDYTETIFDIYFGENGKSHD

SEQ ID NO: 19621 - protein, 738 aa, Streptococcus agalactiae; identical to SEQ ID NO: 10361

SEQ ID NO: 19622 - protein, 246 aa, Streptococcus agalactiae; identical to SEQ ID NO: 1476

SEQ ID NO: 19623 - protein, 167 aa, Streptococcus agalactiae
ATGTTTGAAATAGTATTGGAAAAAATTAAATCGCATAAATGGGAGACAACAGGAATTATGTAGGACTCTTATTATTTGGAATTTTGGGTTTAAATCATTTTGGCACTCATCATAAAGAAGACAATTTAAATATCAATTTAGAGAAAAAAGTATNNNNNTTAATTAAT

SEQ ID NO: 19624 - protein, 56 aa, Streptococcus agalactiae
  VARIANT 52, 53: Xaa = Any Amino Acid
MFEIVLEKIKSHKWETTGIIVGLLLFGILGLNHFGTHHKEDNLNINLEKKVXXLIN

SEQ ID NO: 19625 - protein, 96 aa, Streptococcus agalactiae
ATGAAGCCTGCTACTGCAAGCGAAGCATTTCAGGCTAAGAAAAAAGTTGCATTGAAACGTATTTGGCACGTGGACTTTTTGAGGGGATCAGGGAAT

SEQ ID NO: 19626 - protein, 32 aa, Streptococcus agalactiae
MKPATASEAFQAKKKVALKRIWHVDFLRGSGN

SEQ ID NO: 19627 - protein, 471 aa, Streptococcus agalactiae
ATGATTAGTCACGTCAAAGATAAAGTATCTAATCAAGTAACGGTTGACGTAAAAGGGGCAGTCAATCATCCAGGTGTTTATAGTTTGCCTTCTCAAAGTCGTGTAACAGATGCGATTAAGCGTGCAGGTGGACTAAGCAATCTCGCTGATAGTAAATCCGTTAATCTAGCACAGAAATTACAAGATGAGACGGTTATCTATGTTGCTCAAAAAGGTGAAAAAATAACTGTTGTGGAAGAGGAGAAAGCAAATAATATCGCTACTCAGGGAAATAGTAAGGGGAAAATTAATCTTAATAAAGCAGATTTATCAAGTCTTCAGACCATATCAGGCGTTGGGGCTAAAAGAGCTCAAGATATTTTAGATTATCGTGATAGTCAAGGTGGTTTTAAAACTATTGATGACCTCAAAAACGTATCAGGTATTGGTGAGAAAACACTAGAAAAATTACGTCAAGATGTTACAATTGAC

SEQ ID NO: 19628 - protein, 157 aa, Streptococcus agalactiae
MISHVKDKVSNQVTVDVKGAVNHPGVYSLPSQSRVTDAIKRAGGLSNLADSKSVNLAQKLQDETVIYVAQKGEKITVVEEEKANNIATQGNSKGKINLNKADLSSLQTISGVGAKRAQDILDYRDSQGGFKTIDDLKNVSGIGEKTLEKLRQDVTID

SEQ ID NO: 19629 - protein, 2223 aa, Streptococcus agalactiae
TTGACTAAGTATTTTCCTCTAAAACCTATTTATTTAGCATTGTTGGTCTTCCAAATTTACTTACTAGTGTTTTCTTGGACAATGCTTGGTTGTGCCTTTCTTTTATTTTCTTTTATTTTTCTGATTTATCAATATGATCGTGAAACTATTTTTAAAACAATAGCAATAGTAATTTTTTTCTTATTTTATTTTTTATGGCAAAATCACAATATGAATGTCCAATATCAAAGAGTACCGAATCATATTAGCCAGATTAAAGTGCGTATTGATACTATTTCTATCAATGGTGATGTTTTATCATTCCAGGCAGATGCTTCAGGTAACACTTATCAAGCTTTTTACACATTAAAAAATAAAAGTGAGAAAGATTATTTTCAAAATCTTGATAATAATATAATGATAATTGCAGATATCAAACTTGAAGAAGCAGAGGAGAGAAGGCATTTTAATGGCTTTGATTATCGTCAGTATTTAAAAAGACATGGAATTTATCGTATCGCCAAAGTGACAAAGATAAAACAGATACGCTTATTTCAACATAGGTCTTTCTTTGCTCTTATGTCTAAGTGGCGTAGAAGTGCAATTGTTATTAGTCAAACTTTTCCAAATCCTATGCGTCACTATATGTCAGGGCTTTTGTTTGGATATCTAGATAAGACCTTTGATGACATGTCCGATTTATATAGTAGTCTAGGTATTATACATTTATTTGCTTTGTCAGGTATGCAAGTAGGTTTTTTTCTCGGTATTTTTCGTTATATCTGTCTACGTATTGGCTTACGTCTAGACCATGTTTGGTTACTTCAAATACCATTCTCGCTAATTTATGCTGGTTTAACAGGCTTTAGTATCTCAGTCGTTAGGGCACTTATTCAATCTTTATTATCACATAGCGGTGTCAAGAAAGATGAGAACTTTGCTCTCTGCTTGTTAATTTGTCTTATCTCCCTCCCCCACTCACTTTTGACTACGGGAGGAGTTCTTAGCTTTGCTTATGCTTTTATACTTACGATGACCTCCTTTGATCATTTTTCGAGTATAAAAAAAGTAGCTATCGAATCTTTGACAGTCTCTGTAGGAATTCTTCCCATACTAACCTACTATTTTTCGGGTTTTCAACCAATATCAATTATATTAACAGCACTTTTATCTTTTGCATTTGATATTATATTTTTGCCTTTATTAACTGTTATATTTGTCTTATCGCCTATCGTTAAATTAAGTTGTATTAATAGTTTGTTTGAAATCCTAGAAGTGTTATTAAAATGGACTGGGCAACTGTTTCCAAGGCCACTTATTTTTGGAAAGCCCAGCCTTTTTCTTTTAATAGTCATGATTATAATTTTGGGATTACTTTATGATTATTATCATTCTAAATGTTTTCGTTATTGCTCCCTTCTTATTATCTTTACCTTGTTTTTTATCACTAAGAATCCAATTACTAACGAGGTTGCGATTTTAGATGTTGGACAGGGAGATAGTATTTTAGTGAGGGATTGGTTAGGAAAACAATTTATTGATACTGGGGGAAGGGTGAGATTTGAACAGCCTGAAGAATGGAAACAAAAAGTAAATCAGTCTAATGCTAAGAGAACGCTCATTCCTTACTTGAAAAGCAGAGGTATTAGCAAGATAGATGATTTAGTGATAACTCATACCGATACAGATCATATGGGGGATATGGAAGTTATCTCAAAGCATTTTAAAGTTGCACGTTTGATTACAAGTTCAGGTTCTTTAACGAATTCGCAGTACGTTAAGCATTTATCAAAGATAGGTGTAGCGGTAAAATCTATAGAAGCCGGTGATAAACTTGCTGTCATGGGAAGTTATTTACAAGTACTTTACCCATGGCACAAGGGTGATGGAAAAAATAATGATTCAATTGTTTTATATGGACATTTATTAGGAAAAGGCTTCTTATTTACCGGTGATTTGGAGGAAGAGGGAGAAAAGCAGTTATTAGAAGCTTATCCTAATTTATCAGTAGATATCCTTAAAGCAGGACATCATGGTTCTAAGGGCTCATCAAGTCTATCCTTTCTGAAAAAGTTGTCTCCTAGTGTGGTTCTAGTTTCAGCTGGTAAAAATAATCGTTACCAGCATCCTCATCAAGAGACTTTACAAAGGTTCCAAAAGATTAAAAGCAAGATTTTCCGAACGGATCAATCAGGTACAATTAGGCTAACAGGATGGTGGAAGTGGCATATTCAGACAGTTCGT

SEQ ID NO: 19630 - protein, 742 aa, Streptococcus agalactiae
  VARIANT 506: Xaa = Any Amino Acid
MTKYFPLKPIYLALLVFQIYLLVFSWTMLGCAFLLFSFIFLIYQYDRETIFKTIAIVIFFLFYFLWQNHNMNVQYQRVPNHISQIKVRIDTISINGDVLSFQADASGNTYQAFYTLKNKSEKDYFQNLDNNIMIIADIKLEEAEERRHFNGFDYRQYLKRHGIYRIAKVTKIKQIRLFQHRSFFALMSKWRRSAIVISQTFPNPMRHYMSGLLFGYLDKTFDDMSDLYSSLGIIHLFALSGMQVGFFLGIFRYICLRIGLRLDHVWLLQIPFSLIYAGLTGFSISVVRALIQSLLSHSGVKKDENFALCLLICLISLPHSLLTTGGVLSFAYAFILTMTSFDHFSSIKKVAIESLTVSVGILPILTYYFSGFQPISIILTALLSFAFDIIFLPLLTVIFVLSPIVKLSCINSLFEILEVLLKWTGQLFPRPLIFGKPSLFLLIVMIIILGLLYDYYHSKCFRYCSLLIIFTLFFITKNPITNEVAILDVGQGDSILVRDWLGKTIXIDTGGRVRFEQPEEWKQKVNQSNAKRTLIPYLKSRGISKIDDLVITHTDTDHMGDMEVISKHFKVARLITSSGSLTNSQYVKHLSKIGVAVKSIEAGDKLAVMGSYLQVLYPWHKGDGKNNDSIVLYGHLLGKGFLFTGDLEEEGEKQLLEAYPNLSVDILKAGHHGSKGSSSLSFLKKLSPSVVLVSAGKNNRYQHPHQETLQRFQKIKSKIFRTDQSGTIRLTGWWKWHIQTVR

SEQ ID NO: 19631 - protein, 806 aa, Streptococcus agalactiae
ATGACTATCAAACGTATTTTTTGTGACATGGATGGTACACTATTAAATAGTGAAGGACAAGTGAGTAAAAGTAACGCTACCTTAATACGTGAGGCAGCGATTCCAGTAACTTTAGTGTCTGCTAGGGCACCTATGGAAATGAAGGATGCCGTAGATGCACTTCAATTAGGAGGAGTCCAAGTTGCTTTTAATGGAGGATTGATTTATAGAATAGGAGATAATAATCAAGTTCTACCTATTCATACACAAATCATTAAAAAAAGCACAGTAAAACAATTGCTAAGAGGAATACGGTTTCATTTTCCTCAAGTTAGTTTATCTTATTACGATCTTAATAACTGGTATTGTGATAAAATAGATGAAGGAATCCGATACGAACATAGTTTAACTCAACAATGCCCAACGTTTATTCATAATGAGGATCAGTTTTAGAAGGTCACACAAATACTTTTAAAATTATGATGATTACTTTCGATGAAGCAAATATGCTAGAATTAGAAAAATATCTTCAAAGTTTGGAGTTACCAGAAATCACTATTCAACGTTCAGGTAAAGCGTATCTTGAAATTACACATCTCTTAGCCAAAAAATCTAAAGGAATTGCTTACATCCTTCAAAAAGAGCAGTTAGCTAGAGAAGAAACGGCTGCATTTGGAGATGGACATAATGATTTGCCTATGCTTGAAATGGTAGGTTACCCTATTGTTATGGATAATGCTTTTGATGATATCAAAGCGATAGCATATCAACTAACTAAGTCTAATGATGAAGACGGAGTGGGATATGGGATTCAAAAATTTTTAAAG

SEQ ID NO: 19632 - protein, 269 aa, Streptococcus agalactiae; identical to SEQ ID NO: 5936

SEQ ID NO: 19633 - protein, 942 aa, Streptococcus agalactiae; identical to SEQ ID NO: 10369

SEQ ID NO: 19634 - protein, 314 aa, Streptococcus agalactiae; identical to SEQ ID NO: 10370

SEQ ID NO: 19635 - protein, 983 aa, Streptococcus agalactiae
ATGAAAAACTATCGAAAACTTATTGTACTACTACTTCTAACCTTTTTTGTCATTTTTATGGGAGCATATGCTTACACGCATATTGTTGAAAAAAGATCCCTAACTAGCAATACTATTGAAAAAACTCTACCTGTGGTAAATCAGATTAAGCCTCAAACCATCAAAGAATACCAAAATTACTTAACTAAGGTAGCTAAACGTAATGTTCTTCCTGTAGACATTCCTCAGGCATTAAATAATGAAAAGGTAGAAATTACCGCTACTGATGGCATGCAAACATTCACTTGGAATGATAAAAATAATCCTAAGCAAAAGGTTATCTTCTATGTTCATGGAGGATCATATATCCATCAAGCTTCTGAATTACATATATTTTTGTCAATAACTAGCTAAAAAATTAGATGCAAAAGTGTCTTTCCTATTTACCCTAAGCTCCTACATATAATTATAGTGATGCTATCCCCAAAATTAAAAATTATACCAAAATACATTAGCTAGCGTCACATCTCCCAAAAAATTATCCTAGTAGGTGAAAGTGCAGGCGGAGGTCTTGCTTTAGGTCTTGCTGATAACCTTGTCACGGAGCATATCAAACAACAAAAGAAATTATTTTAATATCACCATGGTTAGATATTGCTACTAATAATCCAAAGATTGAAAAAGTTCAAAAAAAAGATCCCCTTCTTAAAGCTTGGCAATTACAACAAGTAGCTCCTTACTGGGCAAATGGAAAAAAGAATTTTAAAAATCCTCAAGTTAGTCCTCTTTACAGTAGCCAATTTAACAAGATGGCTCCAATATCATTTTTTATAGGAACGCACGATATTTTCTACCCCGATAATCAATTATTACATCAAAAATTAGCAAAAGAAAACATTAAACACCACTATATCGTTGGTCAAAAAATGAACCACGTTTATCCAGTCTTACCGATTCCTGAAGCAGAGACTGCTTTCAAACAAATGCTTAAAATTATCAATCAT

SEQ ID NO: 19636 - protein, 330 aa, Streptococcus agalactiae; identical to SEQ ID NO: 10372

SEQ ID NO: 19637 - protein, 726 aa, Streptococcus agalactiae; identical to SEQ ID NO: 10373

SEQ ID NO: 19638 - protein, 242 aa, Streptococcus agalactiae; identical to SEQ ID NO: 10374

SEQ ID NO: 19639 - protein, 891 aa, Streptococcus agalactiae
ATGAAAGAGAAGCTATTTCAGGTAATTGGATTCAATAAAGACGATTTAGCCTATTCTTATTTTGATTTAAGTGAAGAAGACTATCAAAATGCGGAATTAGACTTAGAAAGTTTACCTTTTTTATCAGACTACAAGGTTGTTATTTTTGATCAGTTTCAAGATATTACAACTGATAAAAAAACTTATTTAGATGAACAAGCAATGAAGCGCTTTGAAGCCTACTTGCAGAATCCTGTAGATACTACGAGACTTGTTATTTGTGCTCCAGGAAAACTTGATGGAAAACGTCGACTTGTAAAGTTATTGAAACGTGATGCTCGTGTTTTAGAGGCTAATACTTTAAAAGAATCAGATTTAAAGACGTATTTTCAAAAATATGCTCACCAAGAAGGATTAGTTTTTGAAGCAGGTGTTTTTGATGAGTTATTGATTAAGTCTAACTATGATTTTAGTGATACTTTAACGAATATCGCTTTCTTAAAGTCATATAAAACAGACGGTCATATTTCGTCCAATGATGTTAGAGAGGCTATCCCTAAAAGCCTGCAAGATAATATATTTGATTTGACTCAAGATGTCTTACTTGGCAGGATAGATTTAGCGCGTGATTTAGTAAGAGATTTACGTCTACAAGGCGAAGACGAAATCAAATTGATTGCAATCATGTTAGGACAGTTTCGGATGTTTTTGCAAGTTAAAATATTGGCTAGTAAAGGGAAGTCAGAGAGTCAAATTGTTTCTGAACTATCCCATTACATAGGACGTAAAATCAACCCTTATCAAGTAAAATTTGCTGTCAGAGATTCTAGAAACCTTCCCCTTGCTTTTTTAAAAGAAGCGATTAGGATTTTAATCGAGACTGACTATGCTATTAAAAGAGGGACTTATGAA

SEQ ID NO: 19640 - protein, 297 aa, Streptococcus agalactiae
MKEKLFQVIGFNKDDLAYSYFDLSEEDYQNAELDLESLPFLSDYKVVIFDQFQDITTDKKTYLDEQAMKRFEAYLQNPVDTTRLVICAPGKLDGKRRLVKLLKRDARVLEANTLKESDLKTYFQKYAHQEGLVFEAGVFDELLIKSNYDFSDTLTNIAFLKSYKTDGHISSNDVREAIPKSLQDNIFDLTQDVLLGRIDLARDLVRDLRLQGEDEIKLIAIMLGQFRMFLQVKILASKGKSESQIVSELSHYIGRKINPYQVKFAVRDSRNLPLAFLKEAIRILIETDYAIKRGTYE

SEQ ID NO: 19641 - protein, 537 aa, Streptococcus agalactiae
ATGACACTACATCATGATAAGCACCATGCAACTTATGTTGCTAATGCAAATGCTGCTCTTGAGAAACATCCTGAAATTGGAGAAGACTTAGAGGCGCTCTTAGCTGATGTTTCTCAAATTCCAGAAGATATTCGTCAGGCAGTCATCAATAACGGTGGTGGACATCTTAACCACGCTCTTTTCTGGGAATTGATGTCACCAGAAGAAACTCAAATTTCACAAGAGTTATCTGAAGACATTAATGCAACTTTTGGTTCATTTGAAGACTTTAAAGCTGCTTTCACAGCAGCAGCAACAGGACGTTTTGGTTCAGGTTGGGCTTGGCTTGTTGTTAATGCTGAAGGCAAACTTGAAGTGCTTTCAACTGCCAATCAAGATACTCCAATTATGGAAGGCAAGAAACCTATTTTAGGGCTTGATGTATGGGAGCATGCTTATTACTTAAACTATCGTAATGTTCGTCCTAACTACATCAAAGCTTTCTTTGAAATTATTAACTGGAATAAAGTAAATGAACTTTACCAAGCTGCTAAAGCT

SEQ ID NO: 19642 - protein, 179 aa, Streptococcus agalactiae
MTLHHDKHHATYVANANAALEKHPEIGEDLEALLADVSQIPEDIRQAVINNGGGHLNHALFWELMSPEETQISQELSEDINATFGSFEDFKAAFTAAATGRFGSGWAWLVVNAEGKLEVLSTANQDTPIMEGKKPILGLDVWEHAYYLNYRNVRPNYIKAFFEIINWNKVNELYQAAKA

SEQ ID NO: 19643 - protein, 849 aa, Streptococcus agalactiae; identical to SEQ ID NO: 10379

SEQ ID NO: 19644 - protein, 283 aa, Streptococcus agalactiae; identical to SEQ ID NO: 1490

SEQ ID NO: 19645 - protein, 1865 aa, Streptococcus agalactiae
ATGACTAAATACCAAGAGACTGCTAAAGCTATTTTAGCAGCAGTAGGGGGAGAAAAAATATTCAACACGTAACCCACTGTGTGACACGATTACGATTAGTTTTAGACAATGATGAAATTGTCAACGATCAGGTTATTAAAACTATTCCGAATGTTATCGGTGTTATGCGTAAAAATGATCAATACCAAATTATTTTGGGAAATGATGTCAATAATTATTATAATGCTTTTTTGGCCTTAGGTCATTTTGAAAATACTACCAGAGAATTTTCATCACAAAAAAAGAGTTCAATACTTGAGAAATTAATTGAAACGATTGCAGGAGTCATTACGCCGCTTATACCTGCTCTTCTAGGAGGAGGGATGCTCAAGGTTATAGGTATTTTGCTCCCTATGCTCGGTATAGCAAGCTCTAGTTCTCAAACAGTAGCTTTTATCAATTTTTTTGGTGATGCCGCTTATTATTTTATGCCAATAATGATTGCTTATTCAGCTGCGTCACGATTTAAAGTTACACCTGTATTAGCTGCTACAGTAGGAGGGATTCTCTTACACCCTGCTTTTGTGACAATGGTAGCTGAAGGAAAACCATTATCTTTATTTGGAGCTCCGGTTACACTGGCTAGTTATGGTTCTTCTGTTATTCCAATCTTAATTATGGTTTTTCTTATGCAATATATTGAGAGATGGATTAATAAAATTGTTCCTAGTGTAATGAAGAGTTTTTTACAACCGACTTTGATTATTCTCATTTCTGGCTTTTTAGCTTTAGTGGTCGTGGGGCCACTGGGGGTAATTATTGGTAAAGGATTGTCTAGTGCAATGCTTTCGATTTACCATGTGGCGCCATGGTTAGCTTTATCTATTCTTGGTGCTATTATGCCATTGGTTGTTATGACAGGAATGCACTGGGCATTTGCTCCAATATTTTTAGCTGCTTCTGTTGCGACACCAGATGTTTTGATTTTACCAGCAATGTTAGCTTCTAATTTAGCTCAAGGTGCGGCTTCTCTTGCTGTTGCAGTTAAGGCTAAACAAAAACAAACACGTCAGGTGGCCTTTGCAGCAGGTTTATCAGCACTACTAGCTGGTATCACAGAACCTGCACTTTATGGTGTCACACTGAAATTCAAGAAGCCTTTATACGCTGCAATGATATCAGGTGGTTTAGTAGGAGCTTATATTGGATTAGTTAATATTGCTTCCTATACATTTGTAGTACCATCTATTATTGGTTTGCCACAATATATCAATCCACAGGGGGGCAATAATTTCAGTAATGCTGTTATTGCAGCAATAGCTACTATTATTTTGACTTTCATTATTACATGGTTCTTGGGAATTGATGAAGGAGAAAACGAAAAAAGTAGTATTAATGCTCAAGAGCACACACATATTAGAAGTGGTTTATCAAAAAAAGAGACATTGTATTCACCTATGGTAGGCAATGTATTACCTTTATCTAAAGTACCCGATGAAACATTTTCATCTAAATTACTAGGTGAAGGTTTAGCAATCACTCCTAGTGTGGGTGAAGTTTATGCACCATTTGATGGTGAAATTATAAGTTTATTTCCTACAAAACATGCCATTGCCTTAAAGGATGATAAGGGAGTCGAAGTGTTAATCCATATTGGAATAGATACTGTAGAACTAAATGGAGAAGGTTTTGAACAATTGGTCAAAGTTGGCGATTTTGTTAAACGAGGACAGTTACTTTTGCGAATGGATATTGATTTTATTAGTTCAAAGGGGTATTCTCTTATTAGTCCGGTTGTAGTTACAAATTCAATTGACCAACTTGAAATTATCGTTAAAGACGCAGAGACAATGGTTACAAATGAAGATGATTTACTTGTAATTCTT

SEQ ID NO: 19646 - protein, 622 aa, Streptococcus agalactiae; identical to SEQ ID NO: 10382

SEQ ID NO: 19647 - protein, 1424 aa, Streptococcus agalactiae
ATGACGGTTTTTCCTAAACATTTTCTATGGGGAGGTGCAGTTGCTGCCAATCAGGTAGAGGGTGCATTTAGAACAGATGGCAAAGGTTTATCTGTACAAGATGTACTTCCAATGGTGGTTTAGGCGATTTCACCGCCAAACCTACTCCAGACAATTTGAAGCTAGAAGCAATTGATTTTTATCATAACTATAAAAATGATATAAAACTGTTTGCAGAGATGGGCTTTAAAGTTTTTAGAACCTCTATTGCCTGGTCTCGAATTTTTCCAAATGGTGATGATAGTGCTCCAAACGAAGCTGGCTTACAATTTTATGATAATTTATTTGATGAGTTGCTTAAATATAATATCGAGCCCTTGGTTACCTTATCTCATTATGAAACACCGCTTCATCTTGCAAAAACTTATAATGGTTGGGCTGATAGACGTTTGATAGCATTTTTTGAGAAATTTGCTCAAACAGTCATGGAGCGTTATAAAGATAAGGTGAAATATTGGTTGACTTTTAATGAAGTGAATTCTATTTTACATATGCCTTTCACCAGTGGTGCTATTATGACCGACAAATCACAACTAAGTCCTCAGGAGCTTTATCAAGCTATTCATCATGAATTAGTAGCATCGGCTAGAGTGACAAAATTAGGGCGTTCTATCAATCCTAATTTTAAAATTGGCTGTATGATTCTGGCTATGCCAGCTTATCCTATGACATCTGATCCAAGAGATGTCCTGGCTGCAAGACAATTTGAACAACATAATCTGCTATTTTCAGATATACATGTCAGAGGTAAATATCCCACTTATATTCAGTCCTATTTCAAAAATAATGGTATTAAAATTAAATTTGAAGAAGGAGATGAGGAAGTATTGGCACAAAATACAGTAGATTTTCTATCGTTTAGTTACTATATGAGCGTGACACAAGCTTATGACTTTGAAAATTATCAAAGTGGTCAGGGAAATATCCTTGGAGGCCTAACTAATCCTCATTTAACAACTTCAGAATGGGGATGGCAAATCGATCCCATCGGGCTACGCCTAGTCTTAAATCAGTATTATGAACGTTATCAGATTCCGTTGTTTATTGTAGAAAATGGATTGGGAGCAAAAGATCAATTGATAGAAACACTAGACGGTGATTATACTGTCGAAGATGATTATCGTATTGATTATATGAATCAACATTTAGTTCAAGTTGCTAAAGCTATTGAAGATGGTGTTGAAATAATGGGATATACATCTTGGGGGTGTATTGATTGTGTATCCATGTCTACAGCTCAACTAAGTAAACGTTATGGTCTAATATATGTTGATCGAAATGATGATGGAACAGGGAGTCTACAACGTTACAAGAAGAAGTCATTTGGTTGGTACCAAAAAGTGATTAAGACAAATGGCCAATCATTGTTTGAACATCATAACAGA

SEQ ID NO: 19648 - protein, 475 aa, Streptococcus agalactiae; identical to SEQ ID NO: 1496

SEQ ID NO: 19649 - protein, 552 aa, Streptococcus agalactiae
ATGTCACTCTTGAACTTTTTTGATAAACTTGACACTGCTATTTATACCTTTAATTATCCCAATCAATACTGGCTTTTACTTTCTGACCAGATGTTTGACTATTATTATCCAAATATCCTATCAAAGTTTGAATGCGAAAAGGGCCTCTATAAAGTTGGTATCGGACAAAAATCATCTTTATCACTTTTAAAAAGATCATATGAAACGTCTATCTTAGCCCTGAAAGCTTTAAAAGGTCAACAAAAGGTCAACCTCGTCGACGACCTTGATCTTGAACTGTTATTAACAAGTATTGATTCTAATATTAAACAATATGTGCTAAATAAAGCGCTTGTAAACTTATCTGAAAATGATAAGATCTTGCTTAACTCATATTTTAAGCATAATCTATCATTAAAAGAATGTAGTCAGGAACTTTTTATCCATAAAAATACTGTTCAATATAGGTTAAATAAGATTTATGAATCAACGCAACTCAATCCAAGAAACTTTAAGGATGCAACTTTATTGTATCTAGCACTTAAATCAGAAGATATTAACCTTCATAAATTA

SEQ ID NO: 19650 - protein, 184 aa, Streptococcus agalactiae
MSLLNFFDKLDTAIYTFNYPNQYWLLLSDQMFDYYYPNILSKFECEKGLYKVGIGQKSSLSLLKRSYETSILALKALKGQQKVNLVDDLDLELLLTSIDSNIKQYVLNKALVNLSENDKILLNSYFKHNLSLKECSQELFIHKNTVQYRLNKIYESTQLNPRNFKDATLLYLALKSEDINLHKL

SEQ ID NO: 19651 - protein, 415 aa, Streptococcus agalactiae
ATGAAATTAAGAAAACAACTCGCACAACAAATCGTTACCTCTATCAAAGATGTTTGTCAACAAGATATTAATTTTATTAATACCAAAGGAATCATTTTCGCTAGTACCAATCCAAAACGTGTTGGAGAATTCCATGAAATTGGTTTAAAAGTAGCACAGACAGGACAAATGATTGAAGTAACAGATCAAGAATCTTATTTTGGGACACAAGCAGGGATCAATATTCCTTTCTATTATAATTGTGAATTATTAGCTACTATTGGGATTAGTGGAAACCCCAACCAAGTAGGAAAATATGCTTTACTTGCTCAAAAAATGACTCGACTCATCTTAAAAGAGCATGAATTAGATTATCTGGATTTCGGGCGAAAAAACGAAGCTTCTATTGTCTTACATCATCTTGAAGGCAGAGAGT

SEQ ID NO: 19652 - protein, 139 aa, Streptococcus agalactiae
MKLRKQLAQQIVTSIKDVCQQDINFINTKGIIFASTNPKRVGEFHEIGLKVAQTGQMIEVTDQESYFGTQAGINIPFYYNCELLATIGISGNPNQVGKYALLAQKMTRLILKEHELDYLDFGRKNEASIVLHHLVKAES

SEQ ID NO: 19653 - protein, 1140 aa, Streptococcus agalactiae
ATGAAGGTAGTAGTAGCTATTGATTCTTTGAAAGGGAGTCTTTCTTCTTTAGAAGCTGGCAATGCTATAAAGGAGTCAATTAATGAAGTAATCTCAGGGGCGGATGTGGAAGTACATCCATTAGCAGACGGGGGAGAAGGAACTGTTGAAGCTTTGACGCTAGGTATGGGGGGTACGATCGAAACAATCCCTGTTAAGGGGCCTCTTGGAGAAAAAGTACATGCGAGTTATGGTATTATTCCACAGCGTCAGTTAGCTATTATTGAAATGGCTGCAGCTGCTGGTATTACCCTAATTGCTACTGAAGAGAGAAATCCTCTCCACACAACCACTTATGGAGTTGGAGAAATGATAAAGGATGCTATAAGTAAAGGCTGTAGGCACTTTATTATTGGTATTGGAGGTAGTGCTACTAATGATGGTGGGGCAGGTATGCTACAAGCTTTGGGATATGCATTATTAGATAAAGATAATCAAGAAATCAGTTTGGGAGCACAAGGATTGGCAGATTTAAAATCTATCTCTACTGATAAGGTTATTGAGGAATTAAAAGAATGTGATTTTAAAATTGCATGTGATGTAACAAATCCTTTATGTGGTGCTCAAGGTTGTAGTTCGATTTTTGGACCGCAAAAAGGTGCTGATGAAGATATGATTACAAAAATGGATACTTGGTTAAGTAATTATGCTACCTTAGCTACTTCAGTTAGTGAAAAAGCAGATGCAACTATTGAAGGAACAGGTGCAGCGGGTGGGCTTGGATTTGCCTTTTTAGCCTTTACAAATGCTACCTTAGAACCTGGTATTGATATTATTCTATCAGAAATTAATATAGAAAAAGCGATTTCTGAAGCTGATTTAGTAGTTACTGGTGAAGGTCGTTTGGATGGGCAAACGGTGATGGGAAAAGCTCCAATTGGCGTAGCAAAATTAGCTAAAAAATATGGTAAGAAAGTAGTGGCATTTTCTGGATCTGTCACCGAAGATGCTATACTTTGTAATCAACATGGTATTGATGCTTTTTTTCCAATCGTACGACGCCTTATCAGCTTAGATGAGGCTATGTCTAAAGAGGTAGCTTATAAAAATATGAAAGAAACTGCTACTCAAGTCTTTAGATTAATCAATTTGTATAATCAT

SEQ ID NO: 19654 - protein, 380 aa, Streptococcus agalactiae; identical to SEQ ID NO: 1500

SEQ ID NO: 19655 - protein, 389 aa, Streptococcus agalactiae
ATGGAAGCTACATTTACAACAACAGGGGCTTTAATAGGATTAGCGCTTGCTATTTTACTGATTATCAAAAAAGTTCATCCTGCCTATAGTCTCATTCTTGGAGCATTAGTTGGTGGTTTGATTGGTGGCGGTGATTTAGTTACAATTGTCAATACAATGGTATTAGTGCGCAAGGGATGATGTCATCCATATTACGCATTTTAACATCAGGGATTTTAGCGGGTGCTTTAATTAAAACCGGATCAACTGAAAAAATTGCAGAAAGTATCATTAAAAAATTAGGACAACAGCGAGCCATCACAGCTTTATCCATCGCAACAATGATTATTTGTGCAGTACGTGTCTTTATTGATATTGCAGGTATTACAGTTGCTCCGATTGCANNNNNT

SEQ ID NO: 19656 - protein, 130 aa, Streptococcus agalactiae
  VARIANT 56, 129, 130: Xaa = Any Amino Acid
MEATFTTTGALIGLALAILLIIKKVHPAYSLILGALVGGLIGGGDLVTIVNTMVLXAQGMMSSILRILTSGILAGALIKTGSTEKIAESIIKKLGQQRAITALSIATMIICAVRVFIDIAGITVAPIAXX

SEQ ID NO: 19657 - protein, 933 aa, Streptococcus agalactiae
ATGATTATTTGTGCAGTAGGTGTCTTTATTGATATTGCAGTTATTACAGTTGCTCCGATTGCATTAGCAATAGGTAAAAAAGCTAATCTTTCTAAATCTAGCATACTGTTAGCAATGATTGGTGGTGGTAAGGCTGGGAATATTATCTCACCCAATCCTAATACAATTGCTGCTTCAGAAGCATTTAAGGTTGATTTAACAAGCTTAATGGTACAAAATATTATTCCTGCAATTGCAGCTTTAGTAGTTACGATTATATTAGCAAAGATTGTTTCCAAGAAAAATAACGATATTTCTTATGATAGTGAGGAGCAAGTGGGCTCTGATCTGCCAGCATTCTTACCGGCTATTTCTGGTTCACTTGTGGTTATCTGCTTATTAGCTCTTCGTCCTTTATTTGGAATCACTATTGATCCCTTGATTGCACTGCCGTTGGGTGGTCTAATTAGTATTTTAGCAACAGGTTACCTAAAAGAAACGGTACCGTTTGTTGAATACGGTTTATCAAAAGTTGTTGGCGTTTCAATTCTTTTGATTGGAACAGGTACGCTCTCAGGTATTATTAAAGCATCTAATCTACAATTTGATATGATTCATCTCCTTGAATTTTTAAATATGCCGACCTTTATCCTTGCCCCACTCTCAGGTATTTTTATGGGAGCAGCAACAGCATCAACGACTTCTGGAACAACTATTGCTTCACAAACGTTTGCTGAAACCTTGATTAAATCAGGGGTACCGGCGGTTTCGGGTGCAGCTATGATTCACGCAGGTGCGACTGTTTTGGATTCGCTACCTCATGGATCCTTCTTCCATGCGACAGGCGGAGCTGTCAATATGGCTATAAAAGATCGTATGAAACTAATTAGCTATGAAGCTTTGATTGGATTAACTAGCACAATAGTTGCTGTCGTTTACTATTGTTTCTTTGGG

SEQ ID NO: 19658 - protein, 311 aa, Streptococcus agalactiae
MIICAVGVFIDIAVITVAPIALAIGKKANLSKSSILLAMIGGGKAGNIISPNPNTIAASEAFKVDLTSLMVQNIIPAIAALVVTIILAKIVSKKNNDISYDSEEQVGSDLPAFLPAISGSLVVICLLALRPLFGITIDPLIALPLGGLISILATGYLKETVPFVEYGLSKVVGVSILLIGTGTLSGIIKASNLQFDMIHLLEFLNMPTFILAPLSGIFMGAATASTTSGTTIASQTFAETLIKSGVPAVSGAAMIHAGATVLDSLPHGSFFHATGGAVNMAIKDRMKLISYEALIGLTSTIVAVVYYCFFG

SEQ ID NO: 19659 - protein, 1062 aa, Streptococcus agalactiae; identical to SEQ ID NO: 10391

SEQ ID NO: 19660 - protein, 354 aa, Streptococcus agalactiae; identical to SEQ ID NO: 1504

SEQ ID NO: 19661 - protein, 440 aa, Streptococcus agalactiae
ATGATAATGAGTAATCGAAGTATTTTAGACGAGCGATTATGTTTTACGGTTAGTGAAACACATCGACTTTTCAATAAATTTTACCAAAAAGCTTTGGATGAATTTCAATTGACTTATCTCCAATACGTTATCTTGTTAGTCCTTTGGGAAGAGATCATCGGCATATGAAGGAACTTAGTTATGCACTATCTCTTAATTCGAATACCCTAACTCCAGTTTTAAAGCGTATGGAAAATCGTGGGTGGATTGTACGAGAAAAACCAAGAGATGATAAAAGGCAACTCATTATTCATCTAAGTAACAAAGGTATTGAGTCACAAGATGCCGTTGTCAATGCGGTGCAATCGTGCGGGTATTTTTTCTCAGAAATTAGTCCTGAATCTTATCAAAAAACTGTTTCTGCCCTTTCTTCACTTAACCAAGTTATAAAATCACATTTA

SEQ ID NO: 19662 - protein, 147 aa, Streptococcus agalactiae; identical to SEQ ID NO: 1506

SEQ ID NO: 19663 - protein, 1026 aa, Streptococcus agalactiae; identical to SEQ ID NO: 10395

SEQ ID NO: 19664 - protein, 342 aa, Streptococcus agalactiae; identical to SEQ ID NO: 1508

SEQ ID NO: 19665 - protein, 678 aa, Streptococcus agalactiae
ATGAAAGAAGCAAAAAATTTTTCCCAACAATTGAATATTTTAAGAGCTGGTGTTCTTGGTGCTAATGATGGTATCATCTCTGTAGCTGGTGTTGTTATTGGTGTTGCGAGTGCAACTCATAACCTTTGGATTATTTTTTTATCAGCAGCTTCCGCGATTTTAGCTGGTGCATTTTCTATGGCTGGCGGGGAGTATGTTAGTGTTTCTACTCAAAAAGATACTGAACAAGCAGCAGTTGCGCGTGAAGAGAAACTACTAGAAAATAATCCAGAACTTGCCAAAAAATCCTTAGTTGATATCTACTTAGCAAAAGGAGAAAGTCACGAACATGCTCAATGGCTAGTTGACAAGGCTTTTTCAAAGAATGCTATTGAGCATTTAGTTGAAGAAAAATATGGTATTGAGTTCGGTGAATATACAAGCCCCTGGCATGCTGCTATATCTAGTTTTATAGCTTTTGCCATCGGATCAATTTTTCCAACTATAACTATTCTGTTATTGCCATTTTCGGTACGAATTGTAGGAACGGTAATAATTGTTATTGTTTCACTATTATCAACTGGTTATGTAAGTGCTAAGTTAGGTCAAGCTCCTACAGTACCTGCCATGCGTCGAAATGTGATGATTGGTTGTTTGACAATGTTGGCAACCTACGTCATTGGACAATTATTTTCAATA

SEQ ID NO: 19666 - protein, 226 aa, Streptococcus agalactiae; identical to SEQ ID NO: 5966

SEQ ID NO: 19667 - protein, 699 aa, Streptococcus agalactiae; identical to SEQ ID NO: 5967

SEQ ID NO: 19668 - protein, 233 aa, Streptococcus agalactiae; identical to SEQ ID NO: 5968

SEQ ID NO: 19669 - protein, 952 aa, Streptococcus agalactiae
ATGGGACTTTTAGTAGATGGCAAATGGGTTGATCAATGGTATGATACTGCATCAACTGGTGGTAAATTCGTCCGAACCGTTACACAATTCCGTCATTGGGTTACTAAAGATGGTTCAGCAGGGCCTAGTGGGGATGCAGGTTTTAAAGCAGAATCTGGACGATATCATCTCTACGTTTCACTAGCTTGCCCTTGGGCATCACGTGTATTAATCATGAGAAAGCTTAAAAATCTAGAATCTCATATCTCTATCTCCATTGTTAACCCTTTAATGTTGGAGAATGGTTGGACTTTTCAGAATATAAAGGCGTTATTCCTGATATGATTAACCAAAGCCAATACCTTTACCAAATCTATCAAGCAAGTCAAAGTGATTATACAGGACGCGTGACAGTCCCTGTTCTTTGGGATAAAAATTCCATACAATCGTTAACAATGAATCATCTGAAATTATGCGTATGTTAAATACTGCATTTAATCATATTACTGGAAATACTGACGATTACTATCCCGATTCCTTACAAGGACAAATTGACGAAATGAATAATTTTATTTATCCAAAAATAAATAATGGTGTCTATAAAGCTGGTTTTGCCACTTCTCAGAACGTTTATCAAAAGGAAGTTGAAACCTTATTCACAGCTTTAGATCAGTTAGAAAAACACTTATCTGATAACCATTATCTTGTTGGAGAACAATTTACCGAAGCTGATATTCGCCTTTTCACAACTTTAGTTCGCTTTGACACCGTTTATTATGGTCATTTTAAATGTAATTTAAAAGCGCTACATGATTACCCACATTTATGGCATTATACAAAACGTATTTACAACCTACCTGGAATTGCTGAGACAGTTAATTTTGATCATATCAAAAAACACTATTACGGTAGCCATAAAACCATTAACCCTACTGGTATTATTCCAGCTGGACCTAACTTAGACTGGACAATT

SEQ ID NO: 19670 - protein, 318 aa, Streptococcus agalactiae; identical to SEQ ID NO: 1514

SEQ ID NO: 19671 - protein, 717 aa, Streptococcus agalactiae; identical to SEQ ID NO: 10403

SEQ ID NO: 19672 - protein, 239 aa, Streptococcus agalactiae; identical to SEQ ID NO: 10404

SEQ ID NO: 19673 - protein, 1149 aa, Streptococcus agalactiae
TTGAATTCAAAACTTTCATTGAAATTGACTATTTTATCGATTTCTATCTTTTTGATGTCTCATTTAGCAATTGCTCCTGCAATTCCTAAATTGTATGCCTTTTACCATACTCAAAACCCTCATATTGGACTAGCTTCAGTAGAGAGTTTAGTTACTATTCCAGCTATGATGATTACTATTTTTGTTATTTTGAGTAATTTTGTAGTCACAAAACTTGGCAAAAAAAACACGGTCTTACTTGGTTTATGTTTAATCTTAATGTCTGGGTTTATCTCATTTTTTACAAGTAATTTTTCACTTGCGATGGCTAGTCGACTACTTTTGGGTATTGGTATTGGTCTCTATAATTCGCTATCAATTAGTATCATAACGGATTTATATGAGGCTGATGAGAGAGCCAGTATGATTGGTCTTAGAACAGCATCACTCAATATCGGTAAAGCCTTAACTACATTTATTGTTGGATTGGTTTTAGCTATTGGTGTGAATTATATTTATTTGGTTTACCTTCTGGTTATTCCTGTTTTCTTTTTCTTTTGGAAAAATGTTCCAGAGGTTGAAAATCAAACACATACCCTTAAAGCTAGTACAACATTTGATACTAAAGCGGCTTTGTTGATGCTCATCACGTTCTTAGTAGGTATTGCTTATATAGGAGCAACTGTCAAAATTCCAACCTTACTAGTGACAAAATATCACTACGCGACGAGCTTCTCTAGTAATATGTTAACTCTCCTTGCTTTTAGTGGTATTTTAGTTGGATCTGTATTTGGAAAATTAGTTAAAGTATTCCAAGAGAAGACGCTATTAATCATGATTCTAGCTATGGGAATAGGTAATGTGCTATTTGCTTTAGCTAATAATCAGATCATTTTTATCGTAGCTAGTATTTTAATAGGAGCTAGTTTTGTTGGCACCATGTCTTCTGTATTCTTTTATATTTCAAAAAACTATGCAAAAGAACATAATAACTTTATCACAAGCCTTGCCTTAACAGCTGGTAATATAGGAGTTATTTTGACACCGCTTATTTTAACGAAACTTCCAAGCCAGCTACATCTGGAACCTTTTATGACACCATTTTTAATAACAAGTGGGCTGATGGTGATTAATGTCTTTGTTTACCTAGTTTTAATGTCAAAAAATAAA

SEQ ID NO: 19674 - protein, 383 aa, Streptococcus agalactiae; identical to SEQ ID NO: 10406

SEQ ID NO: 19675 - protein, 944 aa, Streptococcus agalactiae
ATGTTAATTGCTAAAGACAAACAAGGAAATTTAATTAATCTACTCGAGTCTCATCCGGGAAAGGGACAGTATTTTTGTCCAACTTGTTGTTCAGCTGTAAGGTTAAAGGCAGGTCGAATCATGAGAAGACACTTTACACATATTAGTCTAAAAAATTGTCAGTTTTATCATGAAAATGAGTCTAATGAGCACTTGCAATTAAAAGCAAAGTTATATATGAGTTTAAGTAGAGAGAATGAAACTATGCTCGAGCATCATTTGCCAGAAATTAATCAGATTGCAGATTTATTTGTGAATGAGACATTGGCTTTAGAAGTTCAGTGTAGCCGACTATCAGAGCAGCGACTCAGGGAGCGAACAAAAGCATATCTACAGGCAGACTTTCAAGTGAGATGGTTACTAGGGGAAAAACTCTGGTTAAAGCATCGTTTAACAAATCTACATAAACAATTTTTACAATTTTCTCAAAGTATCGGATTTCATATTTGGGAGTTAGATTTGAGGTTAGAAGTACTGAGACTAAAATATTTGATTTACGAAGATTTACGCGGACATGTCTATTACTTAAGTAAAACTTGCCCTCTTAGTGGAGACGTTCTAGCATTTTTGAAGTGGCCATACCAATCAAAAAATCTAAATTTTTATAAGGTTAACAAGACAGAAATATCAGAGATTATGTGCGTCAGCAGTTACGCTATGGCAATCAATTTTGGTTACGAAAACAAGAAAAGGCCTACCTTTCTGGTCAGAATCTATTGACCCAAGAGCTAATGATGTTTTTTCCTCAAATACAGCCACCACGTGTAGATACTGATTTTTGTCAAATAACAAATTCTCTAACATCGTTTTATCAGAATTTTACAAATTATTATCAAAAAAATAAGAATAACTTAGACCAAACACTTTATCCCCCTGTATTTTATGATAAAATAGTCACTAAGAAT

SEQ ID NO: 19676 - protein, 315 aa, Streptococcus agalactiae
  VARIANT 218: Xaa = Any Amino Acid
MLIAKDKQGNLINLLESHPGKGQYFCPTCCSAVRLKAGRIMRRHFTHISLKNCQFYHENESNEHLQLKAKLYMSLSRENETMLEHHLPEINQIADLFVNETLALEVQCSRLSEQRLRERTKAYLQADFQVRWLLGEKLWLKHRLTNLHKQFLQFSQSIGFHIWELDLRLEVLRLKYLIYEDLRGHVYYLSKTCPLSGDVLAFLKWPYQSKNLNFYKVXQDRNIRDYVRQQLRYGNQFWLRKQEKAYLSGQNLLTQELMMFFPQIQPPRVDTDFCQITNSLTSFYQNFTNYYQKNKNNLDQTLYPPVFYDKIVTKN

SEQ ID NO: 19677 - protein, 1802 aa, Streptococcus agalactiae
ATGTCAGACAATCGCTCACATATTGAAGAAAAATACCAATGGGATTTAACTACTGTCTTTGCGACTGATGAGTTATGGGAAACTGAAGTGGTAGAGCTTACTCAAGCCATCGATAATGCAAAGGGTTTTTCAGGTCATCTGTTGGACTCAAGCCAATCTTTATTGGAGATCACGGAGGTTGAATTAGATTTATCTCGCCGTTTAGAAAAAGTTTATGTCTATGCTTCAATGAAAAATGACCAAGACACCACTGTTGCGAAATATCAAGAATTTCAAGCGAAAGCGACAGCGCTCTATGCAAAATTTAGTGAAACATTTTCGTTTTACGAGCCAGAACTATTGCAACTTTCAGAGTCTGATTACCAGTCATTCCTTTTAGAAATGCCTGACTTGCAAAAATATGATCATTTCTTTGAGAAAATATTTGCAAATAAACCTCATGTCTTATCTCAAAACGAAGAAGAATTGTTAGCTGGTGCTAGTGAGATTTTTGGAGCAGCTGGTGAGACATTTGAAATCCTTGATAATGCAGATATGGTCTTCCCAGTTGTAAAAAATGCAAAAGGTGAGGAAGTTGAGCTTACACATGGTAATTTCATTTCCCTTATGGAATCTAGCGATAGGACGGTTCGAAAAGAAGCATATCAAGCTATGTATAGCACATATGAACAATTCCAGCATACTTACGCTAAAACATTACAAACAAATGTGAAATCTCAAAATTTTAAGGCTCGTGTGCATCATTATCAATCAGCACGCCAATCAGCTCTATCTGCCAATTTTATTCCAGAAGAGGTCTACGAAACTCTAATTAAGACAGTTAATCATCATTTACCGCTCTTACATCGTTATATGAAGTTGCGTCAAAAAGTTCTTGGGCTAGATGATTTGAAGATGTATGACGTATATACACCCCTTTCTCAAATGGATATGAGTTTTACTTATGATGAAGCTCTAAAAAAATCAGAGGAGGTTCTAGCTATTTTTGGCGAAGCATATTCTGAACGTGTTCATCGTGCTTTTACTGAACGTTGGATTGATGTCCATGTTAACAAAGGAAAGAGGTCAGGCGCTTATTCAGGTGGATCTTATGACACTAATGCTTTCATGCTTCTTAACTGGCAAGATACTTTAGATAATCTTTATACGCTGGTGCATGAAACTGGACATAGTCTACACTCGACGTTTACTCGTGAAAATCAACCCTATGTTTATGGTGATTATTCTATTTTCCTAGCTGAAATTGCATCAACAACAAATGAAAATATATTACAGAAACCCTTTTGAAAGAAGTTAAAGATGATAAAAATCGCTTTGCAATTCTCAATCATTATTTGGACGGTTTCAAAGGAACAATTTTTAGGCAAACACAGTTCGCTGAATTCGAACATGCCATTCATGTAGCTGATCAGGAGGGGCAAGTACTAACTAGCGAATACTTAAACAATCTTTACGCTGAGCTTAATGAAAAATATTATGGTTTGACTAAAGAAGATAATCATTTTATTCAATATGAATGGGCAAGAATTCCACACTTTTACTACAATTATTATGTTTTCCAATATGCAACCGGCTTCGCAGCAGCAAATTATTTAGCAGAGCGTATTGTAAACGGTAATCCGGAGGATAAAGAGGCCTACCTAAATTACCTTAAAGCTGGGAATTCAGATTACCCTCTAAACGTCATTGCTAAAGCTGGTGTTGATATGACTAGTGCAGACTATCTGGATGCAGCTTTTAGAGTATTTGAAGAGCGTTTAGTGGAACTGGAAAATCTTGTAGCAAAAGGCGTCCATAATGAT

SEQ ID NO: 19678 - protein, 601 aa, Streptococcus agalactiae
  VARIANT 425: Xaa = Any Amino Acid
MSDNRSHIEEKYQWDLTTVFATDELWETEVVELTQAIDNAKGFSGHLLDSSQSLLEITEVELDLSRRLEKVYVYASMKNDQDTTVAKYQEFQAKATALYAKFSETFSFYEPELLQLSESDYQSFLLEMPDLQKYDHFFEKIFANKPHVLSQNEEELLAGASEIFGAAGETFEILDNADMVFPVVKNAKGEEVELTHGNFISLMESSDRTVRKEAYQAMYSTYEQFQHTYAKTLQTNVKSQNFKARVHHYQSARQSALSANFIPEEVYETLIKTVNHHLPLLHRYMKLRQKVLGLDDLKMYDVYTPLSQMDMSFTYDEALKKSEEVLAIFGEAYSERVHRAFTERWIDVHVNKGKRSGAYSGGSYDTNAFMLLNWQDTLDNLYTLVHETGHSLHSTFTRENQPYVYGDYSIFLAEIASTTNENILXETLLKEVKDDKNRFAILNHYLDGFKGTIFRQTQFAEFEHAIHVADQEGQVLTSEYLNNLYAELNEKYYGLTKEDNHFIQYEWARIPHFYYNYYVFQYATGFAAANYLAERIVNGNPEDKEAYLNYLKAGNSDYPLNVIAKAGVDMTSADYLDAAFRVFEERLVELENLVAKGVHND

SEQ ID NO: 19679 - protein, 624 aa, Streptococcus agalactiae; identical to SEQ ID NO: 10411

SEQ ID NO: 19680 - protein, 208 aa, Streptococcus agalactiae; identical to SEQ ID NO: 10412

SEQ ID NO: 19681 - protein, 548 aa, Streptococcus agalactiae
ATGCGTCGTCCAGTAGTTAAAGAAGAAATTGTTCAATATATGCGTCAGCACCAAAAACAAAATAATGGCTGTTTAGCAGAGTTAGAAGCATTTGCTAAACAGGAAAATATCCCTATTATACCTCATGAAACAGCGACTTATTTTCGTTTTTTGATGCAAACATTACAACCTAAGCACATTTTAGAAATTGGAACAGCTATTGGTTTTTCGGCCCTTTTGATGGCAGAAAACGCTCCTGAAGCAAAGATAACAACGATCGATCGTAATGAAGAGATGATTGCCTTGGCTAAGGAAAACTTTGCAAAATATGATAATCACAATCAGATAACCCTTTTGGAAGGCGATGCTGTGGATGTGTTACAAACATTGGATAAATCTTACGATTTTGTATTCATGGATTCTGCTAAGTCTAAATATATCGTTTTTTTACCTCAATATTAAAACATTTAGATGTTGGAGGAGTAGTTGTTTTAGATGATATTTTCCAAGGTGGAGATATTGCAAAACCTATCGATGAAGTGAGAAGAGGTCAGCGAACNNNNNTTAAT

SEQ ID NO: 19682 - protein, 183 aa, Streptococcus agalactiae
  VARIANT 181, 182: Xaa = Any Amino Acid
MRRPVVKEEIVQYMRQHQKQNNGCLAELEAFAKQENIPIIPHETATYFRFLMQTLQPKHILEIGTAIGFSALLMAENAPEAKITTIDRNEEMIALAKENFAKYDNHNQITLLEGDAVDVLQTLDKSYDFVFMDSAKSKYIVFLPQVLKHLDVGGVVVLDDIFQGGDIAKPIDEVRRGQRTXXN

SEQ ID NO: 19683 - protein, 893 aa, Streptococcus agalactiae
TGACACTTATGTCAGTTGCCACATTAGCTGCCTGCTCAGGTAAAACATCAAATGGAACAAATGTTGTTACAATGAAGGGCGACACTATTACAGTCTCTGATTTTTATGATCAAGTAAAAACATCAAAAGCTGCACAACAATCAATGCTTACATTGATCCTCTCACGTGTTTTTGATACACAGTATGGTGATAAAGTTTCAGATAAAAAAGTATCAGAAGCTTATAATAAGACAGCTAAAGGCTATGGTAATTCATTTTCAAGCGCACTTTCACAAGCAGGTTTGACTCCGGAAGGTTACAAACAACAAATTCGCACAACTATGCTTGTGGAATATGCTGTAAAAGAAGCAGCTAAGAAAGAATTAACAGAAGCAAACTATAAAGAAGCATATAAAAACTATACTCCTGAAACTTCTGTACAAGTAATCAAATTGGATGCAGAAGATAAAGCTAAATCTGTCCTTAAAGATGTAAAGGCTGATGGAGCTGATTTTGCAAAGATTGCAAAAGAAAAAACAACAGCTACTGATAAGAAAGTTGAGTATAAATTTGATTCTGCAGGGACAACCCTCCCTAAAGAAGTTATGTCAGCAGCCTTTAAGCTAGATAAAAATGGTGTTTCAGATGTGGTTTCAACGGTTGATTCAACAACTTATAAAACAAGTTACTACATCATTAAAGTAACTGATAAGACAGAGAAAAAATCTGATTGGAAATCTTACAAAAATCGCTTAAAAGAAGTTATTCTTAAGGATAAAACAAGCGATAGAGCCTTCCAAAATAAAGTGATTTCAAAAGCCTTAGAAAAAGCTAATGTTAAGATTAAAGATAAAGCATTTGCGGGCATCTTATCACAATATGCTACAACAAGTGGTTCATCATCACTTAAAAAA

SEQ ID NO: 19684 - protein, 298 aa, Streptococcus agalactiae
LTLMSVATLAACSGKTSNGTNVVTMKGDTITVSDFYDQVKTSKAAQQSMLTLILSRVFDTQYGDKVSDKKVSEAYNKTAKGYGNSFSSALSQAGLTPEGYKQQIRTTMLVEYAVKEAAKKELTEANYKEAYKNYTPETSVQVIKLDAEDKAKSVLKDVKADGADFAKIAKEKTTATDKKVEYKFDSAGTTLPKEVMSAAFKLDKNGVSDVVSTVDSTTYKTSYYIIKVTDKTEKKSDWKSYKNRLKEVILKDKTSDRAFQNKVISKALEKANVKIKDKAFAGILSQYATTSGSSSLKK

SEQ ID NO: 19685 - protein, 483 aa, Streptococcus agalactiae; identical to SEQ ID NO: 10419

SEQ ID NO: 19686 - protein, 161 aa, Streptococcus agalactiae; identical to SEQ ID NO: 5990

SEQ ID NO: 19687 - protein, 500 aa, Streptococcus agalactiae
ATGAAAGAATTATCGTCTGCACAAATCCGCCAAATGTGGTTGGATTTCTGGAAATCCAAAGGACATTCCGTTGAGCCTTCAGCTAACTTGGTTCCTGTGAACGACCCAACGCTTCTTTGGATCAACTCAGGTGTTGCAACCTTGAAAAAATATTTTGATGGTTCAGTGATTCCAGAAAATCCACGTATTACCAATGCACAAAAATCAATTCGTACTAATGATATTGAAAATGTTGGTAAAACAGCACGTCACCATACTATGTTTGAAATGCTTGGTAACTTCTCAATTGGAGACTATTTCCGTGATGAAGCTATTGAGTGGGGATTTGAACTCTTGACAAGTCCTGAATGGTTTGACTTCCCTAAAGACAAGCTCTACATGACTTATTACAGATGACAAGGATTCATATAACCGTTGGATTGCTTGTGGCGTTGAACCAAGTCACTTGGTGCCAATCGAGGATAACTTCTGGGAAATCGGTGCTGGACCTNNNNNTTAAT

SEQ ID NO: 19688 - protein, 167 aa, Streptococcus agalactiae
  VARIANT 165, 166: Xaa = Any Amino Acid
MKELSSAQIRQMWLDFWKSKGHSVEPSANLVPVNDPTLLWINSGVATLKKYFDGSVIPENPRITNAQKSIRTNDIENVGKTARHHTMFEMLGNFSIGDYFRDEAIEWGFELLTSPEWFDFPKDKLYMTYYQMTRIHITVGLLVALNQVTWCQSRITSGKSVLDLXXN

SEQ ID NO: 19689 - protein, 1970 aa, Streptococcus agalactiae
GTGCCACGTTCAGAATACAAAGAATTGCCAAACAAAAACATTGATACGGGTGCTGGTCTTGAACGTCTTGCAGCTGTTATGCAAGGGGCAAAAACAAACTTTGAAACTGACCTTTTCATGCCTATCATCCGTGAAGTAGAAAAATTGTCAGGTAAAACTTACGATCCAGATGGCGACAACATGAGTTTCAAGGTTATCGCTGACCACATCCGTGCGCTTTCATTTGCTATCGGTGATGGTGCGCTTCCTGGAAATGAAGGTCGTGGTTACGTTCTTCGTCGTCTTCTTCGTCGTGCGGTTATGCACGGTCGCCGTCTGGCATCAACGAAACTTTCCTTTACAAATGGTTCCGACTGTGGACAAATCATGGAAAGCTACTACCCAGAAGTGCTTGAAAAACGTGATTTATCGAGAAAATCGTTAAACGTGAGGAAGAAACATTTGCTCGTACTATCGATGCAGGTAGCGGTCACTTGGATTCATTGCTTACGCAGCTTAAAGCTGAAGGTAAAGATACACTTGAAGGTAAAGATATCTTCAAACTTTATGATACTTATGGATTCCCGGTTGAATTGACAGAGGAATTGGCAGAAGATGCAGGCTACAAGATTGACCACGAAGGATTCAAAGCAGCCATGAAAGAACAACAAGACCGTGCGCGTGCAGCTGTTGTTAAGGGGGGTTCAATGGGTATGCAAAATGAAACCCTAGCTGGTATTGTTGAAGAATCACGCTTCGACTACGGAGCTGACAGCCTTGAATCAAATCTTTCAGTCATCATCGCTGACAATGAACGTACTGAAGCAGTTTCAGAAGGTCAAGCTCTTCTTGTCTTTGCTCAAACACCATTCTATGCTGAAATGGGTGGACAGGTTGCTGACCACGGTGTCATCAAAAATGATAAGGGTGACACAGTTGCTGAGGTTGTTGATGTTCAAAAAGCACCAAATGGTCAACCTCTACACACTGTAAACGTTTTGGCATCACTTTCAGTTGGAACAAACTACACACTTGAAATCAACAAAGAGCGTCGTTTGGCTGTTGAGAAAAACCACACAGCAACTCACTTGCTCCATGCAGCTCTTCACAATGTTATCGGTGAACACGCAACTCAGGCTGGTTCATTGAACGAAGAAGAATTCTTGCGCTTTGATTTTACTCACTTTGAAGCAGTAAGCAATGAGGAACTTCGTCACATTGAACAAGAAGTTAATGAGCAAATTTGGAACGATCTTACGATCACAACGACTGAAACTGACGTTGAAACCGCAAAAGAGATGGGAGCAATGGCACTTTTTGGTGAGAAATATGGTAAAGTGGTTCGTGTGGTTCAAATTGGTAATTATTCTGTTGAACTTTGCGGTGGAACTCACTTAAATAATTCTTCAGAAATCGGTCTCTTCAAGATTGTCAAAGAAGAAGGTATTGGTTCAGGTACTCGTCGTATTATTGCAGTTACTGGTAGACAAGCTTTTGAAGCTTATCGTAACCAAGAGGATGCACTAAAAGAGATCGCTGCTACTGTAAAAGCTCCGCAATTGAAAGATGCAGCAGCTAAAGTACAAGCTCTTAGCGACTCACTTCGTGATCTTCAAAAAGAAAATGTAGAGCTTAAAGAAAAAGCAGCAGCTGCAGCAGCTGGTGATGTCTTTAAAGATATTCAAGAAGCTAAGGGCGTGCGCTTCATTGCTAGTCAAGTTGATGTTGCAGACGCAGGTGCACTTCGTACATTTGCTGATAACTGGAAACAAAAAGACTACTCTGATGTGCTTGTTCTCGTAGCAGCTATTGGTGAGAAGGTTAATGTCCTTGTTGCAAGCAAAACTAAAGATGTCCACGCTGGTAACATGATCAAAGGATTGGCACCAATTGTAGCAGGTCGTGGTGGTGGTAAACCAGACATGGCTATGGCAGGTGGTAGCGATGCAAGTAAAATTGCAGAGTTGCTAGCAGCAGTTGCAGAAAATTTA

SEQ ID NO: 19690 - protein, 658 aa, Streptococcus agalactiae
  VARIANT 116: Xaa = Any Amino Acid
MPRSEYKELPNKNIDTGAGLERLAAVMQGAKTNFETDLFMPIIREVEKLSGKTYDPDGDNMSFKVIADHIRALSFAIGDGALPGNEGRGYVLRRLLRRAVMHGRRLGINETFLYKXVPTVGQIMESYYPEVLEKRDFIEKIVKREEETFARTIDAGSGHLDSLLTQLKAEGKDTLEGKDIFKLYDTYGFPVELTEELAEDAGYKIDHEGFKAAMKEQQDRARAAVVKGGSMGMQNETLAGIVEESRFDYGADSLESNLSVIIADNERTEAVSEGQALLVFAQTPFYAEMGGQVADHGVIKNDKGDTVAEVVDVQKAPNGQPLHTVNVLASLSVGTNYTLEINKERRLAVEKNHTATHLLHAALHNVIGEHATQAGSLNEEEFLRFDFTHFEAVSNEELRHIEQEVNEQIWNDLTITTTETDVETAKEMGAMALFGEKYGKVVRVVQIGNYSVELCGGTHLNNSSEIGLFKIVKEEGIGSGTRRIIAVTGRQAFEAYRNQEDALKEIAATVKAPQLKDAAAKVQALSDSLRDLQKENVELKEKAAAAAAGDVFKDIQEAKGVRFIASQVDVADAGALRTFADNWKQKDYSDVLVLVAAIGEKVNVLVASKTKDVHAGNMIKGLAPIVAGRGGGKPDMAMAGGSDASKIAELLAAVAENL

SEQ ID NO: 19691 - protein, 714 aa, Streptococcus agalactiae; identical to SEQ ID NO: 10423

SEQ ID NO: 19692 - protein, 238 aa, Streptococcus agalactiae; identical to SEQ ID NO: 1524

SEQ ID NO: 19693 - protein, 816 aa, Streptococcus agalactiae
ATGAATCTATTATTTTCTATTGATGATATGTACGTAGATCATTTTAAAGTGATGCTTTATTCGCTTGTCCGACAAACCAAGAATCGTAAGTTAGAGATATATGTCTTACAAAAAACATTACTCAAACGTCATACAGAACTTATTCAATATACTCAAAATTTAGAAGTTGGCTATCATCCAATAATTGTAGGTACCGAAGTATTTGCTCAGGCACCTACAACTGATCGCTATCCAGATACAATATATTATCGACTTTTGGCTCATAAATTTTTACCTGAGACCTTAGATAGGATACTTTATTTAGATGCAGATATGCTTTGCTTAAATGATTTCTCAAGTTTATATGATATGGAGTTAGGTGATCAACTATATGCAGCGGCAAGTCATAATACTGATGGTAAGTTTCTAGATTATGTCAATAAATTACGGTTAAAAAATGTAGAGCTAGAATCCTCTTATTTCAATACAGGGGTACTCTTGATGAACTTGCCTGCTATACGAAAAGTTGTTCATCAACAAACTATCTTAGATTACATAATGCAAAACCGTGGTCGTCTAATCTTACCAGATCAGGATATCTTAAATGGCTTATACGCTAATTTGGTTAAACCAATACCTGATGAAATTTATAATTATGATGCTAGGTATAGTCTTATTTATCAATTAAAAAGTCGCAATGAATGGGATTTAGAGTGGGTTATTAACCATACTGTTTTTTTACATTTTGCAGGACGAGATAAACCATGGAAAAAAGATTATAGAGGACGTTACTCGGGCCTTTATAAGTTTATGGCTAAAGAGGCTTTAACTAAAAAT

SEQ ID NO: 19694 - protein, 272 aa, Streptococcus agalactiae; identical to SEQ ID NO: 1526

SEQ ID NO: 19695 - protein, 291 aa, Streptococcus agalactiae; identical to SEQ ID NO: 10427

SEQ ID NO: 19696 - protein, 97 aa, Streptococcus agalactiae; identical to SEQ ID NO: 10428

SEQ ID NO: 19697 - protein, 213 aa, Streptococcus agalactiae; identical to SEQ ID NO: 10429

SEQ ID NO: 19698 - protein, 71 aa, Streptococcus agalactiae; identical to SEQ ID NO: 1530

SEQ ID NO: 19699 - protein, 759 aa, Streptococcus agalactiae
ATGATGAAAAATTTTATAAAACAAAGTGATACTACATTTGTTCGAATTATCAAAAGTCTTTTAATTGGTGGTTTTATAGGGGCCATACTTGGTTCCGTAGGAGCTCTTTTTATCATATTTGGTCAAGATAAGTACTTATCTGAAATTAATATTGTTCAATATTTCCTATGGGTTAGTCGTATTGTTGTAATTATAACAGCTCTCTTTAGTCTCATCTACCTCTATCAGATTCAAAAATATCAGAAAGTTTTTTTCAATGTTGATGAAAGTCAATCTGAAGAAATTTATCGCCAGATTAATTTAAGACATTCTTATGGGATGACTTTTGTGTCAATTTCAATAGTACTCAGTATAGTTAATACTTTATTTAACTATAAACTAAATATTTTTGATGATTCAGTTACTTTAGTTATTCCAATATATGATTTATCACTGCTATTTGTTTTATTGGGTTTACATATATATTTTTTAAAGGTATATCGGAATATCCGAGGTATAAAAATGACAGTCGCTCCAACTTTAAAAGAGTTGAAAAACAATGTCTTACAATTGGACGAAGCAGAGTTGGAATCAAATTATAAGATGTGTTTTGATATTGTCATGAATTTAAGTGGTTTTATTTTCCCTACGATCTATTTTGTATTATTCTTTATCTCATTTGTTTTTCAAAAAGTGGAGATTGTAGCAATTATTATAACAACATCTATTCATATCTACATTCTCATTAAGTCTTTAAAAGCAGCACGTCATTTTTATAGA

SEQ ID NO: 19700 - protein, 253 aa, Streptococcus agalactiae
MMKNFIKQSDTTFVRIIKSLLIGGFIGAILGSVGALFIIFGQDKYLSEINIVQYFLWVSRIVVIITALFSLIYLYQIQKYQKVFFNVDESQSEEIYRQINLRHSYGMTFVSISIVLSIVNTLFNYKLNIFDDSVTLVIPIYDLSLLFVLLGLHIYFLKVYRNIRGIKMTVAPTLKELKNNVLQLDEAELESNYKMCFDIVMNLSGFIFPTIYFVLFFISFVFQKVEIVAIIITTSIHIYILIKSLKAARHFYR

SEQ ID NO: 19701 - protein, 561 aa, Streptococcus agalactiae
ATGTCAAAAAATAACAACACTACCTGTCTTATTGAAACTGCTATTTTTGCAGCGCTTGCTATGGCTTTATCAATGATTCCTGATTTTGCGTCATGGTTCACTCCCTCTTTTGGAGCAATTCCTCTGATACTTTTTGCATTACGTCGTGGTACAAAATACGGTCTATTTGCTGGCTTAATTTGGGGCTTATTGCACTTTGTTCTTTCCAAAGTATATTACCTTAGTTTATCCCAAGTTTTTATAGAATACATCTTAGCATTTATAAGTATGGGACTTGCAGGCGTATTTTCTGCTAAATTTAAAGATGCACTTAGCAGCAGCTCTAAAACTAAAGCTTTATCATTAGCATTATCTGGAGCAATATTAGCAACATTTGTTCGTTATGTTTGGCATTATATCGCTGGTGTTATTTTTTGGGCTAGTTATGCACCAAAAGGTATGTCTGCTACATTATACTCATTAAGCGTCAATGGTACTGCTGGTTTGTTAACTCTATTTTTTGTAGTCATTAGTATTATTATTTTAGTTATCAGCTACCCTAGCTTCTTTTTACCTAAGAAA

SEQ ID NO: 19702 - protein, 187 aa, Streptococcus agalactiae
MSKNNNTTCLIETAIFAALAMALSMIPDFASWFTPSFGAIPLILFALRRGTKYGLFAGLIWGLLHFVLSKVYYLSLSQVFIEYILAFISMGLAGVFSAKFKDALSSSSKTKALSLALSGAILATFVRYVWHYIAGVIFWASYAPKGMSATLYSLSVNGTAGLLTLFFVVISIIILVISYPSFFLPKK

SEQ ID NO: 19703 - protein, 957 aa, Streptococcus agalactiae; identical to SEQ ID NO: 6009

SEQ ID NO: 19704 - protein, 319 aa, Streptococcus agalactiae; identical to SEQ ID NO: 1534

SEQ ID NO: 19705 - protein, 2157 aa, Streptococcus agalactiae; identical to SEQ ID NO: 10437

SEQ ID NO: 19706 - protein, 719 aa, Streptococcus agalactiae; identical to SEQ ID NO: 10438

SEQ ID NO: 19707 - protein, 222 aa, Streptococcus agalactiae; identical to SEQ ID NO: 10439

SEQ ID NO: 19708 - protein, 74 aa, Streptococcus agalactiae; identical to SEQ ID NO: 1538

SEQ ID NO: 19709 - protein, 261 aa, Streptococcus agalactiae; identical to SEQ ID NO: 10441

SEQ ID NO: 19710 - protein, 87 aa, Streptococcus agalactiae; identical to SEQ ID NO: 1540

SEQ ID NO: 19711 - DNA, 1722 bp, Streptococcus agalactiae
atgcttaaaggaatcgcagcctctgatggtgttgcagttgctaaagcatatctacttgtccaaccggatttgtcatttgagactgtaacagtcgaagatacaaacgcagaagaagctcgccttgatgttgcactccaagcttcacaagacgagctttctgttatccgtgagaaggcagtagaaagcttaggcgaagaagccgcagctgtatttgatgctcatttaatggttctttctgacccagaaatgattaatcaaattaaagagactattcgtgcaaaacaagtaaatgcagaaacaggtcttaaagaagtgactgatatgttcatcactatctttgaaggtatggaagataacccatacatgcaagaacgtgcagcagatatccgtgatgttgccaaacgtgtcttagcacatcttttgggtgttaaattaccaaacccagcaactatcaatgaagaatcaatcgttattgcacacgatttgacaccttctgatacagctcaattaaataaacaatttgttaaagcttttgtaacaaatattggagggcgtacaagtcactcagctattatggcacgtacactcgaaatcgcagctgttcttggtacaaatgatattactgaacgtgttcaagatggtcagttgattgctgttaatggtattactggtgaagttatcattgaaccaactgaagctcaaatttcagccttcaaggcagcaggtgaagcttatgccaaacaaaaagctgaatgggcacttcttaaggatgcacaaacagttactgctgatggtaaacattttgaattagctgctaatatcggtacacctaaagatgttgagggtgttaacgaaaatggagcagaagcagttggtctttaccgtacagagttcttatatatggattcacaagatttcccaacagaagatgagcaatatgaagcatataaagcagttcttgagggtatgaatggtaaaccagttgttgttcgtacaatggatatcggtggagataaagagcttccttactttgatcttccaaaagagatgaacccattcttaggattccgtgcattgcgtatttcaatttctgaaactggtgatgcaatgttccgcacacaaatccgagcacttcttcgtgcttcagttcatggacagctacgcatcatgttcccaatggttgctttgcttaaagaattccgtgctgctaaagctatatttgaagaagagaaagcgaacttgttagctgacggtgtagcagtagctgaaggcattgaagttggtattatgattgaaatcccagcggcagctatgcttgcagaccaatttgcaaaagaagttgatttcttctcaattggtactaatgatcttatccaatacacaatggctgcggaccgtatgaatgagcaagtttcatacctctatcaaccatacaatccatcaatccttcgtttgattaacaacgttatcaaagctgctcatgctgaaggtaaatgggcaggtatgtgtggtgagatggccggtgatcaaactgcggttccacttcttgttggtatgggattggatgaattctcaatgtcagcaacctcagtacttcgtacacgtagcttaatgaaaaaattggacacagctaaaatggaagaatacgctaatcgtgctctttcagagtgttcaactatggaagaagttatcgaacttcaaaaagaatacgttgactttgac

SEQ ID NO: 19712 - protein, 574 aa, Streptococcus agalactiae; identical to SEQ ID NO: 1542

SEQ ID NO: 19713 - DNA, 1425 bp, Streptococcus agalactiae
ttgacaaaagaatatcaaaattatgtcaatggcgaatggaaatcatctgttaatcagattgagattttgtcaccaattgatgattcttcattgggattcgtgccagcgatgactcgagaagaagttgatcatgctatgaaagcgggtcgtgaggctttaccagcctgggctgctttgacagtatatgaacgtgcacaataccttcataaagccgcagacattattgaacgtgataaagaagaaattgctactgttttagcaaaagaaatttctaaagcttacaatgcttcagtaactgaggttgtaaggacagctgatcttattcgttatgcagcagaagaaggaattcgtttatcaacttcagctgacgaaggtggaaaaatggatgcttcaacaggtcataagttggctgttattcgtcgtcaaccagtaggtatcgttttagcaatcgcaccttataattaccctgttaacctctcaggatcaaaaattgcgccagctctaattggtggaaacgttgtgatgtttaaaccaccaacacaaggttcagtctcaggacttgttttagcaaaagcttttgcagaagcaggtcttccagcaggtgtctttaatactattacaggacgcggttctgagattggagattacattgttgagcatgaagaagttaattttattaactttacaggatcaacgccagttggaaaacgtattggtaagttagcaggaatgcgtccaattatgcttgagttgggtggtaaggatgcaggtgtcgtcttagctgatgctgaccttgacaacgctgctaaacaaatcgttgcaggtgcttatgattactccggacaacgctgtacggcaattaagcgtgtacttgtcgttgaagaagttgcagatgaattggcagaaaaaatatctgaaaatgtagcaaaattatcagtaggtgatccatttgataatgcaacggtgacaccggttattgatgataattcagccgactttattgaaagcttagtagtagatgcacgtcaaaaaggtgcgaaagaattgaatgaatttaaacgtgatggtcgtctattaactccaggattgtttgatcatgttactttagatatgaaactagcttgggaagagccttttggaccaattctcccaattattcgtgtcaaggatgcagaagaagctgttgctattgccaacaaatctgattttggattacaatcatcagtctttacacgtgatttccaaaaagcatttgatatagcaaataaacttgaagttggtacagttcacattaacaataagactggacgtggtcctgataatttcccattcttaggactcaaaggatctggtgcaggtgttcaaggtatcagatattcaattgaagcaatgacaaatgtaaaatcgatagtttttgatatgaaa

SEQ ID NO: 19714 - protein, 475 aa, Streptococcus agalactiae; identical to SEQ ID NO: 1546

SEQ ID NO: 19715 - DNA, 1251 bp, Streptococcus agalactiae
atgaagaaattaattataggtatttttagtctaattattatagcgattcttgcttggcaaggtttttcgtttttgaaacataaagaaataaaacttcaacaagctgttgttgaaaaagaaattcgcatagccgagaaaacggtagaagtggtgaaaagacagaaaactgaacgtgttctttttcttgaacctaaaggatatgacaaaagtctaagcgctgatattttaaagtggaatcaaaaaagctttgagcataaaaaattttatgacaatcaatacattattctacgtcctcaattagcagattctaactttgcaaatgttaaaaaattatccatttatcaaatcttatatcaaaaagaaaaaggaagtatgtttcaaaaatcaagtcgccttttgagaacctacttacttgatcaaaataagaaaccttttgaattagatgagcttttagctcataatatatctggatttaaggctattttagaaaatatagctccaggaactcaactaaaggaacatgatagcaataaagaatttttaaaaactggaagagtaacagatgggctagatgttaaagatggtaagttaattattaatgatttaaaattaccacttgataaattatataatgtgatcgatgagtcatatttaaaatcaagtgatctagatttagtttctaatttaaaagctaaagcaccacgtgttgcacttacctttgatgatggaccaaatgaaaaaacgactcctaaagccttagaaatccttaaaagatataatgctaaagcgactttctttgtaatgggacaaagtgctgtagggcacacagatattttacaaaggatgcatgctgaaggtcatgagattggtaatcatacatgggatcatcctaatttaaccaaactaccagcggagaaaatcaaggaagagattcataagactaatgatctgattatgaaagcaacaggacaaaaaccggtgtacttacgtcccccttacggagcaacaaatgctactgtaaaaacagtgacaggattgaaagaaatgttgtggtcagttgatacagaagactggaaaaatcataatacacaagcaatgatgaccaatatcaaaaaacaattacgtcctggaggagtgattttgatgcatgatattcaccagacaaccatagatgctctgcctacaattatggattatctgacaacccagggctattattttgttactgtaggtgaattatattcaacgcct

SEQ ID NO: 19716 - protein, 417 aa, Streptococcus agalactiae; identical to SEQ ID NO: 10448

SEQ ID NO: 19717 - DNA, 1080 bp, Streptococcus agalactiae
atgataacaaaatttccagaccaatggcaggataaattaacccagcgtcaatttgatgatctaacagatattcaaaataaactttttcaacctattactgatggtgataatatccttggaattagccctacaggtactggtaaaactctagcataccttttcccaacgcttcttaagttgcaacctaaaaagagccaacaactcttaattttagctccaaattcagaattagctggacaaatcttcgacgttacaaaagaatgggctgaaccattaggactgaccgcacaactattcctttcaggttctagtcaaaaacgccaaattgagcgactaaaaaaaggaccagaaattcttataggaactgctggacgcgtatttgaacttgtgaaactaaaaaaaataaaaatgatgaacattaatactatcgtccttgatgaattcgatgaattactcggcgactcacaatatcattttgtggacaatattattaatcgcgttcctcgtgatcagcaaatgatttacattagtgccaccaacaaactggacaatagtaaacttgccgataacactataacaatcgatctatctaatcaaaaacttgatactataaaacattattatattacagttgataaaagagagcgtactgacctacttcgtaaattttcaaatattcctgattttagaggtcttgtcttttttaacagcttatcagacttaggtgcatgtgaagaacgtttacaatttaatagggcctcggcagtttctttagcaagcgatattaatattaaattccgtaaagttatcttagagaaatttaaaaaccatgatatttcattactcctaggaactgatttggtagctcgtggcattgatatcgacaacctagaatatgtgattaattttgatatcgcacgcgacaaagaaacatatacacatcgttctggacgaactggtcgtatggggaaagagggatgtgttattacatttgtaacacataaagaagagctcaaacaacttaaaaaatacgccaccgttacagaacttgtacttcacaatcaaaaattacatttaaaa

SEQ ID NO: 19718 - protein, 360 aa, Streptococcus agalactiae; identical to SEQ ID NO: 1552

SEQ ID NO: 19719 - DNA, 627 bp, Streptococcus agalactiae
atgcgtaaaaaacctattattattggtgttacaggtggatctggtggtggtaaaaccagtgtttctcgggcgattttatcaaatttcccagatcaaaaaattaccatgattgaacatgattcttactataaagatcaaagtcatttaacttttgaagaacgtgtaaaaaccaattatgatcatccccttgcttttgataccaatttgatgattgagcaattgaacgaattgattgagggacgtccggtcgatattccggtttatgattacacaaaacatacccgtagtgatagaactatccgccaagaaccccaggatgtcattattgttgagggaattttggtattagaagatcagcgtttgcgtgatttaatggatatcaaattatttgttgacacagatgatgatattcgtattattcgtcgtattaagcgtgatatggaagagcgcgatagaagtttagatagtattattgaacagtatacagaagttgtaaaacctatgtatcatcaatttatcgaaccaacaaagcgttatgcggatattgtaattccagaaggagtaagtaatattgtcgctattgatttaatcaataccaaagtggctagcatcttaaatgaagcaaaa

SEQ ID NO: 19720 - protein, 209 aa, Streptococcus agalactiae; identical to SEQ ID NO: 6028

SEQ ID NO: 19721 - protein, 495 aa, Streptococcus agalactiae; identical to SEQ ID NO: 10453

SEQ ID NO: 19722 - protein, 165 aa, Streptococcus agalactiae; identical to SEQ ID NO: 1558

SEQ ID NO: 19723 - protein, 1662 aa, Streptococcus agalactiae; identical to SEQ ID NO: 10455

SEQ ID NO: 19724 - protein, 554 aa, Streptococcus agalactiae; identical to SEQ ID NO: 1560

SEQ ID NO: 19725 - protein, 192 aa, Streptococcus agalactiae; identical to SEQ ID NO: 10457

SEQ ID NO: 19726 - protein, 64 aa, Streptococcus agalactiae; identical to SEQ ID NO: 1564

SEQ ID NO: 19727 - protein, 865 aa, Streptococcus agalactiae
ATGGCAAATCAACTTAATATTTCCCGCACAGCTATTTGGAAAGGTATAAAAACGTTAGAAGAATTAGGCCTAGAGATTGAGTCTGTCACTAACAAGGGCTACCGATTGGTATCAGGTGACATATTATTACCAGAACAACTCGAACAAGAAATTGGTATTAAGGTTAGTCTTAATAATAATAGTGCTTCAACCCAACTAGATGCTAAAATGGGGATAGAAAGTAAATTAAAGACTCCACACCTTTTTTTAGCTCCTAATCAAAAAAAAGCTAAAGGACGTTTTGATAGACCTTTCTTTACATCAAATCAAGGCGGCATCTATATGTCTCTTTTATTACAACCTAATGTACCGATTGAAGATATAAAACCTTATACTGTCATGGTAGCCTCTAGTGCTGTAAAAGCTATCTCACGGTTAACAGGAATTACTCCTGAAATTAAGTGGGTCAATGATATTTATTTAGATAATAAAAAAATAGCTGGTATTTTAACCGAGCTATCGCTTCTGTTGAGAGTGGGTGGTAACGAATGTTATTATAGGATTAGGTATCAATTTCTATATCAAAGAGTTCCCTAGGGCGTTAACTAAGCGCGCAGGTAGTCTCTTTACAGAGCAACCGACCATAACTAGAAATCAATTGATTACAGAAATCTGGAATCTCTTTTTCAATATTCCACTAGAGGATCACTTAAAGGTATATAGAGAAAAATCCCTAGTCTTAGATAGAACCGTTAGCTTTATGGATGGTCAAACAATGTATTCTGGGAAAGCTATTGATATTACAGATAAAGGATATTTAGTGGTTGAGTTAGATGATGGTCAGTTGAAAACACTTCGCAGTGGCGAAATCAGTCTTTCTTCTTGG

SEQ ID NO: 19728 - protein, 289 aa, Streptococcus agalactiae; identical to SEQ ID NO: 10460

SEQ ID NO: 19729 - protein, 1192 aa, Streptococcus agalactiae
ATGTCAGAACGTAAACTTTTCACGTCTGAGTCAGTATCTGAGGGACATCCTGATAAGATTGCTGACCAAATTTCCGATGCGATTTTAGATGCAATTTTAGAGCAAGATCCAGATGCCCACGTAGCAGCCGAAACAGCTGTTTATACAGGGTCGGTTCATGTATTTGGCGAAATATCAACGACAGCCTATGTTGATATTAACCGAGTTGTCCGTAACACAATCGCTGAAATTGGCTATGATAAAGCTGAATATGGCTTCTCAGCTGAATCTGTTGGAGTGCATCCGTCACTCGTTGAACAGTCGCCAGACATTGCACAGGGAGTCAATGAAGCTCTTGAGGTACGTGGTTCTCTTGAACAAGATCCTTTAGATTTAATTGGTGCAGGTGACCAAGGTTTGATGTTTGGGTTTGCTGTTGATGAAACACCTGAGTTAATGCCATTGCCAATTTCTTTAGCTCATCAGTTAGTTAAGAAATTGACAGATCTACGTAAGTCTGGGGAACTCACTTATCTTCGACCAGATGCAAAATCTCAAGTAACGGTTGAATATGATGAAAATGATCAACCAATTCGTGTGGATGCAGTAGTTATTTCGACACAGCATGATCCTAATGTAACTAATGACCAACTCCATAAGGACGTGATTGAGAAAGTTATCAATGAAGTTATTCCAAGCCATTATTTAGATGACCAAACAAAATTCTTTATCAATCCTACAGGGCGCTTTGTTATTGGAGGCCCTCAAGGAGATTCAGGACTAACAGGTCGTAAGATTATTGTAGATACTTATGGTGGTTATTCTCGTCATGGTGGTGGTGCATTTTCAGGTAAAGATGCTACTAAAGTAGATCGTTCAGCATCTTATGCAGCTCGTTATATTGCAAAAAATATTGTTGCAGCTGATTTAGCTAAAAAAGTAGAAGTACAACTTGCTTATGCAATTGGTGTTGCCCAGCCTGTCTCTGTGCGTGTAGATACATTTGGAACAGGTGTTATAGCAGAAGCAGACCTAGAGGCAGCTGTACGTCAAATATTTGATTTGCGACCAGCAGGCATTATTAATATGTTGGACCTCAAACGACCTATTTATCGACAAACAGCAGCTATGGGCATATGGGACGTATGATATCGATTTGCCATGGGAGCGAGTTGATAAAGTCCAGGCCTTAAAGGATTTTATTGCTAGCAAA

SEQ ID NO: 19730 - protein, 398 aa, Streptococcus agalactiae
  VARIANT 376: Xaa = Any Amino Acid
MSERKLFTSESVSEGHPDKIADQISDAILDAILEQDPDAHVAAETAVYTGSVHVFGEISTTAYVDINRVVRNTIAEIGYDKAEYGFSAESVGVHPSLVEQSPDIAQGVNEALEVRGSLEQDPLDLIGAGDQGLMFGFAVDETPELMPLPISLAHQLVKKLTDLRKSGELTYLRPDAKSQVTVEYDENDQPIRVDAVVISTQHDPNVTNDQLHKDVIEKVINEVIPSHYLDDQTKFFINPTGRFVIGGPQGDSGLTGRKIIVDTYGGYSRHGGGAFSGKDATKVDRSASYAARYIAKNIVAADLAKKVEVQLAYAIGVAQPVSVRVDTFGTGVIAEADLEAAVRQIFDLRPAGIINMLDLKRPIYRQTAAYGHMGRXDIDLPWERVDKVQALKDFIASK

SEQ ID NO: 19731 - DNA, 2259 bp, Streptococcus agalactiae
atgaaaaaacaatttttaaaatcagcagcgattctatcgctagcagtaacagcagtatctacaagtcagccggtaggggcgatagtgggaaaagatgaaacgaaattaagacagcaacttgggtatattgattcaaaaaaatctggaaagaaaattgatgagagatggggtgaaaaaatttataactatctaagttatgagctcattgaagcaaacgaatggattaaccgaagtgagtttcaggaacctgagtatagaactattttatcagaatttaaagataaaatagatagtattgaatactacttaattaacttaagtaatattgctaaagaagatgcgcatcaaagaaatattcttcaatcattagataaatatgaaaaaagtggaatatataatttagaccaaggtgtttataattatatatatcaagaaattagttcagcgaagcacaagttttcggatggggtagataaaatttatcgtttagatagtactttatttcctttctctgtatggtatgataaacatttagataataatgataactacaaggataataaagattttaaagagtacattgctttattaaatgaaattacacgaaaagcaaggttaggatatcaaattgtaaataaccataaagatggggagcataaagatgaagcagaaatactggatattttaatcagagatataacttttgtttcaaaagatgctcctggatataaatatattccaaataaaagaattgcagcgaaaataattgaagatttagatggagttatcaatgacttttttaagaatacaggaaaagataagccttctcttgaaaagttaaaggacacagaattccataaaaaatatcttaattcaactgaaccgtatagtattgaaactaacttaccttcaaattataaagaattgaaggaaaagcaaataaaaaaattggaatatggatacaaaaagtcttctaaaatttatacgtctgctcattatgcactatatagtgaagaaattgatgctgcaaaagaattgcttcaaaaagtgaagattgcaaaagataattataatgaaattaagtccatgaatctaagcccttcaatttttaatcagtatttacaacttcttcaaatagttataagttcagagataaatctaaaaaaggcactcgataacactgtggatttacccatagaaaataattttaatacattggacattcaatataataaattagacactgctattaagtcacttcgaaaatttgtaactaagtataaacaagaagtaagaaaagctactaagagttattctaaaaaagaattagtaaatgcagagttaacaaaagtaatttctaatgacaatattttattagacatgcaagcaattagttccaattatgggtctactaaaaagtttgtttattcagtcaaaagattaccttacgtcccgcaagtaattatgacaacaacgtctaatgtacttatgcctcaaaagcaagttgaaaaagtgaagctactcaccccatttacaatttctaataaagaagtattgaatcatgactcactagtagaaaatgatgctcaaaaacaaaaagtagaacaggaaaaaactaaatcgctagctcctcaaaaaggggctgtaaaagaacaaactgagcaaaaagtatctggaaatactcaagagatagaaaagaaatctgaaactgtggcaactccacaacaaagttcagttgcgcaaacttctgtccaacagccggctccggttcaatcagttgttcaagaatccaaagcttctcaagaggagattaatgcagcacacgatgctatttcggcgtataaatcaacagtcaatattgctaatacagccggtgtaacaactgcggaaatgaccacgctcattaatactcaaacttctaatctttctgatgttgagaaagctttaggaaataataaggttaataatggtgcagtcaatgtattgagagaagatacagctcgtcttgagaatatgatttggaatcgtgcttaccaagctattgaagaattcaacgtcgctcgtaatacttataataaccaaatcaagacagaaacagttccagttgataatgatattgaagctattttagcaggttctcaagctaaaattagccatttggacaatcgtatcggagcgcgccacatggatcaagcttttgtagctagtttattagaagttactgagatgagtaaatcaatctcatcgcgtataaaagag

SEQ ID NO: 19732 - protein, 753 aa, Streptococcus agalactiae; identical to SEQ ID NO: 10464

SEQ ID NO: 19733 - DNA, 543 bp, Streptococcus agalactiae
atgaaaaaaataacaactttaatcttagctagtagcttattactagttgcaacgacatcggttaaagctgatgataactttgaaatgccaacgcgttatgttaaaatgagtgaaaaatcaaaagcattttatcaaagactacaagaaaaacaacgtaaggcacatactactgtgaagacttttaataattcagaaataaggcatcaactacctcttaaacaagaaaaggctagaaatgatatctacaatttaggcattcttatttctcaggagtctaaagggttcatccaacgtattgataatgcctattctttggaaaatgtctcagatattgttaatgaagctcaggctttgtataaacgtaactatgatttatttgaaaaaatcaaatctacacgtgataaggttcaagtcttacttgcatcgcatcaagataatacagacttaaaaaacttttatgctgagttggacgatatgtatgaacatgtttatctcaatgaaagtagagtggaggcgataaacagaaatatccaaaaatataat

SEQ ID NO: 19734 - protein, 181 aa, Streptococcus agalactiae; identical to SEQ ID NO: 1570

SEQ ID NO: 19735 - DNA, 564 bp, Streptococcus agalactiae
atgactaatcataaaacaaaaaaattaacggttttagcaattatgattgctttagatgtttttttaacgcccatttttagaatagaaggcatggcctttatgtctagtgtggttaatattatcgctggagttataatgggaccaatctatgcattagttatggcacttgtaacggcttttattcgtattttaactcaagcaggagtagcatctgttgcacctttagctattctaggagctggtccaggagctttcttagcgggttggttttatcggttttatgcgaaagactggatgtcttgggtgggtgagtttataggaacagggataattggagcacttttatcagctccaattatggtctggttttggacttggacagcggatggaaatcacgaagtgttagctaaagcatctgcagctcaatccatttttctttttatgccaaggtttataggggcgactataattggcggtgttattgctttgttgctacttcagggattaaagcgggttcctgtatttatgacaatacaagcattatttaaaggagaaaaagtaaaa

SEQ ID NO: 19736 - protein, 188 aa, Streptococcus agalactiae; identical to SEQ ID NO: 1572

SEQ ID NO: 19737 - DNA, 552 bp, Streptococcus agalactiae
atgaaattgagtttaaaagatgtattattgattgctctattagcggttgttctgggcgttgtttactttggagcaggctatatttcaaatgcttttgtaccttttgtaggccctatagcgcatgaagttatttatggtatttggtttgtggcaggtccaatggctctttatatattgaggaaaccaggaaccgctattgtagcagaattgttagctgctttgatagaggttttaattggatcaatttatggaccaagtgtactcgttattggtacccttcaaggtttagggtcagaattaggctttacactatttaggtatcataattacaagttgccagcttttatattgtctgctattttgacatcaatttttagttttgcatggagtttttatgccaatggacttagtgcgttttcattttcatataacattctgatgcttatagtaagaactgtttcatctattattttcttcttattaacaaagaatatatgcgaccaattgcatagaagtggtgtactgaatgcttatgggattcatgaaaggaag

SEQ ID NO: 19738 - protein, 184 aa, Streptococcus agalactiae; identical to SEQ ID NO: 10470

SEQ ID NO: 19739 - DNA, 1284 bp, Streptococcus agalactiae
atgctatctgttgaaaaattagcttgcacccatggcgatagtcattatttatttgatgaagtgacttttagtcttaacccaggagaacgaattttaatcagtggctattcagggtgtggtaagagtacattggctcttttactatcagggttaaaagaaagtgggaaaggtcaagttttattaaacggctcattaatagaaccaagcgatgtggggtttctttttcaaaatcctgatttgcaattttgtatggatactgtggcgcatgagttgtattttattttagaaaatttacaaatagaaccggagcaaatgcaagatagaagtgagtttgtattggcacaagttggtttaaaaggatttcagaatcggttgatttatactttatctcaaggtgaaaaacagcgattagcattggcgaccatttttttaaaatctcctaaacttattattttagatgaagcttttgcgaatttggatcaagagagtgccagtcaactattacaattagttcttaattatcaagcaaacaatcaatcaatgctgattgtaatcgatcatttgattacttattatcaagatataatggatcactatttttggttggaaaaacggttgacaagggtcaattttgattatatgctcaatcgtttgaatgtcttcgaattagaaaagaaaagtcataatacaggtgacaaactgttatcaattaaagatttccaagttaaactttcaaaaaacaaattcatctcttaccttgattttgatttagcaagtggggagaggttgtgcttagatggaccaagtggcgtggggaagtctagtttgtttatgggattgttagggctttataggactaaagggaaaaaacaatttactcatagaaagcaaattcctataagctttttatttcaaaatcccttagaccaatttattttttcaacagtttatgacgaaatttttcaggtttgcaaggatagtaacaaagcgagggatattttggaaaccataaatctttgggataagaaacagttttcaccatttcaactaagtcaaggccaacagaggcgattagccattggcagtattttagctagtgatagtaaacttctattattagatgaaccaacttatggacaagatgcctatcacgctaatatgattacaactcttcttttgagttattgtcacaaaaatcattgtggggttatttttactagccatgatcctcacttaaaagagtgttttgcaacacgtttcttggaggtgtcatcttgttcaatt

SEQ ID NO: 19740 - protein, 428 aa, Streptococcus agalactiae; identical to SEQ ID NO: 10472

SEQ ID NO: 19741 - protein, 666 aa, Streptococcus agalactiae
TTGTTCAATTTGAAAAACTATCATCCAGCTATTACCTTCCTATGTTTATTAATACCAACCTTTTCGTTTAGTTTCACATTGAGGTTAAGAACGTCTTTGTTATTTCTAATTATAGTAGTAACACTGCAATGCTTCGTAAAGGTTTCTTTAAAAACTTGGGCGAAGGTCAATCTGATATCATTTGTGATGGGACTCTCTTTATTTCTAGGGACGTATTTTTGGGGAAAATTACCCCATCAATTCGTCTTAGCTAGTCTAGTGGCCTGTCGTCCGCTTATTTTTATGAACGTGGGTTTGTTATTTCATGCATCACATTCTAATTATGATTTTATAGAATCTCTTTATCAAACTTTCAAAGTGCCTAGTCATTTTGCATATGGTATTTTTGCGGTCTTTAATCTTCTACCATTAATTAAATTACAATACCAACGTAATCGACTCGCATTCCGACTGAAGAATCAGGTAACTTGGGCATTATCGCCTAGACTAATATTGTCAGTTTTATTAAAGACGATATATTGGGTAGAACAGTTAGAGTTAGCAATGCTTTCTAAAGGTTTTGAAGTGGGTAAAGAGCGAACACATGCTTCAACTTATCCCGTTCGTTTTCGAGATTATAGTTTACTTGGTATGAGTATTTTATTGTCTATAGGAATGATTTTTAAA

SEQ ID NO: 19742 - protein, 222 aa, Streptococcus agalactiae; identical to SEQ ID NO: 1582

SEQ ID NO: 19743 - protein, 678 aa, Streptococcus agalactiae; identical to SEQ ID NO: 10475

SEQ ID NO: 19744 - protein, 226 aa, Streptococcus agalactiae; identical to SEQ ID NO: 1584

SEQ ID NO: 19745 - protein, 795 aa, Streptococcus agalactiae
ATGACTTATTTAGCACCAGTTTTAACTATTGCAGGAACTGATCCTAGCGGTGGAGCAGGGATTATGGCGGATTTAAAGACATTTCAAGCTCGTCGGACTTACGGGATGGCTGTTGTGACTAGTGTTGTTGCTCAGAACACTTGTGGGGTTAGAGGCGTTCAGCATATAGAAACAGCTATCATTGATCAACAACTAGCTTGTGTCTATGATGATATTAAGCCAAAGGCGGTTAAAACAGGAATGTTAGCGGAGAGGGAAACAATTAGTTTAGTCGCTTCATATTTAAAAAAATATCCGCAACCTTATGTATTAGATCCTGTTATGGTGGCAACTAGCGGACATCGTTTAATTGATTCAGATGCCGTAGAAGCATTAAAAGAAGACTTATTGCCATTAGCAACTATTATCACACCAAATTTACCAGAAGCTGAGGTTTTAGTGGGATATGACTTATCAGATGAAGTAAGTATTATTAAAGCAGGTTACGATATTCAAAAACAATATTCTGTTAGAAATGTTCTTATAAAGGGAGGACATCTAGATGGCTTGGCTAAAGATTATTTATTTTTGGAAAAAGAAGGGTTGATAACTCTTAGTAATCAACGTATCAATACTATTCATACTCATGGGACTGGGTGTACATTTGCAGCAGTCGTTGCAGCGGAGTTAGCTAAAGGGCAATCAATTCTAAACGCGGTAAGTACCGCTAAATCATTTATTACTTCAGCTATCGAAACAGCGCCTGAGTTGGGCTTTGGAAACGGTCCTGTCAATCATACTAGCTATCAAGGAGAC

SEQ ID NO: 19746 - protein, 265 aa, Streptococcus agalactiae
MTYLAPVLTIAGTDPSGGAGIMADLKTFQARRTYGMAVVTSVVAQNTCGVRGVQHIETAIIDQQLACVYDDIKPKAVKTGMLAERETISLVASYLKKYPQPYVLDPVMVATSGHRLIDSDAVEALKEDLLPLATIITPNLPEAEVLVGYDLSDEVSIIKAGYDIQKQYSVRNVLIKGGHLDGLAKDYLFLEKEGLITLSNQRINTIHTHGTGCTFAAVVAAELAKGQSILNAVSTAKSFITSAIETAPELGFGNGPVNHTSYQGD

SEQ ID NO: 19747 - protein, 768 aa, Streptococcus agalactiae; identical to SEQ ID NO: 10479

SEQ ID NO: 19748 - protein, 256 aa, Streptococcus agalactiae; identical to SEQ ID NO: 1588

SEQ ID NO: 19749 - protein, 667 aa, Streptococcus agalactiae
ATGAAAGATACATTGAAATTATATTTTGTTTGTGGAACTGTGGATTGCTCTAGGAAGAATATATTGACTGTTGTTGAAGAAGCCTTACAAGCAGGTATAACTCTATTTCAATTTAGAGAAAAAGGTTTTACAGCATTACAAGGTAAGGAAAAAATTGCTATGGCTAAGCAACTCCAAATACTTTGTAAGCAATATCAAGTTCCTTTTATTATTGATGATGACATTGACTTAGTTGAGTTAATTGATGCTGATGGTCTTCATATTGGACAAAATGATTTACCTGTTGATGAGGCACGGAGACGTTTACCAGATAAAATCATCGGTTTATCTGTGAGTACAATGGATGAATATCAGAAATCACAATTATCTGTTGTTGATTACATCGGAATTGGTCCTTTTAATCCGACACAATCAAAAGCAGATGCTAAGCCTGCTGTTGGCAATAGGACAACAAAGGCAGTTAGAGAAATTAATCAAGATATTCCAATCGTTGCAATAGGCGGAATCACTAGTGATTTTGTTCATGATATTATAGAATCAGGTGCAGATGGGATTGCTGTTATATCGGCTATTTCAAAAGCAAATCATATTGTAGATGCAACCAGACAATTGCGTTATGAAGTGAAAAAGCTCTGTTAATAGGCAAAAACACAGTGATGTAATCAAA

SEQ ID NO: 19750 - protein, 223 aa, Streptococcus agalactiae; identical to SEQ ID NO: 1598

SEQ ID NO: 19751 - DNA, 1257 bp, Streptococcus agalactiae
atgcgtaaaattattattaacggtggcaagcaactgacgggagaagttgctgtatcgggtgccaaaaatagtgtagttgccttgattcctgccactattcttgctgatgatgttgtggtcttagatggagttccggctatttctgatgttgacagtttagttgacattatggaaactatgggagctaagattaagcgttatggtgagacgcttgaaattgatccatgtggcgttaaagatattccaatgccttatggcaaaatcaatagtcttcgtgcatcctattatttctatggaagcttattggggcgttatggtcaagcaacattaggtttacctggtggttgtgatttaggcccccgtccgattgatttacatttaaaagcttttgaagcgatgggagctagtgtttcttatgaaggtgattcaatgcgtctagcaacaaacggaaagcctttgcaaggagcaaatatttatatggatactgtcagtgttggtgcgacaattaacactataatcgcagcagctaaggcaaatggccgtacggttattgaaaatgctgcacgtgaaccagaaattattgacgtggctactcttttaaataatatgggagctcatattcgtggtgctgggactgatgttattacaattgaaggtgtgaaatcgctccatggcacgcgtcatcaagtaattccagatcgtattgaagcaggaacttatattgctatggcagcagctatcggacgaggaataaaagtgaccaatgtgttatatgaacaccttgagagtttcattgctaagttagatgagatgggagttcgaatgacagttgaagaggattcaatttttgtcgaagaacaagaaaggttaaaagctgtatccataaaaacctcaccttacccaggatttgctacagatttacaacaacctctaactcctttattactaacagcagaaggaaacgggagtttattagatactatctatgagaaacgtgttaatcatgttcccgaattagcacgtatgggagctaatatttctaccctagggggcaaaatagtttatagtggtcctaatcaattatctggtgcacctgtaaaagcgacagatttgcgtgcaggcgctgctttagttatcgctggcttaatggcagagggacgaactgaaattacgaatatcgagtttattttacgtggatattctaatatcatcgagaaactaacatcattgggtgcggatatccaattggttgaggaa

SEQ ID NO: 19752 - protein, 419 aa, Streptococcus agalactiae; identical to SEQ ID NO: 1600

SEQ ID NO: 19753 - DNA, 321 bp, Streptococcus agalactiae
ttgtggtataatattatcatggatatatggacaaatttaggacggtttgcattcattgaaacagaacatgttaacctacgtcctgttgcctacactgatagggaagctttttggcgaatagcttcaaaaaggacaaatttacaatttatttttcctgttcaaaccagtaagaaggaaagtgattttcttttagttcattcttttatgaaagagccattgggagtttgggcgattgaagataaagttagtcataaaatgtttggagttatccgttttgaaacattgatttatctaaaaagacagctgaaattggctattttt

SEQ ID NO: 19754 - protein, 107 aa, Streptococcus agalactiae
MWYNIIMDIWTNLGRFAFIETEHVNLRPVAYTDREAFWRIASKRTNLQFIFPVQTSKKESDFLLVHSFMKEPLGVWAIEDKVSHKMFGVIRFETLIYLKRQLKLAIF

SEQ ID NO: 19755 - DNA, 219 bp, Streptococcus agalactiae
atgactgaatgtctaaagacactttctttttttgcttttcgagagtttgggatggacmaattgatcatagtaacacataaagagaatattgctagtcagaaggttgctttgaaggcgcatttcaaacaatctakgagttttaaaggaagcgaccgttacacacgccgtataagagactatattgagtttcaattaactaggggtgattatcgttatgag

SEQ ID NO: 19756 - protein, 73 aa, Streptococcus agalactiae
  VARIANT 20, 45: Xaa = Any Amino Acid
MTECLKTLSFFAFREFGMDXLIIVTHKENIASQKVALKAHFKQSXSFKGSDRYTRRIRDYIEFQLTRGDYRYE

SEQ ID NO: 19757 - DNA, 1281 bp, Streptococcus agalactiae
atgagtaaacatcaagaaattttggagtacctagaaaatttagctgttggtaagagggttagtgtacgcagtatttcaaatcatttaaaggtgagtgatggcactgcataccgcgctataaaagaggcagaaaataggggtattgttgagactagaccgcgtagtgggacagtacgtgttgctcaaaaagcaaaggttaatattgaaaaactgacttatgctgaaattgcaaggattagtgactcacaagttgttgcaggaatagagggactcagcaaggagtttagtaaattttctataggtgcaatgactcacagaaatattgaaaaatatttggtgcaaggagggttattgattgttggcgaccgtgatgagatacaacatttagccttacaacatcaaaacgctatcttagttacaggtggctttaatgtttccccatctgtttgtcgtttagcagataaacttcaaattcccgtaatggtaacacactatgatacattcacagtatcaacgatgattaatcacactttgtcaaatgccaaaattcgtactgatttaaagaccgttgaacaagtctatcagtcgcaaatggattacggtttcttagcgcaggatgataccgtaaaagaatttaatcttcttgttaaacaaactaaaaatgttcgttttccaatagtcaaccaagctaatgttgtcgttggtgttgttagtgttcaagatattcttggaaaagataaagaagtaaaattggcaacagtcatgtcaaaaaatatcattgttgctaaacctcgaatgagtctagctaatatcagtcaaaaaatgatttttgaagatttgaatatgatgccagtagtatcggatgactttgaattattaggcgttattacaagacgacaagctgtagaaaatttatcgatgtcgcaagggacggatttatacacctatagtgatcaaatcttgtctaatttacaaattgaagatggtcacttttcgtttttagtagaacccgctatgattgaccatacaggtagcttaacacaaggagttttgacggagttcttaaaagaaatttgtattcgtgtcttaactcgtaagcatcaacgcagtattgttgttaaacaaatgacactttatttcttgcaacctgttcaaattgatgaaataataatggtaacgccaacaattatttcagaaaaacggcgcgaagctacactcgatttagaattaaaattagaaaataaaattattgctaaagctatgatagcggtaaaaattaat

SEQ ID NO: 19758 - protein, 427 aa, Streptococcus agalactiae; identical to SEQ ID NO: 1604

SEQ ID NO: 19759 - DNA, 750 bp, Streptococcus agalactiae
atgtgggaagttgaagaatacgttcgtagacgttgtaaagaagaaaacgtattgccattgcaaatcggggttgatggtgcagttatggattacccatatgctacttgttgtgggcttaatgatgaagtggctcatgcctttcctcgtcattataccctaaaacaaggtgaccttttaaaagtagatatggttttaagcgaacctttagataaatcaattgttgacgtttcatcgttaaactttgacaacgtggctcaaatgaaaaagtacacggaaacatatagtggtggtttggcagactcgtgttgggcttatgctgtaggtgaagtttcacaagaggtgaaagacttaatgtctgtgacaagagaagcaatgtatattgggattgaaaaagcagttatcggaaaccgcattggtgatattggagctgctattcaggattatgcagagagtcgtggttatggagttgttcgtgatttggttggtcacggtgttggtccaacaatgcatgaagagcctatggtgcctaactatggtacagcaggtcgaggtctccgtcttcgtgaggggatggttttaaccatcgaaccaatgattaatactggtacttgggaaattgatacagacatgaaaactggttgggcacataaaaccttagatggtggtctttcttgtcaatatgaacatcaatttgttatcactaaagatggtcctgttattttaacgagtcaaggagaagaaagaacttac

SEQ ID NO: 19760 - protein, 250 aa, Streptococcus agalactiae; identical to SEQ ID NO: 1606

SEQ ID NO: 19761 - protein, 918 aa, Streptococcus agalactiae
ATGAAATTAAAAAAATTCTTTGAGGATTTGCTGGCTAAACTAGAATATAGACCCATTCAAGTTTTTATGCGTCATTTTCAAAGTGCAGAGATGGACTTATCAGCCATAGCAGTTGCTTATTATCTATTAGTGACAGCTTTTCCATTACTAGTTATTGCTGCTAATATTTTTCCTTATTTTCATATTAATGTGTCGGATTTATTGTCACTTATGCAAAAAAATCTTCCGAAAAATATTTATGAACCTGCCTCACGCTTAGCAGTAGATGCTTTTTCGAAACCGTCTACCGGCATTTTGGGATTCGCGTCATTAACAGCTTTTTGGACAATGTCTAAAAGTTTGACCTCTCTTCAAAAAGCCATTAATAAAGCATACGGTGTTGACCAACACAGAGACTTTGTGATTAGTCGTTTAGTGGGTGTGGGGACTGGGCTGATCATCCTATTTTTACTGACTTTTGTTTTAATTTTTTCAACCTTTTCAAAACCAGTTTTACAGATAATTGTAAACATGTATGATTTGGGAGATACTCTAACGGCGTGGCTTTTAAATCTTGCACAACCAGTTACATTTTTGACTATATTTTTAGGTATTGGAATTTTATACTTTATTTTACCTAACGCACGAATTAGAAAAGTACGTTATGTCATTCCAGGGACATTATTTTCAACGTTTGTTATTGGTTTTTTTAGTAATTTAATTAGCCAATACGTCTTAAATAGGGTTGAGAAAATGGTAGATATTAAAACGTTTGGTTCGGTCGTTATCTTTATCTTAATGCTATGGTTTATTTTCTTAGCCCACATTATGATTTTAGGTGCAATACTGAATGCCAGCGTTCAAGAAATTGCGACAGGAAAAATTGAATCAAGGCGTGGAGATATTATGTCTCTTATCCAAAAATCCAAAGAAGAAAAA

SEQ ID NO: 19762 - protein, 306 aa, Streptococcus agalactiae; identical to SEQ ID NO: 1608

SEQ ID NO: 19763 - protein, 453 aa, Streptococcus agalactiae; identical to SEQ ID NO: 10493

SEQ ID NO: 19764 - protein, 151 aa, Streptococcus agalactiae; identical to SEQ ID NO: 1610

SEQ ID NO: 19765 - protein, 507 aa, Streptococcus agalactiae; identical to SEQ ID NO: 10495

SEQ ID NO: 19766 - protein, 169 aa, Streptococcus agalactiae; identical to SEQ ID NO: 1612

SEQ ID NO: 19767 - protein, 1944 aa, Streptococcus agalactiae; identical to SEQ ID NO: 10497

SEQ ID NO: 19768 - protein, 648 aa, Streptococcus agalactiae; identical to SEQ ID NO: 1614

SEQ ID NO: 19769 - protein, 1017 aa, Streptococcus agalactiae; identical to SEQ ID NO: 10499

SEQ ID NO: 19770 - protein, 339 aa, Streptococcus agalactiae; identical to SEQ ID NO: 1616

SEQ ID NO: 19771 - DNA, 1941 bp, Streptococcus agalactiae
  misc_feature 1936, 1937, 1938, 1939, 1940: n = A,T,C or G
atggataatactgtcattgtacattaccatagccgaaagaaaaattactttaatttaagtttatggcagtggcgcgatggctcagagggtcaagatgctcatttttcacggtttgacagtttcggtgctgttgcgatactaaaatatcccttgccatattttttaagccattattatgtgattgttaaggataaaaattggcatcataaaacaatagattatcgcattgattgtactcaaggtggtgcacgtaaagaagtttggattgtagatggggatgacaatctgtattattctcgtcaagcagcagttagtagccatcattatagtagacgccaacctcatgcctacgacatggcaatcaatagtagagcgtttgacaaaaaatggggatttgatggttggttaggttttgaatattcagaaactaaaacggcttttagattatgggcccctactgcggaacgtgtagaactgattttatatcattcgacagatgaaacagcaagtgtatcaaaagttctttctatgaaaagagggacagccgtcaattataaaaatcataaagaaaatacccatggagtctggtttactgaacttgaaggaaactataattaccaagcatatacttatcgagtctactatagacgacgtacctttaaaattacgagagacccttattccattgcaacgactgcaaatggtaaaaggtctattgttattgctccagaagcattaactccggaagggtttaaaataagtcatggaaaagaagctaagtggcggctcgaaaaccccaatcaagcagtcatttacgaaatgcatgtgcgtgatttttcgatatctgagacttcaggagttaagacagattatcacggaaaatttaagggattgcatcaaaaaggtacggttaatcagcatggtgataaaacgacctttgattatgtacaagacctaggagttaactatatccaacttcaaccaattttcgatcatcatcagacatttgatgatgatggtcactatgcttataattggggatatgatcctgaaaactacaatgttccagaagcaagcttctctagtaatccacatgaacctgcaacgcgtattttagaattaaaatctgctatccaagcgtaccatgatgcaggcattggtgttattatggatgttgtctataatcatactttttcatcaactgattctgcatttcaactaacggttccagattattattatcgaatgaatcacaatggaacatttcaaaatgggtcaggctgtggtaatgaaacagctagtgaaaaagaaatgtgtcgtaagtatattcttgattcagttttgtattgggtgaaagaatataatattgatggttttcgatttgatttgatgggactacatgatgtagaaacgatgaacattataagaaatgagctaaataaaatcgaccctcgtattttggtttatggagaaggatgggacatgggagctggtctcacgcctcaaaataaagctaaaaaagataatgcttatcagatgcctggaattggctttttcaatgatgatgtaagagacgctgtcaaaggtgcggaaatttacggagaatttaaaaaaggcttagtttctggaaacagtacagaagatattgttgcaaaaggcattttaggaagtgatgagttagtatcatacattgatcctagtcaagttttaaattatgttgaagcacatgacaactacaacttaaatgatttgctatgggaattacatcctaatgacaacgagaaacaacatatttaccgagttgaagtagctagtgctatgaatctattgatgcaagggatggctttcatgcaattaggtcaggagtttcttcgaacaaagtgttatcctacaggtgataaaggtcaacttactcaagcagataaagaaaggggcnnnnnt

SEQ ID NO: 19772 - protein, 647 aa, Streptococcus agalactiae
  VARIANT 646, 647: Xaa = Any Amino Acid
MDNTVIVHYHSRKKNYFNLSLWQWRDGSEGQDAHFSRFDSFGAVAILKYPLPYFLSHYYVIVKDKNWHHKTIDYRIDCTQGGARKEVWIVDGDDNLYYSRQAAVSSHHYSRRQPHAYDMAINSRAFDKKWGFDGWLGFEYSETKTAFRLWAPTAERVELILYHSTDETASVSKVLSMKRGTAVNYKNHKENTHGVWFTELEGNYNYQAYTYRVYYRRRTFKITRDPYSIATTANGKRSIVIAPEALTPEGFKISHGKEAKWRLENPNQAVIYEMHVRDFSISETSGVKTDYHGKFKGLHQKGTVNQHGDKTTFDYVQDLGVNYIQLQPIFDHHQTFDDDGHYAYNWGYDPENYNVPEASFSSNPHEPATRILELKSAIQAYHDAGIGVIMDVVYNHTFSSTDSAFQLTVPDYYYRMNHNGTFQNGSGCGNETASEKEMCRKYILDSVLYWVKEYNIDGFRFDLMGLHDVETMNIIRNELNKIDPRILVYGEGWDMGAGLTPQNKAKKDNAYQMPGIGFFNDDVRDAVKGAEIYGEFKKGLVSGNSTEDIVAKGILGSDELVSYIDPSQVLNYVEAHDNYNLNDLLWELHPNDNEKQHIYRVEVASAMNLLMQGMAFMQLGQEFLRTKCYPTGDKGQLTQADKERGXX

SEQ ID NO: 19773 - DNA, 369 bp, Streptococcus agalactiae
atgaccacgctcattaatactcaaacttctaatctttctgatgttgagaaagctttaggaaataataaggttaataatggtgcagtcaatgtattgagagaagatacagctcgtcttgagaatatgatttggaatcgtgcttaccaagctattgaagaattcaacgtcgctcgtaatacttataataaccaaatcaagacagaaacagttccagttgataatgatattgaagctattttagcaggttctcaagctaaaattagccatttggacaatcgtatcggagcgcgccacatggatcaagcttttgtagctagtttattagaagttactgagatgagtaaatcaatctcatcgcgtataaaagag

SEQ ID NO: 19774 - protein, 123 aa, Streptococcus agalactiae
MTTLINTQTSNLSDVEKALGNNKVNNGAVNVLREDTARLENMIWNRAYQAIEEFNVARNTYNNQIKTETVPVDNDIEAILAGSQAKISHLDNRIGARHMDQAFVASLLEVTEMSKSISSRIKE

SEQ ID NO: 19775 - DNA, 528 bp, Streptococcus agalactiae
  misc_feature 519, 520, 521, 522, 523: n = A,T,C or G
atgaaattgagtttaaaagatgtattattgattgctctattagcggttgttctgggcgttgtttactttggagcaggctatatttcaaatgcttttgtaccttttgtaggccctatagcgcatgaagttatttatggtatttggtttgtggcaggtccaatggctctttatatattgaggaaaccaggaaccgctattgtagcagaattgttagctgctttgatagaggttttaattggatcaatttatggaccaagtgtactcgttattggtacccttcaaggtttagggtcagaattaggctttacactatttaggtatcataattacaagttgccagcttttatattgtctgctattttgacatcaatttttagttttgcatggagtttttatgccaatggacttagtgcgttttcattttcatataacattctgatgcttatagtaagaactggtttcatctatattttccctctattaaccaagaatatatgcgaccaattgcatagaagtggnnnnnttaat

SEQ ID NO: 19776 - protein, 176 aa, Streptococcus agalactiae
  VARIANT 174, 175: Xaa = Any Amino Acid
MKLSLKDVLLIALLAVVLGVVYFGAGYISNAFVPFVGPIAHEVIYGIWFVAGPMALYILRKPGTAIVAELLAALIEVLIGSIYGPSVLVIGTLQGLGSELGFTLFRYHNYKLPAFILSAILTSIFSFAWSFYANGLSAFSFSYNILMLIVRTGFIYIFPLLTKNICDQLHRSGXXN

SEQ ID NO: 19777 - DNA, 459 bp, Streptococcus agalactiae
ttggcagactcgtgttgggcttatgctgtaggtgaagtttcacaagatgtgaaagacttaatgtctgtgacaagagaagcaatgtatattgggattgaaaaagcagttatcggaaaccgcattggtgatattggagctgctattcaggattatgcagagagtcgtggttatggagttgttcgtgatttggttggtcacggtgttggtccaacaatgcatgaagagcctatggtgcctaactatggtacagcaggtcgaggtctccgtcttcgtgaggggatggttttaaccatcgaaccaatgattaatactggtacttgggaaattgatacagacatgaaaactggttgggcacataaaaccttagatggtggtctttcttgtcaatatgaacatcaatttgttatcactaaagatggtcctgttattttaacgagtcaaggagaagaaagaacttac

SEQ ID NO: 19778 - protein, 153 aa, Streptococcus agalactiae
MADSCWAYAVGEVSQDVKDLMSVTREAMYIGIEKAVIGNRIGDIGAAIQDYAESRGYGVVRDLVGHGVGPTMHEEPMVPNYGTAGRGLRLREGMVLTIEPMINTGTWEIDTDMKTGWAHKTLDGGLSCQYEHQFVITKDGPVILTSQGEERTY

SEQ ID NO: 19779 - DNA, 696 bp, Streptococcus agalactiae
atgagtaagcgaaaccagcaagaagtcatgcttattcctaaactatgtccttcttgtggtagtgaattagttcattttgaaggtgaggtggctttacgttgtattaatccgctgtgccccaaccaaatcaaagaacgtttagctcattttgctagccgagatgctatgaatattacaggttttggtccatccttagtcgaaaaattatttgatgctcatttaatagcagatgttgcagatatttatcgtttaagtatagagaatttattaactttagatggtattaaagagaaatctgcaactaagatttatcatgcaatccaatcttcaaaagaaaattctgctgaaaaacttctttttggcctaggtattcgtcatgtgggaagcaaggcgagccgccttttattggaggaatttggtaatttgaggcaactaagtcaagcaagtcaagaaagtattgcctcaattgatggactaggaggggttattgccaaatcacttcataccttctttgaaaaagaagaggtagataaactactagaggaattaacttcctataacgttaattttaattatctaggaaaacgagttagtacagatgcacaactttcaggtttaacagtcgttttaaccggtaagcttgaaaaaatgactcgtaatgaagcaaaagagaaattcaaaaccttggtgctaagg

SEQ ID NO: 19780 - protein, 232 aa, Streptococcus agalactiae
MSKRNQQEVMLIPKLCPSCGSELVHFEGEVALRCINPLCPNQIKERLAHFASRDAMNITGFGPSLVEKLFDAHLIADVADIYRLSIENLLTLDGIKEKSATKIYHAIQSSKENSAEKLLFGLGIRHVGSKASRLLLEEFGNLRQLSQASQESIASIDGLGGVIAKSLHTFFEKEEVDKLLEELTSYNVNFNYLGKRVSTDAQLSGLTVVLTGKLEKMTRNEAKEKFKTLVLR

SEQ ID NO: 19781 - protein, 1863 aa, Streptococcus agalactiae
ATGTCCAATAAAGATGAGTTATATACTTTTGGAATAGGTGAAAATTTTCATCTCCAGAATTATTTAGGCGTACATAGCGAAAATGGAAGCTTTTGTTTCAGAGTTTGGGCTCCTAATGCTGAAAATGTTCAAGTTATTGGAGATTTTACAGATTGGCGAAATCGACCTCTCCAAATGAACAAAAATCAAGCAGGAGTTTGGGAAGCTAACAGTTTGGATGCGCGCGAAGGTGATTTATATAAATATTTGGTTACTCGTAAAGGTGGTCAAGTAGTTGAGAAAATCGATCCTATGGCAGTTTATATGGAAAGACGTCCTGGAACTGCAAGTGTTATTAAAGTTCTTAGAAATAAAAAGTGGGAAGATGGTCTTTGGATGGGAAGGCGCAAACGTCTGGGTTTTCAGAAGCGTCCAATTAATATTTACGAAGTTCATGCTGGTTCATGGAAAAAAGATGATTTTGGACATCCTATGACTTTTTCTCAGTTAAAAGATTACTTAATCCCCTACCTTGTTGAGATGAATTATACTCATGTTGAATTTATGCCCTTAATGGCACATCCGCTTGATATGAGTTGGGGATATCAATTAATGGGGTATTTTGCTTTTGAACATACCTATGGTACTCCAGAAGAATTTCAAGACTTTGTAGAAGCATGTCATAAAAATAATATAGGAGTTCTTGTAGATTGGGTTCCAGGACACTTTATTCAGAATGACGATGCTTTAGCCTATTTCGATGGAACTGCTACTTATGAGTATCAAAATCATGATCGTGCGCATAACTATCGATGGGGAGCTCTGAACTTTGATTTAGGAAAAAATCAAGTACAATCCTTTTTGATTTCGAGTGCCTTGTTCTGGATTGAACATTATCATATTGATGGTATTCGTGTTGATGCGGTTAGTAATATGTTATATCTCGATTATGATGAAGGACCATGGGAAGCTAACCAATTTGGGGATAATCGTAATTTGGAAGGATATCACTTTTTAAGGAAACTTAACAAAGTAATTAAAGAGCGTCATCCTAATGTTATGATGATTGCTGAAGAGTCAACAGCTTCTACCCCAATAACTAAAGACTTAGAGTCTGGAGATTGGGTTTTGACTTTAAATGGAATATGGGCTGGATGAATGATATCCTGCGTTTTTATGAAGAAGATCCTCTCTATAGGCAATATGATTTTAATTTAGTGACTTTTAGTTTTATGTATATATTCAATGAGAACTTTGTACTAGCTTTTCACATGATGAAGTAGTACATGGTAAAAAGAGTATGATGCATAAAATGTGGGGTGACCGTTATAATCAATTTGCTGGTTTACGTAATTTATATGCATATCAAATGTGTCATCCTGGGAAAAAACTTCTCTTTATGGGAAGTGAGTTTGGTCAATTTTTAGAATGGAAATATAATGATCAACTAGAATGGGAAAACTTAAATGATGATATGAACCAAAAGATGCAACGCTATACTAAACAATTGAATCAATTTTATAAAGATCATAAGTGCCTATGGCGTATTGATGATTCCTTTGACGGGCTAGAAATTATTGATGCGGATAATAAATCTGAAACTGTTTTATCTTTTATACGAAAAGATGATAAAGGCGATTTGTTACTTTGTGTCTTTAATATGACTCCTGTAGAACGCCCTAACTTTACTATTGGTGTTCCGCAAGCGGGTATTTATGAAGAAGTTTTAAATACTGAAATGGAAGAGTTTGGAGGTTTTGGAAAAACCACAATCCTGTAACGAAAACACAAGTGGCTACATGGAAAGATTATGATCATACTTTAAGTTTTACATTACCAGCCCTTGGGGCAAGTGTTTGGAGAATAAAACGTCGGCTTCGTAAA

SEQ ID NO: 19782 - protein, 622 aa, Streptococcus agalactiae; identical to SEQ ID NO: 1620

SEQ ID NO: 19783 - protein, 717 aa, Streptococcus agalactiae
ATGAAAAATGAAATGTTAGCACTCATTCTCGCCGGAGGACAAGGCACTCGACTCGGAAAATTGACTCAGAGCATTGCGAAACCTGCTGTTCAATTTGGAGGTCGTTACCGTATTATTGACTTTGCGCTTTCAAATTGTGCGAATTCAGGTATTAATAATTTGGAGTTATTACTCATATCAACCCTGGAACTCAATACTCATATTGGAAACGGATCTAGCTGGGGACTAGATGGTATCGATTCGGGAGTAACTGTATTACAGCCATATTCTGCAACAGAAGGTAATCGCTGGTTTCAAGGTACCAGCCACGCTATCTATCAAAATATTGACTACATTGATCGTATTAATCCAGAATATGTACTCATTCTCTCTGGGGACCACATCTATAAAATGAACTATGATGACATGCTACAGACGCATAAAGATAATTTAGCAAGCCTAACAGTCGCTGTTTTAGATGTTCCTTTAAAAGAAGCAAGCCGTTTTGGAATTATGAATACTGATTCAAACGACCGTATTGTCGAATTTGAAGAAAAACCTGAACATCCAAGTCACAAGGTTCATGGGAATATACTTTTTGACTGGAAGAGATTACGGACAGTTTTAATTGATGGTGAAAAGAACGGCATAGACATGTCAGACTTTGGTAAAAATGTTATACCAGCATACCTTGAATCGGGTGAACGTGTTTATACCTATAATTTTGATGGGTATTGG

SEQ ID NO: 19784 - protein, 242 aa, Streptococcus agalactiae
  VARIANT 59: Xaa = Any Amino Acid
MKNEMLALILAGGQGTRLGKLTQSIAKPAVQFGGRYRIIDFALSNCANSGINNVGVITXYQPLELNTHIGNGSSWGLDGIDSGVTVLQPYSATEGNRWFQGTSHAIYQNIDYIDRINPEYVLILSGDHIYKMNYDDMLQTHKDNLASLTVAVLDVPLKEASRFGIMNTDSNDRIVEFEEKPEHPKSTKASMGIYIFDWKRLRTVLIDGEKNGIDMSDFGKNVIPAYLESGERVYTYNFDGYW

SEQ ID NO: 19785 - protein, 371 aa, Streptococcus agalactiae
ATGGAATATTTGGAGAAGATAACAAATTACATAGTCGTGATCGTTCATGGAAAATCTATTCTAAAAATTTGATTGCACCACCTAATTTCATGACAGAAGATGCAAATGTTAAAGATTCTTTAGTTGTAGATGGATGCTTTGTTGCAGGAAATGTTGAGCACTCCATTTTATCAACTAATGTCCAGGTAAAACCAAATGCTATTATTAAAGACTCCTTTGTTATGAGTGGCGCGACTATCGGTGAAGGTGCAAAGATAAATCGAGCTATTATCGGTGAGGATGCTGTTATTGGTGATGGTGTTGTGATTGATGGAAGTAAAGAAGTAGAAGTTATTGGTTATAAAGAAGTAGCGGGGGTTCCAAATGAAGAT

SEQ ID NO: 19786 - protein, 124 aa, Streptococcus agalactiae
MEYIGEDNKLHSRDRSWKIYSKNLIAPPNFMTEDANVKDSLVVDGCFVAGNVEHSILSTNVQVKPNAIIKDSFVMSGATIGEGAKINRAIIGEDAVIGDGVVIDGSKEVEVIGYKEVAGVPNED

SEQ ID NO: 19787 - protein, 1131 aa, Streptococcus agalactiae; identical to SEQ ID NO: 10507

SEQ ID NO: 19788 - protein, 377 aa, Streptococcus agalactiae; identical to SEQ ID NO: 1628

SEQ ID NO: 19789 - protein, 1428 aa, Streptococcus agalactiae; identical to SEQ ID NO: 10509

SEQ ID NO: 19790 - protein, 476 aa, Streptococcus agalactiae; identical to SEQ ID NO: 1630

SEQ ID NO: 19791 - DNA, 198 bp, Streptococcus agalactiae
atgaatttagctattttagcacttggtttcgccgtgatgggtgtttcaatcggtgaaggaattttggttgcaaatattgccaaatcagcggctcgtcagcctgaaatgtttagcaaactgcaaacattgatgtttacaggtgtggccttcattgaaggtaccttcttcgttctatttgcgtttacattcttagtaaga

SEQ ID NO: 19792 - protein, 66 aa, Streptococcus agalactiae; identical to SEQ ID NO: 1632

SEQ ID NO: 19793 - DNA, 714 bp, Streptococcus agalactiae
ttggaatctacaagtaatccaaccgtatcttttttaggcattgattttgatttaaccatcctagctatgtctctcttgacaattactattatctttatcttagtcttctgggctagtcgtaagatgacaataaaaccaaaaggtaagcagaatgtcttagaatatgtctatgagcttgttaataatacaatctcacaaaatttaggacactatactaaaaattatagtttattgatgtttattttattcagttttgtcttcattgctaacaacttaggattgatgacatcattgaaaacacatgagcataatttttggacatctccgaccgctaattttggtgtagatattacattatcattattagtagcatttatttgtcatattgaaggtattcgcaaaaaaggaattggtggttatctcaaaggtttcttatcaccaacaccagcaatgcttccgatgaatttattggaagaagttactaatgttgcttcattagcattgcgtctttttggtaatatcttttctggtgaagttgtcactggattacttttacaacttgcagttttatcaccatttacaggtccactagcttttgcattgaatatcgtttggacagcattctcaatgtttattggtttcatccaagcgtatgtgttcattatcttgagctcaagttatattggacacaaagttcatggtgacgaagaagaa

SEQ ID NO: 19794 - protein, 238 aa, Streptococcus agalactiae; identical to SEQ ID NO: 1634

SEQ ID NO: 19795 - DNA, 495 bp, Streptococcus agalactiae
atgtcaatacttattaatagtacaacgattggtgatatcattatcgtatctggctctgtgcttctcttatttatcttaattaagacttttgcatggaaacaaatcacaggtatttttgaagcccgtgaacaaaagatagctaatgatattgatactgctgaacaggcacgtcaacaagctgaagcttttgcaactaagcgcgaggaagaactatctaacgctaaaactgaagctaatcaaatcattgataacgctaaagagacaggtcttgcaaaaggtgatcaaattatttcagaagcaaaaactgaagctgatcgattaaaagaaaaagcacatcaagatattgcccaaaataaggcagaagcactagcagatgttaagggtgaagtagcagatttaacagttttattagctgaaaaaattatggtatcaaatcttgataaagaagctcagagtaatctcattgatagctatattaaaaagctaggagatgcc

SEQ ID NO: 19796 - protein, 165 aa, Streptococcus agalactiae; identical to SEQ ID NO: 1640

SEQ ID NO: 19797 - DNA, 534 bp, Streptococcus agalactiae
atgaataaaaagacgcaggctctaattgagcaatattcaaaaagccttgttgaagttgccattgaacataaaattgttgaaaaaatccaacaagaagtagcagctttaattgatatttttgaaacaagcgagcttgagggtgtcctgtcaagtcttgccgtttcacatgatgaaaaacaacattttgtgaagacattgcaaacatcatgttcaacttatcttgttaatttccttgaggttattgtacaaaatgaacgtgaagcacttctatatcctattttgaaatcagttgatcaggaacttatcaaagtgaatggtcaatatccaattcaaattacaactgcagttgctttgtctccagaacaaaaagaacgtctttttgatattgctaaaactaaattagctttaccaaatggacagttagttgagcacattgacccatctattgttggtggatttgttgtcaatgcaaacaataaagtaattgatgcaagtgttcgtaatcaattacatcaatttaaaatgaaattaaaa

SEQ ID NO: 19798 - protein, 178 aa, Streptococcus agalactiae; identical to SEQ ID NO: 1642

SEQ ID NO: 19799 - DNA, 1503 bp, Streptococcus agalactiae
ttggcaattaatgcacaagaaattagcgctttaattaaaaagcaaattgaagacttccagccaaattttgacgtcacagaaactggtattgttacatatatcggtgatggtattgctcgtgctcgtgggctagataatgctatgagtggagaacttcttgaattttcaaatggtgcgtacggtatggctcaaaaccttgagtctaatgacgtgggtatcattattttgggtgatttctcagaaattcgtgaaggtgatgtggtaaaacgtactggtaaaattatggaagtaccagtaggggaagctatgattggacgtgtcgtcaatccgcttggtcaaccagttgatggactaggtgaaattgagacgacagcaacacgcccagttgaaacaccagcacctggtgttatgcaacgtaaatcagtttttgagcctcttcaaacaggtctcaaagcgattgatgctttggttcctatcggacgtggtcaacgcgaattgattatcggtgaccgccaaactggtaagacgtctgtagcgattgatgcaatcttgaatcaaaaaggtcaagatatgatctgtatctatgtggctatcggtcaaaaagagtctacagtacgtacacaagttgaaactttgcgtaaatacggtgcccttgattatacaatcgttgtgacagcttcagcatcacaaccatctccattacttttcattgctccatatgcaggagtagcaatggctgaggaattcatgtataacgggaaacacgttttgattgtttatgatgatttatcaaaacaagccgtagcttatcgtgaactttcgcttcttcttcgccgtcctccaggtcgcgaagcttacccaggggatgttttctaccttcatagtcgtcttttggaacgttcagctaaagtatcagatgctttaggtggaggttcgattacagcgcttccgttcattgaaacacaagcaggtgatatctcagcatatattgctacaaacgttatttcaattactgacggccaaattttcttgcaagaaaatctctttaactcaggtattcgtccagcgattgatgcaggttcatcagtatctcgtgttggtggtgcagcgcaaattaaagcgatgaagagagttgcaggtacgcttcgtctagatcttgcttcttatcgcgaacttgaggcattcactcaatttggttcagaccttgatgcagcaacacaagcaaaactaaatcgtggtcgtcgcacagtggaagtgttaaaacaaccattacacaaaccattaccagttgagaaacaagttgtgattttatatgctctaacacatggattccttgatgatgtacctgtaaatgatattttagcttttgaagaagctttgtatgattactttgatgctcattatgataatctcttcgaaacaatccgcacaacaaaagatttaccagaagaagcagaattagatgctgctattcaagcatttaaagatcaatcacaatttaaa

SEQ ID NO: 19800 - protein, 501 aa, Streptococcus agalactiae; identical to SEQ ID NO: 1644

SEQ ID NO: 19801 - protein, 879 aa, Streptococcus agalactiae; identical to SEQ ID NO: 10521

SEQ ID NO: 19802 - protein, 293 aa, Streptococcus agalactiae; identical to SEQ ID NO: 1646

SEQ ID NO: 19803 - protein, 1404 aa, Streptococcus agalactiae; identical to SEQ ID NO: 10523

SEQ ID NO: 19804 - protein, 468 aa, Streptococcus agalactiae; identical to SEQ ID NO: 1648

SEQ ID NO: 19805 - protein, 411 aa, Streptococcus agalactiae; identical to SEQ ID NO: 10525

SEQ ID NO: 19806 - protein, 137 aa, Streptococcus agalactiae; identical to SEQ ID NO: 1650

SEQ ID NO: 19807 - protein, 1269 aa, Streptococcus agalactiae; identical to SEQ ID NO: 10527

SEQ ID NO: 19808 - protein, 423 aa, Streptococcus agalactiae; identical to SEQ ID NO: 10528

SEQ ID NO: 19809 - protein, 201 aa, Streptococcus agalactiae; identical to SEQ ID NO: 6111

SEQ ID NO: 19810 - protein, 67 aa, Streptococcus agalactiae; identical to SEQ ID NO: 1658

SEQ ID NO: 19811 - protein, 855 aa, Streptococcus agalactiae
ATGACAAAAAAACAAAAACAAATAACAGCTTCGATTGTAACTTTGCTTTTTTCATTACTGGCAATAGGGTTAGGTGAAAGCAAATCTTTGCCTAATGATCACATTTTAAAACAGGTGACAGATTTAATTATTAGTAATGAATCTGGCAAAAATACTTCCCTTAAAAATGTATCAGGAACTCCTAGTAGAGAGTTATCTGAATCTGTTTTGACTAGCAATGTTAAAAAACAATTGGGAACAAATATAGCTTGGAACCAGTCAGGTGCTTTTATCATTAATCAAAATAAAACAGATTTGAATGCTAAAGTGTCAAGTGCACCATATGCTATTAATGAAATAAAGAAGGTTAATAACCAAATTGTTCCGACTAAAGCAAATGCCTTATTAACAAAAGCAACTCGTCAATATCGAAATCGAGAAGAAACAGGGAATGGTAGAACTTATTGGAAACCAGCTGGATGGCATCAGATAAATGGATTAAAAGGGAGCTATAACCACGCTGTGGACAGAGGCCATTTAATTGGTTATGCTTTAGTAGGGAGTTTAAGAGGATTTGATGCCTCCACAAGTAATCCTAAAAATATTGCCACACAAGCAGCTTGGGCAAACCAAGCTAATAGCAACCAATCAACAGGGCAAAATTATTATGAAACTTTAGTTCGTAAAGCATTGGATCGTCATAAAACTGTTAGGTATCGTGTGACTTTAATTTATGACAGAGATAATCTTTTATCTTCGGGATCACATATTGAGGCTAAATCTTCAGATGGAAGTTTAGAATTTAACGTTTTTATTCCTAATGTACAATCGGGATTATTATTTGATTATGCAACAGGAAAAGTGAAGCAGACAAAG

SEQ ID NO: 19812 - protein, 285 aa, Streptococcus agalactiae; identical to SEQ ID NO: 1660

SEQ ID NO: 19813 - protein, 342 aa, Streptococcus agalactiae
ATGCAGATGGTCTCATCTGCTAAGTTGGTTAAATCTGAACAAGCTGCTAGAGATTTTCAAGTGTATGCCTCTAAAATTCGTCAAATTACTACTAACCTCTTAAAGTCAGACTTAGTATCTGGATCAGATAACCCTATGTTATCTTCACGTCCGGTGAAGAAAACAGGTTATATTGTTATTACTTCTGATAAGGGTTTAGTTGGTGGTTACAATTCAAAAATCTTAAAAGCGATGATGGACACTATAACTGACTATCATACTGAGAATGATGAATTATGCCATCATTTCAATTTGGTAGTGTTGGTTCTGATTTTTTTTCAAAAAGGCCAACCGTGGGGAAAT

SEQ ID NO: 19814 - protein, 114 aa, Streptococcus agalactiae
MQMVSSAKLVKSEQAARDFQVYASKIRQITTNLLKSDLVSGSDNPMLSSRPVKKTGYIVITSDKGLVGGYNSKILKAMMDTITDYHTENDELCHHFNLVVLVLIFFQKGQPWGN

SEQ ID NO: 19815 - protein, 90 aa, Streptococcus agalactiae
ATGGTTTTTTCTTTTCCGAAATTTTACCGTGGTTTTAGGGAGGACCCCAACCAAGTTTTTGATCAAGTTGGTAAAATTATNNNNNTTAAT

SEQ ID NO: 19816 - protein, 30 aa, Streptococcus agalactiae
  VARIANT 27, 28, 29: Xaa = Any Amino Acid
MVFSFPKFYRGFREDPNQVFDQVGKIXXXN

SEQ ID NO: 19817 - protein, 252 aa, Streptococcus agalactiae
ATGGATAAAATTATTGTGGAAGGTGGGCAAACGCAGCTTCAAGGTCAAGTTGTTATTGAAGGAGCTAAAAATGCAGTTTTACCTCTTTTAGCAGCCACAATTTTACCAAGCCAAGGGAAAACATTGTTGACCAATGTTCCTATCTTGTCTGATGTATTTACAATGAACAATGTTGTTCGTGGTTTAGATATTCAAGTTGACTTTAATTGCGATAAAAAAAGAAATCTTAGTGGATGCCTCCAGGTGATATTT

SEQ ID NO: 19818 - protein, 84 aa, Streptococcus agalactiae
MDKIIVEGGQTQLQGQVVIEGAKNAVLPLLAATILPSQGKTLLTNVPILSDVFTMNNVVRGLDIQVDFNCDKKRNLSGCLQVIF

SEQ ID NO: 19819 - protein, 108 aa, Streptococcus agalactiae
ATGCCTCCAGGTGATATTTTAGATGTTGCCACCCTTAATGGGAATTTGGGGTTAGTTTCAAATGGGGAGGAAGCTTTTCTTTATTTGTTGTTTTTTGGGACCCTATTT

SEQ ID NO: 19820 - protein, 36 aa, Streptococcus agalactiae
MPPGDILDVATLNGNLGLVSNGEEAFLYLLFFGTLF

SEQ ID NO: 19821 - protein, 1037 aa, Streptococcus agalactiae
ATGGATTTACAAAAACAATTAGAAGAGTTGAAAATATCAACTCAAGAAAAGCTTAAAGAAATGACTGGGAACCACACTAAAGAATTACAAGACTTACGTGTACAAGTTTTAGGAAAAAAAGGTTCTCTAACAGAATTACTAAAAGGTCTGAAAGATTTATCTAATGATTTACGCCAGTTGTTGGAAAACAAGTCAATGAAGTACGTGATATTTTAACAAAAGCGTTTGAGGAACAAGCTAAAGTAGTGGAAGCTGCGAAGATTCAAGCACAGTTAGAGTCTGAGAGTGTCGACGTTACCTTGCCTGGTCGTCAAATGACATTAGGTCACCGTCATGTCTTAACACAAACTAGCGAAGAGATTGAAGATATCTTTTTAGGTATGGGATTCCAAGTGGTTGATGGTTTTGAAGTTGAGAAAGACTACTATAATTTTGAACGAATGAATTTACCAAAAGATCATCCAGCCCGTGATATGCAAGATACTTTTTATATTACAGAAGAAATCTTGCTACGTACTCATACTTCGCCTGTTCAAGCACGAACAATGGACCAACATGATTTTTCTAAAGGGCCTTTAAAAATGATTTCTCCTGGACGTGTTTTCCGTCGTGATACTGATGATGCTACTCATAGCCATCAATTCCATCAAATTGAAGGCTTAGTTGTTGGAGAAAATATTTCAATGGGCGATCTCAAAGGAACACTTCAACTGATTTCTCAAAAAATGTTTGGAGCAGAGCGTAAAATCCGACTTCGTCCTTCATATTTCCCATTCACAGAACCTTCAGTTGAAGTTGATGTCTCTTGCTTCAAGTGCGGAGGTAAGGGATGTAATGTCTGCAAACAGACAGGTTGGATTGAGATATTGGGTGCTGGTATGGTTCACCCAAGTGTTTTGGAAATGTCTGGTATTGATTCTGAGAAATACTCCGGTTTTGCCTTTGGTTTAGGTCAAGAACGTATTGCAATGTTACGCTACGGTATCAATGACATTCGTGGCTTCTATCAAGGTGATGTTCGCTTCACAGATCAATTT

SEQ ID NO: 19822 - protein, 346 aa, Streptococcus agalactiae; identical to SEQ ID NO: 1662

SEQ ID NO: 19823 - protein, 519 aa, Streptococcus agalactiae; identical to SEQ ID NO: 10535

SEQ ID NO: 19824 - protein, 173 aa, Streptococcus agalactiae; identical to SEQ ID NO: 10536

SEQ ID NO: 19825 - protein, 2403 aa, Streptococcus agalactiae; identical to SEQ ID NO: 10537

SEQ ID NO: 19826 - protein, 801 aa, Streptococcus agalactiae; identical to SEQ ID NO: 10538

SEQ ID NO: 19827 - protein, 900 aa, Streptococcus agalactiae; identical to SEQ ID NO: 10539

SEQ ID NO: 19828 - protein, 300 aa, Streptococcus agalactiae; identical to SEQ ID NO: 1670

SEQ ID NO: 19829 - protein, 3231 aa, Streptococcus agalactiae
ATGAAATTACTTTATACTGATATTAATCATGATATGACAGAAATCTTAGTCAATCAGGCCGCGCATGCTGCTGAAGCTGGATGGCGTATTTTTTATATTGCTCCAAACTCTTTATCTTTTGAAAAAGAGCGTGCAGTATTAGAGAACCTTCCTCAAGAAGCCTCTTTTGCTATTACAATTACTCGCTTTGCTCAATTGGCACGTTATTTTACTTTAAACCAGCCTAATCAAAAAGAAAGTTTAAACGATATTGGATTAGCAATGATCTTTTATCGTGCTTTAGCAAGTTTTGAAGATGGACAATTAAAAGTTTTTGGACGATTGAAGCAAGATGCTTCCTTTATCAGTCAATTGGTAGACCTATACAAAGAATTGCAGACAGCAAATCTGAGTATTTTAGAGTTAAAATATTTACATTCTCCTGAAAAATTTGAAGATTTATTAGCTATTTTTCTAGTGGTTTCAGATCTTTTAAGAGAAGGAGAATACGACAATCAATCTAAAATTGCCTTTTTTACAGAACAAGTAAGGTCAGGCCAGCTAGATGTGGATTTAAAGAACACTATCCTTATAGTCGATGGTTTTACCCGTTTCTCAGCTGAAGAAGAAGCTTTAATTAAAAGTCTGAGTTCACGTTGTCAAGAGATTATCATCGGAGCTTATGCTAGCCAAAAAGCGTATAAGGCTAACTTTACTAATGGAAATATTTATTCTGCAGGGGTTGATTTTTTAAGATATCTAGCAACGACATTTCAAACAAAACCAGAATTTATCTTGTCCAAGTGGGAAAGTAAATCTGGTTTTGAAATGATTTCGAAAAATATCGAAGGTAAACATGATTTTACAAATAGTAGTCACATTTTAGACGACACTGCTAAAGATTGTATAACAATTTGGGAGTGCATTAATCAAAAAGATGAAGTGGAACATGTGGCTAGAGCTATACGTCAGAAACTTTATCAAGGATATCGCTACAAAGATATTTTAGTTTTACTAGGAGATGTAGATAGTTATAAACTACAATTAAGTAAGATTTTTGAGCAGTATGATATTCCTTATTATTTCGGTAAAGCTGAAACAATGGCTGCGCACCCTTTAGTTCATTTTATGGATTCCTTGTCTCGAATAAAACGTTATCGATTTAGAGCTGAAGATGTTTTAAATCTTTTTAAGACAGGTATTTATGGAGAGATTAGCCAAGATGATTTAGATTATTTTGAGGCTTATATCTCATATGCAGACATTAAAGGTCCTAAGAAGTTCTTTACAGATTTTGTTGTGGGGGCTAAAAAATTTGATTTAGGGCGTCTTAACACTATTCGTCAGTCCCTCCTTACTCCACTGGAAAGTTTTGTGAAAACGAAAAAACAAGACGGTATAAAAACACTCAACCAATTCATGTTTTTCCTTACTCAGGTAGGTTTGAGTGACAATTTATCGCGATTAGTTGGTCAAATGTCTGAAAATGAACAAGAAAAACATCAAGAAGTTTGGAAAACATTTACAGATATTTTAGAGCAGTTTCAAACAATATTTGGTCAAGAAAAATTAAATTTAGACGAATTTTTATCGTTATTAAATTCAGGTATGATGCAAGCCGAGTATCGTATGGTCCCTGCTACTGTTGATGTGGTTACTGTTAAGTCTTACGATTTGGTAGAACCACATAGTAATCAATTTGTCTATGCCCTAGGCATGACACAATCACATTTTCCAAAGATTGCTCAAAACAAATCTTTAATATCTGATATTGAACGTCAGCTTATAAATGATGCCAATGACACTGATGGTCATTTTGACATTATGACGCAAGAAAATTTGAAGAAAAACCATTTTGCTGCCCTCTCTCTTTTTAATGCTGCTAAACAAGAATTAGTGTTGACTATACCACAATTATTGAATGAGTCTGAAGATCAGATGTCACCATATCTTGTCGAACTAAGAGATATAGGTGTTCCTTTTAATCATAAAGGACGCCAATCGTTAAAAGAAGAAGCTGATAATATTGGGAATTACAAAGCTTTATTATCGCGTGTTGTTGACTTGTATCGCTCTGCTATTGACAAAGAGATGACTAAAGAAGAACAAACTTTTTGGTCAGTTGCTGTTCGTTATTTGCGTCGTCAATTAACTTCTAAAGGGATTGAGATACCAATAATTACAGATAGTCTTGATACTGTGACAGTTTCATCAGATGTGATGACCAGACGCTTCCCAGAAGATGACCCACTTAAATTATCCTCATCTGCTTTGACAACTTTTTATAATAATCAATATAAGTATTTTTTACAATATGTGTTAGGTTTGGAAGAACAAGACTCAATTCATCCAGATATGCGGCACCATGGAACGTACCTTCATCGTGTTTTTGAAATTCTGATGAAAAACCAAGGGATAGAATCTTTTGAAGAGAAACTCAACTCTGCAATTAATAAAACCAATCAAGAAGATGTTTTCAAATCCTTGTATTCAGAAGATGCAGAAAGTCGTTATTCTTTAGAAATTTTAGAAGATATCGCGCGTGCAACTGCAACCATATTACGACAAGATAGTCAGATGACTGTTGAAAGTGAAGAAGAACGATTTGAACTAATGATTGATAATACTATAAAAATTAACGGTATTATTGACCGTATCGATCGTTTATCTGATGGTTCTTTGGGTGTCGTGGACTATAAATCAAGCGCTCAAAAATTCGATATCCAAAAATTTTATAACGGTCTAAGTCCACAATTAGTCACCTACATTGATGCTATCAGTCGTGACAAGGAAGTTGAACAAAAACCACCGATTTTTGGAGCTATGTACTTACATATGCAGGAACCTAGACAAGACTTGTCTAAAATTAAAAATTTAGATGATTTAGTAACAAAAAATCATCAAGCTTTAACTTATAAAGGATTATTTTCAGAAGCCGAAAAAGAATTCTTAGCAAATGGGAAATACCATCTCAAAGATTCCCTTTATTCAGAGACTGAAATTGCTATTTTACAAGCACATAACCAATCGCTTTACAAAAAAGCATCTGAGACTATTAAGTCAGGTAAGTTTTTGATCAATCCATATACAGAAGATGCTAAAACAGTTGACGGAGATCAGTTTAAGAGTATTACGGGATTCGAGGCGGATAGGCATATGGCACGTGCCAGAGCGCTTTATAAATTACCTGCTAAGGAAAAACGTCAAGGTTTCTTAACATTAATGCAGCAAGAGGAGGAAAATGATGACCTT

SEQ ID NO: 19830 - protein, 1077 aa, Streptococcus agalactiae
MKLLYTDINHDMTEILVNQAAHAAEAGWRIFYIAPNSLSFEKERAVLENLPQEASFAITITRFAQLARYFTLNQPNQKESLNDIGLAMIFYRALASFEDGQLKVFGRLKQDASFISQLVDLYKELQTANLSILELKYLHSPEKFEDLLAIFLVVSDLLREGEYDNQSKIAFFTEQVRSGQLDVDLKNTILIVDGFTRFSAEEEALIKSLSSRCQEIIIGAYASQKAYKANFTNGNIYSAGVDFLRYLATTFQTKPEFILSKWESKSGFEMISKNIEGKHDFTNSSHILDDTAKDCITIWECINQKDEVEHVARAIRQKLYQGYRYKDILVLLGDVDSYKLQLSKIFEQYDIPYYFGKAETMAAHPLVHFMDSLSRIKRYRFRAEDVLNLFKTGIYGEISQDDLDYFEAYISYADIKGPKKFFTDFVVGAKKFDLGRLNTIRQSLLTPLESFVKTKKQDGIKTLNQFMFFLTQVGLSDNLSRLVGQMSENEQEKHQEVWKTFTDILEQFQTIFGQEKLNLDEFLSLLNSGMMQAEYRMVPATVDVVTVKSYDLVEPHSNQFVYALGMTQSHFPKIAQNKSLISDIERQLINDANDTDGHFDIMTQENLKKNHFAALSLFNAAKQELVLTIPQLLNESEDQMSPYLVELRDIGVPFNHKGRQSLKEEADNIGNYKALLSRVVDLYRSAIDKEMTKEEQTFWSVAVRYLRRQLTSKGIEIPIITDSLDTVTVSSDVMTRRFPEDDPLKLSSSALTTFYNNQYKYFLQYVLGLEEQDSIHPDMRHHGTYLHRVFEILMKNQGIESFEEKLNSAINKTNQEDVFKSLYSEDAESRYSLEILEDIARATATILRQDSQMTVESEEERFELMIDNTIKINGIIDRIDRLSDGSLGVVDYKSSAQKFDIQKFYNGLSPQLVTYIDAISRDKEVEQKPPIFGAMYLHMQEPRQDLSKIKNLDDLVTKNHQALTYKGLFSEAEKEFLANGKYHLKDSLYSETEIAILQAHNQSLYKKASETIKSGKFLINPYTEDAKTVDGDQFKSITGFEADRHMARARALYKLPAKEKRQGFLTLMQQEEENDDL

SEQ ID NO: 19831 - protein, 3621 aa, Streptococcus agalactiae
ATGACCTTTAAGCCTTTCTTAAATCCAGAAGATATTGCTGTTATTCAGACAGAAGAAAAAAATTCTGATAAAAAACAAAAGCGAACGCCTGAACAAATTGAAGCCATTTATACTTTTGGTAACAATGTCCTGGTATCAGCTTCGGCTGGTTCTGGAAAGACTTTTGTAATGGTTGAGCGGATTTTAGATAAACTTTTAAGAGGGGTTCCGATTGACTCTTTGTTTATCTCAACATTTACAGTAAAAGCGGCAGGTGAGCTCAAAGAACGTTTAGAAAAGAAAATAAACGAGTCTTTGAAATCCGCAGAATCAGATGATTTAAAACAGTTTCTCACCCAGCAACTTGTCGGCATTCAAACAGCTGATATTGGTACTATGGATGCTTTTACGCAAAAAATAGTTAACCAATATGGTTATACTTTGGGCATATCACCTATATTTAGGATTTTACAAGATAAAAATGAGCAAGACGTCATAAAGAATGAGGTCTATGCTGATTTATTTTCTGACTACATGACTGGGAAGAATGCAGCTTCATTCATAAAATTAGTCAAAAATTTCTCAGGTAATCGTAAAGATAGCAAAGCTTTTCGAGAAATGGTTTATAAAGTTTATGCTTTTAGCCAGTCCACCGATAACCCCAAGCGCTGGATGCAAACAGTTTTTCTAAAAGGTGCACAAACTTACACTGATTTTGAAGCTATTCCAGATCAAGAAGTTTCAAGCCTTTTAAATGTAATGCAAACAACTGCTAATCAATTACGTGATTTAACGGATCAAGAAGATTATAAGCAATTAACTGCTAAAGGGGTTCCGACAGCAAATTACAAAAAACACCTTAAAATAATTGAAAATTTAGTCCATTGGTCTCAAGACTTTAATTTGCTGTATGGAAAAAAAGGATTGACTAATTTGGCACGTGATATCACTAATGTGATTCCTTCAGGCAATGATGTTACAGTTGCTGGCGTTAAATATCCTATCTTTAAACAATTGCATAATCGTATCGTTGGACTTAAGCACTTAGAAGTTATTTTTAAGTATCAAGGAGAATCTCTTTTCTTGTTAGAATTATTGCAATCCTTTGTTTTAGATTTCTCAGAACAATATTTACAGGAGAAGATTCAAGAAAATGCTTTTGAATTTTCTGATATTGCCCATTTTGCAATTCAAATATTGGAAGAAAATCATGATATTAGGCAACTTTATCAAGATAAGTATCATGAAGTAATGGTTGATGAGTATCAGGACAATAACCATACCCAAGAGAGAATGTTAGAATTATTGTCTAATGGACATAATCGTTTCATGGTTGGAGACATAAAACAATCAATTTACCGTTTTCGTCAGGCTGATCCACAAATTTTTAATGATAAATACAAAGCTTACCAAGACAATCCAAGTCAAGGGAAATTAATTATTCTGAAAGAGAATTTTCGGAGTCAATCAGAGGTTTTAGACAGTACAAATAGTGTGTTTACACATCTTATGGATGAAGAAGTAGGAGACATTCTTTATGATGAAAGTCACCAATTAAAAGCTGGTAGTCCAAGACAGCAAGAAAGACATCCGAATAATAAAACACAAGTTTTACTATTAGATACTGATGAAGATGATATAGATGACAGTGATAGTCAACAATATGATATTAGCCCAGCTGAAGCAAAGTTAGTCGCAAAAGAAATTATTCGATTGCATAAAGAAGAGAATGTTCCCTTTCAAGATATCACCCTCTTAGTTTCTTCAAGGACAAGGAATGATGGTATCTTACAAACTTTTGACCGTTATGGTATTCCTTTGGTAACTGACGGTGGGGAGCAAAATTACTTAAAATCAGTCGAAGTGATGGTAATGCTTGATACTTTGCGGTCAATTGATAATCCCTTAAATGATTATGCTCTAGTTGCTCTTTTGAGATCTCCCATGTTTGGCTTTAATGAAGATGATTTAACAAGAATTGCTATTCAGGATGTCAAAATGGCTTTTTATCATAAAGTGAAATTGTCTTATCATAAAGAAGGTCATCATAGTGATTTAATTACTCCAGAATTATCTTCTAAAATAGATCACTTTATGAAAACATTCCAGACTTGGCGTGATTTTGCTAAATGGCATTCGCTTTATGATTTAATATGGAAAATATATAATGACCGTTTTTATTATGATTATGTAGGAGCTCTGCCTAAAGCTGAGCAACGTCAAGCCAATCTATATGCCTTGGCACTTCGAGCAAACCAGTTTGAAAAAACAGGTTTCAAGGGTTTATCACGCTTTATTCGAATGATTGATAAAGTTTTAGAAAATGAAAATGATTTGGCAGATGTTGAGGTGGCATTACCGCAAAATGCTGTTAACCTAATGACTATACACAAATCAAAGGGGCTTGAGTTTAAGTATGTATTTATTTTAAATATTGATAAGAAATTTTCAATGGTAGACATAACTTCCCCTCTTATTTTAAGCCGAAATCAAGGAATTGGTATTAAATATGTTGCTGATATGCGACATGAACTCGAAGAAGAGATACTGCCTGCAGTAAAGGTTAGCATGGAAACACTTCCTTACCAACTTAATAAAAGAGAGTTACGCTTAGCTACTTTATCAGAGCAAATGCGTTTACTTTACGTAGCTATGACACGTGCAGAGAAAAAATTATATCTGGTTGGTAAGGCTAGTCAAACCAAATGGGCTGATCATTATGACTTAGTATCTGAAAATAATCATCTCCCATTAGCTAGTCGTGAGACTTTTGTGACCTTTCAAGATTGGTTACTGGCTGTTCATGAAACCTATAAGAAACAAGAGTTGTTTTATGACATCAACTTCGTATCATTAGAGGAATTAACAGATCACCACATAGGGATGGTTAACCCTAGTCTACCTTTCAATCCCGATAATAAGGTAGAGAATCGTCAGTCTGAAGATATCGTGCGTGCGATTAGCGTGTTAGAATCTGTTGAGCAGATTAATCAAACTTATAAAGCGGCTATTGAGTTACCGACAGTGAGAACACCAAGTCAAGTCAAAAAATTCTATGAGCCTATTCTAGATATAGAAGGTGTTGATGTGATGGAAACTATTACTAAAACATCAGTAGATTTTAAGTTACCTGATTTTTCTACAAGTAAAAAGCAAGACCCAGCAGCTTTAGGATCTGCTGTACATGAATTAATGCAACGCATAGAGATGTCATCTCATGTCAAAATGGAAGATATTCAAAAAGCTTTGACAGAAGTGAATGCTGAAACAAGTGTCAAAGCGGCTATTCAGATTGAAAAAATCAACTATTTTTTCCAAGAAACCTCACTCGGTAAGTATATACAAGAAGAAGTAGAACATCTGCATCGAGAGGCACCTTTTGCCATGTTAAAAGAAGATCCGGAGAGTGGTGAGAAATTCGTTGTACGTGGTATTATTGATGGGTATCTACTATTAGAAAATCGGATAATTCTATTTGATTATAAGACTGATAAATTTGTCAATCCTCTAGAATTAAAAGAACGCTATCAGGGACAAATGGCTTTATATGCAGAAGCTTTAAAAAAATCTTACGAGATAGAAAAGATAGACAAATACTTAATTCTTTTAGGTGGTAAACAGCTAGAAGTGGTAAAAATGGAT

SEQ ID NO: 19832 - protein, 1207 aa, Streptococcus agalactiae; identical to SEQ ID NO: 10546

SEQ ID NO: 19833 - protein, 915 aa, Streptococcus agalactiae; identical to SEQ ID NO: 10547

SEQ ID NO: 19834 - protein, 305 aa, Streptococcus agalactiae; identical to SEQ ID NO: 6134

SEQ ID NO: 19835 - protein, 1370 aa, Streptococcus agalactiae
ATGTCTATTACAAAAATGATACCATCGCAGCTATTTCAACTCCTCTCGGTGAGGGAGCTATTGGTATTGTCCGTATATCTGGTACAGATGCCTTAAAGATAGCATCAAAAATTTATCGTGGAAAAGATCTATCCGCGATCCAATCCCATACCTTAAACTATGGTCATATTGTGGACCCAGATAAAAATGAAATCTTGGATGAAGTTATGTTAGGCGTTATGCTTGCTCCAAAAACATTCACAAGAGAAGATGTTATTGAAATTAATACGCATGGAGGAATTGCAGTTACTAACGAAATTCTTCAGTTAATTTTACGACATGGAGCACGAATGGCTGAACCAGGAGAATTTACTAAACGTGCTTTTTTAAATGGTCGAGTTGACTTGACTCAGGCTGAAGCTGTTATGGATCTTATTAGAGCTAAAACAGATAAAGCAATGGATATTGCCGTTAAGCAATTAGATGGTTCTTTAAAGACACTAATCAATAACACTCGACAAGAAATTTTAAATACTCTAGCCCAAGTTGAAGTTAATATCGATTACCCTGAATATGATGACGTTGAAGAGATGACTACAACACTGATGCGTGAAAAAACACAAGAGTTTCAAGCACTTATGGAAAATTTACTTCGAACTGCCAGACGTGGAAAAATTCTTCGAGAAGGACTTTCAACAGCAATCATTGGTCGTCCAAATGTCGGTAAATCCAGCTTACTAAATAACCTCTTACGTGAAGAAAAGGCGATTGTGACAGATATTGAAGGAACAACTCGTGATGTTATTGAAGAATACGTCAATATTAAAGGAGTTCCTTTAAAACTAGTTGACACTGCTGGTATCCGTGATACAGATGATATCGTTGAAAAAATTGGTGTTGAACGTTCAAAGAAGGCTTTAGAAGAAGCCGACCTTGTGTTGTTGGTTCTCAATAGTTCCGAACCACTAACATTACAAGACCGCTCCCTTCTAGAACTAAGTAAAGAAAGTAATCGTATCGTATTACTCAATAAAACGGATCTTCCTCAAAAAATAGAAGTTAACGAATTACCTAAAAATGTTATTCCAATTTCGGTTTTAGAAAATGAAAACATCGATAAAATCGAAGAACGTATTAACGATATTTTCTTTGACAACGCTGGTATGGTAGAACATGACGCTACTTATCTATCAAATGCTCGCCATATCTCACTAATTGAAAAAGCCGTTGATAGTTTAAAAGCTGTCAATGAGGGCTTGGAATTAGGAATGCCTGTTGATCTCTTACAAGTCGATATGACTAGAACTTGGGAAATACTTGGAGAAATCACTGGGGATGCAGCTCCAGATGAACTAATAACTCAGCTCTTCAGCCAATTCTGCTTAGGTAAA

SEQ ID NO: 19836 - protein, 458 aa, Streptococcus agalactiae
  VARIANT 6, 7: Xaa = Any Amino Acid
MSITKXXDTIAAISTPLGEGAIGIVRISGTDALKIASKIYRGKDLSAIQSHTLNYGHIVDPDKNEILDEVMLGVMLAPKTFTREDVIEINTHGGIAVTNEILQLILRHGARMAEPGEFTKRAFLNGRVDLTQAEAVMDLIRAKTDKAMDIAVKQLDGSLKTLINNTRQEILNTLAQVEVNIDYPEYDDVEEMTTTLMREKTQEFQALMENLLRTARRGKILREGLSTAIIGRPNVGKSSLLNNLLREEKAIVTDIEGTTRDVIEEYVNIKGVPLKLVDTAGIRDTDDIVEKIGVERSKKALEEADLVLLVLNSSEPLTLQDRSLLELSKESNRIVLLNKTDLPQKIEVNELPKNVIPISVLENENIDKIEERINDIFFDNAGMVEHDATYLSNARHISLIEKAVDSLKAVNEGLELGMPVDLLQVDMTRTWEILGEITGDAAPDELITQLFSQFCLGK

SEQ ID NO: 19837 - protein, 1907 aa, Streptococcus agalactiae
ATGATTATACTACAAGGAAACAAAATTGAGCGCTCATTTTCAGGTGATGTGCTTTTTGATAATATTAATATTCAAGTTGATCAACGTGATCGTATTGCTCTTGTTGGACGTAATGGTGCTGGCAAATCAACGCTTCTTAAAATTTTAGTTGGTGAAGAGGCTCCGACAAAAGGAGAAATAAATAAAAAGCGTGATTTGAGTTTGTCCTACTTGGCACAAGATAGTCGTTTTCAATCTGAAAATACAATTTTCCAAGAAATGTTACAAGTTTTTGACTCATTAAGAGAAGTAGAGAAGCGCTTACGTGAATTGGAATTACAAATGGGGCAAGTTTCAGGAAGTGACCTGGAACAATTGATGAAAACATACGATATTTTGTCAGAAGAGTTTCGTGAAAAAGGTGGCTTTACCTATGAATCAGATATAAAGGCTATTTTAAATGGTTTTAAGTTTAACAGTGATATGTGGGAAATGCCTATTAGTGAATTGTCTGGCGGGCAAAATACACGATTAGCGCTTGCAAAAATGCTACTTGAAAAGCCAGAATTACTTGTTTTAGATGAACCAACGAACCATTTAGACATTGATACGATTGCTTGGTTAGAAAATTATCTTGTAAATTATCAAGGAGCCCTTATTATTGTCAGCCATGACCGCTATTTTTTAGACAAGGTAGCTACAGTAACTTATGATTTAACGACACATTCTCTAGACCGCTATGTAGGCAATTATTCGAAATTTATGGATCTTAAGGCAGAGAAAATAGCGACTGAAGAAAAGAATTTTGAAAAACAACAAAAAGAAATTGCTAAGTTAGAAGATTTTGTACAACGTAACATTGTTAGGGCTTCAACCACTAAACGAGCACAAGCTCGTCGTAAACAATTAGAAAAGATGGAACGACTCGACAAACCGAATGTAGAGCAAAAATCAGCTAATATGACTTTTCATGCTGGGAAAGTCTCAGGGAATGTTGTTTTAACACTTGAGAATGCAGCTATTGGTTATGAAGGTGTTTCTTTATCGGAGCCAATCGATTTGGACGTGAAGAAATTTGATGCTATTGCAATTGTAGGTCCAAATGGTATCGGGAAATCAACTTTAATCAAATCGCTTGTTGGGCAAATTCCTTTTATCAAAGGAGAAGCAAAATTAGGAGCAAATGTCGAAACTGGGTATTACGATCAAAGTCAAAGTAATTTAACAAAAACGAATACTGTTTTAGATGAGTTATGGGATGCTTTTTCAACAACGCCAGAAGTTGAAATTAGAAACCGTTTAGGAGCTTTTCTTTTTTCAGGTGATGATGTTAAAAAATCAGTTTCAATGCTATCAGGTGGTGAACGAGCGCGTTTGCTATTGGCAAAATTATCTATGGAAAATAATAATTTTCTCATATTAGATGAGCCAACAAACCACTTGGATATTGATAGTAAAGAAGTCTTAGAAAATGCACTCATCGAATTTGATGGCACATTACTTTTTGTTAGTCATGATCGCTATTTTATTAATCGTGTGGCAACTAAGGTTCTCGAAATTTCTGATAAGGGAAGTACTCTCTATCTAGGAGATTATGATTATTACCTCACTAAGAAAGCCGAACTAGAGGAATTAGCACGTTTAAATGAAGAAGAAGTGAGTGCTTCAAAAACAGAAATCGACGTTACATCAGATTATGAGACACAAAAAGCAAATCAAAAGGAATTTAGGAAAATTACCCGTCGCGTTGTAGAAATTGAGGCGCGTTTGGAAGTTCTTGAAAATGATGAAAACAATATCAATGGTTTAATGTTAGAAACCAATGACATCGGAAAACTCTCTGATTTGCAAAAAGAGCTGGAATCAATCCAAGAAGAACAATTGCTATTAATGGAAGAGTGGGAAATCTAAATATGAGACTAGATTTG

SEQ ID NO: 19838 - protein, 636 aa, Streptococcus agalactiae; identical to SEQ ID NO: 1688

SEQ ID NO: 19839 - protein, 666 aa, Streptococcus agalactiae
ATGCACTTAGCAAACCTTGAAAAAGGTAACTATGGAACAAACGGTATCGTCGGTGGAGGATATGCGCTTGCAGTAGGTGCTGCCCTTACACAGCAATATGAAGGAACTGATAACATTGTTATCGCCTTTTCGGGTGACTCAGCGACTAACGAGGGCTCATTCCATGAGTCAGTTAACTTAGCTGCTGTTTGGAACTTACCAGTTATCTTCTTTATCATCAACAACCGTTATGGTATCTCAACAGACATCACATACTCAACTAAAATTCCTCACCTTTACATGCGTGCTGATGCGTACGGTATTCCAGGGCATTATGTTGAAGATGGTAATGACCTTATGGCTGTTTACGAGAAAATGCATGAAGTTATCAATTACGTGCGTTCAGGAAATGGACCAGCTATTGTAGAGGTTGAATCATACCGTTGGTTTGGTCATTCAACTGCTGATGCTGGGGTATACCGTACTAAAGAAGAAGTTGATTCATGGAAAGCTAAAGATCCAGTAAAACGCTACCGTGCATACTTAATTGAAAATGAAATCGCTACTGAAGAAGAGCTTGCAGCTATTGAAGCACAAGTGATTAAAGAAGTTGAAGAAGGGGTTAAATTCGCTGAAGAAAGTCCATTCCCTGATATGTCTGTTGCATTTGAAGACGTTTTTGTGGAC

SEQ ID NO: 19840 - protein, 222 aa, Streptococcus agalactiae
MHLANLEKGNYGTNGIVGGGYALAVGAALTQQYEGTDNIVIAFSGDSATNEGSFHESVNLAAVWNLPVIFFIINNRYGISTDITYSTKIPHLYMRADAYGIPGHYVEDGNDLMAVYEKMHEVINYVRSGNGPAIVEVESYRWFGHSTADAGVYRTKEEVDSWKAKDPVKRYRAYLIENEIATEEELAAIEAQVIKEVEEGVKFAEESPFPDMSVAFEDVFVD

SEQ ID NO: 19841 - protein, 858 aa, Streptococcus agalactiae; identical to SEQ ID NO: 10555

SEQ ID NO: 19842 - protein, 286 aa, Streptococcus agalactiae; identical to SEQ ID NO: 1692

SEQ ID NO: 19843 - protein, 1386 aa, Streptococcus agalactiae; identical to SEQ ID NO: 10557

SEQ ID NO: 19844 - protein, 462 aa, Streptococcus agalactiae; identical to SEQ ID NO: 10558

SEQ ID NO: 19845 - protein, 1755 aa, Streptococcus agalactiae; identical to SEQ ID NO: 10559

SEQ ID NO: 19846 - protein, 585 aa, Streptococcus agalactiae; identical to SEQ ID NO: 1698

SEQ ID NO: 19847 - protein, 987 aa, Streptococcus agalactiae; identical to SEQ ID NO: 10561

SEQ ID NO: 19848 - protein, 329 aa, Streptococcus agalactiae; identical to SEQ ID NO: 1700

SEQ ID NO: 19849 - protein, 783 aa, Streptococcus agalactiae; identical to SEQ ID NO: 10563

SEQ ID NO: 19850 - protein, 261 aa, Streptococcus agalactiae; identical to SEQ ID NO: 10564

SEQ ID NO: 19851 - protein, 1278 aa, Streptococcus agalactiae; identical to SEQ ID NO: 10565

SEQ ID NO: 19852 - protein, 426 aa, Streptococcus agalactiae; identical to SEQ ID NO: 10566

SEQ ID NO: 19853 - protein, 849 aa, Streptococcus agalactiae
ATGGATATTTTTTCAGCTATTGATTCAAAGTTTTGGGCGAGCATTATGGAAAATCCATGGATGATCCTTATTCATCTCATGGATATTATCATAGTAGCTGTTCTGATTTATAAATTTATCAAAGCGCTAGCAGGCACAAAAATTATGTCCTTAATTCAGGGCGTTATTTTGTTTATCATCATTAGATTTGTGTCAGAATGGATAGGGCTAACAACGATTACATTTTTGATGAATCAGATTGTTACTTATGGTGTAATTGCAGGTGTTGTCATCTTTGCTCCAGAGATTAGAACAGGTCTCGAAAAATTTGGGCGAACACCACAACTATTTACGCAACGTTCTCAATTAAGCAGTGATGAAAAGCTAGTAGATGCCCTTGTTAAGGCAGTTGCTTATATGAGTCCGCGTAAAATAGGAGCCTTGATTTCAATTGAACGTACCCAAACTTTGCAAGAGTATATAGCTACAGGTATCCCATTAGATGCAGATATTTCCAGTGAATTGTTAATTAATATTTTCATTCCTAATACACCACTGCATGATGGTGCTGTTATTGTAAAAGATAAAAAAATTGCTACAGCATGCTCGTACTTACCTCTATCAGAATCATCTTCGATTTCAAAAGAATTTGGAACACGCCACAGAGCAGCGATTGGTCTATCAGAGAATTCAGATGCACTAACAGTTATTGTTTCTGAAGAGACTGGTGGTATTTCTGTTGCTTTGAAAGGTGAATTTTTACATGATCTTTCTAAAGATAGCTTTGAAGCAATTCTGAGAACTCAGTTGATTCAAAATCAAGAGGAAAACTCAAAATTAGCTTGGTATAATCAACTATTGAGGAGGAAG

SEQ ID NO: 19854 - protein, 283 aa, Streptococcus agalactiae; identical to SEQ ID NO: 6154

SEQ ID NO: 19855 - protein, 957 aa, Streptococcus agalactiae
ATGAAAAAATTTTTTACAAATAAATTTTGGTTAGGCGTTGTCTCACTCTTTCTGGCTATTTTATTATTTTTAACGGCAACTGCAACAAGTATGAACCATCAAGACAATAGTAAGATTGCAGGAGCGTCTGAGACATATACACATACCCTAACAGATGTGCCAATAGACATCAAATACGATAGTGATGATTACTTTATTAGTGGATATTCTTATGGGGCAGATGTCTATATGTCATCGGTTAATCGTGTTAAGTTAGATTCTGAAATAAATGAGGATACACGAAAATTTAAAGTAGTCGCCGATTTGACAAATATGAAACCAGGGACTCACAAAGTCCCACTAAAGGTAGTAAATTTGCCATCTGGTGTAAATGCTACGGTTTCTCCAACAACAATTACAGTAACTATGGGTAAAAAGAAAACAAAAGAGTTTCCGGTTTATGGACATGTTAATGATAAGCAAATTAAAGCTGGTTATGCAGTCGATAAGATGTCAGTTGATGTGTCAAAAGTTAAAGTTACTAGTGATGAATCTATTATAGATCGTATTGACCATGTCGCTGCCAATATCCCTGATGATAAAGTTCTTGATGATGATTTTAACAAGACAGTTACTTTACAAGCTGTAACAGCAGATGGTACAGTATTAGCAAGTATTATTCACCCTTCTAAAGCAACTTTATCTGTCAAAGTAAAAAAATTGACCAAGACAGTACCGATTAATTTGATACCAGTAGGACAATTCAGCGATAGTATTTCAAAAATTAACTACAAGTTGAGTCAAGAAAAAGCAGTAATTTCAGGAACAAAAGAGGCTTTAGAAGCTATTTCTGTTATTAATGCTGAGGTAGATATTTCAGACGTAACTAAAAATACAGAAAAGAAAATTAATCTTTCTGCAAACAATGTTTCAGTTGATCCTGCTCAAGTAACAGTTCAATTGACAACTACTAAAAAA

SEQ ID NO: 19856 - protein, 319 aa, Streptococcus agalactiae; identical to SEQ ID NO: 6156

SEQ ID NO: 19857 - protein, 1350 aa, Streptococcus agalactiae; identical to SEQ ID NO: 10575

SEQ ID NO: 19858 - protein, 450 aa, Streptococcus agalactiae; identical to SEQ ID NO: 6158

SEQ ID NO: 19859 - protein, 369 aa, Streptococcus agalactiae; identical to SEQ ID NO: 10577

SEQ ID NO: 19860 - protein, 123 aa, Streptococcus agalactiae; identical to SEQ ID NO: 10578

SEQ ID NO: 19861 - protein, 378 aa, Streptococcus agalactiae; identical to SEQ ID NO: 10579

SEQ ID NO: 19862 - protein, 126 aa, Streptococcus agalactiae; identical to SEQ ID NO: 6162

SEQ ID NO: 19863 - protein, 1127 aa, Streptococcus agalactiae
ATGTTAAAGAAACCAACCTCAGCATATGTACACATTCCATTTTGTACCCAAATATGTTATTATTGTGATTTTTCAAAAGTTTTTATTAAAAATCAGCCTGTAGACGCTTATCTTCAGGCTCTTATCCGTGAATTTCGGTCTTATGATATTACAGAATTGCGCACCTTATATATTGGAGGAGGGACACCTACATCTATAAGCGCTGTGCAACTGGACTATTTATTGACGGAGTTAAGTAGAGATTTAAACTTAAATACTTTAGAGGAGTTCACTATCGAAGCTAATCCAGGAGATTTAACCGTTGATAAAATAGAGGTGCTTCAAAAGTCAGCTGTCAATAGAGTTTCTCTAGGAGTTCAGACCTTTAATGATAAACATTTAAAGCGTATTGGACGCAGTCACAATGAGGCACAAATTTATTCTACAATTGATGCTCTTAAAACAGCTGGTTTTCAAAATATCTCTATTGACCTAATTTATGCCTTACCTGGACAAACGATGGATGATGTTAGAAGTAATGTAGCCAAAGCTCTCTCTCTAAATATTCCTCATTTGAGTTTATATAGTTTAATTTTAGAACACCATACTGTATTTATGAATAAAATGCGTCGTGGGAAATTACATTTGCCAACAGAAGATTTAGAAGCCGAGATGTTTGAATATATCATTTCTGAAATGGAAAGAAATGGTTTTGAGCATTATGAAATTTCTAATTTTACAAAGCCGGGTTTTGAAAGTCGTCATAATTTGATGTACTGGGATAATGTAGAATATTATGGTGTTGGTGCAGGCGCTTCTGGTTATCTTGATGGTATTCGTTATCGTAATAGAGGGCCAATACAACATTATCTAAAGGGGGTTTCAGAAGGTAATGCAAGGTTATCGAAGAAGTATTATCAAAAAATGAAATGATGGAAGAGGAGCTTTTCCTCGGTCTTCGTAAAAAAGAGGGTGTTTCCATCGGAAAATTTGAACAAAAATTTGGAACGTCCTTTGAGAAACGTTACGGTCAGATTGTTCAAGAACTCCAAAGTGATGGGCTTTTGAAAGAAAATAATGGTTTTATCCAGATGACTAAAAAAGGTCTCTTCTTAGGAGATACGGTTGCCGAGAAATTTATTGTGGAG

SEQ ID NO: 19864 - protein, 376 aa, Streptococcus agalactiae; identical to SEQ ID NO: 10582

SEQ ID NO: 19865 - protein, 734 aa, Streptococcus agalactiae
ATGGGTTTATTATATCGAGAAACTTACGAAGTGCCTTTTTATGAATCAGACACTAATCATTATATGAAATTACCGCAGTTGTTGGCTTTAGCGTTACAAATTTCAGCCAAACAATCTTTAAAATTAGGAATAGGCGATGACATCGTTTTTAAAAGATACGGATTGGTTTGGGTCGTTACAGATTATATTATTGATATTGAGCGTTTACCCAAGCATGCTGAAAAGATAGTCATTGAGACTGAAGCCAAAGCTCATAATAAATTATTGTGTTACCGCTATTTTTATATTTATGGTGAAGACGGGCAAAAAATAATAACGATTTCATCTGCTTTTGTCTTAATGGATTTTAAAACACGGAAGATTCATCCTGTTCTTGATGATATTACTTCAATTTACCAATCCCAAAGAATCAAAAAAGTTATTCGAGGGCCGAAATATCATCCCATTGGAGATAGTAAAGTTAAACAATACCATGTTCGTTATTTTGATTTAGATATGAATGGACATGTTAATAATAGTAAGTATCTAGAATGGATGTATGATGTGTTGGACTTAGATTTTCTAAGTAGCCACATTCCTAAAAAATTGATTTAAAATATATTAAGGAAATTCAATATGGAACGGATATTAAGTCTCATTGGTATCAAGATGGTCTTGTGACACGTCATGATATTATTGGTGGCGATGCTATTCATGCTCAAGCTAGGATTGAATGGCAGGAAAAAAAGGAGGAT

SEQ ID NO: 19866 - protein, 245 aa, Streptococcus agalactiae; identical to SEQ ID NO: 1716

SEQ ID NO: 19867 - protein, 768 aa, Streptococcus agalactiae
ATGGCTTATAAAGGATATCTTATTGATTTAGATGGTACTATTTACAAAGGGAAAAGTCGTATCCCAGCAGGAGAGCGTTTTATCGAACGTTTGCAAGAAAAAGGCATTCCTTATATGTTAGTAACTAATAATACGACTCGTACACCAGAAAGCGTTCAGGAAATGCTTCGAGGCTTCAATGTTGAAACACCACTTGAAACAATCTACACCGCAACTATGGCTACGGTTGACTATATGAATGATATGAACCGTGGAAAAACAGCTTACGTTATTGGTGAAGAAGGGCTTAAAAAAGCTATTGCAGATGCAGGTTATGTGGAGGATACAAAAAATCCAGCCTATGTGGTTGTTGGTTTAGATTGGAATGTTACTTATGATAAATTGGCAACTGCTACGTTAGCAATTCAAAATGGTGCTTTATTTATTGGAACCAATCCAGATTTGAATATTCCTACTGAACGTGGTTTATTACCCGGTGCTGGCTCCTTAAATGCTTTATTAGAAGCCGCAACGCGTATAAAACCAGTCTTTATTGGAAAGCCAAATGCCATCATTATGAATAAGGCACTTGAAATTTTAAATATTCCTAGAAATCAAGCAGTCATGGTCGGTGATAATTATTTGACAGATATCATGGCTGGTATTAATAATGATATTGATACTTTGTTAGTAACAACGGGTTTTACAACAGTTGAAGAAGTACCAGATTTACCAATTCAACCAAGTTATGTTTTAGCAAGTTTAGATGAATGGACATTTAATGAAGGA

SEQ ID NO: 19868 - protein, 256 aa, Streptococcus agalactiae; identical to SEQ ID NO: 1718

SEQ ID NO: 19869 - protein, 669 aa, Streptococcus agalactiae; identical to SEQ ID NO: 10587

SEQ ID NO: 19870 - protein, 223 aa, Streptococcus agalactiae; identical to SEQ ID NO: 1720

SEQ ID NO: 19871 - protein, 4109 aa, Streptococcus agalactiae
ATGAATAAGCCATATTCAATAGGCCTGACATCGGTACTAATTCCGTCGGATGGAGCATTATTACAGATGATTATAAAGTACCTGCTAAGAAGATGAGAGTTTTAGGGAACACTGATAAAGAATATATTAAGAAGAATCTCATAGGTGCTCTGCTTTTTGATGGCGGGAATACTGCTGCAGATAGACGCTTGAAGCGAACTGCTCGTCGTCGTTATACACGTCGTAGAAATCGTATTCTATATTTACAAGAAATTTTTGCAGAGGAAATGAGTAAAGTTGATGATAGTTTCTTTCATCGATTAGAGGATTCTTTTCTAGTTGAGGAAGATAAGAGAGGGAGCAAGTATCCTATCTTTGCAACATTGCAGGAAGAGAAAGATTATCATGAAAAATTTTCGACAATCTATCATTTGAGAAAAGAATTAGCTGACAAGAAAGAAAAAGCAGACCTTCGTCTTATTTATATTGCTCTAGCTCATATCATTAAATTTAGAGGGCATTTCCTAATTGAGGATGATAGCTTTGATGTCAGGAATACAGACATTTCAAAACAATATCAAGATTTTTTAGAAATCTTTAATACAACTTTTGAAAATAATGATTTGTTATCTCAAAACGTTGACGTAGAGGCAATACTAACAGATAAGATTAGCAAGTCTGCGAAGAAAGATCGTATTTTAGCGCAGTATCCTAACCAAAAATCTACTGGCATTTTTGCAGAATTTTTGAAATTGATTGTCGGAAATCAAGCTGACTTCAAGAAATATTTCAATTTGGAGGATAAAACGCCGCTTCAATTCGCTAAGGATAGCTACGATGAAGATTTAGAAAATCTTCTTGGACAGATTGGTGATGAATTTGCAGACTTATTCTCAGCAGCGAAAAAGTTATATGATAGTGTCCTTTTGTCTGGCATTCTTACAGTAATCGACCTCAGTACCAAGGCGCCACTTTCAGCTTCTATGATTCAGCGTTATGATGAACATAGAGAGGACTTGAAACAGTTAAAACAATTCGTAAAAGCTTCATTGCCGGAAAAATATCAAGAAATATTTGCTGATTCATCAAAAGATGGCTACGCTGGTTATATTGAAGGTAAAACTAATCAAGAAGCTTTTTATAAATACCTGTCAAAATTGTTGACCAAGCAAGAAGATAGCGAGAATTTTCTTGAAAAAATCAAGAATGAAGATTTCTTGAGAAAACAAAGGACCTTTGATAATGGCTCAATTCCACACCAAGTCCATTTGACAGAGCTGAAAGCTATTATCCGCCGTCAATCAGAATACTATCCCTTCTTGAAAGAGAATCAAGATAGGATTGAAAAAATCCTTACCTTTAGAATTCCTTATTATATCGGGCCACTAGCACGTGAGAAGAGTGATTTTGCATGGATGACTCGCAAAACAGATGACAGTATTCGACCTTGGAATTTTGAAGACTTGGTTGATAAAGAAAAATCTGCGGAAGCTTTTATCCATCGTATGACCAACAATGATTTTTATCTTCCTGAAGAAAAAGTTTTACCAAAGCATAGTCTTATTTATGAAAAATTTACGGTCTATAATGAGTTGACTAAGGTTAGATATAAAAATGAGCAAGGTGAGACTTATTTTTTTGATAGCAATATTAAACAAGAAATCTTTGATGGAGTATTCAAGGAACATCGTAAGGTATCCAAGAAGAAGTTGCTAGATTTTCTGGCTAAAGAATATGAGGAGTTTAGGATAGTAGATGTTATTGGTCTAGATAAAGAAAATAAAGCTTTCAACGCCTCATTGGGAACTTACCACGATCTCGAAAAAATACTAGACAAAGATTTTCTAGATAATCCAGATAATGAGTCTATTCTGGAAGATATCGTCCAAACTCTAACATTATTTGAAGACAGAGAAATGATTAAGAAGCGTCTTGAAAACTATAAAGATCTTTTTACAGAGTCACAACTAAAAAAACTCTATCGTCGTCACTATACTGGCTGGGGACGATTGTCTGCTAAGTTAATCAATGGTATTCGAGATAAAGAGAGTCAAAAAACAATCTTGGACTATCTTATTGATGATGGTAGATCTAATCGCAACTTTATGCAGTTGATAAATGATGATGGTCTATCTTTCAAATCAATTATCAGTAAGGCACAGGCTGGTAGTCATTCAGATAATCTAAAAGAAGTTGTAGGTGAGCTTGCAGGTAGCCCTGCTATTAAAAAGGGAATTCTACAAAGTTTGAAAATTGTTGATGAGCTTGTTAAAGTCATGGGATACGAACCTGAACAAATTGTGGTTGAGATGGCGCGTGAGAATCAAACAACAAATCAAGGTCGTCGTAACTCTCGACAACGCTATAAACTTCTTGATGATGGCGTTAAGAATCTAGCTAGTGACTTGAATGGCAATATTTTGAAAGAATATCCTACGGATAATCAAGCGTTGCAAAATGAAAGACTTTTCCTTTACTACTTACAAAACGGAAGAGATATGTATACAGGGGAAGCTCTAGATATTGACAATTTAAGTCAATATGATATTGACCACATTATTCCTCAAGCTTTCATAAAAGATGATTCTATTGATAATCGTGTTTTGGTATCATCTGCTAAAAATCGTGGAAAGTCAGATGATGTTCCTAGCCTTGAAATTGTAAAAGATTGTAAAGTTTTCTGGAAAAAATTACTTGATGCTAAGTTAATGAGTCAGCGTAAGTATGATAATTTGACTAAGGCAGAGCGCGGAGGCCTAACTTCCGATGATAAGGCAAGATTTATCCAACGTCAGTTGGTTGAGACACGACAAATTACCAAGCATGTTGCCCGTATCTTGGATGAACGCTTTAATAATGAGCTTGATAGTAAAGGTAGAAGGATCCGCAAAGTTAAAATTGTAACCTTGAAGTCAAATTTGGTTTCAAATTTCCGAAAAGAATTTGGATTCTATAAAATTCGTGAAGTTAACAATTATCACCATGCACATGATGCCTATCTTAATGCAGTAGTTGCTAAAGCTATTCTAACCAAATATCCTCAGTTAGAGCCAGAATTTGTCTACGGCGACTATCCAAAATATAATAGTTACAAAACGCGTAAATCCGCTACAGAAAAGCTATTTTTCTATTCAAATATTATGAACTTCTTTAAAACTAAGGTAACTTTAGCGGATGGAACCGTTGTTGTAAAAGATGATATTGAAGTTAATAATGATACGGGTGAAATTGTTTGGGATAAAAAGAAACACTTTGCGACAGTTAGAAAAGTCTTGTCATACCCTCAGAACAATATCGTGAAGAAGACAGAGATTCAGACAGGTGGTTTCTCTAAGGAATCAATCTTGGCGCATGGTAACTCAGATAAGTTGATTCCAAGAAAAACGAAGGATATTTATTTAGATCCTAAGAAATATGGAGGTTTTGATAGTCCGATAGTAGCTTACTCTGTTTTAGTTGTAGCTGATATCAAAAAGGGTAAAGCACAAAAACTAAAAACAGTTACGGAACTTTTAGGAATTACCATCATGGAGAGGTCCAGATTTGAGAAAAATCCATCAGCTTTCCTTGAATCAAAAGGCTATTTAAATATTAGGGCTGATAAACTAATTATTTTGCCCAAGTATAGTCTGTTCGAATTAGAAAATGGGCGTCGTCGATTACTTGCTAGTGCTGGTGAATTACAAAAAGGTAATGAGCTAGCCTTACCAACACAATTTATGAAGTTCTTATACCTTGCAAGTCGTTATAATGAGTCAAAAGGTAAACCAGAGGAGATTGAGAAGAAACAAGAATTTGTAAATCAACATGTCTCTTATTTTGATGACATCCTTCAATTAATTAATGATTTTTCAAAACGAGTTATTCTAGCAGATGCTAATTTAGAGAAAATCAATAAGCTTTACCAAGATAATAAGGAAAATATATCAGTAGATGAACTTGCTAATAATATTATCAATCTATTTACTTTTACCAGTCTAGGAGCTCCAGCAGCTTTTAAATTTTTTGATAAAATAGTTGATAGAAAACGCTATACATCAACTAAAGAAGTACTTAATTCTACCCTAATTCATCAATCTATTACTGGACTTTATGAAACACGTATTGATTTGGGTAAGTTAGGAGAAGAT

SEQ ID NO: 19872 - protein, 1370 aa, Streptococcus agalactiae
  VARIANT 9: Xaa = Any Amino Acid
MNKPYSIGXDIGTNSVGWSIITDDYKVPAKKMRVLGNTDKEYIKKNLIGALLFDGGNTAADRRLKRTARRRYTRRRNRILYLQEIFAEEMSKVDDSFFHRLEDSFLVEEDKRGSKYPIFATLQEEKDYHEKFSTIYHLRKELADKKEKADLRLIYIALAHIIKFRGHFLIEDDSFDVRNTDISKQYQDFLEIFNTTFENNDLLSQNVDVEAILTDKISKSAKKDRILAQYPNQKSTGIFAEFLKLIVGNQADFKKYFNLEDKTPLQFAKDSYDEDLENLLGQIGDEFADLFSAAKKLYDSVLLSGILTVIDLSTKAPLSASMIQRYDEHREDLKQLKQFVKASLPEKYQEIFADSSKDGYAGYIEGKTNQEAFYKYLSKLLTKQEDSENFLEKIKNEDFLRKQRTFDNGSIPHQVHLTELKAIIRRQSEYYPFLKENQDRIEKILTFRIPYYIGPLAREKSDFAWMTRKTDDSIRPWNFEDLVDKEKSAEAFIHRMTNNDFYLPEEKVLPKHSLIYEKFTVYNELTKVRYKNEQGETYFFDSNIKQEIFDGVFKEHRKVSKKKLLDFLAKEYEEFRIVDVIGLDKENKAFNASLGTYHDLEKILDKDFLDNPDNESILEDIVQTLTLFEDREMIKKRLENYKDLFTESQLKKLYRRHYTGWGRLSAKLINGIRDKESQKTILDYLIDDGRSNRNFMQLINDDGLSFKSIISKAQAGSHSDNLKEVVGELAGSPAIKKGILQSLKIVDELVKVMGYEPEQIVVEMARENQTTNQGRRNSRQRYKLLDDGVKNLASDLNGNILKEYPTDNQALQNERLFLYYLQNGRDMYTGEALDIDNLSQYDIDHIIPQAFIKDDSIDNRVLVSSAKNRGKSDDVPSLEIVKDCKVFWKKLLDAKLMSQRKYDNLTKAERGGLTSDDKARFIQRQLVETRQITKHVARILDERFNNELDSKGRRIRKVKIVTLKSNLVSNFRKEFGFYKIREVNNYHHAHDAYLNAVVAKAILTKYPQLEPEFVYGDYPKYNSYKTRKSATEKLFFYSNIMNFFKTKVTLADGTVVVKDDIEVNNDTGEIVWDKKKHFATVRKVLSYPQNNIVKKTEIQTGGFSKESILAHGNSDKLIPRKTKDIYLDPKKYGGFDSPIVAYSVLVVADIKKGKAQKLKTVTELLGITIMERSRFEKNPSAFLESKGYLNIRADKLIILPKYSLFELENGRRRLLASAGELQKGNELALPTQFMKFLYLASRYNESKGKPEEIEKKQEFVNQHVSYFDDILQLINDFSKRVILADANLEKINKLYQDNKENISVDELANNIINLFTFTSLGAPAAFKFFDKIVDRKRYTSTKEVLNSTLIHQSITGLYETRIDLGKLGED

SEQ ID NO: 19873 - protein, 867 aa, Streptococcus agalactiae; identical to SEQ ID NO: 10591

SEQ ID NO: 19874 - protein, 289 aa, Streptococcus agalactiae; identical to SEQ ID NO: 10592

SEQ ID NO: 19875 - protein, 324 aa, Streptococcus agalactiae; identical to SEQ ID NO: 10593

SEQ ID NO: 19876 - protein, 108 aa, Streptococcus agalactiae; identical to SEQ ID NO: 1728

SEQ ID NO: 19877 - protein, 663 aa, Streptococcus agalactiae; identical to SEQ ID NO: 10595

SEQ ID NO: 19878 - protein, 221 aa, Streptococcus agalactiae; identical to SEQ ID NO: 1730

SEQ ID NO: 19879 - protein, 315 aa, Streptococcus agalactiae
GTGAAAAGTTTTGGAACCATTCGAAACAGCACAGCTCTAAAACAAAGAGCAATGCAAATTATCAAGATAATCTGTTTTGGAACCATTCGAAACAGCACAGCTCTAAAACCAATTGCATTAACTTTTGCAATGCTTTTATGTTTTGGAACCATTCGAAACAGCACAGCTCTAAAACCTCAAAACCAACCAGCATTTGATACTAAGGGTTTTGGAACCATTCGAAACAGCACAGCTCTAAAACACATGCCACATCTTCCTACACGAAAAGTACGTTTTGGAACCATTCGAAACAGCACAGCTCTAAAACGAGGCTTA

SEQ ID NO: 19880 - protein, 105 aa, Streptococcus agalactiae
MKSFGTIRNSTALKQRAMQIIKIICFGTIRNSTALKPIALTFAMLLCFGTIRNSTALKPQNQPAFDTKGFGTIRNSTALKHMPHLPTRKVRFGTIRNSTALKRGL

SEQ ID NO: 19881 - protein, 413 aa, Streptococcus agalactiae
ATGGAACAAACCTTTTTTATGATAAAACCTGATGGTGTAAAACGTGGTTTTATTGGAGAAGTTATTAGTCGTATTGAGCGTCGAGGCTTCTCTATTGATCGCTTAGAGGTTAGATATGCAGATGCAGATATTTGAAAAGACATTATGCAGAACTGACGGATAGACCATTCTTTCCAACATTAGTAGATTATATGACTAGTGGTCCAGTAATCATTGGAGTTATTTCGGGAGAAGAGGTCATTTCAACTTGGCGCACCATGATGGGGAGTACTAACCCCAAAGATGCCCTTCCAGGAACTATTCGAGGAGATTTTGCACAAGCTCCCTCTCCAAACCAAGCGACATGTAATATTGTTCATGGGTCAGACTCACCTGAATCTGCAACTCGCGAGATAGCCATTTGGTTCAATAAC

SEQ ID NO: 19882 - protein, 138 aa, Streptococcus agalactiae; identical to SEQ ID NO: 1734

SEQ ID NO: 19883 - protein, 1828 aa, Streptococcus agalactiae
ATGAATATTGAAGATTTGAAGAAACGTCAAGAAAAGATTAGAAACTTTTCGATTATCGCTCATATTGACCATGGAAAATCAACCTTAGCAGACCGTATTTTAGAGAAAACAGAAACGGTTTCTAGTCGTGAAATGCAGGCGCAACTGTTGGACTCTATGGATCTAGAACGTGAGCGTGGAATTACTATAAAGTTAAATGCTATTGAGCTTAATTATACTGCTAAAGATGGTGAAACTTACATTTTTCACTTGATTGACACGCCAGGGCATGTTGACTTCACATATGAAGTATCACGTTCATTGGCAGCTTGTGAGGGTGCTATACTGGTTGTTGATGCAGCCCAAGGAATTGAAGCTCAAACTCTGGCAAATGTTTATTTGGCTCTAGACAATGATTTAGAGATACTACCAGTTATTAATAAAATTGATTTACCAGCAGCAGATCCAGAACGTGTACGTGCAGAAGTAGAGGATGTTATTGGTCTAGATGCTTCAGAAGCTGTGCTTGCCTCAGCTAAGGCAGGGATTGGTATTGAAGAAATTTTAGAGCAGATCGTTGAAAAATCCTGCACCGACTGGGGAAGTAGATGCTCCTCTTCAAGCTCTAATTTTTGATTCTGTTTATGATGCTTATCGTGGAGTAATTCTTCAAGTAAGGATTGTAAATGGTATGGTTAAGCCAGGAGATAAGATTCAAATGATGTCTAATGGTAAAACCTTCGACGTTACTGAGGTTGGTATTTTCACTCCCAAAGCAGTTGGACGTGATTTTTTAGCAACTGGAGATGTAGGGTATATTGCTGCCTCAATTAAAACGGTTGCTGATACACGTGTTGGTGATACCATTACCCTTGCTAATAACCCAGCAATAGAACCCTTGCATGGCTATAAGCAAATGAACCCAATGGTTTTTGCCGGTCTTTATCCAATTGAATCAAATAAGTATAACGATCTGCGTGAAGCCCTTGAAAAATTACAATTGAATGATGCTAGTCTACAGTTTGAACCGGAAACATCACAAGCATTAGGGTTTGGTTTCCGTTGTGGTTTCTTAGGACTTTTACATATGGACGTTATCCAAGAGCGCTTGGAACGAGAGTTCAATATTGATCTTATTATGACTGCACCATCAGTAGTTTATCATGTTAATACAACTGACGGTGAAATGCTTGAAGTTTCGAATCCATCTGAATTTCCTGATCCTACTCGTGTTGACAGCATTGAAGAACCATATGTTAAGGCGCAAATTATGGTTCCTCAAGAATTTGTCGGTGCTGTAATGGAGTTAGCACAACGTAAACGTGGTGACTTTGTAACAATGGATTATATTGATGATAATCGTGTTAATGTTATTTACCAAATTCCTTTAGCTGAAATTGTGTTTGACTTCTTTGATAAGCTTAAATCATCAACACGTGGCTATGCTAGTTTTGATTATGAAATTTCCGAATATCGTCGCTCACAATTAGTTAAAATGGATATTCTTTTAAATGGTGATAAAGTGGATGCTTTAAGCTTTATTGTTCACAAAGAATTTGCCTATGAACGTGGTAAATTGATCGTTGATAAGTTGAAAAAAATCATTCCTCGTCAGCAGTTTGAAGTTCCTATCCAAGCAGCTATTGGACAAAAAATTGTGGCCCGTTCTGATATAAAAGCACTACGTAAAAATGTCTTAGCAAAATGTTATGGTGGTGACGTTTCACGTAAACGTAAGTTGCTTGAAAAACAAAAAGCTGGTAAAAAGCGCATGAAAGCAATTGGTTCCGTCGAAGTTCCTCAGGAAGCTTTCTTAAGTGTTTTATCAATGGACGATGATGACAAAAAA

SEQ ID NO: 19884 - protein, 610 aa, Streptococcus agalactiae; identical to SEQ ID NO: 1736

SEQ ID NO: 19885 - protein, 2603 aa, Streptococcus agalactiae
ATGAAAGGTCAAAAAATATGCTCTAGCTGGTCTTGTCCTGTCATGCCATTTTGCTCTTACGGCATGTCATACTCAAGAACACAAAAATTCTCATCATATTAAAACAAAGCAGGTTGCTAAGAAAAAAGCTAATAAAAAGAAAGTCTCTGTAAGGAAAGTCATAAAAAACGCAAGGGTGTTGCAGGGGTTGACTTTCCAACTGATGATGGCTTTTTACTGACTAAAGATTCGAAGATTTTATCTCATACAGATTCTGGAATCGTTGTAGCACATGGAAATCATTCTCATTTTATTTTTTACTCTGATTTAAAAGGTAAAATTTAGCTATTTAATCCCTAATGCTAATACAAAAACTAATAAAAATCAAGCGGTAAGAAACTTTAAAGCAGGGGCGGTAGCTGTTAATACATTAAATGATGGCTATGTTTTTAATCCCGCAGATATTGTTTCAGAAGATGCTAATGGCTACGTGGTCAGACATGGTGATCATTTCCACTATATTCCAAAAGCAAGTTTATCTCAGCAAAAGCAAGTACAAGCAAGTAGAGCTGTTTCACGTTTAGGAAATCAAAGTAATAGCCATTACAGGGTTAATAGTTCTAAAATTGCAGGGCTTCACTACCCAACAAGTAATGGTTTCTTATTTAATGGACGAGGAATAAAAGGCACTACCCCAACAGGTATTTTAGTAGAACATCATAATCATCTGCATTTTATTAGTTTTGCTGATTTAAGAAAAGGGGGGTGGGGATCAATTGCTGACCGTTACCAACCACAAAAGAAAGCTGATTCTAAAAAACAGTCACCATCAAGTAAAAAGCCAAGAACTGAAAATACTTTACCTAAGGACATCAAAGATAAGCTAGCTTACCTTGCTCGTGAATTACATTTAGATATTTCACGTATCAGAGTCCTTAAAACACTAAATGGTGAAATTGGATTTGAATACCCACATGATGATCATACACATGTTATTATGGCCAAAGATATTGATCTAAGTAAGCCAATTCCAAATCCACATCATGATGATGAAGATCATCACAAAGGTCATCACCATGATGAGTCCGACCATAAGCATGAAGAACACGAGCACACTAAGTCAAATAAATTATCTGATGAAGATCAAAAGAAATTAATTTATTTAGCAGAGAAGCTTGGTTTAAATCCTAATCAAATTGAAGTATTAACGTCAGAGGATGGAAGTATCATCTTTAAGTATCCACATGATGACCACTCACACACCATAGCAAGTAAGGATATTGAAATTGGGAAGCCTATCCCAGATGGACACCACGATCACTCTCATGCAAAAGATAAAGTTGGTATGGCAACTCTAAAACAAATTGGTTTTGATGATGAGATTATTCAGGATATTCTGCATGCAGATGCTCCAACACCATTCCCATCAAATGAAACTAATCCTGAAAAAATGCGTCAGTGGCTTGCAACTGTTACTAAGATTAACATTGGACAAAGAACCAATCCATTCCAGCGTTTTGGTCTATCATTGATGCCTAATATTGAAGTTCTAGGAATTGGGTTTACTCCGATTAATGATATGACGCCAGTTTTGCAATTCAAAAAACTTAAACAGCTTTGGATGACAAATACTGGTATTACAGATTATTCTTTCCTTGATAAGATGCCACTATTAGAAGGATTGGATATTTCACAAAACGGTATTAAGGATTTATCTTTCCTTACAAAATATAAACAATTAAGTCTTATTGCTGCAGCTAATAATGGCATTACTTCGCTAAAACCATTGGCTGAATTACCAAACCTTCAATTCTTAGTTTTGAGTCATAACAATATCTCTGACTTGACACCGTTATCAAACTTGACAAAACTCCAAGAATTGCACCTTGATCATAATAATGTGAAGAATTTAAGTGCACTTTCTGGTAAAAAAGATTTGAAAGTTCTAGATTTATCAAACAATAAATCCGCAGACTTATCGACTCTAAAAACAACTAGTCTTGAGACGCTTCTTTTAAATGAGACGAATACAAGCAATCTAAGTTTCTTAAAGCAAAATCCTAAGGTATCTAATTTAACAATTAATAATGCGAAATTAGCATCATTAGATGGTATTGAAGAGAGCGATGAAATTGTTAAAGTAGAAGCTGAAGGGAACCAAATTAAGTCACTAGTATTGAAAAATAAACAAGGTTCGTTAAAATTCTTGAATGTGACTAATAATCAGTTAACATCACTTGAAGGTGTTAATAATTATACTTCACTTGAGACCTTAAGTGTTTCTAAAAATAAACTTGAATCTTTAGATATTAAAACACCTAACAAAACAGTTACAAATCTTGATTTTAGCCATAACAATGTTCCAACATCACAATTGAAATTGAATGAAAAAAATATTCCTGAAGCAGTAGCTAAGAATTTTCCAGCAGTTGTAGAAGGTTCAATGGTTGGAAATGGTAGTCTTGCTGAAAAGCAGCTATGGCTTCAAGAGGACAACAAGTTTCAGATAATACTAATCACCAAAAAAACACTGAAAAATCTGCTCAAGCGAATGCTGATAGTAAAAAAGAAAACCTAAAACACATGATGAACATCATGACCATGAAGAACAGATCATGCACATG

SEQ ID NO: 19886 - protein, 871 aa, Streptococcus agalactiae
  VARIANT 51, 107, 866: Xaa = Any Amino Acid
MKGQKIIALAGLVLSCHFALTACHTQEHKNSHHIKTKQVAKKKANKKKVSXKESHKKRKGVAGVDFPTDDGFLLTKDSKILSHTDSGIVVAHGNHSHFIFYSDLKGXKFSYLIPNANTKTNKNQAVRNFKAGAVAVNTLNDGYVFNPADIVSEDANGYVVRHGDHFHYIPKASLSQQKQVQASRAVSRLGNQSNSHYRVNSSKIAGLHYPTSNGFLFNGRGIKGTTPTGILVEHHNHLHFISFADLRKGGWGSIADRYQPQKKADSKKQSPSSKKPRTENTLPKDIKDKLAYLARELHLDISRIRVLKTLNGEIGFEYPHDDHTHVIMAKDIDLSKPIPNPHHDDEDHHKGHHHDESDHKHEEHEHTKSNKLSDEDQKKLIYLAEKLGLNPNQIEVLTSEDGSIIFKYPHDDHSHTIASKDIEIGKPIPDGHHDHSHAKDKVGMATLKQIGFDDEIIQDILHADAPTPFPSNETNPEKMRQWLATVTKINIGQRTNPFQRFGLSLMPNIEVLGIGFTPINDMTPVLQFKKLKQLWMTNTGITDYSFLDKMPLLEGLDISQNGIKDLSFLTKYKQLSLIAAANNGITSLKPLAELPNLQFLVLSHNNISDLTPLSNLTKLQELHLDHNNVKNLSALSGKKDLKVLDLSNNKSADLSTLKTTSLETLLLNETNTSNLSFLKQNPKVSNLTINNAKLASLDGIEESDEIVKVEAEGNQIKSLVLKNKQGSLKFLNVTNNQLTSLEGVNNYTSLETLSVSKNKLESLDIKTPNKTVTNLDFSHNNVPTSQLKLNEKNIPEAVAKNFPAVVEGSMVGNGSLAEKAAMASKRTNKFQIILITKKTLKNLLKRMLIVKKKTLKHMMNIMTMKXQIMHM

SEQ ID NO: 19887 - protein, 657 aa, Streptococcus agalactiae; identical to SEQ ID NO: 10607

SEQ ID NO: 19888 - protein, 219 aa, Streptococcus agalactiae; identical to SEQ ID NO: 10608

SEQ ID NO: 19889 - protein, 462 aa, Streptococcus agalactiae; identical to SEQ ID NO: 10609

SEQ ID NO: 19890 - protein, 154 aa, Streptococcus agalactiae; identical to SEQ ID NO: 10610

SEQ ID NO: 19891 - protein, 432 aa, Streptococcus agalactiae; identical to SEQ ID NO: 10611

SEQ ID NO: 19892 - protein, 144 aa, Streptococcus agalactiae; identical to SEQ ID NO: 1742

SEQ ID NO: 19893 - protein, 2790 aa, Streptococcus agalactiae
ATGGCTTCTACAAATAATGTTTCAGATACAAACACACGTTTTGCTAAAGAGGAGTTAGAAGAGGTTTTCGAAGAATTAGGGACAACTCAAGGTGGTTTATCAGATGAAGAGGTTGCTGTACGTCAGAAAAAATATGGTTTAAACCTGTTATCTGAAGTAAAGCAAGAATCGATTATTTTATTGTTTCTGAAAAATTTTACTAGTCTTATGGCAATACTATTATGGGTTGGAGGATTTGTGGCTATTGTTTCTAATAGCTTAGAGCTAGGTCTTGCCATTTGGATGGTTAATGTGATTAATGGTATTTTTAGTTTCATTCAGGAATACCGTGCAAGCCAAGCAACACAAGCTCTCGAGAAAATGTTACCATCTTATTCACGTGTTCTTAGAAAAGGCTCAGAAGAAAAGATATTATCAGAGCAACTAGTCCCAGGCGATATTGTTCTTATTGAAGAAGGAGACCGTATTTCAGCAGATGGTCGCTTGATTAAAACAACAGATTTGCAAGTAAACCAATCAGCCTTGACAGGGGAATCAAATCCTATTTATAAAGATAGCAATGTTGAAAACGACCAGTCTAAAACATTGATTGAATGTGATAATATGGTTTTCGCAGGAACGACGGTCTCCAGTGGTAGCGCAACAATGGTTGTTACGGCAATTGGAATGCAAACTCAATTTGGTCAAATCGCTGATTTAACACAAGGGATGAAATCAGAAAAAAGCCCTCTTCAAAGAGAACTTGATCGGTTGACCAAACAGATTTCTATCATTTCAATTACGGTAGGAATTATCTTTTTCTTAGCAGCGACTTTTTTTGTTAAGGAGCCAGTGTCAAAATCATTTATCTTTGCCTTGGGGATGATCGTTGCATTTATCCCAGAAGGTTTACTACCTACCGTTACACTTTCTCTAGCTATGGCAGTCCAACGAATGGCTAAAGAACACGCACTTGTCAAAAAACTTTCTTCAGTTGAGACTCTTGGAGCAACCTCAGTTATCTGTTCTGATAAGACTGGTACATTAACGCAAAATGAAATGACCGTCAATCATTTGTGGCAAAATGGAAAGAGTTACCAAGTGACAGGACTGGGTTATGCTCCAGAAGGACAGATTCTTTTTGAAGGTGACAATATTTGCTTTGGTAATAGTGATAGAGGAGACTTAGAAAAACTTATTCGTTTTGCTCATCTCTGTAGCAACGCTCAAGTATTACCACCAAATGATGATCGTTCAACTTATACTGTACTTGGAGATCCGACAGAAGCTTGTTTGAATGTTTTATTGGAAAAATCAGGGATAAACATACAAGAAAATCGTAAGTTTGCACCACGTTTGAAAGAATTACCTTTTGATTCGGTTAGAAAACGCATGACAACTATTCATAGCTTAGGAGGCGATGAAAAGGATAAAAAAATTTCAATTACAAAAGGTGCGCCGAAAGAAATACTTGATTTATCAGATTATGTCTTATCTGATGGCAAAGTTATCCCCTTAAACAAGGAAGAACGTAATAAAATACAGTTGGCTAACGATACATTTGCTAAAGATGGACTTCGCGTCTTAGCTGTTTCATACTGCGATATTGAAGGCTTTTCAAAAGAACAATGGACGCAAGAAAATTTGGAACAACACATGGTGTTTATAGGGTTGATAGCAATGAGTGATCCACCTCGTGAAGGCGTTCGCGAAGCTATTGATAAATGTCATGCAGCAAGCATTCGTATTATTATGGTGACTGGAGATTACGGATTAACGGCACTAAGTATCGCTAAAAATATTGGTATTATTCGTAACGATGATGCTAAAGTAATTTCAGGTTTAGAGTTATCAGAAATGACGGATAGCCAATTGAAAAAAGAATTGTCAGGTGAAGTCGTTTTTGCTCGTGTAGCACCAGAACAAAAATATCGAGTAGTAACGATATTACAGGAGATGGGTGAAGTAGTAGCAGTTACAGGAGACGGGGTCAATGATGCGCCTGCGCTAAAAAAATCCGATATTGGTGTAGCCATGGGTGTTACCGGTACTGATGTTGCTAAAGAATCAGCTGATATGATTCTGACAGATGATCATTTTGCTTCTATTGTACATGCTGTGGAAGAAGGACGGGCTGTTTATCAAAACATTAAGAAATTCTTGACGTATATTTTTAATAGTAATACTCCTGAGGCTGTTCCGTCGGCATTCTTCCTTTTTTCTAAAGGTTTTATTCCTTTACCATTGACTGTAATGCAAATACTTGCTGTTGATTTGGGAACCGATATGCTTCCCGCTTTAGGTCTGGGCGTGGAACCACCAGAAACAGACGTTATGAATCGTCCTCCAAGACGGCTAACAGATCGCTTATTGGACAAAGGGCTACTTATAAAATCTTTCCTTTGGTACGGCACTATTGAATCCGTATTAGCTATGGGTGGTTTTTTCTGGGCTCATTACTTACGTTATGGTAATTTTACTTTTTTCGTCGCAAACGGCATACCGTACAGAGAAGCGACAACTATGACACTTGGAGCTATTATCTTTAGCCAGATAGGTATGGTTATGAATAGCAGAACGAGCTATCAATCTATTAAAGCACTATCTATTTTTGGTAATAAATTAATTAATTTTGGTATAATAATGGAGATTTTAGCATTTTTAGTCTTAGTATACGTGCCACTATTCCATAACTTATTCAACACAGCAAGCCTAGGTTTATCACATTGGCTCTATTTAATAAGCTGCCCATTTATCATGATAGGTTTAGATGAAGTTCGGAAATTATTCAGCAGTAGAAAGAATAAACGG

SEQ ID NO: 19894 - protein, 930 aa, Streptococcus agalactiae; identical to SEQ ID NO: 1744

SEQ ID NO: 19895 - protein, 1101 aa, Streptococcus agalactiae; identical to SEQ ID NO: 10617

SEQ ID NO: 19896 - protein, 367 aa, Streptococcus agalactiae; identical to SEQ ID NO: 1746

SEQ ID NO: 19897 - protein, 636 aa, Streptococcus agalactiae
ATGGCTAGTATTTTAAAAAAACATTTAGAGAAACGTTTAGAGCTTAAAAATGATCCTATGAGGACAGATATGAGTACTGGTGCCAGTTACCCTAAATATGGATTCTCGGTAGGAAAGTACACATATGGATATCAACAATTCTTTTACGAAGGCGTTAACTTAAAAGAAATTGGAGCATTTTGCTCAATAGCCCAGAACGTTACTATTACTGGTCTGAATCATCCAACCGATCACATTACCACTAACCCTTTTATTTACTATAAGTCAAGGGGATTTATAAATGAGGATAGGGCGGACTTAATAGATGAAAAGAAAAATGGAAAAGTTATTATTGGCAACGATGTCTGGATAGGAACTAATGTCACTATACTTCCATCTGTTACAATAGGTAATGGAGCAATTATTGGAGCAGGTTCAGTTATTACCAAAGACATTCCTGACTATGCTGTTGTCGCTGGAACACCTGCTAAAATTATCAAATATCGCTTTTCAGAGGAAGAAATAACATTATTAAATGCATCTCAGTGGTGGAATTGGTCAGATGAAGCTATTAAGGAACATATTAGCGAATTTTCAGATAAGAAGGAATTCTTCAATACTCTAAAAAGTATTTCCGAAAACAAAAATCATAAACTC

SEQ ID NO: 19898 - protein, 212 aa, Streptococcus agalactiae; identical to SEQ ID NO: 1748

SEQ ID NO: 19899 - protein, 696 aa, Streptococcus agalactiae
GTGAAAGTCATTAAGATGTCTGCAATGCGTAAGGCTATTTCTAAAGGTATGACTAACTCTTACCTCACTGCTCCAAGCTTTACACTTAACTATGACATTGATATGACTGAAATGATGGCTCTTCGCAAGAAATTAATTGATCCAATCATGGCTAAAACAGGCTTGAAAGTCAGCTTTACTGATTTGATTGGAATGGCCGTTGTTAAGACATTGATGAAACCAGAGCATCGATACCTAAATGCTTCATTAATTAACGATGCACAAGAAATTGAGCTTCATAATTTTGTTAATATTGGAATCGCAGTTGGTCTTGATGATGGTTTGATTGTTCCTGTTGTTCACAATGCTGATCAAATGTCACTTTCTGACTTTGTTATAGCATCTAAAGATGTTATTAAGAAAACTCAAGAAGGTAAATTAAAATCAGCTGAAATGTCAGGTTCAACATTCTCAATTACTAACTTAGGTATGTTTGGTACTAAGACGTTTAACCCAATTATCAATCAACCGAACTCAGCAATCCTTGGAGTAGGAGCTACTATTCCGACTCCAACAGTGGTTGATGGTGAAATTGTAGCTCGACCAATTATGGCAATGTGTTTAACAATTGACCACCGTATTGTTGATGGAATGAATGGTGCTAAGTTTATGGTTGATCTTAAGAACTTAATGGAAAACCCATTTGGTTTACTTATT

SEQ ID NO: 19900 - protein, 232 aa, Streptococcus agalactiae
MKVIKMSAMRKAISKGMTNSYLTAPSFTLNYDIDMTEMMALRKKLIDPIMAKTGLKVSFTDLIGMAVVKTLMKPEHRYLNASLINDAQEIELHNFVNIGIAVGLDDGLIVPVVHNADQMSLSDFVIASKDVIKKTQEGKLKSAEMSGSTFSITNLGMFGTKTFNPIINQPNSAILGVGATIPTPTVVDGEIVARPIMAMCLTIDHRIVDGMNGAKFMVDLKNLMENPFGLLI

SEQ ID NO: 19901 - protein, 609 aa, Streptococcus agalactiae; identical to SEQ ID NO: 10621

SEQ ID NO: 19902 - protein, 203 aa, Streptococcus agalactiae; identical to SEQ ID NO: 6240

SEQ ID NO: 19903 - protein, 780 aa, Streptococcus agalactiae; identical to SEQ ID NO: 10623

SEQ ID NO: 19904 - protein, 260 aa, Streptococcus agalactiae; identical to SEQ ID NO: 1752

SEQ ID NO: 19905 - protein, 696 aa, Streptococcus agalactiae; identical to SEQ ID NO: 10625

SEQ ID NO: 19906 - protein, 232 aa, Streptococcus agalactiae; identical to SEQ ID NO: 1754

SEQ ID NO: 19907 - protein, 366 aa, Streptococcus agalactiae; identical to SEQ ID NO: 6245

SEQ ID NO: 19908 - protein, 122 aa, Streptococcus agalactiae; identical to SEQ ID NO: 6246

SEQ ID NO: 19909 - protein, 3102 aa, Streptococcus agalactiae; identical to SEQ ID NO: 10629

SEQ ID NO: 19910 - protein, 1034 aa, Streptococcus agalactiae; identical to SEQ ID NO: 6248

SEQ ID NO: 19911 - DNA, 1020 bp, Streptococcus agalactiae
atgaaacgtattgctgttttaactagtggtggtgacgcccctggtatgaacgctgctatccgtgcagttgttcgtaaagcaatttctgaaggtatggaagtttacggcatcaaccaaggttactatggtatggtgacaggggatattttccctttggatgctaattctgttggggatactatcaaccgtggaggaacgtttttacgttcagcacgttatcctgaatttgctgaacttgaaggtcagcttaaagggattgaacagcttaaaaaacacggtattgaaggtgtagtagttatcggtggtgatggttcttatcatggtgctatgcgtctaactgagcacggtttcccagctgttggtttgccgggtacaattgataacgatatcgttggcactgactatactattggttttgacacagcagttgcgacagcagttgagaatcttgaccgtcttcgtgatacatcagcaagtcataaccgtacttttgttgttgaggttatgggaagaaatgcaggagatatcgctctttggtcaggtatcgctgcaggtgcagatcaaattattgttcctgaagaagagttcaatattgatgaagttgtctcaaatgttagagctggctatgcagctggtaaacatcaccaaatcatcgtccttgcagaaggtgttatgagtggtgatgagtttgcaaaaacaatgaaagcagcaggagacgatagcgatcttcgtgtgacgaatttaggacatctgctccgtggtggtagtccgacggctcgtgatcgtgtcttagcatctcgtatgggagcgtacgctgttcaattgttgaaagaaggtcgtggtggtttagccgttggtgtccacaacgaagaaatggttgaaagtccaattttaggtttagcagaagaaggtgctttgttcagcttgactgatgaaggaaaaatcgttgttaataatccgcataaagcggaccttcgcttggcagcacttaatcgtgaccttgccaaccaaagtagtaaa

SEQ ID NO: 19912 - protein, 340 aa, Streptococcus agalactiae; identical to SEQ ID NO: 1760

SEQ ID NO: 19913 - DNA, 1296 bp, Streptococcus agalactiae
atggctactgttcgtaaagcagaagagattgcaggacaaaaagttggcttcctccttgatactaaaggacctgaaattcgtacagaactttttgaagatggtgcagatttccattcatatacaacaggtacaaaattacgtgttgctactaagcaaggtatcaaatcaactccagaagtgattgcattgaatgttgctggtggacttgacatctttgatgacgttgaagttggtaagcaaatccttgttgatgatggtaaactaggtcttactgtgtttgcaaaagataaagacactcgtgaatttgaagtagttgttgagaatgatggccttattggtaaacaaaaaggtgtaaacatcccttatactaaaattcctttcccagcacttgcagaacgcgataatgctgatatccgttttggacttgagcaaggacttaactttattgctatctcatttgtacgtactgctaaagatgttaatgaagttcgtgctatttgtgaagaaactggcaatggacacgttaagttgtttgctaaaattgaaaatcaacaaggtatcgataatattgatgagattatcgaagcagcagatggtattatgattgctcgtggtgatatgggtatcgaagttccatttgaaatggttccagtttaccaaaaaatgatcattactaaagttaatgcagctggtaaagcagttattacagcaacaaatatgcttgaaacaatgactgataaaccacgtgcgactcgttcagaagtatctgatgtcttcaatgctgttattgatggtactgatgctacaatgctttcaggtgagtcagctaatggtaaatacccagttgagtcagttcgtacaatggctactattgataaaaatgctcaaacattactcaatgagtatggtcgcttagactcatctgcattcccacgtaataacaaaactgatgttattgcatctgcggttaaagatgcaacacactcaatggatatcaaacttgttgtaacaattactgaaacaggtaatacagctcgtgccatttctaaattccgtccagatgcagacattttggctgttacatttgatgaaaaagtacaacgttcattgatgattaactggggtgttatccctgtccttgcagacaaaccagcatctacagatgatatgtttgaggttgcagaacgtgtagcacttgaagcaggatttgttgaatcaggcgataatatcgttatcgttgcaggtgttcctgtaggtacaggtggaactaacacaatgcgtgttcgtactgttaaa

SEQ ID NO: 19914 - protein, 432 aa, Streptococcus agalactiae; identical to SEQ ID NO: 1762

SEQ ID NO: 19915 - DNA, 513 bp, Streptococcus agalactiae
  misc_feature 500, 501, 502, 503, 504: n = A,T,C or G
atggttaaacgcgattttattagaaatattattttagcattgattgctgtattgattttgattctcttgagatattttgtttttgcaacctttaaagtacataaggatgctacaaattcttattttagcaacggagatgttgttgttgttaatcgtaataggacgcctaagtacaaagactttattgtctataaggttggaaagattttctatattagtcgtgttattggtgagccaaatcaaaaagtgagagtaatggatgatattttatatttgaatgatgttttcaaggatgagccttacattgaaaaaatgaaaaatgcttattctgaaaagaaagacggtcaaatgccctttacttccgacttctcagttgaaacattaacacgaaataaagaaagcagagttcctaagggttcttatcttgtgttaaatgataatcgacaaaataaaaatgatagtcgaaaatttggaaaatcaaagagaaagatattcgtggnnnnnttaattaat

SEQ ID NO: 19916 - protein, 171 aa, Streptococcus agalactiae
  VARIANT 167, 168: Xaa = Any Amino Acid
MVKRDFIRNIILALIAVLILILLRYFVFATFKVHKDATNSYFSNGDVVVVNRNRTPKYKDFIVYKVGKIFYISRVIGEPNQKVRVMDDILYLNDVFKDEPYIEKMKNAYSEKKDGQMPFTSDFSVETLTRNKESRVPKGSYLVLNDNRQNKNDSRKFGKSKRKIFVXXLIN

SEQ ID NO: 19917 - DNA, 141 bp, Streptococcus agalactiae; identical to SEQ ID NO: 15133

SEQ ID NO: 19918 - protein, 47 aa, Streptococcus agalactiae; identical to SEQ ID NO: 1766

SEQ ID NO: 19919 - DNA, 1812 bp, Streptococcus agalactiae
atgtgtggtatcgtaggtgtagttggaaatacaaatgcaacggatattttaattcaaggcttagaaaagctagagtaccgaggatatgactcagcaggtatttttgtagtaggtgataacaaaagtcaacttgtgaagtcagtcggtcgaatcgcggagcttcaggcaaaagtaggagattctgttagtggtacgacaggtatcggtcatacacgttgggcaacccatggtaaacctactgaaggaaatgcacatcctcacacttcaggatctggtcgttttgtattggtacacaatggtgttattgaaaattaccttcaaattaaagaaacttacttaacaaaacataacctcaagggtgaaactgatacagaaatagctattcatttagttgaacactttgttgaagaagataacttatcagtgcttgaagcctttaaaaaagccttacatattatagaaggatcatacgcatttgctcttattgattctcaagatgctgatacgatttacgtagctaaaaataaatcacctcttctaataggtttgggaaatggttataatatggtgtgttcagatgccatggctatgatacgtgagacaagtgaatatatggaaatccacgataaagaactcgttattgttaaaaaagatagcgttgaagttcaagattatgatggtaatgtcattgaacgtggtagctacacagcagagcttgacttatcagatattggtaaggggacttatccattctacatgcttaaagaaattgatgagcaaccaactgtgatgcgtaagttgatttcaacttatgcgaacgaatctggagatatgaatgtggattctgatattataaaatcagtccaagaagcagatcgtctttacatattggctgcaggaacgtcatatcatgctggttttgctgctaagaccatgatcgaaaaattaactgatacacctgttgaacttggagtttcttcagaatggggttacaacatgccacttttgagtaagaagccaatgtttattttacttagtcaatcgggagaaacagcagatagtagacaagttttagttaaagcaaacgaaatgggaatccctagtttaactataacaaatgtgcctggctcaacactttctcgtgaagcaacctatacgatgctcattcatgcaggacctgaaatcgctgttgcttctacaaaagcatatactgctcaagttgcaacgttagctttcttagcaaaagcggtaggagaagcaaatggtaaggcagaagcaaaagattttgatttggttcatgaattgtcaattgtagcacaatcaattgaagcgaccttatcagaaaaagatgttatctctgagaaggtagagcagttgttaatctcgacacgtaatgccttctacattggtcgtggtaacgactattatgttacaatggaggctgcactgaagctaaaagagatttcttatattcagacagaaggttttgctgcaggtgaattaaaacatggtacaatttcgttgattgaagacaatactcctgttattgctttaatatctgctgattcaactattgcagcgcatactcgtggaaatatccaagaagttgtttctcgcggagcaaatgctttgattattgtagaagaagggttggaacgtgaaggtgatgatattattgttaataaagttcacccattcttatcagccatttcaatggttattccgactcaattaattgcttactatgcttcattacaacgtggcttagatgttgataaaccacgtaatttggcaaaagctgtaactgttgaa

SEQ ID NO: 19920 - protein, 604 aa, Streptococcus agalactiae; identical to SEQ ID NO: 6258

SEQ ID NO: 19921 - protein, 327 aa, Streptococcus agalactiae
ATGTCATTACCAAATTGCCCTAAGTGTAACTCTGAATATGTCTATGAAGACGGTATTTTACTGGTTTGTCCAGAATGTGCTTACGAGTGGAATCCAGAAGAAATCGAAGAAGAAGTAGGTTTAATTGTATTGGATAGCAATGGAACGCGCTTATCAGATGGAGATACTGTGACAGTTATTAAGGATTTAAAAGTAAAAGGAGCGCCTAAGGATATTAAGCAAGGCACTCGTGTTAAAAATATTCGTTTAGTTGATGGCGATCATAATATCGATTGTAAAATTGATGGTTTTGGAGCTATGAAACTAAAATCTGAGTTTGTAAAAAAA

SEQ ID NO: 19922 - protein, 109 aa, Streptococcus agalactiae; identical to SEQ ID NO: 1770

SEQ ID NO: 19923 - protein, 638 aa, Streptococcus agalactiae
ATGTCTTATATTTTAGAAATCTTACCTAGCTTATTAGTAGGTGCGCAAGTGACATTGCAAGTTTTCTTTATTGTATTTGTTTATCAATTCCACTTGGTATTGTTGTAGCCTTCCTAATGAAAGTTCATTTTAAGCCGCTTCAATGGCTACTGACAACTTATATTTGGATTATGCGAGGCACGCCTCTGTTATTACAGCTTATCTTTTTTTATTACTTTTTACCAAGTGTAGGGATTTCTTTTGATCGTATGCCAGCTGCGATTATTGCTTTTACGATGAATTATGCAGCTTATTTTGCAGAGATTTTTCGAGGAGGTATTGAGTCTATTCCTAAAGGGCAATATGAAGCTGCAAAGGTATTAAAGTTTTCTAAGTTTCAAACGGTTTGGTACATAGTATTACCTCAAGTCTTCAAAATAGTCTTACCGAGTGTTTTCAATGAAACGATTACTTTAGTGAAAGATTCCTCATTGGTTTACATACTTGGTGTGGGCGACTTACTTCTAGAAAGTAAGACAGCCGCAAATAGGGATGCAACACTTGCACCAATGTTTATAGCAGGTGGTATTTACCTATTATTAATTGGTCTTTTAACTATTTTATCTAAACAAGTTGAAAAGCGTTTTAACTACTATAAA

SEQ ID NO: 19924 - protein, 213 aa, Streptococcus agalactiae
  VARIANT 25: Xaa = Any Amino Acid
MSYILEILPSLLVGAQVTLQVFFIXICLSIPLGIVVAFLMKVHFKPLQWLLTTYIWIMRGTPLLLQLIFFYYFLPSVGISFDRMPAAIIAFTMNYAAYFAEIFRGGIESIPKGQYEAAKVLKFSKFQTVWYIVLPQVFKIVLPSVFNETITLVKDSSLVYILGVGDLLLESKTAANRDATLAPMFIAGGIYLLLIGLLTILSKQVEKRFNYYK

SEQ ID NO: 19925 - protein, 627 aa, Streptococcus agalactiae; identical to SEQ ID NO: 10645

SEQ ID NO: 19926 - protein, 209 aa, Streptococcus agalactiae; identical to SEQ ID NO: 1774

SEQ ID NO: 19927 - protein, 903 aa, Streptococcus agalactiae; identical to SEQ ID NO: 15145

SEQ ID NO: 19928 - protein, 301 aa, Streptococcus agalactiae; identical to SEQ ID NO: 1776

SEQ ID NO: 19929 - protein, 240 aa, Streptococcus agalactiae; identical to SEQ ID NO: 6267

SEQ ID NO: 19930 - protein, 80 aa, Streptococcus agalactiae; identical to SEQ ID NO: 1778

SEQ ID NO: 19931 - DNA, 918 bp, Streptococcus agalactiae
atgaataatgaatttattaatttcgaccgtatttccagagaaaattggaaggacttacatcagcaatcccaagctttactaactgaaaaagagcttgaatctatcaaaagcttaaacgataatattaatattcaagatgttattgacatctaccttcctttaattaaccttattcaaatctataaacgtagtcaagaaaatttatctttttctaaagcaatatttcttaaaaaggaaaattatcaacgtccttttattatcggcatatcagggtcagttgctgttggaaaatcaactaccagtcgcttactacaattactaatttcacgaacttttaaagatagtcacgtcgaattagtcactactgatggctttttatatcctaacgagaaactcatacaaaatggaattttaaaccgtaaaggtttcccggaatcctatgatatggagtcacttctaaatttcttagatactataaagaacggtataaccgcgaaaatcccaatttattctcatgaaatctacgatatcgttccaaatcaattgcaaactattgaaacaccagattttttaattttagaaggaataaatgtctttcaaaaccaacaaaaccatcgactttacatgaatgattattttgatttttcaatatacattgatgctgaaaataaacaaattgaagaatggtatttacaacgatttaacagtcttctacaattagccgaagcagaccctagtaattactatcataaattcacacaaataccgccacataaagctatggaactagctaaagatatttggaaaactattaatttagtcaaccttgaaaaatatatagaaccaaccagaaatagggctgattttattattcataaagggaaacatcataaaattgatgaaatttatctcaaaaag

SEQ ID NO: 19932 - protein, 306 aa, Streptococcus agalactiae; identical to SEQ ID NO: 6270

SEQ ID NO: 19933 - DNA, 588 bp, Streptococcus agalactiae
atggctaatatgtattatacagagaatcctaatgttgaacatgatattcatgagctaaatgtcaaattattaggagaatcattcagttttttaactgatgcaggagttttctctaaaagaatgatagattatggtagtcaagtccttctaaatagtttacattttgaaaaaaataaatccttgttagaccttgggtgtggatacggtccgctgggaatttctctagccaaagtgcaaggagttaaagcaactatggttgacattaatacgagagcattggaattagctaagaaaaatgcaacacgcaatggagtagtagttgaagtctttcagtcaaacatttatgaaaatatttctaaaactttcgactatattataagcaacccacctattcgtgctggaaagcaagttgttcattctattatcgaagaaagtatctgttaccttaatacaggcggtagccttaccattgtcattcaaaagaaacaaggcgctccaagtgcaaaagctaaaatgctagatacttttggtaattgcgatattttaaaaaaagataagggatattatatattgagaagtgaaaaagtc

SEQ ID NO: 19934 - protein, 196 aa, Streptococcus agalactiae; identical to SEQ ID NO: 6272

SEQ ID NO: 19935 - DNA, 414 bp, Streptococcus agalactiae; identical to SEQ ID NO: 15153

SEQ ID NO: 19936 - protein, 138 aa, Streptococcus agalactiae; identical to SEQ ID NO: 6274

SEQ ID NO: 19937 - DNA, 1047 bp, Streptococcus agalactiae
atgaacaaaaaaattgccgggatcggcttggcttcgattgcagtacttagtttagctgcatgtggacatcgtggtgcttctaaatctggtggtaaatcagatagcttgaakgttgcaatggtaacagataccggtggtgttgatgataaatcatttaaccaatctggttgggaaggtatgcaagcttggggcaagaagaatggccttaaaaaaggagctggttttgactatttccaatcggcaagtgaatctgattatgcaactaacttagatacagctgtgtctagtggttataaattgattttcggtattggattttctcttcatgatgctattgataaagcagcagacaataacaaagatgttaattacgtcatcgttgatgatgttattaaagggaaagataatgttgcaagtgttgtctttgcggataatgaatcagcttacttagcaggtattgcagccgctaaaactaccaaaacaaaaacagttggctttgtaggtggtatggaatctgaggttattacccgttttgaaaaaggttttgaagcaggtgtcaaatcagttgataaatcaattaaaattaaagttgactatgctggttcattcggtgatgctgctaagggtaagacaattgcagccgcacaatatgcttctggcgcagatattgtttatcaagtagctggtggaactggtgcaggtgtattcagtgaagcaaaatcacgcaatgaatctttaaaagaagctgacaaagtttgggtattaggtgtagaccgtgaccaagcagcagaaggtaagtatacttctaaagatggtaaggcttctaactttgttttggcttcatcaattaaagaagttggaaaatcagttgaattgattgctactaaaacaagtaaaggtaaattcccaggtggtaatgtaacaacttatggtttgaaggatggtggagttgatatagcaactacaaacctttcagatgacgccgttaaagcgattaaagaggctaaagctaaaattatttcaggagatatcaaagttcctagcaaa

SEQ ID NO: 19938 - protein, 349 aa, Streptococcus agalactiae
  VARIANT 37: Xaa = Any Amino Acid
MNKKIAGIGLASIAVLSLAACGHRGASKSGGKSDSLXVAMVTDTGGVDDKSFNQSGWEGMQAWGKKNGLKKGAGFDYFQSASESDYATNLDTAVSSGYKLIFGIGFSLHDAIDKAADNNKDVNYVIVDDVIKGKDNVASVVFADNESAYLAGIAAAKTTKTKTVGFVGGMESEVITRFEKGFEAGVKSVDKSIKIKVDYAGSFGDAAKGKTIAAAQYASGADIVYQVAGGTGAGVFSEAKSRNESLKEADKVWVLGVDRDQAAEGKYTSKDGKASNFVLASSIKEVGKSVELIATKTSKGKFPGGNVTTYGLKDGGVDIATTNLSDDAVKAIKEAKAKIISGDIKVPSK

SEQ ID NO: 19939 - DNA, 1533 bp, Streptococcus agalactiae
atgacacagaatgtcattgaaatgaaagaaatcactaagaaattcggtgattttgtggcaaatgatcatatcaatttgacggttgaaaaaggtgagatacatgctctgcttggcgaaaacggtgcagggaaatcaactttaatgaacatgttagcaggtttactagaaccaacagacggtcaaatttttattaatggtcagcctgtaactattgattcaccttccaaatcgtcacaattggggattggtatggtacatcagcatttcatgcttgttgaagcatttactgtagctgaaaatattgttctaggaaatgaaaccacccaaaatggtgttttagacattaagacagcagctaaagaaataaaggaactatcagagaaatatggtttgtcagtaaatccaaatgctaaaatatctgatatttctgtaggagcacagcagcgtgttgaaattttgaagacactttatcgcggtgcagatattttaatttttgatgagccgacggcggtgcttacaccatcagaaataaaagaattgatgacaattatgaagagccttgttaaagaaggcaaatccattatactaattacccataaattggatgaaattcgggcagttgctgataaagttactgtgattcgccgtggtaaaagtattgaaacagtccctgttgcaggcgcaagttctcaacaactggcggaaatgatggttggacgatctgtttccttcagaactgaaaaaaaggaagctaatccgactgacataatcctttctgtaaaggatttagttgtagaagaaaatagaggcggcgttctagctgttaaaaatctgtcgttagatgttcgagcaggtgaaattgtaggtatagctggtattgatggtaatggacaaagtgaattaattcaagctattacaggtttaagaaaggtaacttctggtcaaattgtaattaaaggtaaagatgtcacaaaattttcaagtcgacaaattacagaattaagtgtaggtcatgttccagaagatcgtcatagagatggtttggttctagatatgacgatggcagaaaatttagctttacaaacttattataaagagccattgagtcataaaggtatccttaattttgctaaaattaaagagtatgctcgtcaattaatgacagaatttgatgtgcgtggtgctggtgaacatgttttagcaagaggattttctggtggtaaccaacaaaaagcaattattgctcgtgaagtggatcgcgatccagacctactcattgttagccaaccgactcgtggtctagatgttggtgctatcgagtatattcataaacgtttgattgaagagcgcgataaagggaaagcggtcttagtagttagctttgagttagatgaaatcttaaacttatcagatcgtattgcagttattcatgatggtaaaattcaaggaattgttaaacccgaccaaaccaacaagcaagaattgggtattttgatggctggtggaaaaattgaaaaggaggagagagatgtc

SEQ ID NO: 19940 - protein, 511 aa, Streptococcus agalactiae; identical to SEQ ID NO: 1786

SEQ ID NO: 19941 - protein, 1059 aa, Streptococcus agalactiae; identical to SEQ ID NO: 10661

SEQ ID NO: 19942 - protein, 353 aa, Streptococcus agalactiae; identical to SEQ ID NO: 1788

SEQ ID NO: 19943 - protein, 954 aa, Streptococcus agalactiae; identical to SEQ ID NO: 10663

SEQ ID NO: 19944 - protein, 318 aa, Streptococcus agalactiae; identical to SEQ ID NO: 1790

SEQ ID NO: 19945 - protein, 1364 aa, Streptococcus agalactiae
ATGAGTAAAATCGTTGTCGTAGGGACAAACCACGCTGGTACAGCAGCAATTAAAACAATGCTTAGTAATTATGGTGAAGCCAATGAAATTGTAACATTTGATCAAAATTCCAATATCTCTTTCTTAGGATGTGGTATGGCTCTTTGGATTGGTGAACAGATTGATGGTCCAGAAGGATTGTTCTACTCTGATAAAGAGCAGTTGGAAAGTATGGGAGCTAAGGTTTACATGAACTCTCCAGTACTTAATATTGACTACGATAAAAAAGAAGTTACAGCTTTAGTAGATGGAAAAGAACATGTTGAAAGTTATGAAAAACTTATTTTAGCAACTGGTTCACAACCTATCATTCCACCAATTAAAGGTGTTGAAATTCAAGAAGGATCTCGTGAATTTAAAGCTACTCTTGAAAACCTTCAATTTGTGAAACTTTATCAAAATTCAGAAGAAGTTATTGAAAAGTTAGCTAAACCTGGTATCAATCGTGTTGCTGTTGTTGGGGCTGGGTATATTGGTGTAGAATTAGCAGAAGCTTTCCAACGTATTGGAAAAAAGTACACTTGTTGATGTGCTGATACTTGTAGGGTGGTTACTATGATCGTGACTTTACTGATATGATGAGTAAAAACCTTGAAGACCATGGTATTCGTCTTGCTTTCGGACAAGCTGTTCAAGCAGTTGAAGGTGATGGTAAAGTAGAACGTCTTGTTACTGATAAAGAAACATTTGATGTTGATATGGTGATCTTAGCTGTTGGATTCCGTCCAAATACAGAACTCGGTGCAGGTAAATTAGATACATTCCGTAATGGCGCTTGGGTAGTTGATAAGAAGCAAGAAACAAGCGTGAAAGATGTTTATGCTATAGGTGATTGTGCGACAATTTGGGATAATTCTCGTGATGATATCAATTATATTGCTCTTGCTTCAAACGCCGTTCGTACTGGTATTGTAGCAGCTCACAATGCATGTGGTACAGAGCTTGAAGGTGCTGGTGTCCAAGGGTCAAATGGTATCTCAATCTATGGCCTTAACATGGTGTCAACTGGTTTGACTTTAGAAAAAGCAAAACAAGCTGGGTACAATGCAGTTGAAACAGGCTTTAATGACCTTCAAAAACCAGAATTTATCAAACACAATAATCATGAAGTAGCTATTAAGATTGTCTATGATAAAGATAGCCGAGTTATCCTTGGTTGCCAAATGGTCTCACACGAAGATGTATCTATGGGAATTCATATGTTCTCACTTGCTATTCAAGAAAAAGTTACTATTGAAAAGCTTGCTTTGACCGATATCTTCTTCTTACCACATTTTAATAAGCCATATAACTATATTACAATGGCTGCATTAGGCGCTAAAGAT

SEQ ID NO: 19946 - protein, 456 aa, Streptococcus agalactiae
  VARIANT 191: Xaa = Any Amino Acid
MSKIVVVGTNHAGTAAIKTMLSNYGEANEIVTFDQNSNISFLGCGMALWIGEQIDGPEGLFYSDKEQLESMGAKVYMNSPVLNIDYDKKEVTALVDGKEHVESYEKLILATGSQPIIPPIKGVEIQEGSREFKATLENLQFVKLYQNSEEVIEKLAKPGINRVAVVGAGYIGVELAEAFQRIGKEVTLVDXADTCMGGYYDRDFTDMMSKNLEDHGIRLAFGQAVQAVEGDGKVERLVTDKETFDVDMVILAVGFRPNTELGAGKLDTFRNGAWVVDKKQETSVKDVYAIGDCATIWDNSRDDINYIALASNAVRTGIVAAHNACGTELEGAGVQGSNGISIYGLNMVSTGLTLEKAKQAGYNAVETGFNDLQKPEFIKHNNHEVAIKIVYDKDSRVILGCQMVSHEDVSMGIHMFSLAIQEKVTIEKLALTDIFFLPHFNKPYNYITMAALGAKD

SEQ ID NO: 19947 - protein, 987 aa, Streptococcus agalactiae
ATGACTGCAACTAAACAACATAAAAAAGTTATTCTCGTTGGTGATGGTGCCGTAGGTTCTTCTTACGCTTTTGCACTTGTTAACCAAGGTATTGCGCAAGAGTTAGGTATCATTGAAATCCCAGCTTTATTTGATAAAGCTGTTGGTGATGCTGAAGATCTTTCACATGCCCTTGCATTTACATCACCTAAAAAAATCTACGCAGCTACTTATGCAGACTGCGCAGATGCTGACCTTGTTGTCATTACTGCTGGCGCACCTCAAAAACCAGGTGAAACTCGACTTGACCTTGTTGGTAAAAACTTAGCAATTAACAAATCAATCGTAACTCAAGTTGTTGAATCAGGTTTCAACGGTATCTTCTTAGTAGCGGCTAACCCTGTAGATGTACTTACATATTCAACTTGGAAATTCTCAGGTTTCCCTAAGGAACGCGTTATTGGTTCAGGTACTTCACTTGACTCTGCACGTTTCCGTCAAGCTTTAGCAGATAAAATTGGTGTTGATGCTCGTTCAGTTCACGCATACATCATGGGTGAACACGGTGACTCAGCATTTGCCGTTTGGTCACATGCTAACGTTGCTGGTGTCCAACTTGAACAATGGTTACAAGAAAATCGCGATATTGATGAACAAGGACTTGTTGATTTGTTTATTTCAGTTCGTGACGCTGCATACTCAATCATCAACAAAAAAGGTGCTACATATTACGGTATTGCTGTCGCACTTGCTCGTATTACTAAAGCTATCCTTGATGATGAAAATGCAGTTCTTCCATTATCTGTATATCAAGAAGGCCAATACGGTGATGTTAAAGATGTCTTTATCGGTCAGCCTGCAATCGTAGGTGCACATGGTATCGTTCGTCCAGTTAATATCCCATTAAATGATGCTGAACTTCAAAAAATGCAAGCCTCAGCTGAACAATTAAAAGATATTATTGACGAAGCTTGGAAAAACCCAGAATTCCAAGAAGCATCAAAAAAC

SEQ ID NO: 19948 - protein, 329 aa, Streptococcus agalactiae
MTATKQHKKVILVGDGAVGSSYAFALVNQGIAQELGIIEIPALFDKAVGDAEDLSHALAFTSPKKIYAATYADCADADLVVITAGAPQKPGETRLDLVGKNLAINKSIVTQVVESGFNGIFLVAANPVDVLTYSTWKFSGFPKERVIGSGTSLDSARFRQALADKIGVDARSVHAYIMGEHGDSAFAVWSHANVAGVQLEQWLQENRDIDEQGLVDLFISVRDAAYSIINKKGATYYGIAVALARITKAILDDENAVLPLSVYQEGQYGDVKDVFIGQPAIVGAHGIVRPVNIPLNDAELQKMQASAEQLKDIIDEAWKNPEFQEASKN

SEQ ID NO: 19949 - protein, 95 aa, Streptococcus agalactiae
ATGCAAGATAAAAATTTAGTAATTTACTAACTAGTGAAATGAAAACGAGTTTTATCGATTACGCCATGAGTGTCATTGTTGCTCGNNNNNTTAAT

SEQ ID NO: 19950 - protein, 33 aa, Streptococcus agalactiae
  VARIANT 31, 32: Xaa = Any Amino Acid
MQDKNLVDVNLTSEMKTSFIDYAMSVIVARXXN

SEQ ID NO: 19951 - DNA, 2310 bp, Streptococcus agalactiae
atgaatgaactaggtgtgacacctgataaacctcataagaaatcagcacgtattactggtgatgttatgggtaaataccatccacatggtgattcatctatttacgaagcaatggtgcgtatggcacaatggtggtcatatcgtcatatgctcgttgatggtcatggaaactttggttcaatggatggggatggtgctgccgcacagcgttatacagaagcacgtatgagtaaaattgctcttgagatgcttcgtgatatcaataaaaatacagttgattttcaagataactatgatggcagtgaacgtgaacctcttgttttaccagcgcgtttccctaatttattagtcaatggtgcaactggtattgctgtaggtatggcaacaaatattccaccacataatctaggtgagtctatagatgctgtcaaattggttatggataaccctgatgttactacacgggagttaatggaagttattcctggtccagattttcctactggtgccttggtgatgggacgttcaggtattcaccgtgcctatgaaactgggaagggatcaattgtcttacgttcacggactgaaattgaaacaacttcaaatgggaaagagcgtattgttgtcacagagtttccatatggcgttaataaaacaaaagtacacgagcatattgtacgtttagcacaagaaaagcgcattgaaggtattactgctgttcgtgatgaatcaagtcgtgaaggcgttcgttttgttattgaagttcgtcgtgctgcttcagcaaatgtgattttaaataatcttttcaaattaactagcttgcagacaaattttagcttcaatatgcttgctattgaaaaaggtgttccaaaaattttgtcattacgacaaatcattgataactatattgaacaccaaaaggaagttattgttcgtcgtactcagtttgacaaagctaaagcaggagcccgtgctcatatcttagaaggtttacttgtggcgcttgatcacttggatgaagttatcacaattattcgtaatagtgagacagacaccattgctcaagcagagttgatgtcacgttttgaattatcggagcgtcagagtcaagctattttagatatgcgtcttcgtcgtttaactggattagaacgcgataaaatccaatcagaatacaatgacttactagctttaattgctgatttagcagatatcttagctaagcctgaacgtgttgttaccattataaaagaagagatggatgaggttaagcgtaagtatgctgatgcccgtcgtacagaattaatgattggtgaagttttatcacttgaagatgaagaccttattgaggaagaagatgttcttattactctctcaaacaagggatatatcaagcgtctcgctcaagatgagtttagagcacaaaaacgtggaggacgcggtattcaagggactggagttaataacgatgattttgttcgtgaattggtttcaacaagtactcacgatactgtgcttttctttacaaatttagggcgtgtgtatcgtttgaaagcatatgaaattccagaatatggacgtacagctaaaggcctccctatcgttaaccttttaaaacttgacgaaggtgagacaattcaaacaattattaacgctagaaaagaagatgtcgctaataaatatttctttttcacaactcagcaaggtatagtgaaacgtacaagtgtttctgaatttagtaacattcgtcaaaatggacttcgtgctattaatttgaaagagaatgacgagttgattaacgtcctcttgattgacgaaaatgaagatgttattatcgggacacgtacaggctactctgttcgcttcaaagtgaacgctgtacgtaatatgggacgcacagcgactggggtacgaggcgttaatcttcgtgaaggtgataaagttgtgggagcttctcgtatcgttaatggacaagaagtactaatcatcactgaaaaaggttatggcaagagaacagaagcttcggaatatcctacaaaaggccgtggtggtaaaggaataaaaaccgctaatattactgctaaaaatgggccattagcacgcttagtgacgattaatggaaatgaggacatcatggtcattacagatacaggtgttattattcgaaccaatgttgctaatatttctcaaactggtcgttctaccatgggtgttaaagtgatgagacttgatcaagaagctaaaatcgtcactgttgcgctagtggaacaagaaattgaagataagtctaatatagaggatacaaaagaa

SEQ ID NO: 19952 - protein, 770 aa, Streptococcus agalactiae
MNELGVTPDKPHKKSARITGDVMGKYHPHGDSSIYEAMVRMAQWWSYRHMLVDGHGNFGSMDGDGAAAQRYTEARMSKIALEMLRDINKNTVDFQDNYDGSEREPLVLPARFPNLLVNGATGIAVGMATNIPPHNLGESIDAVKLVMDNPDVTTRELMEVIPGPDFPTGALVMGRSGIHRAYETGKGSIVLRSRTEIETTSNGKERIVVTEFPYGVNKTKVHEHIVRLAQEKRIEGITAVRDESSREGVRFVIEVRRAASANVILNNLFKLTSLQTNFSFNMLAIEKGVPKILSLRQIIDNYIEHQKEVIVRRTQFDKAKAGARAHILEGLLVALDHLDEVITIIRNSETDTIAQAELMSRFELSERQSQAILDMRLRRLTGLERDKIQSEYNDLLALIADLADILAKPERVVTIIKEEMDEVKRKYADARRTELMIGEVLSLEDEDLIEEEDVLITLSNKGYIKRLAQDEFRAQKRGGRGIQGTGVNNDDFVRELVSTSTHDTVLFFTNLGRVYRLKAYEIPEYGRTAKGLPIVNLLKLDEGETIQTIINARKEDVANKYFFFTTQQGIVKRTSVSEFSNIRQNGLRAINLKENDELINVLLIDENEDVIIGTRTGYSVRFKVNAVRNMGRTATGVRGVNLREGDKVVGASRIVNGQEVLIITEKGYGKRTEASEYPTKGRGGKGIKTANITAKNGPLARLVTINGNEDIMVITDTGVIIRTNVANISQTGRSTMGVKVMRLDQEAKIVTVALVEQEIEDKSNIEDTKE

SEQ ID NO: 19953 - DNA, 741 bp, Streptococcus agalactiae; identical to SEQ ID NO: 15171

SEQ ID NO: 19954 - protein, 247 aa, Streptococcus agalactiae; identical to SEQ ID NO: 1798

SEQ ID NO: 19955 - DNA, 411 bp, Streptococcus agalactiae; identical to SEQ ID NO: 15173

SEQ ID NO: 19956 - protein, 137 aa, Streptococcus agalactiae; identical to SEQ ID NO: 1800

SEQ ID NO: 19957 - DNA, 798 bp, Streptococcus agalactiae
  misc_feature 789, 790, 791, 792, 793: n = A,T,C or G
atgagtattaaaaagctattgtttgcaggccttgcttttattttatttaccctagcgagtccagcatatgctgcatcagatgttcagaaagttattgatgaaacttatgttcaacctgattatgtcttaggttattcgctaaatcaagaacagcgtgcacagacattacaacttctgaattatgatgaatctagagacacgaaagttaaaacgctaaatactagctcatatgctaaaataatgaatatagctgatgatgcaagcatccaattatattcatctgtkaaaataaaaaaattagggtctaacgataccttagcagtaaacattgttacacctgagaatattactaaagttacagaagatatgtatcgcaatgctgcagttacattaggtattgagcatgcaacgatatcagtggctgctccaataaaagtaactggggagagtgctcttgcaggtatctattattcattagagaaaaatggagcaagtgtatcatcagaaaataaacaactagcacaagaagagttaagtactttatctggtattaatgctgagaataagggtaaggaaggttatgacgccgacaagcttaatgtagctttaacggatattaagtcagccgtagctaaaggaggatctgatctttcaaaagatgatattcgaaaaattgttgaggaaacattgaaaaattatcatcttgataacgctgtaacggaaaatcaaataaatttaattgttaattttgcagttaatctgtcacaaagtaatgtcatcaaaaatagnnnnnttaat

SEQ ID NO: 19958 - protein, 266 aa, Streptococcus agalactiae
  VARIANT 263, 264, 265: Xaa = Any Amino Acid
MSIKKLLFAGLAFILFTLASPAYAASDVQKVIDETYVQPDYVLGYSLNQEQRAQTLQLLNYDESRDTKVKTLNTSSYAKIMNIADDASIQLYSSVKIKKLGSNDTLAVNIVTPENITKVTEDMYRNAAVTLGIEHATISVAAPIKVTGESALAGIYYSLEKNGASVSSENKQLAQEELSTLSGINAENKGKEGYDADKLNVALTDIKSAVAKGGSDLSKDDIRKIVEETLKNYHLDNAVTENQINLIVNFAVNLSQSNVIKNXXXN

SEQ ID NO: 19959 - DNA, 1107 bp, Streptococcus agalactiae
  misc_feature 1102, 1103, 1104, 1105, 1106: n = A,T,C or G
atgcatattatcatycaaattacaatcattttgttggcaagcgttcttgcaactcttatttcaaaaagaattggaataccggckgttgttggacaactacttgtaggtatcatcatcggacctgcaatgctaggacttgttcatcaaaatcaggtattacatgtcttgtcagaaattggtgttatcttactcatgtttttagcgggtcttgaagctaattttgatcttttaaagaagtatcttaagcccagtctactggtcgcaattactggtgttattgttcctatggctctcttctacttcttgacacgcttgtttgggttccaaatcaatactgctatcttttacgggctcgtatttgctgcaactagtatttctatcacagttgaagttttacaagaatacaatcgtgtaaaaacagatactggtgctattattttaggtgctgctgttgctgatgatgtcttagctgttttgcttctgagtgtctttattgcaacaaatggaagctcttctaatatcggattacaaattatcattcaattgttattctttgttttcttatttatttgtatgaaataccttgtacctgctcttttcaaattaatcgaaaaggttcatttctttgagaaatatactattcttgctatccttatctgtttttctctatcaattttagccgataaagttggaatgagttctatcattggttcgttttttgcaggattagctattggacaaacttcttttgttgataaggtagaacataaaatttcacttcttagttacaccttctttatcccaattttcttcgcttcaattgcactacctcttaaattcgatggaatgatgtctcaccttcacacgatattaatctttactgctttggctgttttatcaaaattaattccagggtactttgtcggtcgaggctttaatttttcaaaattagaatctttaacaattggtggtggaatggtcagtcgtggcgagatggctctcattatagttcaagttggattagctgctaaaattatttcaagcactacttattccgagcttgttattgttgttatactatcaactattattgcggcatttnnnnnt

SEQ ID NO: 19960 - protein, 369 aa, Streptococcus agalactiae
  VARIANT 368, 369: Xaa = Any Amino Acid
MHIIIQITIILLASVLATLISKRIGIPAVVGQLLVGIIIGPAMLGLVHQNQVLHVLSEIGVILLMFLAGLEANFDLLKKYLKPSLLVAITGVIVPMALFYFLTRLFGFQINTAIFYGLVFAATSISITVEVLQEYNRVKTDTGAIILGAAVADDVLAVLLLSVFIATNGSSSNIGLQIIIQLLFFVFLFICMKYLVPALFKLIEKVHFFEKYTILAILICFSLSILADKVGMSSIIGSFFAGLAIGQTSFVDKVEHKISLLSYTFFIPIFFASIALPLKFDGMMSHLHTILIFTALAVLSKLIPGYFVGRGFNFSKLESLTIGGGMVSRGEMALIIVQVGLAAKIISSTTYSELVIVVILSTIIAAFXX

SEQ ID NO: 19961 - protein, 381 aa, Streptococcus agalactiae; identical to SEQ ID NO: 6713

SEQ ID NO: 19962 - protein, 127 aa, Streptococcus agalactiae; identical to SEQ ID NO: 880

SEQ ID NO: 19963 - protein, 387 aa, Streptococcus agalactiae; identical to SEQ ID NO: 6711

SEQ ID NO: 19964 - protein, 129 aa, Streptococcus agalactiae; identical to SEQ ID NO: 882

SEQ ID NO: 19965 - protein, 1560 aa, Streptococcus agalactiae
ATGACTGATATTTCTATATTGAATGATATCCAAAAAATTATCGTTCTAGATTACGGTAGTCAATATAACCAGCTTATCGCACGTCGTATCCGTGAATTTGGTGTATTTTCTGAGTTAAAATCACATAAAATTACGGCTGATGAAATTCGCGATATTAATCCTATTGGTATCGTACTTTCAGGTGGTCCAAATTCCGTATATGCTGATGGCGCTTTTGGAATCGATGAAGAAATTTTTGAATTAGGAATTCCAATCTTAGGAATTTGTTATGGCATGCAACTGATTACCCATAAACTCGGTGGTAAGGTTCTTCCTGCGGGAGAAGCTGGTCACCGTGAGTATGGTCAATCAGCACTTCGCCTACGCTCAGAATCAGCACTCTTTGCTGGCACTCCTCAAGAACAACTTGTTTTGATGAGCCATGGTGATGCTGTTACTGAAATCCCTGAGGGTTTCCATCTCGTTGGTGACTCTGTTGACTGTCCATTTGCTGCAATGGAAAATACTGAAAAACAATTTTATGGTATCCAATTCCACCCCGAAGTTCGTCACTCAGTATATGGCAATGATATCCTTAAAAATTTTGCTGTTAATATCTGTGGTGCACGTGGTGATTGGTCAATGGATAACTTCATTGATATGGAAATTGCAAAAATACGTGAAACTGTAGGCGATCGTAAAGTACTTCTTGGACTATCTGGCGGTGTTGATTCATCTGTTGTCGGAGTACTCCTACAACGTGCTATCGGTGATCAATTAACATGTATTTTTGTAGATCATGGTTTATTACGTAAAAATGAAGGTGACCAAGTTATGGATATGCTTGGTGGTAAATTTGGACTTAATATTATCCGTGTTGATGCTTCAAAACGCTTCCTAGATCTTCTTTCTGGTGTTGAAGATCCCGAGAGAAAACGAAAAATCATCGGAAATGAGTTCGTGTACGTTTTTGATGATGAGGCAAGTAAACTTAAAGGCGTTGATTTCCTTGCTCAAGGTACCCTCTACACAGATATTATTGAATCTGGGACAGAAACAGCCCAAACAATCAAGTCACACCATAATGTTGGTGGATTGCCAGAAGATATGCAATTTGAATTGATTGAGCCACTTAACACATTATTCAAAGATGAGGTTCGCGCTCTTGGTACTGCACTTGGAATGCCTGATGAAGTTGTATGGCGTCAACCATTCCCTGGGCCTGGTCTTGCTATTCGCGTTATGGGTGAAATTACCGAAGAAAAACTTGAAACAGTCCGCGAATCAGATGCTATTCTTCGTGAAGAAATCGCTAAAGCTGGTCTAGATCGTGACGTATGGCAGTATTTCACAGTTAATACTGGCGTACGTTCTGTCGGTGTTATGGGAGATGGTCGTACTTATGACTATACAATTGCTATCCGTGCAATTACTTCAATTGATGGCATGACAGCTGACTTTGCGCAACTTCCTTGGGATGTACTTAAGAAAATTTCGACACGTATTGTTAACGAAGTTGATCACGTTAACCGTATTGTTTATGATATTACAAGTAAACCACCTGCAACTGTTGAGTGGGAA

SEQ ID NO: 19966 - protein, 520 aa, Streptococcus agalactiae; identical to SEQ ID NO: 1812

SEQ ID NO: 19967 - protein, 696 aa, Streptococcus agalactiae; identical to SEQ ID NO: 10685

SEQ ID NO: 19968 - protein, 232 aa, Streptococcus agalactiae; identical to SEQ ID NO: 1814

SEQ ID NO: 19969 - protein, 1332 aa, Streptococcus agalactiae
ATGTCTCAATCTTACATTAATGTTATCGGCGCTGGTTTGGCTGGTTCTGAAGCAGCTTATCAAATTGCTAAACGTGGAATACCAGTTAAGCTTTATGAAATGCGTGGGGTTAAATCAACCCCTCAACATAAAACAGATAATTTTGCAGAATTAGTATGTTCCAATTCATTCCGCGGTGATTCTCTAACAAATGCAGTTGGTCTTTTAAAAGAAGAAATGCGTCGTTTGGATTCTATCATTATGAGAAATGGGGAGGCACATCGAGTTCCAGCAGGTGGAGCCATGGCCGTTGATAGAGAAGGTTATTCTGAAGCTGTTACTGAGGAAATCCATAAACATCCATTAATCGAAGTAATTCGTGATGAAATCACAGATATCCCTGGAGATGCTATTACAGTTATCGCTACAGGACCATTAACAAGTGATAGTCTGGCAGCTAAAATCCATGAACTTAATGGTGGTGATGGTTTTTATTTTTACGATGCCGCCGCTCCAATTGTCGATAAAAATACGATTGACATGAATAAAGTTTACCTTAAGTCTAGGTATGACAAAGGTGAAGCAGCTTATCTAAATTGTCCAATGACCAAAGAAGAATTTATGGCTTTTCATGAAGCTTTAACTACAGCTGAGGAAGCACCACTAAATTCTTTTGAGAAAGAAAAATACTTCGAAGGTTGTATGCCTATCGAAGTGATGGCTAAGCGTGGTATTAAAACGATGCTTTATGGTCCAATGAAACCAGTTGGTTTGGAGTATCCTGAGGACTACAAAGGACCGCGAGATGGTGAATTTAAAACACCATATGCTGTTGTTCAATTACGTCAAGATAATGCTGCAGGCTCTCTTTATAACATAGTTGGTTTCCAAACTCATCTTAAGTGGGGAGAACAAAAACGTGTATTTCAAATGATTCCTGGTCTTGAAAATGCTGAATTTGTCCGGTATGGTGTTATGCATCGCAATTCTTATATGGATTCACCAAATCTTTTAAACCAAACCTTTGCTACACGTAAGAACCCAAATCTTTTCTTTGCTGGACAAATGACCGGTGTTGAAGGTTATGTAGAATCGGCAGCAAGTGGTCTTGTAGCGGGAATTAATGCTGTCCGTCGCTTCAATGGGGAGAGTGAAGTAGTTTTCCCACAAACTACTGCTATTGGTGCACTGCCACATTATATTACACATACAGACAGCAAACATTTCCAACCAATGAATGTTAACTTTGGTATCATCAAAGAATTAGAAGGTCCACGAATTCGTGATAAGAAAGAGCGTTATGAAGCTATTGCTACACGAGCTTTGAAAGATTTAGAAAAATTTCTCAACTAT

SEQ ID NO: 19970 - protein, 444 aa, Streptococcus agalactiae; identical to SEQ ID NO: 15236

SEQ ID NO: 19971 - DNA, 741 bp, Streptococcus agalactiae
atgcactataaagaattacttgagtcatccgaaaaagcttatttggaaactaatcggtataaacattttaagaatataatcacttcagagcgttatttttcaaactatattagctacaaaataatgcctacagtaagtgagtttttacaggatatgatctatttagcagatgaacaaaaagattatcagtctgattttgcttttgtattttttgaggaaaatgctgaattgagcagtgaattacagagaactttatcacaacaaggctttgaatcagagaaacatatcatatttacaaattcattaaatcatcttaaactttttgaaaaagaatttgatgacatcacatttactaaacttaatgaaaattacctagaaaaatacctaaagttcaaatataaacaaagtatagtttacggagaaatttacgctaagcaaatgtataatgataatcgtgttaatcttttaaataataatgctaaagtttacctagctattaaagataatcaaattattggagatgtaacagcttgggactatggtgaatacgtggaaatagatgatttttatgtccaagagtcctacagaggacaaggaattggtacgcgcctacaatttgatgcaagtagggggtttaagaaagttatcttaatttcagaagaagaaaacagaaaaatgtatgagcaccaaggttatgaggaagtcgcctattattggaccgctttacggagccctcgaaag

SEQ ID NO: 19972 - protein, 247 aa, Streptococcus agalactiae; identical to SEQ ID NO: 15238

SEQ ID NO: 19973 - DNA, 846 bp, Streptococcus agalactiae
atgaaaatcaaaaagctattagggttaacgacaacagtagtaatttcagcacttattttaggagcctgtggtcagtctaaaaatgaagacgccaaagtcgttagagttggaacaatggtaaagagtaaaactgaaaaagctcgttgggataaaatcgaagaattagttaagaaaaaaggcgttaagctaaaatttacggaattcacagattatacacaacctaataaagctttagaaagtgatgagattgatattaatgctttccagcattataattacttaaacaattggaataaagcaaataagaccaatcttgtttccgttgctgagacatactttacttcctttagattatactctggtactaagaacggtaaaggtaaataccaaacagtttctgaaattccaaataaagcaactattactatcccaaacgatgcagttaacgaaagtcgctctctctacttgttacaatcagcaggcttgctaaaattgaaagtatcaggtgatacattagcaacaatgtcagatgttgtttccaatcctaaatctttagatttaaaagaagtagatgcagcacagaccgcacgttctttggattccacagatgcagcagttattaataatgattttgtgacagaagcaggaataaatcctaaatcagctatttttattgaaccaaaaagtaaaaatgcaaaacaatggtacaaccttttagttgctcaaaaaggttggcaagacaaatcaaaagctaaagccattaaagaagttgtgaaagcttaccatacagatgcggttaaaaaagttatcgaaaaaacatctcaaggtttagatcaacctgtttgg

SEQ ID NO: 19974 - protein, 282 aa, Streptococcus agalactiae; identical to SEQ ID NO: 6338

SEQ ID NO: 19975 - DNA, 486 bp, Streptococcus agalactiae
atggccaagacaagtaaaaaattgacaaaatctttagggcctattggtaaattaatttcaataatccctgacacaactgaacttattggaaaagcaattgataattctcgtccaattattgaaaaagaacttgaccgtcgtcatgaaaaaaaacagacttatactcagcttgataatgtagtacaccttgatatcaatgatgcgcaagtttacttagagcaacgccattttaatgtatcaaggattgttgctgaaccaaattcaaagtgggcaaccctacatcctaatcaagttgtgaatatgtcgcctaaagctggtagggtcagaatcggttcattagtgaagttgtactatattacagaggatatccttgaagaaagtaagacactacttttatctaaatccgaaaaaagtaaagcacgacaacaacggttaacagaagtattgagtacccctagtcaattactcaaaaaaaatcgaaataaa

SEQ ID NO: 19976 - protein, 162 aa, Streptococcus agalactiae; identical to SEQ ID NO: 1822

SEQ ID NO: 19977 - DNA, 960 bp, Streptococcus agalactiae
atgcggcgaaaaatagttttactttttgtagttccaatgcttatagttttaggaattttaggagtggtagttcattattatggttcagcattaaatatttatctattacctcctagtagcgaacgttatggacgtgttattttagatcgtgttgaacagcgtggtttgtattcgcaaggtcgtcaatggcaaattataagacaacgatcagaaaaaaagttgaaaacgtcaaaatcttaccaagagagtcgcaacattgtacaggaagcagtacggtatggaggcggtaaacatagtcaaatattatccaaagagactgtacgaagagataccctagatagtcgatatccagaatatcgaagattaaacgaagacattctcttaattactattccttctataagtaagttagataaacgatctattagccattatagtggtaaattacaaaatatattgatggaaaaaagttataagggactcattttagacttatcgaataatactggcggcaatatgatccctatgattgggggggtagcctctattttaccaaatgataccctatttcattatactgataagtatggaaataagaaaacaatcacgatgaaaaatataccgctagaagcattaaaaatatctaggaaaacaatcaatactaagcatgttccaatcgctattataactaatcataaaactgctagttcggcagaaatgacttttttatcatttaaaggattacctaatgttaaaagctttggtcaagctacagcaggatatacgactgttaatgaaactttcatgctttacgacggtgctagattagctttaactacaggaatagttagtgatcgacaaggatataaatacgagaacacccctatcttaccagatcaagtaaccagccttcctttacaagagtcacagtcttggttaaagagtagaatcaatcaaaat

SEQ ID NO: 19978 - protein, 320 aa, Streptococcus agalactiae; identical to SEQ ID NO: 1824

SEQ ID NO: 19979 - DNA, 750 bp, Streptococcus agalactiae
atgttattagaaatcaatcacttagaaaaagtttttcgtacacgtttttcaaaagaagagacaagggctctacaagacgtcgattttaaagttgaacaaggggaattcattgctattatgggagagtctggttcgggaaaaacaactctgctaaatattttagctactttagaaaaaccgacaaatggacaagtgattttaaatggggaagatattacgaaaattaaagaggcaaaattagcgagttttcgtttgaaaaatcttggtttcgtctttcaggacttcaaccttttggatactctctctgtaagagataatatctatcttcctttagttcttgatcgtaaacgttacaaagaaatggatcatcgtttgtcagaattatcttctcatctgagaattgatgacttattagataagagacctttcgagctctctggtgggcaaaagcaacgtgtagcgattgctcgtagtttgataaccaaccctcaaattttattagcagatgaaccaacagcagcgttagattaccgtaattcagaagacttgctgaatttatttgaaactattaacttggatggacaaactattttgatggtaacccattcagcaaatgctgctagtcatgccaaacgcgttttatttatcaaagatggacgtatttttcaccaactttatcgtggtaataagaataatagcgaattcaataaagatatttctttaacaatgtctgccatattagggggtgaa

SEQ ID NO: 19980 - protein, 250 aa, Streptococcus agalactiae; identical to SEQ ID NO: 1826

SEQ ID NO: 19981 - protein, 1949 aa, Streptococcus agalactiae
ATGTTTTATCTCAAAATAGCCTGGCATAATTTAAAACATTCTATAGACCAGTACATACCATTCCTCTTAGCCAGTTTATTACTTTATTCATTGACTTGTTCTACGCTACTAATCTTAATGAGTGCTGTTGGAAGAGATATGGGGACAGCGGCAACGGTTCTTTTTCTTGGAGTGATTGTTTTGTCAATCTTTGCGGTAGTCATGGAACATTATAGCTACAATATCTTGATGAAACAGCGTAGTAGTGAATTTGGACTGTATAACATTTTGGGGATGAATAAACGTCAAGTTGCGCGTGTAGCTAGTCTAGAGCTGTTTATTATTTATATATTTCTTATTTCTATAGGAAGTCTGTTTAGTGCTTTTTTTGCTAAATTTATTTATTTAATTTTTGTCAACATTATTAACTATCATGCACTAAATCTTAGTTTAAGTTTATGGCCATTTATTATTTGTATCGTTATATTACAGGTATTTTTCTGACTTTAGAAGTTCCAGTTATTCGACATGTTCATTTATCATCCCCATTAAGTCTTTTTAGAAAGAAACAACAGGGAGAAAAAGAACCAAAAGGTATCTTATACTTGCAATTTTAGCGTTAGTAGCTATCGCCATCGCTTATACAATGGCTCTTACTTCAGGTAAAGCACCTGCATTAGCTGTTATCTATCGTTTCTTCTTTGCAGTACTTTTAGTTATTGCTGGTACTTATCTTTTTTATATTAGTTTTATGACATGGTACTTAAAGGTTGCGTCAAAACAAGCATTATTATTATAAATCTGAGCATTTTGTATCAACTTCGCAAATGATTTTTCGAATGAAGCAAAATGCAGTAGGGTTAGCAAGTATCACTTTATTAGCTGTTATGGCTCTAGTTACTATTGCTACAACAGTCTCACTTTATTCAAATACACAAAATGTTGTTACCGGACTATTTCCAAAATCAGTAAGTTTATCAATAGATAATTCAAAAGGTGACGCGAAAAATATATTTGAAGAAAAGATTTTGAAGAAACTAGGTAAGTCATCTAAGGAAGCTATCACTTATAATCAGACAATGATTTCGATGCCAGTTAGTCAATCAAGTGAACTTAATATCACATCTAAAAACGTCAAACATGTTGATATCACAAAAACGGGTTTTATGTACCTAATTACTCAGAATGATTTCCGTCGTTTAGGTCACCAATTACCAAAATTAAAAGATAACCAAGTGGCTTACTTTGTTCAAAAAGGTGATAGCCGTTTGAAAAAAATAAATCTATTGGGAAATAAATTTGACGTTGTAAAAAATTTAAAAGAGGCTTATGTCCCAGAGACTACAAATACTTACAACCCGGGTTTGATTATATTTGCAAACAACAAACAAATTGACAATATTAGAAAAGCATATTTACCTTATACTAAGAACATCAATACTTTTCCAAAAACCTTTAAGGCATATTTGGATTTGAATAGTCAAGAGATAAATTCAATTTCTAAAAACGACATAATAGAGGTAGATGGTAAGTATGTTGGAAATATTAGCACTAAACAGAGTTTTCTAAAAGAAGGTTATCAAATGTTTGGTGGGTTATTATTTACTGGATTTCTGTTAGGTATAAGCTTTTTGCTAGGTATAGCTCTAATTGTTTACTATAAGCAATACTCAGAAGGTCATGAAGATAAGAGATCTTATCGTATCTTACAAGAAGTAGGTATGAGCAAAAAATTAGTTAAACGGACTATTAATTCTCAAATTATGATTTTCTTCTTCCAACCTTTAGTGGTAGCAGTTATTCACTTTGGAGTTGCTATTCCAATGCTAAAACAGATGCTTTTGGTATTTGGGGTGCTTAACTCAACAATCGTATATGTAGTAAGTGGTTTGACAGTACTTGCGATTTCTATAATTTACTTTATCATTTACCGTATAACTAGTCGAACTTATTATCATATTATTGAACGC

SEQ ID NO: 19982 - protein, 651 aa, Streptococcus agalactiae
  VARIANT 193, 250: Xaa = Any Amino Acid
MFYLKIAWHNLKHSIDQYIPFLLASLLLYSLTCSTLLILMSAVGRDMGTAATVLFLGVIVLSIFAVVMEHYSYNILMKQRSSEFGLYNILGMNKRQVARVASLELFIIYIFLISIGSLFSAFFAKFIYLIFVNIINYHALNLSLSLWPFIICIVIFTGIFLTLEVPVIRHVHLSSPLSLFRKKQQGEKEPKGXLILAILALVAIAIAYTMALTSGKAPALAVIYRFFFAVLLVIAGTYLFYISFMTWYLXRLRQNKHYYYKSEHFVSTSQMIFRMKQNAVGLASITLLAVMALVTIATTVSLYSNTQNVVTGLFPKSVSLSIDNSKGDAKNIFEEKILKKLGKSSKEAITYNQTMISMPVSQSSELNITSKNVKHVDITKTGFMYLITQNDFRRLGHQLPKLKDNQVAYFVQKGDSRLKKINLLGNKFDVVKNLKEAYVPETTNTYNPGLIIFANNKQIDNIRKAYLPYTKNINTFPKTFKAYLDLNSQEINSISKNDIIEVDGKYVGNISTKQSFLKEGYQMFGGLLFTGFLLGISFLLGIALIVYYKQYSEGHEDKRSYRILQEVGMSKKLVKRTINSQIMIFFFQPLVVAVIHFGVAIPMLKQMLLVFGVLNSTIVYVVSGLTVLAISIIYFIIYRITSRTYYHIIER

SEQ ID NO: 19983 - protein, 666 aa, Streptococcus agalactiae; identical to SEQ ID NO: 10703

SEQ ID NO: 19984 - protein, 222 aa, Streptococcus agalactiae; identical to SEQ ID NO: 1830

SEQ ID NO: 19985 - protein, 441 aa, Streptococcus agalactiae
GTGATTACGCTTATTTTAATATTAGACTTCCTGCGAAACAAAATATGGTACAATAGTTCTATGAATTATGAAGCAAGCAAACAATTAACTGATGTACGATTTAAGCGCCTTGTTGGTGTTCAGCGCACTACTTTTGAAGAGATGTTAGCTGTGTTAAAAACAGCTTATCAACGTAAACACGCAAAAGGTGGCCGAACCCCTAAGTTAAGCTTAGAAGATCTCCTCATGGCTACTCTTCAATACATGCGAGAATACCGCACTTATGAACAAATTGCGGCTGATTTTGGCATTCACGAAAGCAACTTAATCCGTCGAAGTCAATGGGTTGAATCAACTCTTATTCAAAGTGGTTTTACGATTTCAAAAACTCATCTTAGTGCTGAGGATACGGTGATTGTGGATGCAACAGAGGTAAAAATCAATCGTCCTAAAAAAATCAAC

SEQ ID NO: 19986 - protein, 147 aa, Streptococcus agalactiae
MITLILILDFLRNKIWYNSSMNYEASKQLTDVRFKRLVGVQRTTFEEMLAVLKTAYQRKHAKGGRTPKLSLEDLLMATLQYMREYRTYEQIAADFGIHESNLIRRSQWVESTLIQSGFTISKTHLSAEDTVIVDATEVKINRPKKIN

SEQ ID NO: 19987 - protein, 387 aa, Streptococcus agalactiae; identical to SEQ ID NO: 6711

SEQ ID NO: 19988 - protein, 129 aa, Streptococcus agalactiae; identical to SEQ ID NO: 882

SEQ ID NO: 19989 - protein, 597 aa, Streptococcus agalactiae
ATGATAAAGATGTGGTCGCACCAAATGAAAGTTCCATTGGCAGCTATTTCATTAATGGCCCAGACAAATCATCTCGATCCTAAGGAAGTTGAACAACAATTATTGAAATTGCAACATTATCTTGAAACGTTGTTAGCATTTTTGAAATTTAGACAATATCGTGACGATTTTCGTTTTGAAGCTGTTAGCCTTAGAGAAGTAGTAGTAGAAATTATAAAATCGTATAAGGTTATTTGTCTATCCAAAAGCTTATCTATCATAATTGAAGGCGATAATATCTGGAAAACAGACAAAAAGTGGTTAACTTTTGCTCTTTCACAGGTGCTAGATAATGCCATAAAATATTCTAATCCTGAGTCAAAGATAATAATAAGCATAGGAGAAGAGAGTATTAGAATACAAGACTACGGTATCGGCATACTCGAAGAAGATATCCCTAGACTTTTTGAAGATGGCTTTACGGGTTACAACGGTCATGAGCACCAAAAGGCAACAGGCATGGGGTTATATATGACAAAAGAAGTCTTATCTAGTCTGAATTTGTCCATTTCGGTGGATAGCAAAATTAATTATGGGACTGCTGTTTCTATACATAAA

SEQ ID NO: 19990 - protein, 199 aa, Streptococcus agalactiae
MIKMWSHQMKVPLAAISLMAQTNHLDPKEVEQQLLKLQHYLETLLAFLKFRQYRDDFRFEAVSLREVVVEIIKSYKVICLSKSLSIIIEGDNIWKTDKKWLTFALSQVLDNAIKYSNPESKIIISIGEESIRIQDYGIGILEEDIPRLFEDGFTGYNGHEHQKATGMGLYMTKEVLSSLNLSISVDSKINYGTAVSIHK

SEQ ID NO: 19991 - DNA, 1068 bp, Streptococcus agalactiae
atgaaacgtgaattactactcgaaaaaatcgatgaactaaaagaaattatgccttggtatgttctagaatattatcaatcaaagctttctgttccttatagtttcacaacactctacgaatatttaaaagaatatagacgttttcttgaatggttattggattctggtgttgctaattgtcatcacattgcagaaattgagctttcagttttagaaaaccttactaaaaaagatatggaagcttttatactatatttacgagaacgccctttattaaatgctaacacaaggcaaaatggggtgtctcaaaccactattaacagaactctatctgccttatctagtcttttcaaataccttactgaagaggttgagaatgctgacggggagccttacttttatcgcaatgtcatgaaaaaagtctcaaccaaaaagaaaaaggaaactttagcttctcgggcagaaaatattaaacaaaagttatttttgggcaatgaaacgatagaattcttagagtatatagattgtgaatatcaaaacaaactttccaaacgtgctttagcttttttcaacaaaaataaagagagagatttagctattattgctttgctactagcttcaggagtgcgtctatctgaggcagtaaacttagatttaaaggatattaaccttaatgtaatggttattgatgtcacacgaaaaggggggaaaagggactctgtcaatgtcgctagctttgcgaagccctaccttgctaattatttagacatccgtaaaaatagatacaaagcagaaaatcaggacattgctctatttttatcagaataccgtggggtgccaaatcgtattgatgcttcaagtgtagagaaaatggttgctaagtattcccaggattttaaggttcgtgtaacacctcataaactaaggcatactcttgctactaggctatatgatgctacaaaatctcaagtattagttagccaccaactaggtcatgcttccactcaagttactgacctatatacccatattgttaacgatgaacaaaagaacgctttagataaacta

SEQ ID NO: 19992 - protein, 356 aa, Streptococcus agalactiae; identical to SEQ ID NO: 1834

SEQ ID NO: 19993 - DNA, 1659 bp, Streptococcus agalactiae
atgtctagttttaatagaaaaaaacttaagtttttgggtatatctttggcgactctaacagccaccacagttaccctggttgcctgtggtaatgagtcaaagaactctggagataataaagttattaattggtatattcctactgaaatcagtacattggacatttcaaagaatacagatgcttattcaaacttagctataggtaattcaggcagcaatttacttagaattgataaagagggcaaaccaaaacccgatttagctaaaaaagtatccgtttcttctgatggtcttacttatactgctacacttcgtgataatttaaaatggtcagatggaagcaaactaagcgctgaagattttgtttacacatggcggagaatagttgatcctaaaactgcatctgaatatgcttacttggcgacagaatcgcaccttttaaatgctgataagattaattctggagatattaaagatttaaataaacttggtgtaacagctaaaggcaatcaagtgacctttaaattgacaagtccatgccctcaatttaaatattatttagccttctctaattttatgcctcaaaaacaatcgtatgttgaaaaagttggtaaagattatggtacaacatcaaaaaatcaaatttactcaggtccttaccttgttaaggattggaatggttcaaatggtaaatttaaattagtcaaaaataaatattattgggattctaaacatgttaaaacaaatagtgtcatagttcaaactatcaaaaaaccagatactgcagttcaaatgtacaagcaaggtcagattgattttgctgaaatatcaggaacttctgctatttatcaagctaataaaaataataaagatgtagtagatgcgtctgatgcacgtactacatatattatttataaccaaactggttcggttaaagcattgacaaatcagaaaattaggcaagctttgaatttagcgactgatcgtaaaggtgttgttaaagcggcagttgatacaggttcaactcctgctgaatctctggtccctaaaaaattagccaaattacctaatggtgaggatctttccaagtatactgccccaggttatacgtataatacaagtaaagctcaaaaactttttaaagaaggtcttgctgaggttggtcagtcatctctcaagttaacaatcacagctgattcggactctccagcagctaaaaatgctgttgactatgtgaaatctacatgggagagtgctttgcctggtctaactgttgaagaaaaatttgttactttcaagcaacgccttgaagatgcaaaaaatgaaaattttgatgtcgtgctcttctcatggggaggagattatccagaaggatcaactttctatgggttattcacgactaattctgcgtataattatggtaaattttcttctaaagagtatgacaatgcctatcaaaaggcaattactactgacgccttgaaaccaggagatgccgctaatgattacaaaactgctgaaaaagctttatttgatcaatcatattataacccagtttattacctagggaaaaaaggactccaaaattctaaattaaaggggttggtaagaaattcaactggtttgaatgttgattttacttatgcttataagacagaa

SEQ ID NO: 19994 - protein, 553 aa, Streptococcus agalactiae; identical to SEQ ID NO: 10710

SEQ ID NO: 19995 - DNA, 771 bp, Streptococcus agalactiae
atgatttctgattttttaagggataatccaatcctaactttattattttgtgcacattttttagctgactttcagtggcaaagtcaatccttagcagatagtaaatcacatagttggaggggactctggagacatctcttgattgttttcctccccctagcagctttaatgatattgataccagaaactactttgttaaatttaagcatatggggaagtcatattgttattgatagtataaagaaattgagttacccttgggtagaggaagggcatttccaaaaagcagcttttattatagaccaactagcccactatacttgcattatcgttttttaccatgcgcttcctacatatttaccgcctaatcattggcttttgcctatcaagcactttattgtcatagctctggtttttatcattatcaccaaacccattaatattgtgtttaaaattttctttaataaatttcaagctaaagaattatcatcattattaacacaagaaaaaacaaaaataatgaaagaaaaatctgaagatcatgaagaaacaattgaaggagcaggagctatgattggtaatttagagcgtctaattatggctatattactaatctcaggacagtatgctgctataggtcttgtttttactgcaaaatccattgcacgttacgataaaatttctaaaagtcaggtttttgccgaatattatttaattggatcattgttctcaattataagtgttttgataactcattggttacttttggta

SEQ ID NO: 19996 - protein, 257 aa, Streptococcus agalactiae; identical to SEQ ID NO: 1838

SEQ ID NO: 19997 - DNA, 684 bp, Streptococcus agalactiae
atgtatttagcattaatcggtgatatcattaattcaaaacagatacttgaacgtgaaactttccaacagtcttttcagcaactaatgaccgaactatctgatgtatatggtgaagagctgatttctccattcactattacagctggtgatgaatttcaagctttattgaaaccatcaaaaaaggtatttcaaattattgaccatattcaactagctctaaaacctgttaatgtaaggttcggcctcggtacaggaaacattataacatccatcaattcaaatgaaagtatcggtgctgatggtcctgcctactggcatgctcgctcagctattaatcatatacatgataaaaatgattatggaacagttcaagtagctatttgccttgatgatgaagaccaaaaccttgaattaacactaaatagtctcatttcagctggtgattttatcaagtcaaaatggactacaaaccattttcaaatgcttgagcacttaatacttcaagataattatcaagaacaatttcaacatcaaaagttagcccaactggaaaatattgaacctagtgcgctgactaaacgccttaaagcaagcggtctgaagatttacttaagaacgagaacacaggcagccgatctattagttaaaagttgcactcaaactaaagggggaagctatgatttc

SEQ ID NO: 19998 - protein, 228 aa, Streptococcus agalactiae; identical to SEQ ID NO: 1840

SEQ ID NO: 19999 - DNA, 1563 bp, Streptococcus agalactiae
atggctttcgaaagtttaacagagcgcctgcaaggagtttttaaaaatattcgtggtaagaaaaagttatctgaaaaagatgtgcaagaagtcaccaaggagattcgtctagctcttttagaagctgacgttgctcttccagttgttaaaacctttattaaacatgttcgtgaacgtgctgttggacatgaaatcattgatacactagatcctacgcaacaaattgttaagattgtcaatgaagagctaacagatttattaggggctgagacctctgaaattgaaaaatcccctaaaattccaaccatcattatgatggttggtctacaaggtgctggtaaaacaacttttgccggtaagttagcaaacaaactaatcaaagaagacaatgctcgtcctatgatgatagcagctgatatttatcgaccagctgctattgatcagttaaaaacccttggtagccagattaatgttcctgtctttgatatgggaactaaccattcagcagttgagattgtcactaaaggtttagaacaggctcgtgaaaatcgtaatgactatgttcttattgatacagccggacgcctacaaattgatgcaacccttatgcaggaattgcatgatgtcaaagccatagctcaacctaatgaaatactccttgtcgttgacagcatgattggacaggaagctgcaaatgtcgctgaagaatttaaccgtcagctcagcattagtggtgttgttctgacaaagattgacggtgatacacgcggtggtgctgccctttcagtacgcgaaattactggaaaaccaattaaatttacagggacaggggaaaaaatcactgatattgaaactttccatcccgatcgtatggcaagccgtatattggggatgggagacctgctaacacttattgagcgcgctagtcaagaatacgacgaaaaacgttcaatggaattagcggagaaaatgcgtgaaaacacctttgacttcaacgattttattgatcaattagatcaagttcaaaatatggggccaatggaagatctccttaaaatgcttccaggaatggctaacaatccagcaatgaaaaacttcaaagtggatgaaaacgaaattgctcgcaaaagagccattgtgtcatcaatgactccagaagagagagaaaatccagatctcctcaatccaagtcgtagacgtcgtattgctgctggatcaggtaatactttcgttgatgttaataaattcattaaagattttaaccaggcaaaacaaatgatgcaaggcgtgatgtccggtgatatgaataaaatgatgaaaaaaatgggaattgatcctaataacctccctaaagatatgcctggaatggacggaatggatatgtctaatttagaaggtatgatggggcaaaatggcatgcctgacttatctagtttaggtggcgatatggacttcagccaaatgtttggtggtggcttaaaaggaaaagtaggagcctttgcagctaaacaatcaatgaaacgtatggctaataaaatgaagaaagctaagaagaaacgcaaa

SEQ ID NO: 20000 - protein, 521 aa, Streptococcus agalactiae; identical to SEQ ID NO: 1842

SEQ ID NO: 20001 - protein, 330 aa, Streptococcus agalactiae; identical to SEQ ID NO: 10717

SEQ ID NO: 20002 - protein, 110 aa, Streptococcus agalactiae; identical to SEQ ID NO: 1844

SEQ ID NO: 20003 - protein, 1311 aa, Streptococcus agalactiae; identical to SEQ ID NO: 6365

SEQ ID NO: 20004 - protein, 437 aa, Streptococcus agalactiae; identical to SEQ ID NO: 6366

SEQ ID NO: 20005 - protein, 678 aa, Streptococcus agalactiae; identical to SEQ ID NO: 6367

SEQ ID NO: 20006 - protein, 226 aa, Streptococcus agalactiae; identical to SEQ ID NO: 1848

SEQ ID NO: 20007 - protein, 2547 aa, Streptococcus agalactiae; identical to SEQ ID NO: 10723

SEQ ID NO: 20008 - protein, 849 aa, Streptococcus agalactiae; identical to SEQ ID NO: 1850

SEQ ID NO: 20009 - protein, 651 aa, Streptococcus agalactiae; identical to SEQ ID NO: 6371

SEQ ID NO: 20010 - protein, 217 aa, Streptococcus agalactiae; identical to SEQ ID NO: 1852

SEQ ID NO: 20011 - protein, 555 aa, Streptococcus agalactiae; identical to SEQ ID NO: 6373

SEQ ID NO: 20012 - protein, 185 aa, Streptococcus agalactiae; identical to SEQ ID NO: 1854

SEQ ID NO: 20013 - protein, 801 aa, Streptococcus agalactiae; identical to SEQ ID NO: 10729

SEQ ID NO: 20014 - protein, 267 aa, Streptococcus agalactiae; identical to SEQ ID NO: 1856

SEQ ID NO: 20015 - protein, 884 aa, Streptococcus agalactiae
ATGAACGCTAAAAAGGCTGACAAATTAGCAACTACAATACTCTATAGTATTGCAGCTATCATCGTTACAATCCTCGCCTCTCTTTTAATTTTTATTCTTGTTCGCGGATTGCCACACGTATCTTGGTCATTTTTAACTGGGAAATCATCATCATATGAAGCAGGAGGCGGTATTGGAATACAATTATACAATTCCTTTTTCCTACTTATTGTTACTCTGATTATTTCTATTCCTCTATCTTTAGGAGCTGGAATATACCTCTCAGAATATGCTAAAAAAGGACGTTTAACAAACTTTGTTAGAACATGTATCGAAATTTTGTCATCTCTTCCTTCTGTTGTAGTTGGTCTGTTTGGTTACCTAATCTTCGTTGTTCAATTTCATATGGCTTCTCAATTATCTCAGGTGCCTTAGCACTTACTGTTTTTAACTTACCCCAAATGACACGTAGTGTTGAAGATAGCCTTCAAAATGTACACCACACACAGCGTGAAGCAGGATTGGCCCTAGGTATTTCTCGTTGGGAAACGGTCATTTACGTCGTTGTCCCTGAAGCTCTGCCAAGTATTGTAACTGGTGTTGTGCTAGCTTCAGGACGTATTTTCGGTGAGGCAGCAGCACTTATTTATACAGCTGGTCAATCTGCTCCAGCACTTGATTGGTCAAATTGGAACGTCCTTAGTGTTACAAGTCCAATCTCAATTTTCCGTCAAGCAGAAACTTTAGCTGTTCATATTTGGAAAGTTAATAGCGAAGGGACAATCCCTGATGCAACACAAGTATCTGCCGGTAGCGCCGCAGTCTTATTGGTTGTTATTCTTATTTTCAACCTTTCAGCTCGCTCGATCGGTAAGAAACTTCATTCGAAATTAACCTCGTCTAAT

SEQ ID NO: 20016 - protein, 295 aa, Streptococcus agalactiae; identical to SEQ ID NO: 1858

SEQ ID NO: 20017 - protein, 915 aa, Streptococcus agalactiae; identical to SEQ ID NO: 6379

SEQ ID NO: 20018 - protein, 305 aa, Streptococcus agalactiae; identical to SEQ ID NO: 1860

SEQ ID NO: 20019 - protein, 440 aa, Streptococcus agalactiae
GTGGGAGGACAAGATTTAGATATTTCCATCATCAATCGAGCAGCAAGTTCTGGATCCCGTGCAACCTTCGATAATACTATTATGGGAAATGTTGCTCCTATTCAAAGCCAAGAACAAGATTCAAATGGTATGGTGAAATCAATTGTTTCTCAAACACCTGGTGCGATTTCATACTCGCTTTTGCATACGTTGATAAATCTGTCGGAACATTAAAACTAAATGGTTTTGCGCCAACAGCTAAAAATGTTACTACCGACAACTGGAAACTTTGGTCATATGAACATATGTATACAAAAGGTAATGAAACAGGTCTAACAAAAGAATTCTTAGACTACATGAAAAGTGATAAAGTTCAAAGTAGTATCGTACAACATATGGGATATATCTCTATTAACGACATGAAAGTTGTTAAAGATGCTGAAGGTAAAGTAACCCCAAAA

SEQ ID NO: 20020 - protein, 147 aa, Streptococcus agalactiae
  VARIANT 59: Xaa = Any Amino Acid
MGGQDLDISIINRAASSGSRATFDNTIMGNVAPIQSQEQDSNGMVKSIVSQTPGAISYXAFAYVDKSVGTLKLNGFAPTAKNVTTDNWKLWSYEHMYTKGNETGLTKEFLDYMKSDKVQSSIVQHMGYISINDMKVVKDAEGKVTPK

SEQ ID NO: 20021 - protein, 113 aa, Streptococcus agalactiae
ATAAAGACCATCAAGTCGCAGTAGCTGGATTAGCTGTTATGTAATAAAAAAGTTAATGTTAAAAATCTAACCACCCACCAACTTCGTGATATTTTGCAGGAAAAATCAAGAAT

SEQ ID NO: 20022 - protein, 39 aa, Streptococcus agalactiae
MKDHQVAVAGLAVIVNKKVNVKNLTTHQLRDIFAGKIKN

SEQ ID NO: 20023 - protein, 291 aa, Streptococcus agalactiae
ATGAAAAAAAACATTTTTTTGTTAACCTTGCTAGCCACCGTCTTATTGACGCTGTCTGGTTGTGCTAATTGGATTGATAAAGGTCAATCAATCACCAGCGTTGGTTCAACCGCCTTACAGCCACTTGTAGAAGCTGCAGCAGATGAGTTTGGTAAGACAAACCTCGGTAAGACTATCAATGTCCAAGGAGGAGGCTCAGGAACAGGCTTATCACAAGTACAGTCTGGAGCTGTTCAAATTGGTAATAGCGACTTATTTGCAGAAGAAAAAGATGGTATTGATGCTAAGAAA

SEQ ID NO: 20024 - protein, 97 aa, Streptococcus agalactiae
MKKNIFLLTLLATVLLTLSGCANWIDKGQSITSVGSTALQPLVEAAADEFGKTNLGKTINVQGGGSGTGLSQVQSGAVQIGNSDLFAEEKDGIDAKK

SEQ ID NO: 20025 - protein, 1304 aa, Streptococcus agalactiae
ATGAAATTACCGAATGAATTTATTGAAAAATATCAGACTATACTTAAAGATGAAGCAGAAGCTTTTTTTGACAGTTTTGAACAAAAACCCATATCGGCATATCGCACCAATCCTCTCAAAGAAAAGCAACTTGATTTTCCAAATGCCATCCCAAGTACCCCTTGGGGGCATTATGGGAAAATATCAGGAAAATCAATAGAACACACAACTGGCCTTGTTTATTCTCAAGAACCTGCTGCTCAGATAGTGGCTCAGATTGCTGAACCACAAGAAGGAATGAAAGTGCTAGATTTAGCAGCTGCACCTGGTGGAAAAACAACACACCTTCTATCATATTTAAACAATACTGGTCTATTAGTTAGTAATGAAATTTCAAATAAACGTAGTAAAATTTTAGTCGAAAATGTCGAACGTTTTGGTGCTAGAAATGTTATCGTGACTAATGAAAGCTCCCAACGACTAGCCAATGTTTTAATCTTTTTTTGATCTTATGTTTTGACGGTCCGTGTTCTGGTGAGGGAATGTTCCGCAAAGATCCTCAAGCAATACAATATTGGCACAAAGATTACCCCACTGAATGTGCACAGTTACAAAGAGATATTTTAAAAGAAGCAATCAAAATGCTAGCTCATGGTGGTATACTTGTATACTCTACTTGTACATGGTCACCAGAAGAGAACGAAGAAGTGGTTAATTGGCTCCTTCAAGAGTATGATTACTTAGAACTTGTTGATATTCCTAAACTAAATGGGATGGTTGAAGGGATTAATGTACCACAAGTTGCAAGGATGTACCCTCATCATTTTCAAGGTGAAGGACAATTCGTTGCAAAACTGAGAGATACTAGATCTAAGGAAGCACAGAAAATTAAGCCAAAAGCACAGAAAATAAATAAAATGCAGTTACAATTGTGGCAACAATTTGCACAAGACCATTTAAAGATAGACTTGAACGGTGTTTTAGATGTTTTCGGCGACCAACTCTATCTTCTACCTAATGGTCTCCCCGATTTGTCTAAATTAAAAATAGCACGCAATGGTCTCCATCTAGGCACTTTCAAGAAGAATCGTTTTGAGCCATCGTTTGCTTTAGGAATGGCACTTAGCGAACATGACCTAGTACAGTCTATTGAAATTGATATAGAACAGTTTGAGGTGTACGTATCTGGAAATGTAGTCAAACTAGACAAGACTGTTCCAAACGGTTGGTATCAAATTCTTGTAAAAGGCAATGGATTAGGTTTTGCAAAAGTGACAAATAATACTCTTAAAAATTATTACCCTAAAGGACTACGATTTCAGACA

SEQ ID NO: 20026 - protein, 436 aa, Streptococcus agalactiae
  VARIANT 160, 165, 166: Xaa = Any Amino Acid
MKLPNEFIEKYQTILKDEAEAFFDSFEQKPISAYRTNPLKEKQLDFPNAIPSTPWGHYGKISGKSIEHTTGLVYSQEPAAQIVAQIAEPQEGMKVLDLAAAPGGKTTHLLSYLNNTGLLVSNEISNKRSKILVENVERFGARNVIVTNESSQRLAKCFNXFFDLXXFDGPCSGEGMFRKDPQAIQYWHKDYPTECAQLQRDILKEAIKMLAHGGILVYSTCTWSPEENEEVVNWLLQEYDYLELVDIPKLNGMVEGINVPQVARMYPHHFQGEGQFVAKLRDTRSKEAQKIKPKAQKINKMQLQLWQQFAQDHLKIDLNGVLDVFGDQLYLLPNGLPDLSKLKIARNGLHLGTFKKNRFEPSFALGMALSEHDLVQSIEIDIEQFEVYVSGNVVKLDKTVPNGWYQILVKGNGLGFAKVTNNTLKNYYPKGLRFQT

SEQ ID NO: 20027 - protein, 761 aa, Streptococcus agalactiae
TTGGACGCTAAATTTGATTTCGCTAAACAATTAGTGTATAAAGCTGGTCAATTCATTAATCTGAGATGCAAAATACTTTTGATGTTGAGGAAAAGTCTCGATTTGATGATTTAGTGACAAGTCTTGATAAAAAAACACAAAAATTATTAATTCAAGAAATTATTCAACATTACCCAGATGATAATATACTTGCCGAAGAAGATGATGTGCGCTCACCCATTGCACAAGGTAATGTTTGGGTTTTAGACCCTATTGATGGAACTGTTAATTTTATTGTTCAAAAAGATAACTTTGCTGTTATGTTAGCTTATTACGAAGAAGGCGTTGGACAATTTGGTATCATCTACGACGTTATGGCTGATATTCTTTACAGCGGGGGAGGACATTTTGATGTCTATGCTAACGATAAAAAAATTGTTCCTTTTCAAGAGTGTCCTTTAGAACGTTGCTTACTTGGAGTAAATTCTGCTATGTATGCAGAAAATGATTGCGGTATTGCCCATTTAGCTTCTGAAACCTTAGGTGTTCGTATCTATGGTGGTGCTGGAATTAGCATGGCAAAAGTCATGCAGGGCAAATTATTAGCTTATTTTTCGTATATTCAACCTTGGGATTATGCTGCAGCAAAAATCATGGGGGAGACATTAGGATTTACCTTATTAACGCTTGACGGGGAAGAACCCAACTATTCAACAAGACAAAAAGTAATGTTCCTACCAAAGTCGAAATTAAATCTTATCCAATCCTACCTTACCAAAAAA

SEQ ID NO: 20028 - protein, 254 aa, Streptococcus agalactiae; identical to SEQ ID NO: 1866

SEQ ID NO: 20029 - protein, 300 aa, Streptococcus agalactiae; identical to SEQ ID NO: 10741

SEQ ID NO: 20030 - protein, 100 aa, Streptococcus agalactiae; identical to SEQ ID NO: 10742

SEQ ID NO: 20031 - protein, 411 aa, Streptococcus agalactiae; identical to SEQ ID NO: 6397

SEQ ID NO: 20032 - protein, 137 aa, Streptococcus agalactiae; identical to SEQ ID NO: 6398

SEQ ID NO: 20033 - protein, 930 aa, Streptococcus agalactiae; identical to SEQ ID NO: 6399

SEQ ID NO: 20034 - protein, 310 aa, Streptococcus agalactiae; identical to SEQ ID NO: 6400

SEQ ID NO: 20035 - protein, 843 aa, Streptococcus agalactiae; identical to SEQ ID NO: 6401

SEQ ID NO: 20036 - protein, 281 aa, Streptococcus agalactiae; identical to SEQ ID NO: 6402

SEQ ID NO: 20037 - protein, 429 aa, Streptococcus agalactiae; identical to SEQ ID NO: 10749

SEQ ID NO: 20038 - protein, 143 aa, Streptococcus agalactiae; identical to SEQ ID NO: 6404

SEQ ID NO: 20039 - protein, 972 aa, Streptococcus agalactiae
ATGATGCTTCGCGACCTTGAAAACCAAATCGATAGACTACGTTTAGAGCATGAAAATAGCTTGCAAGAGGCGCTAACAAAAGTCGAACGAGAAAGAGATGCAATACAAAATCAGTTGCACATTCAAGAAAAAGAAAAAGATTTAGCTTTAGCTTCAGTAAAAAGTGATTATGAAGTACAACTAAAGGCAGCCAATGAACAAGTAGAATTCTATAAAAACTTCAAAGCTCAACAGTCTACTAAAGCAGTAGGAGAAAGTTTAGAACATTATGCTGAAACAGAATTTAATAAAGTGCGACATTTGGCCTTTCCTAATGCTTATTTTGAGAAGGACAATACATTATCAAGTCGTGGCTCAAAGGGGGACTTTATCTATCGAGAAAAGGATGAAAATGACCTTGAGTTTTTAAGTATCATGTTTGAAATGAAAAATGAGTCTGATGATACTATCAAGAAGCATAAAAATGAAGATTTTTTCAAAGAATTAGATAAAGATCGTCGTGAAAAATCTTGCGAATACGCAGTTTTAGTAACTATGCTTGAAGCAGACAATGACTATTATAATACTGGAATTGTTGATGTTAGTCACAAATACCCTAAAATGTACGTTATACGTCCACAATTTTTTATCCAATTAATTGGTATTCTAAGAAATGCAGCACTCAATACCTTAAAATATAAACAAGAGCTTGCTTTGATGAAAGAACAAAATATTGACATCACACATTTTGAAGAAGATTTAGATATTTTCAAAAATGCATTTGCTAAAAATTATAATTCTGCAAGCAAAAATTTCCAGAAAGCAATCGATGAAATAGATAAATCTATTAAACGTATGGAAGCTGTTAAGGCTGCTTTAACAACGTCTGAAAATCAACTACGTCTTGCAAATAATAAATTAGACGATGTTTCTGTCAAGAAATTAACAAGAAAAAATCCAACAATGAAAGCAAAATTCGATGCTCTAAAAGAC

SEQ ID NO: 20040 - protein, 324 aa, Streptococcus agalactiae
MMLRDLENQIDRLRLEHENSLQEALTKVERERDAIQNQLHIQEKEKDLALASVKSDYEVQLKAANEQVEFYKNFKAQQSTKAVGESLEHYAETEFNKVRHLAFPNAYFEKDNTLSSRGSKGDFIYREKDENDLEFLSIMFEMKNESDDTIKKHKNEDFFKELDKDRREKSCEYAVLVTMLEADNDYYNTGIVDVSHKYPKMYVIRPQFFIQLIGILRNAALNTLKYKQELALMKEQNIDITHFEEDLDIFKNAFAKNYNSASKNFQKAIDEIDKSIKRMEAVKAALTTSENQLRLANNKLDDVSVKKLTRKNPTMKAKFDALKD

SEQ ID NO: 20041 - protein, 105 aa, Streptococcus agalactiae
ATGAAACCAGTTGGTTTGGAGTATCCTGAAGGACTACAAAGGGAACCGCGAAGAAATGGTGGAAATTTTAAAACACCATATGCTGTTGTTTCAATTACGTCAAGA

SEQ ID NO: 20042 - protein, 35 aa, Streptococcus agalactiae
MKPVGLEYPEGLQREPRRNGGNFKTPYAVVSITSR

SEQ ID NO: 20043 - protein, 582 aa, Streptococcus agalactiae
ATGTTAAGATCAAAATTTGATGAAGAATTAGATAAACTGCATAACCAATTCTATGCAATGGGAATTGAAGCTATCGGACAAATCAAAAAAACAGTTCGTGCTTTTGTCAGTCATGATCGAGAGTTAGCTAAAGAAGTGATAGAAGATGATGTAACGCTTAACAACTTTGAAACGAAGTTAGAGAAAAAATCATTGGAAATTATTGCACTCCAGCAGCCTGTATCACAAGACTTACGCACCGTTATTACCGTTTTAAAAGCTACTAGTGATGTTGAGCGTATGGGAGACCATGCAGCAGCAGTTGCAAAAGCAACCATCCGTATGAAGGGCGAGGAAAGAATCCCAGCAGTAGAATTAGAAATCAATAATATGGGAAAAGCAGTTAAAAACATGCTTGAAGAAGCCTTAACAGCTTATATCAATGGTGATGATGAAAAAGCTTACGAAGTAGCAGCAATGGATGAAATAGTTGATGATTACTTCCGTGATATCCAAAAAATGGTAGTTGAAACAATTCAAAAGCATCCTGACGTAGCATTTGCCGCCAAAGAAATACTTCCAAGTATTGATGCACTTNNNNNT

SEQ ID NO: 20044 - protein, 194 aa, Streptococcus agalactiae
  VARIANT 193, 194: Xaa = Any Amino Acid
MLRSKFDEELDKLHNQFYAMGIEAIGQIKKTVRAFVSHDRELAKEVIEDDVTLNNFETKLEKKSLEIIALQQPVSQDLRTVITVLKATSDVERMGDHAAAVAKATIRMKGEERIPAVELEINNMGKAVKNMLEEALTAYINGDDEKAYEVAAMDEIVDDYFRDIQKMVVETIQKHPDVAFAAKEILPSIDALXX

SEQ ID NO: 20045 - protein, 799 aa, Streptococcus agalactiae
ATGATTTTGATTTTTGTTGCTCAAAAAGGACTATCTACATTTTTTGTTGATGGCGTTAAATTAACAGACTTCTTATTTAATACAAAATGGGAACCAAGTGCTAAGTCATTTGGTGCTTTTCCAATGATAGCTGGATCATTTATTGTTACTATTCTATCAGCTATCATTGCTACACCATTTGCTATCGGTGCTGCCGTATTTATGACTGAAATCTCACCTAATATGGTTCTAAAATTTTAACCTGCAGTTGAATTACTAGTTGGGATTCCTTCTGTTGTTTACGGTTTTATTGGTTTACAGATTATTGTTCCCTTCGTTCGCTCTATTTTTGGGGGAACAGGTTTTGGCATTTTATCTGGGGTCTGTGTCCTCTTCGTCATGATTCTACCAACTGTTACTTTCATGACAGTAGATAGCCTTAGAGCTGTGCCACGTCACTATAAAGAAGCAAGTTTAGCCATGGGGGCAACTCGTTGGCAAACAATTTGGCGTGTTATATTAAACGCTGCACGTCCAGGAATTTTCACTGCAATTGTTTTTGGTATGGCACGTGCATTTGGTGAAGCTCTAGCAATTCAGATGGTTGTCGGAAACTCTGCAATTTTACCAACGTCATTGACAACACCAGCAGCAACATTAACGTCTGTTCTAACAATGGGTATTGGTAATACTGTAATGGGAACTGTACAAAACAATGTCCTCTGGTCGCTAGCCTTAGTACTTTTAATTATGAGTTTAGCATTTAATACAGTTATTAAGTTAATTTACAGGGAAGGAAAGAAACTATGAACGCTAAGGC

SEQ ID NO: 20046 - protein, 268 aa, Streptococcus agalactiae
  VARIANT 74, 80: Xaa = Any Amino Acid
MILIFVAQKGLSTFFVDGVKLTDFLFNTKWEPSAKSFGAFPMIAGSFIVTILSAIIATPFAIGAAVFMTEISPXYGSKIXQPAVELLVGIPSVVYGFIGLQIIVPFVRSIFGGTGFGILSGVCVLFVMILPTVTFMTVDSLRAVPRHYKEASLAMGATRWQTIWRVILNAARPGIFTAIVFGMARAFGEALAIQMVVGNSAILPTSLTTPAATLTSVLTMGIGNTVMGTVQNNVLWSLALVLLIMSLAFNTVIKLIYREGKKTMNAKG

SEQ ID NO: 20047 - protein, 588 aa, Streptococcus agalactiae; identical to SEQ ID NO: 6407

SEQ ID NO: 20048 - protein, 196 aa, Streptococcus agalactiae; identical to SEQ ID NO: 6408

SEQ ID NO: 20049 - protein, 474 aa, Streptococcus agalactiae
TTGATTTGGTTTCTTATTTTTGCTGTTGGATGGCAGGTACAAAGCGCATCTGTTGAAATATTGTGTCGTGGATGGTTACTTCCGGTGAGTGCCACAAAGTATAGTAAGATAGTTTCTGTCAGTATCAGTTCAATCTTTTTCGGTCTTCTGCATAGCGCTAATAATCATGTAAGCCTTATCTCGATTTTCAATCTGTGTCTCTTTGGACTATTTCTATCGCTCTATGTTATTTTAAAAGGTAACATCTGGGGGGCGTGTGGTATTCATGGCGCCTGGAACTGTGTACAAGGGAGTGTCTTTGGAATCGAAGTTAGTGGAGAGCCAATGTTGTCTAACTCCCTAGTCCATGTTAAAACCTATGGTGCTGACTGGATTAGCGGTGGAAAATTTGGTGTGGAAGGAAGCATGATTACCAGTATTGTTCTTATCGTAGCATGTTATTGGCTTTATCAAAAATCGAATTTTCCTTACGAC

SEQ ID NO: 20050 - protein, 158 aa, Streptococcus agalactiae
MIWFLIFAVGWQVQSASVEILCRGWLLPVSATKYSKIVSVSISSIFFGLLHSANNHVSLISIFNLCLFGLFLSLYVILKGNIWGACGIHGAWNCVQGSVFGIEVSGEPMLSNSLVHVKTYGADWISGGKFGVEGSMITSIVLIVACYWLYQKSNFPYD

SEQ ID NO: 20051 - protein, 1461 aa, Streptococcus agalactiae
GTGACCGCCAAGTTATCTTTAAATTATTATTATGGGTTTATAGCAGGAACATTAGGGACTACTTTGGGTATCATGGGAGGGCATTATCTTTTACCTCGTATTATTTCTGATATCATTTCCAAAGACCTGACTATTCCAAACACACAGTATCATCTTTTCTTAAATTACAGTTTACTAGCCTTTGTTTTTTCATTATTAAGCATTGTTCTTCCAGTTTTTGTTATCACTCGACGTGAGTTGAAAGAAAAAGCAGCATTTTTATTATTACCAAAACCACCAGCTAAAGGATCTAAAATAGCTTTAGAGTATATCAATTGGATTTGGAAAAAACTGTCCTTCACACAAAAAGTAACTGCTAGAAATATTTTTCGTTACAAACAAAGGATGATTATGACCATATTTGGAGTTGCTGGATCAGTAGCGCTCTTATTTTCAGGTCTAGGAATACAATCCTCCTTAAAGCAAACCGTCAATGAACATTTCGGTCGTATTATGCCCTATGATATATTGCTAACATATAACACAAATGCTTCTCCCCCAAAAATACTTGAACTACTTTCAAAAGATTCAAAAATAGACAAATACCAACCAATACACCTTGAAAATCTTGACGAATCCATTCCTGGACAAATTAATAAACAGTCAATTTCCCTATTCATAACAGACAAAAAACAATTACTACCTTTTATTTATTTACAAGAAGCAACAACTAATAAGTCATTGCACTTGAATAATAAAGGGATTATTATTTCTAAAAAATTAGCTCAATTTTATCATGTTAATACCGGTGATTTTATCCATTTATCTCATTCACAAACACTTCCTTCTAGAAAATTAAAAATAACAGGAGTTGTCAATGCGAATGTTGGTCACTATATTTTATGACAAAACAATACTATCGAACTATTTTAAGAAAGAAGCTAAAGATAACGCTTTTTTGGTTAAGTTAACCAAACATAAAATCGCAAATAACTTAGCAGAAAAACTTTTAGAAATTAATGGAGTTGAGTCTCTTACGCAAAATGCTCTTCAGCTGGCTAGTGTAGAAGCCGTTGTGCGTTCTTTAGATGGCTCTATGACTATTTTAGTTGTCGTATCTTTATTGTTAGCCATTGTAATTCTCTATAATCTCACTAATATTAATTTAGCAGAACGTAAGCGGGAGCTATCAACTATAAAGGTATTAGGTTTTTATAATGAAGAAGTAACTTTATACATTTACCGCGAAACCATTATTTTATCAACCATCGGTGTGATTCTAGGCACCATTAGCGGTACTTATTTACACCGTCAAATGATGTTGCTAATTGGTTCAGATCAAATACTTTTTGGTGAAAAAGTATCACCAACTACATTTATAATACCAATAAGCGTAGTAGTCATCATTCTAATAAGTCTAGGTTTTATAGTTAACCATCAATTAAAAAAACTCAATATGTTAGATGCCTTGAAATCAGTAGT

SEQ ID NO: 20052 - protein, 488 aa, Streptococcus agalactiae
MTAKLSLNYYYGFIAGTLGTTLGIMGGHYLLPRIISDIISKDLTIPNTQYHLFLNYSLLAFVFSLLSIVLPVFVITRRELKEKAAFLLLPKPPAKGSKIALEYINWIWKKLSFTQKVTARNIFRYKQRMIMTIFGVAGSVALLFSGLGIQSSLKQTVNEHFGRIMPYDILLTYNTNASPPKILELLSKDSKIDKYQPIHLENLDESIPGQINKQSISLFITDKKQLLPFIYLQEATTNKSLHLNNKGIIISKKLAQFYHVNTGDFIHLSHSQTLPSRKLKITGVVNANVGHYIFMTKQYYRTIFKKEAKDNAFLVKLTKHKIANNLAEKLLEINGVESLTQNALQLASVEAVVRSLDGSMTILVVVSLLLAIVILYNLTNINLAERKRELSTIKVLGFYNEEVTLYIYRETIILSTIGVILGTISGTYLHRQMMLLIGSDQILFGEKVSPTTFIIPISVVVIILISLGFIVNHQLKKLNMLDALKSVD

SEQ ID NO: 20053 - protein, 985 aa, Streptococcus agalactiae
ATGGGAAAGACATTTTGGAAAGATATCTATCGATCAATTACGACTTCAAAAGGTAGATTTTCATCAATCCTCTTACTTATGATGTTAGGCTCATTTGCTTTTATAGGACTGAAGGTCTCAGCACCTAATATGCAAAGAACAGCACAAAATTACCTTGCTCATCATCATGTTATGGATATTACCGTTTTCAATTCTTGGGGACTTGACAAACATGATCAAACTGTTTTAGAAAGCTTAAAAGGATCACAAGTTGAATTTTCTTACTTTGTAGATACAACCCCTCAACAGAATAGTAAATCTTATCGATTGTATTCCAATACCAAAACGATATCAACCTTTGATCTTGTTAAGGGACGTCTCCCTTTAAATAAATCAGAAATTGCTCTCTCATTTCAGGAACGAAAAAAATATGCAATAGGTGATAAAATTAATTTTAAACAAGATAAAAACAAACTGTTTTCAAATACAGGTCCTCTAACTATTGTAGGTTTTGTTAATTCTACCGAGATTTGGTCTAAGACAAACCTTGGTAGTTCTCAAACAGGGGACGGCGACTTAGATAGTTATGGCGTATTAGATAAGACAGCATTTCACTCTCCAGTATATACAATGGCAAGGGTAACTTTTAAAGATCTTAGGTTGATTAACCCTTTCTCAATAAGTTACAAAGAAAAAGTAGCGAAATACCAAGAAAAGGTATCGCGAAAATTAAATATTCACAATAAAATAAGATATACCAAAACAAAAAAAGAGAGCCTACGTAAAATCGATGAGGAGGAAAAAAGCCTACTAAAAGCTCAAAAACAAATCAATCGGTTAGATAATGATAGCCTAGCGATGCCACTATCTCAAGACAAGCTATTCAAATGAAAATTAACAAGACCGACTATCTCTTTTGAAACGAACAAAAGAGCTTCTAAAATTGAGACATAACACCCAAATAATGGAATCGCCTCAAATTATGAATACAACCGTACTANNNNNT

SEQ ID NO: 20054 - protein, 329 aa, Streptococcus agalactiae
  VARIANT 328, 329: Xaa = Any Amino Acid
MGKTFWKDIYRSITTSKGRFSSILLLMMLGSFAFIGLKVSAPNMQRTAQNYLAHHHVMDITVFNSWGLDKHDQTVLESLKGSQVEFSYFVDTTPQQNSKSYRLYSNTKTISTFDLVKGRLPLNKSEIALSFQERKKYAIGDKINFKQDKNKLFSNTGPLTIVGFVNSTEIWSKTNLGSSQTGDGDLDSYGVLDKTAFHSPVYTMARVTFKDLRLINPFSISYKEKVAKYQEKVSRKLNIHNKIRYTKTKKESLRKIDEEEKSLLKAQKQINRLDNDSLAMPLSQRQAIQMKIKQDRLSLLKRTKELLKLRHNTQIMESPQIMNTTVLXX

SEQ ID NO: 20055 - protein, 699 aa, Streptococcus agalactiae; identical to SEQ ID NO: 6413

SEQ ID NO: 20056 - protein, 233 aa, Streptococcus agalactiae; identical to SEQ ID NO: 1880

SEQ ID NO: 20057 - protein, 366 aa, Streptococcus agalactiae
ATGAACCTGCTGGATTGATTGCGAGCTATGTGGATCACCAATGGTAATAAAACTAGGACGTTATGGAAAGTTTTATGCGTGTAGCAATTTCCCTGAATGTCATAACACAAAAGCTATCACTAAGGAAATAGGTGTTATTTGTCCTATCTGTCAAAAAGGACAAGTTATTGAGCGAAAAACAAAACGCAATCGTATCTTTTATGGCTGTGACCGCTACCCAGAATGTGAGTTTACATCTTGGGACAAACCTATTGGACGAACTTGCCCCAATCAAATGATTTCTTAGTGGAGAAAAAAGTACGCGGTGGTGGTAAACAAGTTGTTTGCTCAAATGAAAAATGCGACTACCAAGAAGAGAAAATTAAA

SEQ ID NO: 20058 - protein, 123 aa, Streptococcus agalactiae
  VARIANT 5: Xaa = Any Amino Acid
MNLLXLIASYVDHQWVIKLGRYGKFYACSNFPECHNTKAITKEIGVICPICQKGQVIERKTKRNRIFYGCDRYPECEFTSWDKPIGRTCPKSNDFLVEKKVRGGGKQVVCSNEKCDYQEEKIK

SEQ ID NO: 20059 - protein, 1830 aa, Streptococcus agalactiae
ATGGCAACTACGACAAAAACGTCGACCAAAAAAACAAGTAAAAAAAAATCAGCTACTGCTAAAAAAAATCTAGTTATTGTGGAGTCTCCTGCAAAAGCAAAGACTATCGAAAAATACTTAGGACGTAACTATAAAGTTGTAGCCTCAGTAGGTCATATCCGTGATTTAAAAAAGTCAAGTATGTCCATTGATTTTGAGAATAATTACGAACCACAATATATTAATATTCGTGGTAAAGGACCTCTCATTAATGATTTAAAAAAAGAAGCTAAAAAGGCTAAAAAAGTTTACCTCGCGAGTGACCCGGACCGTGAAGGAGAAGCTATTTCCTGGCATTTAGCGCATATTTTAGATTTAGACAAAGAAGACAGAAACCGTGTTGTTTTCAATGAAATCACAAAAGATGCTGTTAAAAATGCTTTTGTGGAACCTCGTCAGATTAACATGGATCTCGTTGATGCTCAGCAAGCACGACGTGTTTTAGATCGCATTGTTGGTTATTCTATCTCACCTATTTTATGGAAAAAAGTAAAAAAAGGGCTATCAGCTGGACGTGTACAATCAGTTGCTCTTAAACTAATCATTGATCGTGAAAATGAGATTAAGGCTTTCCAACCGGAGGAGTATTGGACTATTGACGGTTCCTTTAAAAAAGGAACACGTAAATTCAATGCCACTTTCTACGGTTTAGACGGAAAGAAATTCAAATTATCGAATAATGAAGACGTCAAAACAGTTCTAAAACGTATTAAAACTGATGAATTCTTAGTTGAAAAAGTTGAAAAAAAAGAGCGTCGTCGTAATGCACCATTACCGTATACAACTTCTTCATTGCAACAAGATGCAGCTAATAAAATCAATTTTCGAACTCGTAAAACCATGATGATTGCGCAACAGCTGTACGAAGGACTTAGCTTAGGCACAGCAGGTCATCAAGGTCTGATTACCTATATGCGTACTGATTCTACACGTATTAGTCCGTTAGCACAAAATGAAGCAACAGAATTTATTACTAACCGTTTTGGTGCAAATTATTCTAAACATGGGAATAAAGTTAAAAATGCTTCTGGAGCACAAGACGCTCACGAAGCTATTCGCCCATCTAGTGTTAATCATACACCCGAAAGTATTGCTAAGTATTTAGACAAAGATCAACTAAAACTTTACACTCTTATCTGGAACCGTTTTATTGCAAGCCAAATGACAGCAGCAGTCTTTGACACAATGAAAGTTAATTTAACGCAAAATGGTGTTACTTTTATTGCTAATGGTAGCCAAGTCAAGTTTGATGGTTACATGGCTGTTTATAACGATACTGACAAAAATAAAATGTTACCAGATATGGAGGAAGGAGAAAGTGTTAAAAAGGTTAATACGAATCCTGAACAACACTTCACTCAACCTCCTGCAAGGTTTTCAGAAGCAAGTCTCATTAAAACACTTGAAGAAAACGGTGTAGGTCGTCCTTCAACTTATGCCCCAACGCTTGAGACTATTCAAAAACGTTATTATGTTAAGCTTGCAGCTAAACGCTTCGAACCACTGAACTTGGTGAAATTGTTAATAGCCTTATTGTAGAATTTTTCCCAGATATTGTTGATGTTACCTTCACTGCCGAAATGGAAGGGAAACTAGACGAAGTTGAGATTGGTAAAGAGCAGTGGCAAAAGATTATCGATGAATTTTATAAACCATTTGAAAAAGAACTTGCAAAAGCAGAAACTGAAATGGAGAAAATTCAAATAAAGGATGAACCTGCTGGATTGATTGCGAGCTATGTGGATCACCAATGGTAATAAAACTAGGACGTTATGGAAAGTTTTATGCGTG

SEQ ID NO: 20060 - protein, 611 aa, Streptococcus agalactiae
  VARIANT 589: Xaa = Any Amino Acid
MATTTKTSTKKTSKKKSATAKKNLVIVESPAKAKTIEKYLGRNYKVVASVGHIRDLKKSSMSIDFENNYEPQYINIRGKGPLINDLKKEAKKAKKVYLASDPDREGEAISWHLAHILDLDKEDRNRVVFNEITKDAVKNAFVEPRQINMDLVDAQQARRVLDRIVGYSISPILWKKVKKGLSAGRVQSVALKLIIDRENEIKAFQPEEYWTIDGSFKKGTRKFNATFYGLDGKKFKLSNNEDVKTVLKRIKTDEFLVEKVEKKERRRNAPLPYTTSSLQQDAANKINFRTRKTMMIAQQLYEGLSLGTAGHQGLITYMRTDSTRISPLAQNEATEFITNRFGANYSKHGNKVKNASGAQDAHEAIRPSSVNHTPESIAKYLDKDQLKLYTLIWNRFIASQMTAAVFDTMKVNLTQNGVTFIANGSQVKFDGYMAVYNDTDKNKMLPDMEEGESVKKVNTNPEQHFTQPPARFSEASLIKTLEENGVGRPSTYAPTLETIQKRYYVKLAAKRFEPTELGEIVNSLIVEFFPDIVDVTFTAEMEGKLDEVEIGKEQWQKIIDEFYKPFEKELAKAETEMEKIQIKDEPAGXDCELCGSPMGNKTRTLWKVLCV

SEQ ID NO: 20061 - protein, 840 aa, Streptococcus agalactiae; identical to SEQ ID NO: 10769

SEQ ID NO: 20062 - protein, 280 aa, Streptococcus agalactiae; identical to SEQ ID NO: 1884

SEQ ID NO: 20063 - protein, 683 aa, Streptococcus agalactiae
ATGACAAAAAAACTTATTATTGCTATATTAGCACTATGCACTATCTTAACCACTTCTCAAGCTGTTTAGCTAAAGAAAAATCACAAACTGTTACCATAAAAAACAACTATTCGGTCTATATTAAAAAAGAAAAAAGAGACAAGCCGGATAATAAAAAGCAAATCAGCGAGACACTTAAAGTTCCTTTAAAACCCAAAAAAGTAGTTGTTTTTGATATGGGAGCTTTGGATACTATCACAGCTTTAGGAGCTGAAAAATCTGTTATTGGTATCCCGAAGGCTAAAAATGCTCTAAGTTTATTGCCCAATAACGTCAAATCTGTTTATAAAGCTAAGAGATACCAAGACGTAGGAAGTCTCTTCGAACCAAACTTTGAAGCTATTGCTCGTATGCAACCTGATGTGGTTTTCCTAGGAGCACGTATGGCTTCTGTTGATAATATTGAAAAATTAAAGGAGGCTGCACCTAAAGCAGCATTAGTATATGCTGGAGTCGACTCAAAAAAAGTATTTGACAAAGGAGTTGCTGAGCGTGTCACAATGTTAGGGAAAATCTTCGACCAAAATAAAAAGGCAAAAACCTTTAATAAAGATATCGCACAAGCTGTTCTTAAATTGCAGAAAACTATTGAGAAAAAAGGTAAACCTACAGCTCTATTTGTAATGGCAAACAGCGGTGAGCAA

SEQ ID NO: 20064 - protein, 228 aa, Streptococcus agalactiae
MTKKLIIAILALCTILTTSQAVLAKEKSQTVTIKNNYSVYIKKEKRDKPDNKKQISETLKVPLKPKKVVVFDMGALDTITALGAEKSVIGIPKAKNALSLLPNNVKSVYKAKRYQDVGSLFEPNFEAIARMQPDVVFLGARMASVDNIEKLKEAAPKAALVYAGVDSKKVFDKGVAERVTMLGKIFDQNKKAKTFNKDIAQAVLKLQKTIEKKGKPTALFVMANSGEQ

SEQ ID NO: 20065 - protein, 759 aa, Streptococcus agalactiae; identical to SEQ ID NO: 10773

SEQ ID NO: 20066 - protein, 253 aa, Streptococcus agalactiae; identical to SEQ ID NO: 1888

SEQ ID NO: 20067 - protein, 972 aa, Streptococcus agalactiae
ATGATTAAGGATTTAGAGATACCAAAATTACTTATTTTACTGATACTACTAATTACTGCCATTATTTTGTTTTTAATTTATGGTATTCCAACTGACGCAAATGAATTTTTGATTATCTATATCCTAAAAACACGTTATCAAAAACTGATTGCATTAATTTTGGTTGGTATCTGCATTGGTAGTTCTAGTCTTATTTTTCAAACTCTAACCAATAACCGACTTTTAACTCCGTCCATTATTGGTTTAGATAGCTTATATGTTCTTATCCAAACAGGATTAATGTATTTAATCGGAGCTCAGCGTGTCATAAAATTTTCATCTTTTAGCAGCTTCCTCCTTTCATTATTATTAATGGTTGGATTCGCTTACTTATTATTTACGATACTTTTTCGAAATAAAAAACAGTCTTTGTATTTTGTTCTATTAGCTGGACTCATATTTAATACATTATTTTCTTCTATCTCATCCTTTATTCAAGCCATTATGGACCCCAACGATTTTATGATTTTACAAAATCAGCTCTTTGCTAGTTTCAATGCTATTAATACCAAGATTCTTTGGATTTCTTTCATTATCATTGTCGTTAGCTTTGCCATTAATTGGCCTTTTATAAAGGAATTGGATGTCTTACTATTGGGTAAAGAAAATGCGATATCACTCGGCATCCCATATCAAAAGCTTACTACTAGAATTTTTTTATGGTTAGCATTGATGGTAGCTATAGCAACAGCATTAGTTGGGCCGATTACTTTTTTAGGCTTACTTGTAGCACATATTACCTATCACAGTTTTCATACCTTTAGACATCAAATATTAGTTCCTATAGCCATTGTTATCTGTATCTTTACACTTGTCTTAGGGCAGCATCTCGTTCAAAATCTATTACACCTCACTGTTCAACTAAGTGTTCTCCTCAACCTTATCGGGGGAAGTTATTTTATATTCACCTTAATCAAAGGAAGGAAAAACTTA

SEQ ID NO: 20068 - protein, 324 aa, Streptococcus agalactiae
MIKDLEIPKLLILLILLITAIILFLIYGIPTDANEFLIIYILKTRYQKLIALILVGICIGSSSLIFQTLTNNRLLTPSIIGLDSLYVLIQTGLMYLIGAQRVIKFSSFSSFLLSLLLMVGFAYLLFTILFRNKKQSLYFVLLAGLIFNTLFSSISSFIQAIMDPNDFMILQNQLFASFNAINTKILWISFIIIVVSFAINWPFIKELDVLLLGKENAISLGIPYQKLTTRIFLWLALMVAIATALVGPITFLGLLVAHITYHSFHTFRHQILVPIAIVICIFTLVLGQHLVQNLLHLTVQLSVLLNLIGGSYFIFTLIKGRKNL

SEQ ID NO: 20069 - protein, 959 aa, Streptococcus agalactiae
ATGAAAAAGCTATTAACCACTCCTGTAATGGGTTGTACTTTGGTTATACTTTCTCTAACGTCCCTATTTGTTGGTGTTAAATCTATCCCACTGGAGCAAATAACACACCTTGATCAATCACAGGTAGATATTTTTTTAGCGAGTCGCTTACCAAGAACCATTAGTATCCTAATATCTGGTGCAAGTTTGTCAGTCTGTGGCCTGCTGATGCAACAACTCACCCAAAACAAGTTCGTTTCACCGACAACTTCAGGGACTATGGATTGGGCGAAATTAGGAGTAGTTGTTACGCTGATTTTCTTTAAAAATACCTCTATTTTTATTCAACTATGTATAGCTTCAGGTTTTGCCATTTTAGGATCGCTTCTTTTTGTAACCATTTTAAAAATGATTACTTTTAAGGATAATATTTTTATACCTCTTATCGGACTGATGCTTGGACAAATTGTAGCAGCAGTAACAGTATTTTTAGGAACACATTTTCAAGTACTACAATCTGTCAACAGTTGGCTTCAAGGTAATTTTTCCATCATGACTAGCCATCGCTACGAAATTCTTTACTTAGCATTGCCATTTTGTTTTTAGTGTATTTTTTTGCTCATCAGTTTACCATTGTTGGGCTTGGAGAAAGCTTCGCTAAAAATTTAGGGATTGCTTATGAAAAGATGATTTACTTTGGTTTAGTTTTGGTTTCAATTATGACATCCCTAGTCATTATTATCGTAGGAGCTTTACCTTTCTTAGGTTTAATCGTACCTAATCTAATTAGCATAACTAAAGGAGATCATATGTCCTCAACTATCTTAGAGACATCGCTTTTAGGGGCTTGTATCGTCATGATATGTGATCTTTTTGGTCGCTTAGTTATTTTTCCTTATGAAGTCTCAATAGGAGTTACGCTAGGAGTATTGGGTAGTGCCTTTTTCTTGATTTCAATTATAAGAAATGAGGGAAAATCA

SEQ ID NO: 20070 - protein, 320 aa, Streptococcus agalactiae
MKKLLTTPVMGCTLVILSLTSLFVGVKSIPLEQITHLDQSQVDIFLASRLPRTISILISGASLSVCGLLMQQLTQNKFVSPTTSGTMDWAKLGVVVTLIFFKNTSIFIQLCIASGFAILGSLLFVTILKMITFKDNIFIPLIGLMLGQIVAAVTVFLGTHFQVLQSVNSWLQGNFSIMTSHRYEILYLALPCLFLVYFFAHQFTIVGLGESFAKNLGIAYEKMIYFGLVLVSIMTSLVIIIVGALPFLGLIVPNLISITKGDHMSSTILETSLLGACIVMICDLFGRLVIFPYEVSIGVTLGVLGSAFFLISIIRNEGKS

SEQ ID NO: 20071 - protein, 546 aa, Streptococcus agalactiae
ATGACCGAAAAAGAAAAAATGTTAGCAGGACAATATTATCGTCCATCAGCACCTGAACTACGCAAGGATAGAGAAGTTGCACTAAAAAATATGCAAGCCTTCAACAATGAAGATGATAGTAGCAAACGTAACGTCATTTTACAAAAATGGTTTGGTGCTACTGGGAAAAGTATCCATATGGAACAACGTTTTGTCTGCGATTATGGTTGCAATATTTATGTTGGTGAAAACTTCTACGCCAATTTTAACCAAACTTTCTTAGATGTTTGTGAAATTCGTATTGGCGATAACTGTATGTTTGGCCCAAACTGTCAACTCCTCACCCCACTCCATCCTCTAGATCCAATAGAAAGAAATTCAGGATTAGAATACGGTGCCCCAATCCAAATCGGGAATAATGTCTGGCTAGGTGGAGGAGTGACTATTTTACCAGGTGTTGTATTAGGAGATAATGTCGTCGTTGGTGCTGGAAGTGTCGTTACGAAATCATTTGAAAATAACGTTGTTATAGCAGGAAACCCTGCTAAGATAATCAAAAAATTAGCT

SEQ ID NO: 20072 - protein, 182 aa, Streptococcus agalactiae; identical to SEQ ID NO: 15346

SEQ ID NO: 20073 - protein, 759 aa, Streptococcus agalactiae
ATGGCAACAATTAAAGAAATCAAAGCAATTTTAGAGACTATTGTTGATTTAAAAGACAAACGTTGGCAAGAATATCAAACAGATTCACGCGCAGGTGTTCAAAAAGCAATCCTTCAACGAAAAAAAAATATTCAGTCAGATTTAGACGAAGAAGCGCGCTTAGAACAAATGTTGGTCTACGAAAAAAAACTTTACATTGAACATATAAACCTTATTGCAGGAATCGATGAAGTAGGTAGAGGTCCTTTAGCGGGACCAGTAGTAGCTGCTGCTGTTATTCTTCCACCAAACTGTAAAATAAAACATCTCAATGATTCCAAAAAAATTCCAAAGAAAAAGCATCAAGAAATCTATCAAAATATTTTAGATCAAGCGTTAGCAGTTGGTATTGGTATTCAAGACAGCCAATGTATTGATGATATCAACATTTATGAAGCTACAAAACATGCTATGATTGATGCAGTTTCTCATTTATCTGTAGTTCCTGAACATCTTTTAATTGATGCTATGGTTTTGGATCTACCAATTCCACAAACTAAAATTATCAAAGGCGATGCTAATTCACTCTCTATTGCAGCAGCTTCAATTGTAGCTAAAGTGACCAGAGATAAAATAATGTCTGATTATGATAGCAAATATCCTGGATATGCATTTTCTAAAAATGCTGGCTATGGTACTAAAGAGCATTTAGAGGGTTTGCAAAAATACGGTATTACTCCGATACATCGTAAAAGTTTTGAACCTATAAAATCAATGTTG

SEQ ID NO: 20074 - protein, 253 aa, Streptococcus agalactiae
MATIKEIKAILETIVDLKDKRWQEYQTDSRAGVQKAILQRKKNIQSDLDEEARLEQMLVYEKKLYIEHINLIAGIDEVGRGPLAGPVVAAAVILPPNCKIKHLNDSKKIPKKKHQEIYQNILDQALAVGIGIQDSQCIDDINIYEATKHAMIDAVSHLSVVPEHLLIDAMVLDLPIPQTKIIKGDANSLSIAAASIVAKVTRDKIMSDYDSKYPGYAFSKNAGYGTKEHLEGLQKYGITPIHRKSFEPIKSML

SEQ ID NO: 20075 - protein, 849 aa, Streptococcus agalactiae
ATGGCTACTATTCAATGGTTCCCAGGACACATGTCCAAAGCTCGCCGTCAAGTTCAAGAAAATATTAAGCATGTTGATTTTGTTACAATTTTAGTGGATGCAAGGTTACCTCTTTCTAGTCAAAATCCAATGCTAACCAAAATCGTCGGAGACAAACCCAAACTAATGATCCTCAATAAAGCTGATCTAGCAGATCCCATTCGAACTAAAGAATGGAGAGATTTTTATGAATCTCAAGGTTTAAAGACATTAGCTATTAATTCTAAAGAACAATCAACAGTTAAAAAAGTAACCGACATCGCTAAAATATTAATGTCCGATAAAATTGCTAAACTACGGGAACGTGGTATTCAAAAAGAGACACTTCGTACGATGATTATTGGAATTCCGAATGCAGGTAAATCGACTCTAATGAATCGCCTAGCAGGTAAAAAAATTGCAGTGGTTGGTAATAAACCAGGTGTCACAAAAGGTCAGCAATGGCTCAAATCTAATAAGGAACTGGAAATTTTGGACACTCCTGGTATCTTGTGGCCCAAATTTGAAGATGAATTAGTTGGATTAAAGCTAGCATTAACAGGGGCAATCAAAGATCAATTATTGCCTATGGATGAGGTAACAATATTTGGATTGAATTACTTTAAAACCTATTATCCTGATCGTCTCAAAGAGCGTTTTAAAAGCATTAATTTAGAGGATGAAGCTCCTGAAATCATCATGACCTTAACACAAAAATTAGGTTATCGTGACGATTACGATCGCTTTTATAATTTATTTGTCAAAGAAGTTCGCGATGGTAAATTAGGACGCTACACGTTAGATATCGTCGGAGAACATGATGGCAACAAT

SEQ ID NO: 20076 - protein, 283 aa, Streptococcus agalactiae
MATIQWFPGHMSKARRQVQENIKHVDFVTILVDARLPLSSQNPMLTKIVGDKPKLMILNKADLADPIRTKEWRDFYESQGLKTLAINSKEQSTVKKVTDIAKILMSDKIAKLRERGIQKETLRTMIIGIPNAGKSTLMNRLAGKKIAVVGNKPGVTKGQQWLKSNKELEILDTPGILWPKFEDELVGLKLALTGAIKDQLLPMDEVTIFGLNYFKTYYPDRLKERFKSINLEDEAPEIIMTLTQKLGYRDDYDRFYNLFVKEVRDGKLGRYTLDIVGEHDGNN

SEQ ID NO: 20077 - protein, 339 aa, Streptococcus agalactiae
ATGACAATAACTTCGAATGACAAGGTCATCTTTAAAACGATTGTTTCAACAGGAGCAAAAGAGAGCCCTACCCCAAAAGGAACTTTTGTCATAGAACCGGAACGAGGAGATTTTTTCTATAACGCCTCATCAAAAGAAGGAGCCTATTATTGGGTCTCCTTTAAAGAGCATGGTATTTATCTCTTTCATAGCGTTCCGACTGATCAACAAGGAAATGAGATCCCAGAAGAAGCAAAGCAATTAGGAAAAGCCGCCTCACATGGCTGTGTGCGTATGTCAAGGGCGGATGCAAAATGGTTCTATGAAAATATTCCTCAAGGAACGACTGTTACCATCAAA

SEQ ID NO: 20078 - protein, 113 aa, Streptococcus agalactiae
MTITSNDKVIFKTIVSTGAKESPTPKGTFVIEPERGDFFYNASSKEGAYYWVSFKEHGIYLFHSVPTDQQGNEIPEEAKQLGKAASHGCVRMSRADAKWFYENIPQGTTVTIK

SEQ ID NO: 20079 - protein, 252 aa, Streptococcus agalactiae
ATGTTTGGCCCAAACTGTCAATTCTTCACCCCACTCATCTTTTTAGATCCAATAGAAAGAAATTCAGGATTAGAATACGGTGCCCCAATCCAAATCGGGAATAATGTCTGGCTAGGTGGAGGAGTGACTATTTTACCAGGTGTTGTATTAGGAGATAATGTCGTCGTTGGTGCTGGAAGTGTCGTTACGAAATCATTTGAAAATAACGTTGTTATAGCAGGAAACCCTGCTAAGATAATCAAAAAATTAGCT

SEQ ID NO: 20080 - protein, 84 aa, Streptococcus agalactiae
MFGPNCQFFTPLIFLDPIERNSGLEYGAPIQIGNNVWLGGGVTILPGVVLGDNVVVGAGSVVTKSFENNVVIAGNPAKIIKKLA

SEQ ID NO: 20081 - protein, 222 aa, Streptococcus agalactiae
ATGAGAAAACGTTCAATTTTGCCAATATTAGCTGTCTTATTTGTTTTCATGAGTATCTTTAGCGTATATTCTATTTTTCATGGTGATAAAGCCAAAGAAAAAGCAAGTGTCATAAAACAAGCATCCCAAACAAGTCAAACTTCAAAAAAAGAGGTCTTACAAAAGAAGACTTATCCAAATCTAAATAAATATTCAAATCTAGAAATTCATGTNNNNNTTAAT

SEQ ID NO: 20082 - protein, 74 aa, Streptococcus agalactiae
  VARIANT 72, 73: Xaa = Any Amino Acid
MRKRSILPILAVLFVFMSIFSVYSIFHGDKAKEKASVIKQASQTSQTSKKEVLQKKTYPNLNKYSNLEIHVXXN

SEQ ID NO: 20083 - protein, 1482 aa, Streptococcus agalactiae
ATGGTAACATTTTTAGGAGGGGTAGCCCTTTTAATTGTTGGTTATTTCACGTACGGTAGATACATTGAAAAGAATTTTCAAATTGATGAAAATCGCCAAACACCTGCAGAAGCATTAAGGGATGGATATGATTTTGTTCCTATGCCAAAATGGAAGAATGGGATGATCGAGTTATTGAACATCGCAGGAACCGGACCTATCTTTGGACCTATTTTAGGAGCACTCTATGGTCCAGTTGCTTATATCTGGATAGTCTTAGGATGTATTTTTGCAGGGGCTGTTCATGATTATATGATTGGAATGATTTCTCTTAGAAATAATGGTGCATATCTTCCTGAATTAGCTAGTCGCTATCTTGGAAAGTCAATGAAGCATGTGATCAACATTTTTTCAATGCTATTACTTATTTTAGTTGCAACCGTATTTGTGGTAACTCCAGCTAATCTTATCCTAAGTATTTTACCAGCTGGGACACTATCTTTACCTTGGATAATCGGTCTTATTTTCGTTTATTACCTTATTTCTACAGTCTTACCTATTGATAAAGCACTTGGTAAAGTTTATCCTGTATTCTGCGTCATCCTAATGGTTAGTACAGCAGCAGTTGGCTTCCGTTTACTAACTGGTGGCTTTGATATGCCAAACTTAACTTTTGAAACCTTTAAAAATATGCATCCAGCTGGGCTTGGGATATTCCCTGCTTTATTCTTTACCATTTCATGTGGAGCCATCTCTGGTTTCCATGCTACCCAAGCACCTATGGTCTCAAGAACAACTGTTAATGAGAGAGAAGGGCGTTTCACATTCTACGGCATGATGATTGCAGAAGGAGTAATTGCGATGATTTGGGCAGGTGCTTCAATGAGCTTGTTCAAAGGTCAAAATCTCTATGAAATGATTGCTGCTGGAACACCTTCTGCAGTCGTCAATCAAGTAATGTTAATGTTACTCGGTAGTGTAATTGGAACTATCGCTATCATTGGTGTTATTGTTCTCCCTGTTTCATCTGGTTTATCAGCTTTCCGTAGCTTACGTACTATCGTTGCTGATTATATCCATGTCAAACAAGATACTCTTCCAAAAATCTTTGCTGTAACTATCCCATTATATGTTATTTCATTTGTCCTTACACACGTTGATTTTAATCTCCTATGGCGTTACTTTAACTGGGCAAATCAAGTAACTGCTGTTATTGGTTTATTAGTTGCTACAAGATATCTCATCCTAAAAAGACGAAATTATTGGGTAACATTTGTACCAGCTATGTTCATGTTGTATGCAGTAGTTGTTTATATTTTATCTCAACCAATTGGATTTAATATGGGCTTAGGCATCTTAACTTATTCACTTGCTTTAGTGTTAACAGGTATTCTTGTTGGACTTTTCTGGAAATCTGGTCAAAAACAATTAAAAACTGTTCATCCTGAAGCATTCCTGTTTAACGATCATAGACCAATTAATTATTACAGTAGTTTAGATTCT

SEQ ID NO: 20084 - protein, 494 aa, Streptococcus agalactiae; identical to SEQ ID NO: 1902

SEQ ID NO: 20085 - protein, 732 aa, Streptococcus agalactiae
ATGAAAGTTTTAGTAGTTGATGATGAACCAGTTGCACGTAACGAATTAATTTACCTTCTTAATAAGTATGATTCTAACCTCGTTATAGCAGAGGCGCATGATATGGCTACTGCATTAGCTATTTTACTTAGAGAAACTTTTGATGTAGCACTGTTAGATATCCATCTCAGAGATGATTCTGGGTTGCAATTAGCAGAGTATATCAATAAAATGCCCAAACCACCATTATTGATATTCGCGACTGCTTATGATCAATATGCTATTCAAGCTTTTGAGCATGATGCGCGTGATTATTTGTTAAAACCCTATGAGTTTGATAGGCTAAAGCAAGCTATGGATAGAGTAAAAGGAGCGCTAAGTACATCTACAATTATAGAGAGCGTAACTTCCGGCCCTCTCTTCAAGCAACAGTATCCATTGACAGTAGAAGATCGAATCTATCTGGTGTCGGCGGATGATATCCTTTTGATTGAAGCTATGCAAGGAAAACTGATTATACAAACACCTGATAAAAATTATGAAATTGATGGCTCTCTACAACAATGGCAAGATAAACTACCATCATCTCAATTTGTACGGGTGCACCGCTCTTACATTGTGAATATTAATGCTATTAAAACGATTGAACCTTGGTTTAACCAAACACTTCAGTTACACCTTTGTAATAAAATAACAGTTCCTGTTAGCAGAGCAAATGTAAAACCCCTAAAACAAATGTTAGGCATATCTACC

SEQ ID NO: 20086 - protein, 244 aa, Streptococcus agalactiae
MKVLVVDDEPVARNELIYLLNKYDSNLVIAEAHDMATALAILLRETFDVALLDIHLRDDSGLQLAEYINKMPKPPLLIFATAYDQYAIQAFEHDARDYLLKPYEFDRLKQAMDRVKGALSTSTIIESVTSGPLFKQQYPLTVEDRIYLVSADDILLIEAMQGKLIIQTPDKNYEIDGSLQQWQDKLPSSQFVRVHRSYIVNINAIKTIEPWFNQTLQLHLCNKITVPVSRANVKPLKQMLGIST

SEQ ID NO: 20087 - protein, 603 aa, Streptococcus agalactiae
ATGAAGTCTCTCCAAGCGCAGGTTAATCCGCATTTTCTTTTTAATGCACTCAATACTATTTATGGTTTAATTCGCATGGATAGCGAAAAAGCAAGAAAGCTCGTCCAAGATTTTAGCAAGGTTATTCGTGCTAATCTTCAACGGGCAAAGCAAAATTTAATTCCTCTCCATGATGAATTGGAACAGGTTAACGCCTATTTAGCCCTTGAAGAAGCAAGATTTCCTAACATGGTGGCCTTTAATTTAGACAACCAAACAAATTCAGATGACAACTTAATGATTCCTCCCTTTACATTGCAGGTCTTGATTGAAAACTCTTATAAACACGCTTTTAAGCATATCAATAAAAATAACCAGCTAAAGGTTACTATTGCAAGAAATAATGATAGGCTTCATATCATTGTCCAGGACAATGGTATTGGGATTCCAAAAGAAAAATTAATAACGCTTGGAAAAAAAACTCAAATTTCAAAAAAAGGTTCTGGTACAGCTATTGAGAATCTCGTTCGTCGCTTGAATATTATTTATGATGGACAAGCAAGTTTAAAATTTGAATCAAATGATTTAGGAACTTGTGCTATTGTTAACATCCCCATTAAAAAT

SEQ ID NO: 20088 - protein, 201 aa, Streptococcus agalactiae
MKSLQAQVNPHFLFNALNTIYGLIRMDSEKARKLVQDFSKVIRANLQRAKQNLIPLHDELEQVNAYLALEEARFPNMVAFNLDNQTNSDDNLMIPPFTLQVLIENSYKHAFKHINKNNQLKVTIARNNDRLHIIVQDNGIGIPKEKLITLGKKTQISKKGSGTAIENLVRRLNIIYDGQASLKFESNDLGTCAIVNIPIKN

SEQ ID NO: 20089 - protein, 1127 aa, Streptococcus agalactiae
ATGACACTCTTTTTAATTATGATGGAGCGAGCGGGGTTAATCATATTATTAGCCTATGCCTTTGTGCATATCCCCTTTATAAAACAAACTTTGAAGCAACCCGAATTAAAAAAACACCAGTATATTCTGCTTATCTTATTTAGCTTATTTGCTATTATTTCTAATTTTACAGGGGTAGAAATTCAGTCAGATTTATCTATCATTCCACAAACTCTTAATCATATAGCAGATCAATCATCGGTTGCCAACACACGTGTTTTAACCATTGGTGTATCAGGTCTAATCGGTGGCCCAATAGTCGGTATTATAGTTGGTCTCTTATCTGTATTCGTTAGGTACTTGCAAGGAGGATTAGCCCCTCATATTTATGTCATTTCTTCCTTACTAATTGGTTTATGCTCTGGGTTATCAGGCAATTATCTTCGTAGAAATTATAATAAAATTCGTGTTTTAGATGCAATGGTTGTTGGTTTCGGTATGGAAATTCTACAAATGATCTGTATCCTCATTTTTAGTGTTGACTTTAATCAGGCGCTTCGATTAGTATCTTTTATCAGCATGCCAATGATTTTAAGTAATACTTTAGGTTTAGGTATATTTATATCCATTATTTCATCTACTCAAAAATTAGAAGAACATGCTAAAGCATTTCAAACCCATCAAGTACTTGAATTAGCAAATTTAACCCTTCCTTACCTTAGAAAGGGACTGACAACAGAATCTTGTCAACCAGTAGCTGAAATTATTCATAAACATATGGATGTGAGTGCTGTTAGCCTGACTAGTCAATCAGCCATTTTAGCCTATGTAGGAGATGGAGCTGACCATCATCTTCCTAATACTCAAATATTAACAAAGCTTGCTAAAAGAGCAATAGATACTGGTAAAGTTAGTGTCGCAACTGATAAAAGTGAAATCGAATGCGACCATAAGAATTGCCCACTTAGTTCAGCAATTGTTATTCCATTACACATCCACGATGTTATAGTGGGTACTTTGAAATTATATTTTTCAGACGCACAACATATGACTTACGTTGACCGTCAATTAGCTGAAGGATTAGGCAATATCTTTTCCACTCAGTTAGCTTTGGGCAGCTGAGGAGCACAAGGTTACTACAGNNNNNT

SEQ ID NO: 20090 - protein, 377 aa, Streptococcus agalactiae
  VARIANT 376, 377: Xaa = Any Amino Acid
MTLFLIMMERAGLIILLAYAFVHIPFIKQTLKQPELKKHQYILLILFSLFAIISNFTGVEIQSDLSIIPQTLNHIADQSSVANTRVLTIGVSGLIGGPIVGIIVGLLSVFVRYLQGGLAPHIYVISSLLIGLCSGLSGNYLRRNYNKIRVLDAMVVGFGMEILQMICILIFSVDFNQALRLVSFISMPMILSNTLGLGIFISIISSTQKLEEHAKAFQTHQVLELANLTLPYLRKGLTTESCQPVAEIIHKHMDVSAVSLTSQSAILAYVGDGADHHLPNTQILTKLAKRAIDTGKVSVATDKSEIECDHKNCPLSSAIVIPLHIHDVIVGTLKLYFSDAQHMTYVDRQLAEGLGNIFSTQLALGQAEEATRLLQXX

SEQ ID NO: 20091 - protein, 120 aa, Streptococcus agalactiae
ATGTTTAAGGGATTTAAAAAATTGATTATTATTATGGGAGGGATAAGCTTAATGATGATTTTAACAGCATGTGACTTAGTAAAAAAGATCACCAATGGGTTCAAGAACATTGAAAATACT

SEQ ID NO: 20092 - protein, 40 aa, Streptococcus agalactiae; identical to SEQ ID NO: 1908

SEQ ID NO: 20093 - protein, 243 aa, Streptococcus agalactiae
TTGACTGGAAACTCTGAGAGTTTAGTTCTTCAAATATATGATATTGATACGAAGGGGTGGGAAGAAAGAATCAGTCTAGAAAAAGTAGAAGAAGGTTTTTTTGTGAAATCAAAAATAGCTAATCTTGAATATCATACAAATAATAATATTACTTCAAATGAAAGAGTATTAGCTTGGTCTGATAAAGAACCTACAAATAATATGAATTTAAAAATCTTGAGTCTTACATTGATATGTATACCG

SEQ ID NO: 20094 - protein, 81 aa, Streptococcus agalactiae
MTGNSESLVLQIYDIDTKGWEERISLEKVEEGFFVKSKIANLEYHTNNNITSNERVLAWSDKEPTNNMNLKILSLTLICIP

SEQ ID NO: 20095 - protein, 207 aa, Streptococcus agalactiae
ATGGAAGTAAGAAAAGAAGCAAAAGCTGGATTTAAAGTATTTGGTTTAAATATTGATGCGAGTGCATCAGCGGGAATAGGATTGTCCGCGATAGCAAAAGTTGGTGTAACAAGTGAAATTAAAATTAGGACCGGTTGGAATAGGGCTATCCGTTGGTTTGTAGGAAGGATTGGTTTTGGAATTATTACTAAAATTGACTGGAAACTC

SEQ ID NO: 20096 - protein, 69 aa, Streptococcus agalactiae
MEVRKEAKAGFKVFGLNIDASASAGIGLSAIAKVGVTSEIKIRTGWNRAIRWFVGRIGFGIITKIDWKL

SEQ ID NO: 20097 - protein, 213 aa, Streptococcus agalactiae
ATGGAAAATAAAATTTTACCATTAGGAAGTGTTGTCACTTTAAAAAATGGAGATGGAAGTCAATTGTTGATTGTTACTAGAGCAGCAATCATTGAAGAGGATGGAGTAGAAGTCTATTTTGATTACGGATCAGTTTTAACTCCTCAAGGGATGGCCTCTCCAGAAAACGTCTCATGGAATTCAATGCGGAGTCCTCGACAGTCTTTGGTGGAC

SEQ ID NO: 20098 - protein, 71 aa, Streptococcus agalactiae
MENKILPLGSVVTLKNGDGSQLLIVTRAAIIEEDGVEVYFDYGSVLTPQGMASPENVSWNSMRSPRQSLVD

SEQ ID NO: 20099 - protein, 654 aa, Streptococcus agalactiae
ATGGTAAGGAGAAAAAATGATTTTGAGAAAAAAATTTATATAGGTGAAACGAGTCAAGGTGTTATTTATTATGATACTCAAACAGGGGAAATATTAGCTGCTAATAAAAGCAACTTACTTAATACTGAGAAATCTGGGCAATTAAATAAATTAATTCCCTACCTAATTGTATTGTTTCTGTCATTTGGTGGTTTAGGAATTACTAGTTTTTCTTTTGGTGAGTATAATAAGACTATATTAATGATCCGGGTACTAGAGTTTATTGGAATGGTAATACTTCTAGAACAAGCCTTATACAAATATGTTAAACATGCGGTGAGCTCAACAAAAAAGGAATTTCAAATTGCTGCAAGCGGTAATCTTTTTTGGAATAATTTTGGAGATAAAAGAGTTACGAGAGGAAAAAAAATTTGGGCATGGATAATTACTACCATTGTCACACTTTGTGGTTTTTCACCAATAATGATTTCTAAAATAATAAACAATTTAATTGGCACAAATATCAAAAGTGAAATAGTAGGTTTTAGTATGATTGGAATTATGCCTGCGATTATGGTAATTTTTATTTTCCAAAATAATCCTATTAGATTTTTCAAAGCTGTAGAAGAAGTAAGAAGTAATAAATATCAAAAGAAAATGAAGAAAGTAGAGAAA

SEQ ID NO: 20100 - protein, 218 aa, Streptococcus agalactiae
MVRRKNDFEKKIYIGETSQGVIYYDTQTGEILAANKSNLLNTEKSGQLNKLIPYLIVLFLSFGGLGITSFSFGEYNKTILMIRVLEFIGMVILLEQALYKYVKHAVSSTKKEFQIAASGNLFWNNFGDKRVTRGKKIWAWIITTIVTLCGFSPIMISKIINNLIGTNIKSEIVGFSMIGIMPAIMVIFIFQNNPIRFFKAVEEVRSNKYQKKMKKVEK

SEQ ID NO: 20101 - protein, 291 aa, Streptococcus agalactiae
ATGGAAGTAAGAAAAGAAGCTAAAGAGGTCAGTATTAAGAAAACCAAAAATACAGTTGAAAATATTAATAAAGTGGAAAGAGGTCTAAGCTACGGAAGCACTGCTAACGTGATGTGTAGTGAGGCTGTAGGAGCAATGTATGCAGGTGCTGCATTTGGATCAATGATTCCAATACCAGTTGTAGGAACACTGGCAGGAGCAGTTGTAGGTTATGCAATTGGTGGTCTTGCAAATACAATTTATGATGGGATAGCTCACAATGATTGGGATTGGGATAACTTTGCGCTATGG

SEQ ID NO: 20102 - protein, 97 aa, Streptococcus agalactiae
MEVRKEAKEVSIKKTKNTVENINKVERGLSYGSTANVMCSEAVGAMYAGAAFGSMIPIPVVGTLAGAVVGYAIGGLANTIYDGIAHNDWDWDNFALW

SEQ ID NO: 20103 - protein, 381 aa, Streptococcus agalactiae
ATGAAAGAAAAAATAAAAATAATCCCAATGGGGTATCATGGGAAAATCCCAATCTATTATATTTTTGAGAAAAATACTCTTATGTATTCGGATTCTAAGGAACTTCCAAAAGATATAACTTGGAAAATAGTAACTCTAACATTATTATTTCTACCAATTGTAAGATTATTAGATAATAGTACTTTTTTTAATCATTCGGTATTGTTATTTGCTTCAATACGATTTTCAACCGTAGTTGTTATCTTATTTGGAAAATATTTTAATAAAAAGCAATATCAAACTTTGACACTTTATACCCTTAATATAAGTAGTTTTGAGATGGAAGAATTATTACAAAAATTAAGAAAAAACAATAGAATACTTTTTTTCTTAAGATGGTTT

SEQ ID NO: 20104 - protein, 127 aa, Streptococcus agalactiae
MKEKIKIIPMGYHGKIPIYYIFEKNTLMYSDSKELPKDITWKIVTLTLLFLPIVRLLDNSTFFNHSVLLFASIRFSTVVVILFGKYFNKKQYQTLTLYTLNISSFEMEELLQKLRKNNRILFFLRWF

SEQ ID NO: 20105 - protein, 543 aa, Streptococcus agalactiae
ATGAATAATAAAATTTTAGCACTAGGAACTTATTACTCAAATGATATTTTATATGATAAGCAAACAAATATTTTGTATAAGGATGTTAATATAAATACTAATTCAAATAAAAATTATCTAGTTGTTTCACTAACTTTATTTAGTCTACCTATCGTAAGATGGTTGAATCAATTTCTTCATTTTGAAAATAGTTTTATCAATAGTTTTATCCTTTTTATAGTAATTTTCTTAACTTTTATACTTACTCATAGTTTAGTAAAGCAAAAATTCAATAAATTACAACTAGAAGTTATCTCTTTAACTGATTATGAAAAAAAAGAGTTCTTAATAAAGGAGAAAAAAAATACTGAAATTGCAATCACAATTTTCTTTATTTCGTTAATGTTAAGTATTATCTGTATGTTTATATATTTGCTAATTTCGTCTATTATTTTGATTTTTATCATTTTTGGTTGCTCGTTTCTTGTATTTTTAACTTTAGAATTGTCAACATTTGAGCGAAAAAGAATTATTAACAAATTAATAAAAGAAGTTGAAATTAAA

SEQ ID NO: 20106 - protein, 181 aa, Streptococcus agalactiae
MNNKILALGTYYSNDILYDKQTNILYKDVNINTNSNKNYLVVSLTLFSLPIVRWLNQFLHFENSFINSFILFIVIFLTFILTHSLVKQKFNKLQLEVISLTDYEKKEFLIKEKKNTEIAITIFFISLMLSIICMFIYLLISSIILIFIIFGCSFLVFLTLELSTFERKRIINKLIKEVEIK

SEQ ID NO: 20107 - protein, 1287 aa, Streptococcus agalactiae
ATGATGGTAAAAGTTAATGCAGGTTCACTTGCTGCACAGGCGTCATCCGTATCAACAGTAGTTGCTTCACGTGTTACAGCTTTAAATAGTGCAAAGCAAAGTCTGACTAGTTTTGCTAATCAAGCAGGCTTGGAAGGTACTGCCTATCAAAATGCAAAATCCTACGCCACAGGTGTATTAGGAACATTAATAGATGGTATGATCCTTTTATCTGAAGAGACAGAGGAAGGTGTTAGTAAACTACAAAGTTTATATAGCGATAAATGTGGAGGTGAAAGTCTAGATTCTGACGTCCTAACCAAAAAAATCGAAAAAGATGAAGAATTATTAGCTAAAATTCATGATTTGCAAGCACACTTAGACAAACATGCCACTTTTTTGTCGCATGCCTTTGATGGATTAGAAGCGACAATAAAAGCACGGCTCAAAAAGAATAAGAAAAAATTAAAATATCTCATGGAATTCAATGCGGAATCCTCAACAGTCTTTGATGGACTAACAGAAGTTCAGGATGCCGTTTCGGCAGGCCTTAACTATGTCTCAGAAGGTTTTGGAAATTTCAATGGTACATTTGATACCTCAGGTAAAGGTCTTGATTGGACAAAAACAATCAAGACTGGGATGGAAAAGAGGAGAGATAAGGTTTCAATTGATAAAAATTCATTATTGAAAGAAGTAAAAAAAGCTTATAAAGCTGGTAAAATTAATAAACAAACTTATCAATCAATAAAAAGTGGGTTAGTAAATAGTTCCACTGCTTTTCTGAAAGAATTAGCTAAAGCAAAATTAACCGATAAAGCAGTGGAAACATTCACTAAGGAATCATGGGAAGCATTGTCCAAGAATTTCCAAACGATGCAGTTCTCTGGTGTTTTAGCTGCTGTAAATGGAGCTGAATTATCAACTGCAATTGATGTCAATCCTGCTTATGCAGAGATGATTCGTGGAGGTAGTCAATTTGTGAAAAAAGGAGTTCCTGTTATTGGTGCTGCAGTTGACTTTGGACTACAACTTAAAGATGGTGAAGATGTTGGTGATGCAGCAGTCAAGACAGGTGGTCATGTTGCAATTGGTATTGGTGCTGCAAAAGCAGGAGCTATAATAGGGAGTGCATTTCCGGTAGTCGGAACTGCTGGTGGTGCCGTTGTTGGTTTTGCTATTGGGGTTGCTGGTTCAATGGCTTTCGATTGGTTGTATGATAATAAAGAACAAGTTTATAATACTACTAAGAAAGTAATTTCCACTCGTAAGACTATTGATTCAGTAGTTTATGAAGGTTTTTGGAGG

SEQ ID NO: 20108 - protein, 429 aa, Streptococcus agalactiae
MMVKVNAGSLAAQASSVSTVVASRVTALNSAKQSLTSFANQAGLEGTAYQNAKSYATGVLGTLIDGMILLSEETEEGVSKLQSLYSDKCGGESLDSDVLTKKIEKDEELLAKIHDLQAHLDKHATFLSHAFDGLEATIKARLKKNKKKLKYLMEFNAESSTVFDGLTEVQDAVSAGLNYVSEGFGNFNGTFDTSGKGLDWTKTIKTGMEKRRDKVSIDKNSLLKEVKKAYKAGKINKQTYQSIKSGLVNSSTAFLKELAKAKLTDKAVETFTKESWEALSKNFQTMQFSGVLAAVNGAELSTAIDVNPAYAEMIRGGSQFVKKGVPVIGAAVDFGLQLKDGEDVGDAAVKTGGHVAIGIGAAKAGAIIGSAFPVVGTAGGAVVGFAIGVAGSMAFDWLYDNKEQVYNTTKKVISTRKTIDSVVYEGFWR

SEQ ID NO: 20109 - protein, 354 aa, Streptococcus agalactiae; identical to SEQ ID NO: 10831

SEQ ID NO: 20110 - protein, 118 aa, Streptococcus agalactiae; identical to SEQ ID NO: 10832

SEQ ID NO: 20111 - protein, 333 aa, Streptococcus agalactiae; identical to SEQ ID NO: 10833

SEQ ID NO: 20112 - protein, 111 aa, Streptococcus agalactiae; identical to SEQ ID NO: 10834

SEQ ID NO: 20113 - protein, 3872 aa, Streptococcus agalactiae
ATGTCAGCTTATCAATTTTACGCAGGCTATCCTGATTTTCACCGCTCACCTCGTATTATTTATCGTTCCAGTGAAGATAAAATTACAGTTAATGCGCCTGGTAATGAACCTAATAAGTCTAAAGATGAACTGTTAAAATTAATTGTTCCTCCTCTAGTGATGATTGGAGTCAGCATTCTTATTTCTATTTTTCGTCCTCGTGGTATCTATATCATTGCAACAATGTCAATGGCTCTAGTGACGATGATTTTCTCTATCACTGGTTACTTTAAAAATCGTAAACAGTATAAGCAGGACTTACAAGAACGCATTGATTCCTATCATGACTATTTGTCTGATAAGTCAATTGAACTTCAGAAGTTAGCTAAAGAGCAAAAGCGTGGGCAACACTATCATTACCCAACGATTGAAGGTTTACAGGAAATGGCTGATACTTATCACCATCGTATTTATGAAAAGACACCACTTCATTTTGACTTCTTGTATTATCGCCTAGGTTTGGGAGAAGTACCAACGAGCTATAATATTCATTATTCTCAACCAGAACGTTCTGGGAAAAAAGATCCTTTAGAGAACGAAGGCTATAACCTCTACTTTAACAATCGTTATATTAAAAATATGCCGATTGTTGCGAATTTATCACATGGACCAGTTGGCTATATAGGACCACGAGGTTTAGTATTGGAGCAACTCCAATTGATGGTTAATCAATTAGCTTTTTTCCATTCTTACCATGATGTTCAATTTATTACTATCGTTCCAGAGGAAGAGATGGATAAGTGGTCTTGGATGCGTTGGTTGCCACATGCAACCTTACAAGATGTCAATGTTCGTGGCTTTGTTTATAATCAAAGAAGCCGTGATCAAGTGCTCAACAGTCTTAACCAAATTTTAAAATTACGTCGCACACAACGCGAAGATAAATCTGCCAAAGAAGGGACTTTGTTTTCTCCGCATTATGTCGTTATTGTAACTGATGAAAAGTTAATTTTAGATCACGTCATCATGGAATTCTTTACGGAAGATCCTACAGAATTGGGATGTTCTCTCATCTTTGTTCAAGATGTTATGAGTTCACTTTCAGAAAATATCAAAACCATTATTAATATTAAAGACCGTAATACTGGTCAGTTAGTTATAGAAGAAGGAGAGCTTAAAGAAACAGATTTTGAATTAGATCATTTCTTAGAGGATTATGACAAGGAAAATATTTCACGTCGCCTAGCTCCGTTAAATCACCTACAAAATCTTAAATCTTCAATACCAGAAGCAGTTACTTTTATGGAAATGTATCAAGCAGAAGAATTTGAAGATTTGCATGTTCAAGAGCGTTGGATAAGCCATGCTCCGTATAAAAGCTTAGCTGTTCCACTTGGCTTACGTGGTCAGGATGATATTGTTTATCTAAACCTACATGAAAAAGCTCATGGTCCTCATGGATTAGTTGCAGGAACAACGGGATCAGGGAAGTCAGAAATTATCCAGTCCTATATCCTTTCTTTAGCGGTTAATTTCCATCCACACGATGTAGCTTTCCTTCTCATAGACTACAAAGGTGGGGGGATGGCAAATCTCTTCAAGGACCTGCCACACTTACTTGGCACCATCACCAACTTAGATGGTGCCCAATCGATGCGTGCTTTGGTTTCTATTAATGCTGAATTGAAACGTCGTCAACGTTTATTTGCTAAAGCTGATGTTAATCATATTAACCAGTATCAGAAGAAATACAAACTTGGAGAAGTTTCAGAACCAATGCCTCATCTCTTCTTAATCTCCGATGAGTTTGCCGAATTGAAATCCAACCAACCTGAGTTTATGAAAGAGCTTGTCTCAACAGCGCGAATTGGTCGTTCCCTAGGGATTCACTTAATCCTAGCGACCCAAAAACCATCTGGCGTGGTAGATGACCAAATCTGGTCAAACTCACGCTTCAAACTAGCTCTTAAAGTAGCAGACCGCGGCGACTCCATAGAAATGCTCCATACCCCAGATGCTGCCGAGATTACACAAGCAGGACGTGCCTACCTCCAAGTTGGTAATAATGAAGTCTATGAACTCTTCCAATCAGCATGGTCAGGAGCAGATTACCAACCTGAAAAAGACGACCAAGGGATTGAAGACCATACCATTTATTCCATCAACGACCTTGGCCAATACGAAATCCTAAATGATGATCTTTCAGGCTTAGACCAAGCCGAAAATATTAAAGAAGTACCTACGGAATTGGATGCCATCGTGAAAACATTCAAGCTTTAACCAAAGAAATGGGCATCTCAGACTTACCTCAACCGTGGCTACCACCTCTAAGCAATCAGATTGCAGTAACCGATCTCCGTAAGGAAGAATCAGTAGACCTCTGGAGTAAAGCTCCATCTTACAAAGCTGTTCTGGGCTTTATGGATATACCAAGCCAACAAGCACAAGAAGTAGCTTGGCACGATTTTGAAGACGATGGGCATTTGTCAATTTTTGCAGGGCCAAGTATGGGGAAATCCACAGCCCTTCAAACAGTAACAATGGATCTAGCACGTCACAATAGTCCAGAATTTCTAAACCTTTATCTCTTTGATTTTGGTACCAATGGCCTCTTACCATTAAGACGTTTGCCACATGTAGCAGATTTCTTTACCATTGATGATGACGAAAAAATAGCCAAGTTTATTGCCCGTATCAAAGTTGAAATGTCTGATCGTAAGAAAGCTCTCAGTCGCTACAATGTCGCGACAGCAAAACTTTACCGTCAGGTATCTGGGGAAACCATGCCTCAAATCCTGATTGTTATAGACAGTTATGAAGGGCTACGGGAAGCTCAGACACTGACTAACTTAGAAGCTTGTTTCCAAAATATTTCGCGTGATGGGTCGTCACTTGGTATTTCCTTAGTTATCTCAGCTGGTCGTATGGCAGCTTTGAGGTCGTCCTTAATGGCAAACCTTAAAGAACGTATCGCTCTTAAATTAACAGATGACTCTGAATCACGGACACTTGTCGGTCGTCACCAACACATCATGGAAGATATTCCAGGACGTGGATTAATCAAACGTGATGACATTGAAGTGTTACAAGTGGCCCTCCCAACAGAAGGCACTGAAACCTTTGACATCATCAGTAACATCCAAACCGAATCTGACGCCATGAACGACAAATGGACTGGACCAAGACCAAAAGCAATACCAATTGTTCCAGAAGAATTAACCTTTGACGACTTTATGGCTACAGATAGTGTTCAAGCAGATCTATCAGCTAATCGTTTACCACTTGGGCTTGAAATGGTTGACGTTGAAAGCTTTAGCCTACCATTAACGAAATTTAAGCACCTCTTATTCCTATCAGATTCAGATGAAGGTTTAGAAAATCTAGGCAGTCATTTACTTAAAACGTTGATTAAAGTGCCAGAATACAGCACCATGATCATTGATTCCTTAGGCGAACATGAAGCCTACCAAGGACAAGTGAGAACCTATGTCGGTGCTGATATGATTAGTGATATGGCAGAACAACTCAATTATGAGCTAGGAAAACGTCAAGAACAAAACGCTTTCGATAGATGGTTTATCTTAATTCCAGATTTTGAAAGTTTCGTCAGCAAAACAAACCTTAGCCTAGAGCAAATCCAAAATCTCTTAGATAATGGACCCAAAGTCGGCTTACACCTGATCATTGGCTCAGCCTTTAGCTTTGTTGGTTCAAAACTTGACCCCGTTAACAAATACGTCAAAACCAATAGCCAATATGTTATGCTAGGCATGCGCCTAATGGACCAAACATTCCTAGAGAAAGTGTATAATAGTAAAGAAGCACGTCTGGAACGCGACGAAGCCTACATTCACGATAGAAAAAACTATCAAAAACTAAAACTCAGCATAGAC

SEQ ID NO: 20114 - protein, 1291 aa, Streptococcus agalactiae
MSAYQFYAGYPDFHRSPRIIYRSSEDKITVNAPGNEPNKSKDELLKLIVPPLVMIGVSILISIFRPRGIYIIATMSMALVTMIFSITGYFKNRKQYKQDLQERIDSYHDYLSDKSIELQKLAKEQKRGQHYHYPTIEGLQEMADTYHHRIYEKTPLHFDFLYYRLGLGEVPTSYNIHYSQPERSGKKDPLENEGYNLYFNNRYIKNMPIVANLSHGPVGYIGPRGLVLEQLQLMVNQLAFFHSYHDVQFITIVPEEEMDKWSWMRWLPHATLQDVNVRGFVYNQRSRDQVLNSLNQILKLRRTQREDKSAKEGTLFSPHYVVIVTDEKLILDHVIMEFFTEDPTELGCSLIFVQDVMSSLSENIKTIINIKDRNTGQLVIEEGELKETDFELDHFLEDYDKENISRRLAPLNHLQNLKSSIPEAVTFMEMYQAEEFEDLHVQERWISHAPYKSLAVPLGLRGQDDIVYLNLHEKAHGPHGLVAGTTGSGKSEIIQSYILSLAVNFHPHDVAFLLIDYKGGGMANLFKDLPHLLGTITNLDGAQSMRALVSINAELKRRQRLFAKADVNHINQYQKKYKLGEVSEPMPHLFLISDEFAELKSNQPEFMKELVSTARIGRSLGIHLILATQKPSGVVDDQIWSNSRFKLALKVADRGDSIEMLHTPDAAEITQAGRAYLQVGNNEVYELFQSAWSGADYQPEKDDQGIEDHTIYSINDLGQYEILNDDLSGLDQAENIKEVPTELDAIVENIQALTKEMGISDLPQPWLPPLSNQIAVTDLRKEESVDLWSKAPSYKAVLGFMDIPSQQAQEVAWHDFEDDGHLSIFAGPSMGKSTALQTVTMDLARHNSPEFLNLYLFDFGTNGLLPLRRLPHVADFFTIDDDEKIAKFIARIKVEMSDRKKALSRYNVATAKLYRQVSGETMPQILIVIDSYEGLREAQTLTNLEACFQNISRDGSSLGISLVISAGRMAALRSSLMANLKERIALKLTDDSESRTLVGRHQHIMEDIPGRGLIKRDDIEVLQVALPTEGTETFDIISNIQTESDAMNDKWTGPRPKAIPIVPEELTFDDFMATDSVQADLSANRLPLGLEMVDVESFSLPLTKFKHLLFLSDSDEGLENLGSHLLKTLIKVPEYSTMIIDSLGEHEAYQGQVRTYVGADMISDMAEQLNYELGKRQEQNAFDRWFILIPDFESFVSKTNLSLEQIQNLLDNGPKVGLHLIIGSAFSFVGSKLDPVNKYVKTNSQYVMLGMRLMDQTFLEKVYNSKEARLERDEAYIHDRKNYQKLKLSID

SEQ ID NO: 20115 - protein, 455 aa, Streptococcus agalactiae
ATGTTAGTTATTTGTTATTATCAATCACTCCGCTACGAATTTAATATTGAAGAGGAGAAATCCTTTCTAATATCATCAAACGGCAAGTCGCCAATACCAGTATCAGAATTAGAAAATGACATCACGCTAAAAAATATGCAAGGTCAATTGGTATATATTATTGACCAAAAAGAAAAAGAGTTAACTAATGGTGTAGAGATTTCAGGAATTGTATTCTATTTAGCGAATAATCAAAAAGAAATCTATACTCCCTTAGATTACGAAGATATATTAATCGGTGATAAAGAAGGGTATCATATCCGTTTTAAAGAAGGAGCCCCTAATTTATTACTGAAAAAAATAGAAAGTAATTGGCAGCTTAATTTATTTGAAGGTGATATTTATTGAATAATCATCTTCAAAAAGTAGTGCAGCAGTTACCTTTAAGTTTAGGTGATGAGANNNNNTTAATTAAT

SEQ ID NO: 20116 - protein, 152 aa, Streptococcus agalactiae
  VARIANT 129, 148, 149: Xaa = Any Amino Acid
MLVICYYQSLRYEFNIEEEKSFLISSNGKSPIPVSELENDITLKNMQGQLVYIIDQKEKELTNGVEISGIVFYLANNQKEIYTPLDYEDILIGDKEGYHIRFKEGAPNLLLKKIESNWQLNLFEGDIYXNNHLQKVVQQLPLSLGDEXXLIN

SEQ ID NO: 20117 - protein, 1275 aa, Streptococcus agalactiae
ATGGAAACAGATTCGTTTGTATTTGAAGAACAAGACTTTCAATTTGAAAAAGGACCAGATTTTTGGCAGTTATCTCTTAAGCGTTCAAAAGTAGGAACTCAAAATCTGCAACAACTGCAATTGTTAGAAATTCACCATTCTTTGTTGATGCCTATGACAACTGCAATTGATGCAGATACCATTCAATTTCAATTCCAGACAGAAGCGCACGCTCTATCTTTTGAAAGCTTTAAAAAAGAAACTTTATCTGAAAAATTACGATTAGCCTTGAATGTCTTGGATTTAGATAAGGCTTTGTCTTTGCCAGTAAATTTCATTTTGCATCCCTCTAATCTATTTTTAACAAAAAATGCAACTGCTAAAATAGCTTATCGTAGCCTTCCTGGGATTATGACACCTGAGAAGTTTGGTCCAGAGGAGTTTTTATATCAATTCAAATGTTTTGTCTTTGCATTACTGACGCAACATGACTATATAGAATTGTATAATGGTGCTATTTCTGTTATTGAAGTATCAGATTTCCTAAAAAGCATTTATCATGCAGAAACTATTCAGGCTGTTAGAGACATCATTACTACTGATTATGAGCAGCAAGTAGAAGTAGAAACTCATACGTTAGCAAAAGTATCAAAGGCAAAATATAAGCTTTATAAATACATAAGTGTCTGGCTAGGAGCTTTATCTACAATACTCTTGATTCCGCTAGTATATCTGGTTTTTATTCACAATCCATTCAAAGAAAAAATGTTGGCAGCGGATACTTCATTTATTAAAGTTGATTATAATCAAGTGATTAATCGACTAGAACATGTAAAAGTAAGTAAGTTACCTTATACACAGAAGTACGAGTTGGCCTATTCCTATATTAATGGAATGTCATTTTCTGAAGAACAGCGTGAAGTTATTTTAAACAATGTTACGCTCAAGACTGATGAGCTCTATCTTGATTATTGGATTAATATTGGCCGTGGTTTAGATGATGATGCTATTGATGCTGCCAAACGTTTAGACGATTCTGACCTTGTTATTTATGCTATTGTTCAGAAAATGGATCAGGTTAGAAAAGACAATAGTTTATCTGGTAAAGATCGTGAACAAAAACTTTCTGAGCTACAAACAGACTATGATAAATATTGGAAAGACCGTAAGACAGCTTTAACAGATGAGGAATCCAAATCGAAAAATAGCAATAATCATTCGACAAATTCCAACAAAGAGTTGTCATCTGAACCATCAAGTACTACAACAAGTACATCTTCTAAAACTAAAAGTAGG

SEQ ID NO: 20118 - protein, 425 aa, Streptococcus agalactiae; identical to SEQ ID NO: 10838

SEQ ID NO: 20119 - protein, 240 aa, Streptococcus agalactiae
ATGAATACACATATTAACATTACTCTAGATATGGGGGAAACCTCAAAAGATTTACGTATCCCTTTGAAAATTAGTGTTAAGCAATTAGTAATGGAATTAGATAGTATTTTTAGCCGTACTGAAAGGCGTACCAAATATCAACTAAGAGTTATAAATAAAGGTATTTTATTGGGAGAGAACGATATATTAGCGCACCATCCAGTAACAACTGGTGATCGTATAAGGATAGAGGAGTTTTAT

SEQ ID NO: 20120 - protein, 80 aa, Streptococcus agalactiae; identical to SEQ ID NO: 1952

SEQ ID NO: 20121 - protein, 471 aa, Streptococcus agalactiae
ATGAAGTTGAAACGATTTTTAGCCTGTCTACTAATATTATCCTGTATGAGTCAAACATCAGTATTTTCTGATGGGTTAAAGAATAATGATATTCATTTTGATACAAAACGTTTAGAATCAGATTCACAAAAAAATTCCGGTTTTCAAACTGAATTAACTAAAGATTTATTTAAAAAAGAAGACCTTAAAAAATTGGATGAAAACCGTCAATCTAAAGTCTCACTCCAGAAAAAGCAGTCTAAGCAACTGTTTCAATATTCAAATAAAGGACAATCTGATAGGAAAAAACGTATCAAACAATTATTTTCTGAAGAAAGTAATCAATTTAAATTTGTTACAAGAACAGAAGAACCGACTGTTTCGGCTGATATTGGTCATATGATTATGTACCTGGTTCTCATTAGTTTGGTACTAATATTAGCTTCTATAATGACTTTTAAAATAAAGGACAAAAAGGATGAATACACATAT

SEQ ID NO: 20122 - protein, 157 aa, Streptococcus agalactiae
MKLKRFLACLLILSCMSQTSVFSDGLKNNDIHFDTKRLESDSQKNSGFQTELTKDLFKKEDLKKLDENRQSKVSLQKKQSKQLFQYSNKGQSDRKKRIKQLFSEESNQFKFVTRTEEPTVSADIGHMIMYLVLISLVLILASIMTFKIKDKKDEYTY

SEQ ID NO: 20123 - protein, 3012 aa, Streptococcus agalactiae
ATGAAAAGAAATAACTTTAGAATACTTTGGTATATTATAGCTGTTGCTCTCTTTTTAGTAGCTATTGCTGGCCTTAATCTTAAGCTTCAAGGCGATCATGCAAAAGAGAATAAAACAACACAGTCAGCTACTAACACTAAACTAAATATAGCATTAGTTAACGAAGATCAAAATGTATCTAATGGTAAAGAAAGTTATAATTTAGGAGCTAGTTATATTAAGTCTATCGAACGTGATAATAGTCAAAATTGGTCAGTTGTTAGTCGAGGTACTGCTCAAAATGGATTAAACAAAGGTGATTATCAATTAATGGTTATCATCCCTAATAACTTTTCTCAAAAACTCCTTGATGTCAATAAAGCAAATGCAGAGCAAACAACTATCTCTTATAAGGTTAATGCCAAGGGGAATTTAGCATTAGAGAAAAAGGCAACTGAAAAAGGGAAAGATATTGTTTCAGAGTTAAATAGCCACTTAGTAAATATGTATATGGCAAGTATTTTAAGTAACTTATATACAGCTCAAGAAAATGTACAGGCCATGGTAAATGTTCAGTCAGGTAATATCTCAAATTACCAAAAAAATCTTTTAGATTCTGCAACTAATTTCCAAAATATCTTTCCAGCCCTTGTTAACCAGTCTAGTAGTTCCATTACTGCTAACGAATCACTGAAAAAATCTTTAGAAGCTTCTGATAACATGTTTAATGATTTGGTGACAACCCAGACAAATACTGGAAAAGATTTATCAAGCTTAATAGAACAGCGCCATCAAGATAGCATTTCGTATGAAGCGTTTTCGGCCTCATTACTAGAAATGAATAACGAGTTATTAGAGAAGCAATTGTCTGATATTATCACACAAGCACAAAAAGACCAAGAAACATTATCATCACACCAATAGTATTATGGGTGATGATAACGATAACGATCATAATCATAAAGAAAACTCATCAGCTTATCTAAATGTTGCAAGGCAAAAAATCCAAGAACTATCTGAAGCACTCAAGTCACAAGATAACGTCGCTAAAGATCAAAGTGAACAACTAGATAAAATTGTTAGAGAGGGACTAGCAAGTTACTTTGCTAAGAATAATAAAGATAATATTACTTTATTAGAATTATTGAAGAGTCATTCTAATAATGAGAAGACTTTGAAAGATTTTAAAGCTAAGGTAGCAGATTTCACAAATTCTCTCATTTCAAGCATTCCTTCACTAAACCTTTCGGAGTTGCACTTAACCCAAGAAGAAGAAAAAGCCATTCAGTTTACATCTTCTGATTCGGAAATCATTAAAAAAGTAAGCAACGAAAGAACTCTGTATTTAAATACTAATTTATTGAATCGTCTTTTTGAAGCTAGGAAAAATAGAGATGAAGCTAAAAATAAAGTTAATCAATTAAAATTGCCATCTAGTTCTACTCGAACTGGTGAGCAGATAGTTTCTGTTGAATCAAATAATCCAGATTACAGGGTAGATACCTGGACGGTTAATGGTAAGCAAACAAGAACCTTGGACCCCAGCCAAAACAATAATATTATTATCAATAGCAGTTATCAAGGGGAATCATCTAACTCTAGTATTACAAAACCAAGCTATACAATCACTATCGGGAATCAGAAACAAATTGTACAAAATGATGACGGTAAAACCCAACGGTCTTACTTGGAGACAGAAGCAACGTATCAACGAACTCTACAAGAAGTAATTGATGCATATAACACCACTCACAATTTAGTATCTAAATACTACATTTTTTCTGATGGCGAAGAACCGCAAAGTTTATTTGATCAATTTTTAAATCAAAGTGTTAACGATACGATGGTTGATCTGGTCAAAAATGGTATAACTAAGTATTTGATGGATGAAAACACTGCTGATGCGCAACAGAAAGTTAAAGATGTCATGGAGGAAGTTGAAAATAGCCAAGATGAATTGGCGGATCAAATGGCAAAAGTAACTGAGACAAATGTACGACTAACAGATACAATCAAAAAACAGCTTGAGACCCTTCAATCAATTAACATGAAGGTCCAAAACATCACACAGGATCAATCTAAAGTAAACGACTCACAGAAAACAACTGATCAACAATTATCTGATTTGAAGAACCAGCTAGATGGGCTAATGACCTCTGCAACTGGCGTAAAAGATATGTCCAAATCTAATAGTCAAGAGGCGGACCAAGTTAATCAAATATTCACATCATTCAATAAAGATGTTCAAGATGCTAAAAATTCGGGCAACAAACTTTCGACGGATGCAACAGATTTAATGGCTAACTTCCAAAAAGAATTGGCCAATAACGGTGATTTCGTAGCTTCTTTCTCTAAAGTTTTTAATACTGCTTATAAAAATGGAGTGCCAAATGATATTCTCCTTAATTTCTTATCACGACCTGTCGCTGAATCAGCGTCTGCAGTTAGGGCAACTGAAAATACTTATCGCCCATTCACTTGGATACTATTATTAGAAGTTGTTAGCCTATTTACAGCATATATCTTTGCGACTCAAAACCTTATAAGAAATTGACAGATAGGTATAATGTCAATCGCTGGCTTCAAACAGACTTTTTAAATGTCATTGTCATTTCAGGCCTCTCTCTTGTGATTGGTTTAGCACTGGGAGTTATCTCAAGCAGAAGTCTTCATGTCATGCCTGAATATGTACCATCTTGGTTCCTAGTTATGACTCTGTTTAGTTTTTTATTAATTCATAGTCAGTATTTCTTTATTAAAAATTTTAAAGCAGTTGGTATGGGTTTAGCTTTGTTTATGATTATTAGTTTTGTTTATTTATCAAATGCCGTAGGCACAGTAGCGACTGTTAGTGGCCTTCCAAAATTACTAAAAGCTATTAATCCACTATCTATCCTTGAAAATCAATTATCATCTTATTTTGATAATGTGACAACTGGATTTATTTTCCTTATCTTAGTACTTCTTGTGGATGTTGCTTTTATTATCATGAATATTTTTATCACCTTAAATTTTGAAGCTAAAGTAAAAGAG

SEQ ID NO: 20124 - protein, 1005 aa, Streptococcus agalactiae
  VARIANT 842: Xaa = Any Amino Acid
MKRNNFRILWYIIAVALFLVAIAGLNLKLQGDHAKENKTTQSATNTKLNIALVNEDQNVSNGKESYNLGASYIKSIERDNSQNWSVVSRGTAQNGLNKGDYQLMVIIPNNFSQKLLDVNKANAEQTTISYKVNAKGNLALEKKATEKGKDIVSELNSHLVNMYMASILSNLYTAQENVQAMVNVQSGNISNYQKNLLDSATNFQNIFPALVNQSSSSITANESLKKSLEASDNMFNDLVTTQTNTGKDLSSLIEQRHQDSISYEAFSASLLEMNNELLEKQLSDIITQAQKDQETLSSQLNSIMGDDNDNDHNHKENSSAYLNVARQKIQELSEALKSQDNVAKDQSEQLDKIVREGLASYFAKNNKDNITLLELLKSHSNNEKTLKDFKAKVADFTNSLISSIPSLNLSELHLTQEEEKAIQFTSSDSEIIKKVSNERTLYLNTNLLNRLFEARKNRDEAKNKVNQLKLPSSSTRTGEQIVSVESNNPDYRVDTWTVNGKQTRTLDPSQNNNIIINSSYQGESSNSSITKPSYTITIGNQKQIVQNDDGKTQRSYLETEATYQRTLQEVIDAYNTTHNLVSKYYIFSDGEEPQSLFDQFLNQSVNDTMVDLVKNGITKYLMDENTADAQQKVKDVMEEVENSQDELADQMAKVTETNVRLTDTIKKQLETLQSINMKVQNITQDQSKVNDSQKTTDQQLSDLKNQLDGLMTSATGVKDMSKSNSQEADQVNQIFTSFNKDVQDAKNSGNKLSTDATDLMANFQKELANNGDFVASFSKVFNTAYKNGVPNDILLNFLSRPVAESASAVRATENTYRPFTWILLLEVVSLFTAYIFATQNLXKKLTDRYNVNRWLQTDFLNVIVISGLSLVIGLALGVISSRSLHVMPEYVPSWFLVMTLFSFLLIHSQYFFIKNFKAVGMGLALFMIISFVYLSNAVGTVATVSGLPKLLKAINPLSILENQLSSYFDNVTTGFIFLILVLLVDVAFIIMNIFITLNFEAKVKE

SEQ ID NO: 20125 - protein, 288 aa, Streptococcus agalactiae; identical to SEQ ID NO: 10845

SEQ ID NO: 20126 - protein, 96 aa, Streptococcus agalactiae; identical to SEQ ID NO: 10846

SEQ ID NO: 20127 - protein, 288 aa, Streptococcus agalactiae; identical to SEQ ID NO: 10847

SEQ ID NO: 20128 - protein, 96 aa, Streptococcus agalactiae; identical to SEQ ID NO: 10848

SEQ ID NO: 20129 - protein, 780 aa, Streptococcus agalactiae
ATGATTCCAGATAGTAGTTTTAAAGTGCTATCAGACATGGCATATAATGTTGAAGAATCCAAAGCAAAAAGTAATGGACACCTTAAAATTATAGAAGGTAGTCAAATTATTGATTTCCATCAAAAACGCTCTTTTATGGTATTAGAGGTTAATGATAATATCGATAATGGTATGCAGGCTATGGCATGTCAGTCTTTGGATGAGAGTAATCATATTGTTATAGCATATTCAGGAACGAACGCTTTTAATAAGAAAGATATCTTAACAGATATCGATTCAGTTGTATTGGGGAAGAACAATAAATTGCTAACTTGTCCTTCAAGTATTACCCTGAGAGAGGATGGCATTTCTCTGCCTTGTAAAAATCCAAGTCAAATTACAACATCTAAACTATTTGCACAAAAAATTAAGATGAACTATCCTGATGCAACCCTCTGGTTAACAGGGCATTCTCTAGGTGGTTATTTGGCCATGATTGTGGCTTCAGAAATGAGATTATCAGCGCGTGTTTTTAATTCCCCTAGTCCCATTAACAATATGTCTGAAGCAGCCGCGTCCTATGTAATTTCACATCCAGAGAAGTATCGTAGTTACCGTATTAATAAAGATTACATTGGTAATTTTGGTATTAATAGTTCAGATGATAAATTAGGTATTTCTAAAAGAGTCAATGCTAAGAAGCAACATGGTTTTTATAAAAAGATTTTCTTTCACGAATTGACACGATTTCGATTAAATCAACAAGGACAGATTGTTGATATAGATGAAAATAAACAGGAT

SEQ ID NO: 20130 - protein, 260 aa, Streptococcus agalactiae
MIPDSSFKVLSDMAYNVEESKAKSNGHLKIIEGSQIIDFHQKRSFMVLEVNDNIDNGMQAMACQSLDESNHIVIAYSGTNAFNKKDILTDIDSVVLGKNNKLLTCPSSITLREDGISLPCKNPSQITTSKLFAQKIKMNYPDATLWLTGHSLGGYLAMIVASEMRLSARVFNSPSPINNMSEAAASYVISHPEKYRSYRINKDYIGNFGINSSDDKLGISKRVNAKKQHGFYKKIFFHELTRFRLNQQGQIVDIDENKQD

SEQ ID NO: 20131 - protein, 321 aa, Streptococcus agalactiae
ATGTTAAAAACACGAACACATATTAATGAATTAGAAACAAAAATCGCCCTTGATTTAGTACACAGATATCTAGGTATTCAACAACTTGTTTTTTCAAAGTGGAGGCATTCTTTAGAAACTGGTTCATGGTCTTCTATTATAACAATAAATGGCGCTAATATTATCAATTACATTGTTGATGATATTAGCGACAGTGATAGTATTTCAGGTATTATTTGTCATCCTAAAAGTTTTCATCTCAGACCTAGAGAAAAAAAGGAACCTATTCAGTCTATTGATGAGTTAGATATCATCTGGTCTTTGAATAGAGAGGAAAATGAA

SEQ ID NO: 20132 - protein, 107 aa, Streptococcus agalactiae; identical to SEQ ID NO: 15390

SEQ ID NO: 20133 - protein, 3176 aa, Streptococcus agalactiae
ATGCCAAAGCGCACAGACATACGTAAAATTATGGTTATCGGTTCTGGCCCGATTGTGATTGGACAAGCAGCAGAGTTTGACTATTCTGGTACACAAGCCTGTCTCTCTTTAAAAGAGGAGGGATACCAAGTTGTTTTGGTCAATTCGAATCCGGCTACTATCATGACAGATAAAGATATTGCTGATAAAGTTTATATTGAACCTATTACCTTGGAGTTTGTCACAAGAATTCTCAGGAAGGAAAGACCTGATGCTCTCCTTCCAACTCTTGGAGGTCAAACTGGATTGAATATGGCTATGGCTCTATCAAAAAATGGTATCCTAGAAGAATTGAATGTTGAACTATTAGGGACCAAATTATCAGCCATTGATAAAGCTGAAGATCGTGATTTATTTAAACAGTTGATGGAAGAACTCAATCAACCTATTCCAGAATCCGAGATTGTTAATTCGGTAGAAGAAGCTATTCAATTTGCAGAGCAAATCGGGTATCCATTAATTGTTCGTCCTGCCTTTACTTTAGGAGGTACAGGTGGAGGCATGTGCGATAATCAAGAACAATTGGTTGACATCACGACGAAGGGGTTAAAGTTATCGCCTGTGACACAGTGCCTTATTGAACGTTCAATTGCTGGCTTTAAAGAGATTGAATACGAAGTTATGCGTGATGCAGCAGATAACGCTCTTGTTGTTTGTAATATGGAGAATTTTGATCCTGTTGGTATCCATACAGGGGACTCTATAGTTTTTGCACCCGCACAAACGTTATCTGATGTGGAAAATCAGTTATTACGAGATGCGAGTTTAGATATTATAAGAGCTTTGAAAATTGAAGGAGGATGCAATGTTCAACTAGCCCTTGATCCGAATAGTTTTAAATACTATGTCATTGAAGTTAATCCAAGAGTATCAAGATCTTCTGCTTTAGCTTCAAAAGCTACTGGATATCCAATTGCTAAATTAGCAGCTAAGATAGCTGTTGGTTTGACACTAGATGAGGTAATTAATCCTATTACAAAAACGACTTACGCTATGTTTGAACCTGCTTTAGATTACGTAGTCGCAAAAATGCCGAGATTTCCTTTTGATAAATTTGAAAGTGGCGATAGAAAATTGGGAACACAGATGAAAGCTACAGGCGAAGTCATGGCAATAGGACGGAATATAGAAGAATCTTTGTTGAAAGCTTGTCGTTCACTAGAAATAGGTGTCGATCACATTAAAATAGCAGATTTAGATAATGTATCAGATGATGTTTTATTAGAAAAAATAAGAAAGGCAGAAGATGATCGCTTATTTTATCTAGCAGAAGCTTTACGTAGACATTATAGTATTGAAAAATTAGCAAGTTTGACTAGCATTGATTCTTTCTTCCTTGATAAGTTAAGAGTGATTGTAGAGTTAGAAGATCTATTATCTAAAAACAGACTGGATATCAATATTCTCAAAAAGGTTAAAAATAAAGGTTTTTCAGATAAAGCTATAGCGAGTTTATGGCAAATAAACGAAGATCAAGTTCGTAACATGCGAAAAGAAGCAGGAATTCTTCCAGTTTATAAGATGGTTGATACATGTGCGGCTGAGTTTGATTCAGCAACGCCCTACTTTTATTCGACTTATGCCGTAGAAAACGAGTCATTGATATCAGATAAAGCCTCTATTTTGGTTTTAGGATCGGGCCCAATCCGAATTGGACAGGGAGTTGAATTTGATTATGCAACGGTTCATTCTGTTAAAGCCATCAGAGAGTCTGGTTTTGAAGCGATTATCATGAACTCTAATCCAGAGACGGTCTCAACGGATTTCTCTATTTCAGATAAGCTTTACTTTGAACCTTTGACTTTTGAAGATGTTATGAATGTTATTGACTTAGAAAAACCTGAAGGGGTCATCTTACAATTCGGTGGTCAGACTGCTATTAATCTAGCAAAAGATTTAAACAAGGCAGGGGTTAAAATACTAGGCACACAATTAGAAGATTTGGATCGTGCTGAAAATAGAAAACAATTTGAAGCCACTTTACAAGCTCTAATATCCCTCAACCACCAGGTTTTACCGCCACTACGGAGGAAGAGGCAGTTAATGCAGCGCAAAAGATTGGTTATCCCGTGTTGGTTAGACCATCATATGTTCTTGGTGGACGAGCTATGAAGATAGTTGAAAACGAAGAAGATTTACGTCATTATATGACAACCGCGGTAAAGGCAAGCCCAGATCATCCAGTGCTTATAGATGCATACCTTATAAGTAAAGAGTGTGAGGTTGATGCTATATCCGATGGTCAGAATATACTGATTCCTGGAATAATGGAACATATAGAGCGAGCTGGTGTTCATTCAGGAGATTCCATGGCTGTATACCCTCCTCAAACATTTCTGAACCATTATCGAAACTATTGTAGATTATACAAAACGCTTAGCATTGGATTAAACTGTATCGGTATGATGAATATTCAGTTTGTAATCAAGGATCAGAAAGTATACGTTATTGAAGTTAATCCTCGTGCTAGTAGAACACTTCCATTCTTATCAAAAGTAACTCACATTCCTATGGCCCAAGTAGCAACAAAAGTTATCTTAGGAGATAAACTCTGCAATTTTACATATGGTTATGATCTCTATCCAGCTTCAGATATGGTCCACATTAAAGCCCCTGTCTTTAGTTTTACCAAACTTGCTAAAGTAGATAGTTTATTAGGTCCTGAAATGAAATCAACAGGCGAAGTGATGGGATCAGATATTAATCTTCAGAAAGCCTTGTATAAAGCCTTTGAAGCAGCATATCTCCATATGCCAGACTATGGTAACATTGTTTTTACAGTAGATGATACAGACAAAGAAGAAGCTTTAGAACTTGCAAAAGTCTATCAAAGTATTGGTTATCGTATTTATGCTACCCAAGGGACTGCAATTTATTTTGATGCTAATGGTTTAGAGACAGTTTTAGTAGGTAAGTTAGGAGAGAATGATCGAAATCATATTCCTGATTTAATTAAAAATGGTAAGATTCAAGCAGTTATCAACACAGTTGGGCAAAATAACATTGATAACCATGATGCTCTCATCATCAGACGTTCTGCAATTGAACAAGGAGTTCCTCTATTTACATCTTTAGATACTGCACATGCAATGTTCAAAGTTCTTGAAAGCAGAGCATTTACATTAAAAGTACTAGAT

SEQ ID NO: 20134 - protein, 1060 aa, Streptococcus agalactiae
  VARIANT 792, 794: Xaa = Any Amino Acid
MPKRTDIRKIMVIGSGPIVIGQAAEFDYSGTQACLSLKEEGYQVVLVNSNPATIMTDKDIADKVYIEPITLEFVTRILRKERPDALLPTLGGQTGLNMAMALSKNGILEELNVELLGTKLSAIDKAEDRDLFKQLMEELNQPIPESEIVNSVEEAIQFAEQIGYPLIVRPAFTLGGTGGGMCDNQEQLVDITTKGLKLSPVTQCLIERSIAGFKEIEYEVMRDAADNALVVCNMENFDPVGIHTGDSIVFAPAQTLSDVENQLLRDASLDIIRALKIEGGCNVQLALDPNSFKYYVIEVNPRVSRSSALASKATGYPIAKLAAKIAVGLTLDEVINPITKTTYAMFEPALDYVVAKMPRFPFDKFESGDRKLGTQMKATGEVMAIGRNIEESLLKACRSLEIGVDHIKIADLDNVSDDVLLEKIRKAEDDRLFYLAEALRRHYSIEKLASLTSIDSFFLDKLRVIVELEDLLSKNRLDINILKKVKNKGFSDKAIASLWQINEDQVRNMRKEAGILPVYKMVDTCAAEFDSATPYFYSTYAVENESLISDKASILVLGSGPIRIGQGVEFDYATVHSVKAIRESGFEAIIMNSNPETVSTDFSISDKLYFEPLTFEDVMNVIDLEKPEGVILQFGGQTAINLAKDLNKAGVKILGTQLEDLDRAENRKQFEATLQALNIPQPPGFTATTEEEAVNAAQKIGYPVLVRPSYVLGGRAMKIVENEEDLRHYMTTAVKASPDHPVLIDAYLISKECEVDAISDGQNILIPGIMEHIERAGVHSGDSMAVYPPQTXSXTIIETIVDYTKRLAIGLNCIGMMNIQFVIKDQKVYVIEVNPRASRTLPFLSKVTHIPMAQVATKVILGDKLCNFTYGYDLYPASDMVHIKAPVFSFTKLAKVDSLLGPEMKSTGEVMGSDINLQKALYKAFEAAYLHMPDYGNIVFTVDDTDKEEALELAKVYQSIGYRIYATQGTAIYFDANGLETVLVGKLGENDRNHIPDLIKNGKIQAVINTVGQNNIDNHDALIIRRSAIEQGVPLFTSLDTAHAMFKVLESRAFTLKVLD

SEQ ID NO: 20135 - protein, 1074 aa, Streptococcus agalactiae
ATGAAGCGTCTATTATTATTGGAAGATGGTAGTGTGTTTGAGGGTGAGGCTTTCGGAGCGGATGTAGAAACAAGTGGTGAAATTGTTTTTAGTACAGGAATGACAGGGTATCAAGAATCTATAACAGATCAATCTTACAACGGTCAAATCATTACTTTTACTTATCCTCTTATTGGAAATTATGGGATAAATCGAGACGATTACGAATCTATTAGACCAACATGTAAGGGAGTAATTGTTTATGAATGGGCAGAGTATCCAAGTAACTGGCGTCAACAGATGACACTTGATGAATTTTTAAAATTAAAAGGAATACCTGGAATTTCAGGTATAGATACTCGAGCATTAACAAAAATTATTCGAAAACATGGAACAATGAAAGCTTGTTTAATAAACGAGGGAAATTCTATTCATGAAGCACTAGAAAACCTTCAAAAAAGTGTTCTTTTAAATAATCAAATTGAACAAGTATCAACCAAATTAGCTTATGCTTCGCCTGGAGTTGGCAAAAATATTGTATTAGTTGACTTTGGTTTAAAACATTCTATTCTAAGAGAACTGTCACAACGTCAATGTCATATTACAGTCGTCCCTCATACTACGACAGCGCAAGAAATCTTAAATCTCAATCCAGATGGAGTACTCTTATCTAACGGCCCTGGGAACCCAGAACAATTACCGAATGCTTTACAAATGATCCAAGAAATTCAAGGTAAAATTCCAATTTTTGGTATTTGTATGGGACATCAACTATTTGCTAAAGCCAATGGTGCAAAGACTTATAAAATGACTTTTGGTCATCGAGGTTTTAACCATGCTGTTCGTCATTTGCAAACAGGACAGGTTGATTTTACAAGTCAAAATCATGGTTATGCTGTCTCGAGAGAAGATTTCCCTGAGGCTCTCTTCATTACACATGAAGAGATTAATGATAAAACCGTCGAAGGTGTTCGACATAAATACTATCCTGCCTTTTCAGTGCAGTTTCATCCAGATGCAGCACCAGGGCCGCATGATACATCTTATCTTTTTGATGAATTTATTAATATGATTGATGATTTCCAGCAAAAAAGC

SEQ ID NO: 20136 - protein, 358 aa, Streptococcus agalactiae
MKRLLLLEDGSVFEGEAFGADVETSGEIVFSTGMTGYQESITDQSYNGQIITFTYPLIGNYGINRDDYESIRPTCKGVIVYEWAEYPSNWRQQMTLDEFLKLKGIPGISGIDTRALTKIIRKHGTMKACLINEGNSIHEALENLQKSVLLNNQIEQVSTKLAYASPGVGKNIVLVDFGLKHSILRELSQRQCHITVVPHTTTAQEILNLNPDGVLLSNGPGNPEQLPNALQMIQEIQGKIPIFGICMGHQLFAKANGAKTYKMTFGHRGFNHAVRHLQTGQVDFTSQNHGYAVSREDFPEALFITHEEINDKTVEGVRHKYYPAFSVQFHPDAAPGPHDTSYLFDEFINMIDDFQQKS

SEQ ID NO: 20137 - protein, 921 aa, Streptococcus agalactiae
ATGAATCATCAAACACAAACACTTTCATTAGAACATTTTGTCAGTTTAGAAGAATTATCAAATCAAGAAGTTATGTCTTTGATAAAGAGAAGTATCGAAGTTAAAGAAAATCCTAGCAACATTGGTTTTGATAAAGATTACTATGTGTCAAATCTCTTTTTTGAGAATTCAACAAGAACACATAAGTCATTTGAAATGGCAGAACTCAAATTAGGATTAAAAACAATTGAATTTAATGCTGATACAAGTTCTGTTAATAAAGGAGAAACCCTTTATGACACTATCTTAACAATGAGTGCTCTAGGATTGGACGTTTGTGTCATTAGGCACCCTGATATTGACTATTATAAAGAATTGATTGCTAGTCCGAACATTCATTCAGCTATTGTCAATGGGGGTGATGGCTCAGGCCAACATCCAAGCCAATCACTTTTGGATTTGGTAACTATTTACGAAGAATTTGGATACTTCAAAGGACTAAAAATTGCGATTGTAGGAGATCTAACTCACTCACGGGTAGCTAAATCTAACATGCAAGTGCTAAAACGATTAGGAGCTGAAATTTTCTTTTCTGGACCCAAAGAATGGTATAGTAGTCAGTTCGATGAATATGGGCAATATTTACCAATAGATCAGTTAGTTGATCAAATTGATGTCCTTATGCTTTTACGTGTTCAACACGAACGTCATGATGGTAAAGGGGTGTTTTCAAAAGAAAGCTATCATCAACAATTTGGTCTTACAAAAGAACGCTATAAACATTTAAGGGATACAGCAATTATTATGCACCCAGCACCCGTCAATAGGGATGTAGAGATTGCTAGCGATTTAGTAGAAGCAGATAAGGCTCGAATAGTGAAACAGATGAGTAATGGCGTCTATGCAAGGATAGCTATCTTAGAAGCAGTGCTCAATAGCAGA

SEQ ID NO: 20138 - protein, 307 aa, Streptococcus agalactiae; identical to SEQ ID NO: 1966

SEQ ID NO: 20139 - protein, 1290 aa, Streptococcus agalactiae
ATGTATATCATTAAAAACGGATTGATTATCGACCCTCAAAGTGGTTTTAATCAAGTATCAGACATGCTGATTGATCAAGGAAAAATTAAACAAATATCGAAAGAAATTGATATTAAAGGCATTCCAATCATTGATGCAAGCAATAAAATTGTAGCTCCAGGATTAGTCGATATTCATGTACATTTTCGTGAGCCTGGACAGACACATAAAGAAAATATCCATACAGGAGCCTTATCAGCTGCAGCAGGTGGTTTTACGACAGTTCTTATGATGGCCAATACTAACCCAACGATTTCTAGCCCAGAAATTGTAAAACAAGTTAAGGAGAGTGCAGCAAAAGAAGCAATTAAGATTGAAACAGTTGCTACAATTACTAAATCCCTGAATGGTAAAGATTTAGTTAATTTCGAAGAATTATTAGAAGCTGGAGTTGCTGGATTCTCAGACGATGGTATCCCTTTGACAGATACTAAGGTTTTGCAAGAAGCTATGAACTTAGCTAGAAAACATGATGTTGTCCTATCGTTACATGAAGAGGATCCATCGTTAAATGGTGTTCTTGGTATCAACGAACATATTGCTCAGAAAATTTATCATGTCTGTGGAGCTAGTGGTCTTGCTGAATATTCAATGATTGCGCGAGATGCTATGATTGCTTACCAAACACAGGCGAAAGTCCATATCCAGCATTTGTCAAGTTCAGAATCAGTAGAAGTAGTTGATTTTGCGCAGAAGCTTGGTGCTAACTTAACAGCAGAAGTAACCCCCCAACATTTTTCAAAGACAGAGGACTTACTTTTAACTAAGGGTGCTAATGCAAAATTAAATCCACCACTGCGACTTGAAAAGGATAGACAAGCCCTCATTGATGGTCTTAAAAGTGGTGTTATTTCAATTATTGCAAGTGATCACGCTCCCCATCATATTATGGAGAAAGCAGCAGATAATATTAGTCAAGCGCCCTCTGGTATGACTGGCTTAGAGACAACATTAGCCTTAGGGATTACTTATTTAGTATCTACTAAAGAACTCTCAATGATTGACTTTTTGGCAAAAATGACATGTAATCCTGCACAGTTATATGGATTTGATGCAGGTTATCTCAGAGAAGGTGGACCTGCAGATATCGTTATTTTTGATCAAGCTCAAGAGAGAATAATAAAGGCAGAATTTGCCTCCAAATCCAGCAACTCTCCTTTTATCGGTGATAAATTGAAGGGAGTTGTTCACTACACAATTTGCAATGGTGAAATAGTCTATCAAAAAGATAGCCACGCAGCAACATTGGTA

SEQ ID NO: 20140 - protein, 430 aa, Streptococcus agalactiae
MYIIKNGLIIDPQSGFNQVSDMLIDQGKIKQISKEIDIKGIPIIDASNKIVAPGLVDIHVHFREPGQTHKENIHTGALSAAAGGFTTVLMMANTNPTISSPEIVKQVKESAAKEAIKIETVATITKSLNGKDLVNFEELLEAGVAGFSDDGIPLTDTKVLQEAMNLARKHDVVLSLHEEDPSLNGVLGINEHIAQKIYHVCGASGLAEYSMIARDAMIAYQTQAKVHIQHLSSSESVEVVDFAQKLGANLTAEVTPQHFSKTEDLLLTKGANAKLNPPLRLEKDRQALIDGLKSGVISIIASDHAPHHIMEKAADNISQAPSGMTGLETTLALGITYLVSTKELSMIDFLAKMTCNPAQLYGFDAGYLREGGPADIVIFDQAQERIIKAEFASKSSNSPFIGDKLKGVVHYTICNGEIVYQKDSHAATLV

SEQ ID NO: 20141 - protein, 627 aa, Streptococcus agalactiae
ATGGATTTAGCAAGACAGATTGCCATGGAACTATTAGATATTCAAGCTGTTTACTTAAGACCCAAACAACCCTTTACTTGGGCTTCGGGGGTCAAATCGCCAATTTACACTGATAATCGTGTAACCTTATCGTATCCTGAGACAAGGACACTGATTGAAAATGGTTTTGTTAAACAAATACAGGAACATTTCCCAAACGTTGATATCATCGCAGGGACAGCGACTGCAGGCATACCACATGGCGCTATTATAGCTGATAAGATGAACTTGCCCTTTGCCTATATACGCTCGAAGGCAAAGGATCATGGTGTGGGGAATCAAATCGAGGGACGTGTTTACTCAGGCCAAAAAATGGTTATCATTGAAGATTTGATTTCAACAGGAGGATCTGTTTTAGAGGCTGTTACGGCTGCGCAGAGTCAAGGTATTGAGGTTTTAGGGGTAGTAGCGATATTTACATATCAATTAGCTAAGGCTGAACAAGCATTTCGTGAAGCTAATATTCCTTTGGTGACTTTGACGGATTACAATCAATTAATTAAAGTTGCTAAAGTTAATGGATATATTACAGCTGACCAACTGGTATTACTGAAAAAATTTAAAGAAGATCAAATGAATTGGCAAAGT

SEQ ID NO: 20142 - protein, 209 aa, Streptococcus agalactiae
MDLARQIAMELLDIQAVYLRPKQPFTWASGVKSPIYTDNRVTLSYPETRTLIENGFVKQIQEHFPNVDIIAGTATAGIPHGAIIADKMNLPFAYIRSKAKDHGVGNQIEGRVYSGQKMVIIEDLISTGGSVLEAVTAAQSQGIEVLGVVAIFTYQLAKAEQAFREANIPLVTLTDYNQLIKVAKVNGYITADQLVLLKKFKEDQMNWQS

SEQ ID NO: 20143 - protein, 698 aa, Streptococcus agalactiae
ATGTTAGAAAAATGCCCTATCATTGCCTTAGATTTTTCTGATTTGGCTTCTGTAACAACTTTTTTAGAACATTTTCCAAAAGAAGAATTGCTTTTTGTCAAAATAGGAATGGAGCTTTATTATTCCGAAGGTCCCTCAATTATTAGATATATTAAATCCTTAGGACATCGCATTTTTTTGGATTTAAAATTACATGATATCCTAATACAGTTCGATCATCTATGTCTGTCTTAGCCAAATTAGGCATTGATATGACTAATGTCCATGCTGCAGGAGGAGTCGAAATGATGAAAGCAGCTAGAGAAGGTTTGGGGGAGGGTCCAATACTATTAGCAGTGACACAATTAACCTCGACTTCACAAGAACAAATGCAGGTGGATCAACATATTAACTTAAGTGTAGTTGATTCGGTTTGCCATTATGCTCAAAAAGCTCAAGAAGCAGGCTTAGATGGAGTAGTCGCATCGGCTCAAGAGGTAAAGCAAATCAAGAAACAGACTAACGAACATTTCATTTGCTTAACGCCTGGTATCAGACCTCCACAAACCAATCAGTTAGATGATCAAAAAAGAACGATGACTCCTGAGCAAGCACGTATAGTTGGGGCTGATTATATCGTTGTGGGAAGACCTATAACGAAAGCAGAAAATCCATATCAAGCATATCTAGACATAAAAGAAGAATGGAATCGTATTAAA

SEQ ID NO: 20144 - protein, 233 aa, Streptococcus agalactiae
  VARIANT 68: Xaa = Any Amino Acid
MLEKCPIIALDFSDLASVTTFLEHFPKEELLFVKIGMELYYSEGPSIIRYIKSLGHRIFLDLKLHDIXNTVRSSMSVLAKLGIDMTNVHAAGGVEMMKAAREGLGEGPILLAVTQLTSTSQEQMQVDQHINLSVVDSVCHYAQKAQEAGLDGVVASAQEVKQIKKQTNEHFICLTPGIRPPQTNQLDDQKRTMTPEQARIVGADYIVVGRPITKAENPYQAYLDIKEEWNRIK

SEQ ID NO: 20145 - protein, 1230 aa, Streptococcus agalactiae
ATGCAAAATGATATGAGCGTTGTTCTTAGAGCAGGTAAATTACTGATTGAAAGCGGAGCAGAAGTCTATCGTGTCGAAGACACGATGAAGCATTTTGCTAAGGCTCTTCAGATAGAAAATTTTGAAGCTTATGTGGTTAGTAGCAGTATTATCGCTTCCGGGATTAACCGCTATGGTAAACAAGAAGCTAAAGTATGCAATACAGATGGTGTAACAGCAAATTTAGGTAGACTTGAAGCTGTTAATAACCTTTCTAGGCAAATTGCTAAACAAGACTTAGTATCTCCAGAAGAAATTGTAAAGCAGTTAGACTTAATTGAACATCAAAAAGATTATAGTTTACTTGTTACTTTAATTTCTTATTTTTGTGGAGCGGGTAGTTTTTCTTTAGCCTTGGGTAGTTCCTTATTAGATTCATTTTCCGCTGCTGTAACAGGCTTAATTTTAGGATATTTTCTGAATTTGATGGAAAGTCGTATACATACAGGATTTCTTTTGACCATTCTAGGTAGTTCTGTAGTGGCTTTAAGTGCTAATTTATTATATTTTTCAGGATTAGGTGAGCATCGTAGCATCATCATATTAGGGGCACTAATGGTTATGGTGCCAGGGGCTGCCTTTGTTAATTCGGTGAGAGAATTTTCGCAGAATAATTTTTCAACAGGTTTAGCTTTGATTATGTCTGCTTTACTCATTTGTATTTCTATATCAGCAGGCGTGGCTATTACAATTGAAATTATTCCGTTTGCAGAACAAATGACAGGTTCTTTTTCTGGTGTTCCTAATACCATCCTTGAGATTATCATCAGAACACTAATGGCCGGTTTAGGGACGATAGCCTTCTCTATTCTCTACCATGTTCCAAAACGTTATTTCCTTGACTTAGGTATACTAGGAGCAATATCTTGGATGCTCTACCTGATCTTATGGCAACAATTTCATATGGATGCTATAGCCGTATTTTTTCCAGGGCTCTTCATCACTTATTTTTCACGGCTATTAGCTGCTAAACGTAAGTGTCCTGCCACTGTCTTTTTAGCGACAAGTATGTTTCCTCTTATTCCAGGACTTAGCTTCTATAGAGCTGTTTACTTTTTATTGACGGGAGCAGATGCCTTAGCAATGGAATATTTTAGATCCTGTTTTGTAACAGCTTTTACAATTGCTATAGCAATCAGTATTGTACAGCAGATTCCTCTATCGTTCTTTATTAGACGTAAAATGATAAAA

SEQ ID NO: 20146 - protein, 410 aa, Streptococcus agalactiae; identical to SEQ ID NO: 6562

SEQ ID NO: 20147 - protein, 1537 aa, Streptococcus agalactiae
ATGAGTATTTTAGAATTACAAAACTTAAGTCACGGTTTTGGTGATCGTGCTATTTTTGAGATGTTTCTTTTCGCCTTTTAAAAGGTGAACATATAGGACTTATTGGTGCTAATGGTGAAGGAAAATCAACATTCATGTCAATTGTCACAGGTCATCTTCAACCTGATGAAGGAAAAATTGAATGGTCAAAATATGTAACTGCTGGTTACCTTGATCAACATACTGTATTAGAAGAAGGTCAAACAGTTCGTGATGTTTTGCGAACAGCATTTGATGAACTTTTTAAAACAGAGGCACGTATCAATGATATATATATATCCATGGCAGATGATGGCGCAGATGTAGATAGCCTTATGGAAGAAGTTGGAGAACTACAAGATCGTTTAGAATCACGTGATTTTTATACACTTGATGCTAAAATTGATGAAGTCGCACGGGCATTAGGAGTTATGGATTTTGGTATGGATTCTGATGTTACTGAATTATCTGGTGGTCAAAGGACAAAGGTTCTTTTAGCAAAACTGTTATTAGAAAAGCCAGACATCCTCCTGCTTGATGAGCCTACAAACTACCTTGATGCTGAACACATTGATTGGTTAAAACGCTATTTACAAAATTATGAAAATGCTTTTGTTTTAATCTCACACGATATTCCATTTTTGAACGATGTTATCAATATTGTCTATCATGTTGAAAATCAAGATTTAGTAAGATATTCCGGTGATTATACTAATTTTGAATCAGTCTATGCAATGAAAAGGCTCAATTAGAAGCAGCCTATGAACGTCAACAAAAGGAAATAGCTGATTTACAAAATTTTGTTAATCGTAATAAAGCACGCGTTGCAACACGTAATATGGCAATGTCTCGTCAAAAGAAATTAGACAAAATGGATATTATTGAGTTACAAGCAGAGAAACCAAAGCCAAGTTTTGAATTTAAAGAATCTCGCACAGCAGGACGTTTTATTTTCCAAGCTAAAGATCTTCAAATTGGATATGATCGTGCTTTAACAAAACCTCTAAACCTAACATTTGAACGTAATCAAAAAATAGCCATTGTTGGAGCAAATGGGATAGGAAAAACAACATTACTTAAGAGTTTACTAGGTATTATCCCCCCTATTTCTGGTAATGTTGAACGAGGTGATTTTATTGATTTAGGTTATTTTGAACAAGAAGTACCCGGAGGAAATCGCCAAACTCCACTTGAAGCAGTATGGGATGCTTTTCCTGCTTTGAACCAAGCAGAGGTTAGGGCAGCTCTTGCTCGTTGTGGTTTAACTTCAAAGCATATTGAAAGTCAGATTCAGGTGTTATCTGGTGGGGAGCAATCAAAGGTCAGATTTTGCTTATTAATGAATCGCGAAAATAATGTCCTTGTACTTGATGAACCAACCAATCATTTAGATGTAGATGCTAAAGATGAGTTAAAACGTGCTTTAAAAGCTTATAAGGGATCAATCTTGATGGTATGTCATGAACCGGACTTTTATGAAGGATGGATGGATGATGTTTGGGACTTTAACCAACTTAGT

SEQ ID NO: 20148 - protein, 513 aa, Streptococcus agalactiae
MSILELQNLSHGFGDRAIFENVSFRLLKGEHIGLIGANGEGKSTFMSIVTGHLQPDEGKIEWSKYVTAGYLDQHTVLEEGQTVRDVLRTAFDELFKTEARINDIYISMADDGADVDSLMEEVGELQDRLESRDFYTLDAKIDEVARALGVMDFGMDSDVTELSGGQRTKVLLAKLLLEKPDILLLDEPTNYLDAEHIDWLKRYLQNYENAFVLISHDIPFLNDVINIVYHVENQDLVRYSGDYTNFESVYAMKKAQLEAAYERQQKEIADLQNFVNRNKARVATRNMAMSRQKKLDKMDIIELQAEKPKPSFEFKESRTAGRFIFQAKDLQIGYDRALTKPLNLTFERNQKIAIVGANGIGKTTLLKSLLGIIPPISGNVERGDFIDLGYFEQEVPGGNRQTPLEAVWDAFPALNQAEVRAALARCGLTSKHIESQIQVLSGGEQSKVRFCLLMNRENNVLVLDEPTNHLDVDAKDELKRALKAYKGSILMVCHEPDFYEGWMDDVWDFNQLS

SEQ ID NO: 20149 - protein, 1047 aa, Streptococcus agalactiae
ATGGGAACTCTAAAATCCAGAACGGTCTAACGGATTTCTCTATTTCAGATAACTTTACTTGACCTTTGATTTTGAAGATGTTATGAATGTTATTGACTTAGAAAAACCTGAAGGGGTCATCTTACAATTCGGTGGTCAGACTGCTATTAATCTAGCAAAAGATTTAAACAAGGCAGGGGTTAAAATACTAGGCACACAATTAGAAGATTTGGATCGTGCTGAAAATAGAAAACAATTTGAAGCCACTTTACAAGCTCTAAATATCCCTCAACCACCAGGTTTTACCGCCACTACGGAGGAAGAGGCAGTTAATGCAGCGCAAAAGATTGGTTATCCCGTGTTGGTTAGACCATCATATGTTCTTGGTGGACGAGCTATGAAGATAGTTGAAAACGAAGAAGATTTACGTCATTATATGACAACCGCGGTAAAGGCAAGCCCAGATCATCCAGTGCTTATAGATGCATACCTTATAGGTAAAGAGTGTGAGGTTGATGCTATATCCGATGGTCAGAATATACTGATTCCTGGAATAATGGAACATATAGAGCGAGCTGGTGTTCATTCAGGAGATTCCATGGCTGTATACCCTCCTCAAACATTGTCTGAGACCATTATCGAAACTATTGTAGATTATACAAAACGCTTAGCAATTGGATTAAACTGTATCGGTATGATGAATATTCAGTTTGTAATCAAGGATCAGAAAGTATACGTTATTGAAGTTAATCCTCGTGCTAGTAGAACACTTCCATTCTTATCAAAAGTAACTCACATTCCTATGGCCCAAGTAGCAACAAAAGTTATCTTAGGAGATAAACTCTGCAATTTTACATATGGTTATGATCTCTATCCAGCTTCAGATATGGTCCACATTAAAGCCCCTGTCTTTAGTTTTACAAACTTGCTAAGTAGATAGTTTATTAGGTCCTGAAATGAATCACAGGCGAAGTGATGGGATCAGATATTAATCTTCAGAAAGCCTTGTATAAAGCCTTTGAAGCAGCATATCTCCATATGCCAGACTATGGTAACATTGTGATACAG

SEQ ID NO: 20150 - protein, 353 aa, Streptococcus agalactiae
MGTLKSRKTVSTDFSISDKLYFEPLTFEDVMNVIDLEKPEGVILQFGGQTAINLAKDLNKAGVKILGTQLEDLDRAENRKQFEATLQALNIPQPPGFTATTEEEAVNAAQKIGYPVLVRPSYVLGGRAMKIVENEEDLRHYMTTAVKASPDHPVLIDAYLIGKECEVDAISDGQNILIPGIMEHIERAGVHSGDSMAVYPPQTLSETIIETIVDYTKRLAIGLNCIGMMNIQFVIKDQKVYVIEVNPRASRTLPFLSKVTHIPMAQVATKVILGDKLCNFTYGYDLYPASDMVHIKAPVFSFTKLAKVDSLLGPEMKSTGEVMGSDINLQKALYKAFEAAYLHMPDYGNIVIQ

SEQ ID NO: 20151 - protein, 360 aa, Streptococcus agalactiae
GTGGAAACAAAAAGTCAGGGCAATGTTCTAGAACGTCGTCAACGTGATGTTGAGAATAAGAGCCAAGGCAATGTTCTAGAGCGTCGCCAACGTGATGCAGAAAACAAAAGTCAGGGTAATGTTCTAGAGCGTCGTCAACGCGATGCAGATAACAAGAGCCAAGGTAATGTTCTAGAACGTCGTCAACGCGATGTGGAAAACAAAAGTCAGGGCAATGTTCTAGAGCGTCGCCAACGTGATGTTGAGAACAAGAGCCAAGTAGGTCAACTTATAGGGAAAAATCCACTTCTTTCAAAGTCAACTATATCTAGAGAAAATAATCACTCTAGTCAAGGTGACTCTAACAAAACAGTCATTCTC

SEQ ID NO: 20152 - protein, 120 aa, Streptococcus agalactiae
METKSQGNVLERRQRDVENKSQGNVLERRQRDAENKSQGNVLERRQRDADNKSQGNVLERRQRDVENKSQGNVLERRQRDVENKSQVGQLIGKNPLLSKSTISRENNHSSQGDSNKTVIL

SEQ ID NO: 20153 - protein, 1592 aa, Streptococcus agalactiae
TTGATTTGGAGGGGGGAAAAACTTATCAGTAATAAAGTCAAAATTGTTCGTTTACTTAATAAGAGTAAGAAAAGTTTACTAAGGGGTATATTTAGTCGAACAACCGTTATCGCTATTTTATTGATTTTACAATTATTGTTTTTACTAGCCTCTTACTCATGGCTAGAGCAGTATCGTGTTTGGTTAGCAACCGTTGAGCATATCTTAACAATTGGAGCGGTCTTATATTTAGTTAATAGTGAAATGGATGCTTTGTCCCGAGTAACTTGGTTAATATTGGTAATGATTGCCCCTTTACTAGGGGCGATGTTCCTAATGTACACCAAATTTGACTGGGGTTATCGTGGTTTGAAACAAAGATTGGAGACATTGATTGATGAGAGTCAGATTTATCTAGAGGATGATCCTGAAACTTTGAATCAGCTTAAGTCAAGTACATCCACAACATATCATTTGGTTCAATATTTTGAAAAAGCACATGGAAATTTCCCAGTTTATCGAAATACTGATGTGACATTTCTACCAACGGGAGAAGCATTCTTTGAAAAAATGAAAGAAGAACTACTAAAAGCTAAAAAGTATATCTTTTTAGAATTCTTTATCATTGACGAAGGAATAATGTGGGGAGAAATACTTAGTATTTTAGAACAAAAGGTGGAAGAAGGTGTTGAAGTCCGTATCTTATATGATGGTATGATAGAAATTACAAAATTATCCTTTGATTATACGAAACGACTTGAGAAAATAGGAATAAAAGCAAAAGCATTTTCTCCGATTTCTCCTTTTATTTCAACTTATTATAACTATCGTGACCATCGAAAAATTGTTGTTATTGATGGAGTAGTAGGCATGACTGGTGGTGTAAACTTAGCCGATGAGTATATTAATCACATTGAGTTATTTGGGCATTGGAAAGATTCAGGTATATGTTAAAGGGGAAAGCAGTGGATAGTTTCCTCCTACTTTTCTTACAGATGTGGTCCATTACTGAGGAAAAAATGTTAGTAGCGCCTTACCTTGGTGTACACGATGATTTAGTTGAAAATGAAGGCTATGTTATTCCTTATGGAGATTCTCCTTTAGACACTGATAAAGTAGGGGAAAATGTTTATATAGATATTCTTAATCATGCTAGAGAATATGTTTACATCATGACACCTTATTTAATATTAGACAGTGAATTGGAACATGCCATTCAGTTTGCTGCGGAACGTGGTGTAGATGTACGTATTATTATGCCGGGTATCCCAGATAAGCCAATCCCTTATGCTCTTGCTAAAACTTACTATCAAGCATTAACAAAATCAGGTGTTAAAATATATGAATACACCCCTGGATTTGTTCATTCAAAAATATTCCTTAGTGATAATACAAAGGCTGTTGTAGGTACGATAAATCTTGATTACCGTAGCCTGTATCACCATTTTGAATGTGCTGTCTATCTTTATAAGGTAGATGCAATCCAAGACATTTATCGAGATTATATGGATACGTTAAATAAATCAAGGTTAGTTAGCTTGAAAGATATAAATAATATTCCAAAATTCCAAAAAGTAATTGGCATAGTGACAAAAACTATTGCTCCCCTGCTT

SEQ ID NO: 20154 - protein, 531 aa, Streptococcus agalactiae
MIWRGEKLISNKVKIVRLLNKSKKSLLRGIFSRTTVIAILLILQLLFLLASYSWLEQYRVWLATVEHILTIGAVLYLVNSEMDALSRVTWLILVMIAPLLGAMFLMYTKFDWGYRGLKQRLETLIDESQIYLEDDPETLNQLKSSTSTTYHLVQYFEKAHGNFPVYRNTDVTFLPTGEAFFEKMKEELLKAKKYIFLEFFIIDEGIMWGEILSILEQKVEEGVEVRILYDGMIEITKLSFDYTKRLEKIGIKAKAFSPISPFISTYYNYRDHRKIVVIDGVVGMTGGVNLADEYINHIELFGHWKDSGIMLKGKAVDSFLLLFLQMWSITEEKMLVAPYLGVHDDLVENEGYVIPYGDSPLDTDKVGENVYIDILNHAREYVYIMTPYLILDSELEHAIQFAAERGVDVRIIMPGIPDKPIPYALAKTYYQALTKSGVKIYEYTPGFVHSKIFLSDNTKAVVGTINLDYRSLYHHFECAVYLYKVDAIQDIYRDYMDTLNKSRLVSLKDINNIPKFQKVIGIVTKTIAPLL

SEQ ID NO: 20155 - protein, 1668 aa, Streptococcus agalactiae
ATGAAAACAGATATTGAAATAGCGCAAAGCGTCGCCCTAAAGCCTATTGCTGAGATTGTTGAGCAAGTAGGAATTGGTTTTGATGATATAGAATTGTATGGTAAATACAAAGCAAAATTATCTTTTGATAAGATTGAAGCTGTAAGATCTCAAAAAGTAGGAAAGTTAATTTTAGTAACTGCTATTAATCCGACACCAGCAGGTGAGGGAAAATCCACTATGAGCATTGGATTAGCTGATGCTTTAAATAAAATTGGTAAAAAAACGATGATTGCGCTTCGCGAACCTTCTTTAGGTCCTGTAATGGGTATTAAAGGAGGAGCTGCTGGAGGTGGATACGCACAAGTACTACCAATGGAAGATATTAATTTGCATTTTACTGGTGATATGCACGCAATCACAACTGCTAATAATGCTTTATCAGCTCTACTTGATAATCATATTCATCAAGGCAATGAATTAGATATTGACCAACGTCGAGTGATTTGGAAGCGTGTAGTTGATCTTAATGATCGTGCTCTTCGTCAGGTGATCGTTGGCTTAGGAAGCCCTGTCAATGGGATACCACGTGAAGATGGCTTTGATATTACTGTTGCTTCTGAAATAATGGCTATTCTATGTTTAGCTACTGACCTATCAGATTTAAAGAAACGCCTGTCAAATATTGTTGTGGCTTACTCAAGGGACCGTAAACCAATTTATGTTAAAGATTTGAAGATTGAAGGAGCTCTCACACTTATCCTAAAAGATGCTATCAAACCTAATTTGGTTCAAACCATTTATGGGACACCGGCTCTTGTCCATGGGGGACCATTTGCTAATATTGCACATGGATGTAATTCTGTCTTAGCGACTTCAACAGCTCTACGCTTAGCAGATTACGTTGTTACTGAAGCTGGTTTTGGAGCAGACTTGGGCGCTGAAAAGTTTCTTGATATAAAAACGCCAAACCTTCCGACTTCTCCCGATGCGATTGTTATTGTTGCTACATTGCGTGCATTGAAAATGCATGGAGGTGTTTCAAAAGAAGATCTCTCACAAGAGAACGTCGAAGCAGTTAAAAGAGGTTTTACAAATCTCGAGCGTCACGTTAACAATATGCGTCAATATGGTGTTCCGGTAGTTGTAGCTATCAATCAGTTTACTGCAGATACAGAAAGTGAAATTGCAACTCTTAAAACCTTATGTAGTAATATTGATGTGGCAGTTGAATTAGCAAGTGTGTGGGAAGATGGAGCAGACGGTGGCCTTGAACTTGCACAGACTGTTGCTAATGTGATTGAAACACAATCATCCAATTACAAACGCTTATATAATGATGCAGACACTATTGAAGAAAAAATTAAAAAAATTGTTACTAAAATATATGGTGGTAATAAAGTCCATTTTGGACCTAAGGCACAAATACAATTAAAAGAGTTTAGTGACAATGGCTGGGACAAGATGCCTATTTGTATGGCAAAGACACAATATAGCTTTTCTGATAATCCAAATTTACTTGGTGCTCCAACTGACTTTGATATAACTGTTCGTGAATTTGTTCCAAAAACAGGAGCTGGTTTTATAGTTGCTCTTACTGGAGACGTATTGACAATGCCTGGTTTACCTAAAAAACCTGCAGCTCTCAATATGGATGTTTTAGAAGACGGTACAGCCATTGGATTATTT

SEQ ID NO: 20156 - protein, 556 aa, Streptococcus agalactiae
MKTDIEIAQSVALKPIAEIVEQVGIGFDDIELYGKYKAKLSFDKIEAVRSQKVGKLILVTAINPTPAGEGKSTMSIGLADALNKIGKKTMIALREPSLGPVMGIKGGAAGGGYAQVLPMEDINLHFTGDMHAITTANNALSALLDNHIHQGNELDIDQRRVIWKRVVDLNDRALRQVIVGLGSPVNGIPREDGFDITVASEIMAILCLATDLSDLKKRLSNIVVAYSRDRKPIYVKDLKIEGALTLILKDAIKPNLVQTIYGTPALVHGGPFANIAHGCNSVLATSTALRLADYVVTEAGFGADLGAEKFLDIKTPNLPTSPDAIVIVATLRALKMHGGVSKEDLSQENVEAVKRGFTNLERHVNNMRQYGVPVVVAINQFTADTESEIATLKTLCSNIDVAVELASVWEDGADGGLELAQTVANVIETQSSNYKRLYNDADTIEEKIKKIVTKIYGGNKVHFGPKAQIQLKEFSDNGWDKMPICMAKTQYSFSDNPNLLGAPTDFDITVREFVPKTGAGFIVALTGDVLTMPGLPKKPAALNMDVLEDGTAIGLF

SEQ ID NO: 20157 - protein, 1017 aa, Streptococcus agalactiae
ATGTATCTTATTGAACCAATTAGAAATGGTAAGCGTATCACAGACGGTGCGATTGCACTTGCCATGCAAGTTTATATTTTACAAAATGTTTTTTTAGATGATGATATTTTATTTCCATACTATTGTGATCCTAAAGTTGAAATCGGAAAATTTCAGAATGCAGTTATAGAGACAAATCAAGAATATTTGAAAGAACATGATATTCCTGTTGTTCGTCGAGATACTGGTGGAGGGGCTGTTTACGTTGACTCAGGTGCTGTAAATATTTGCTATCTCATGAAAGATCATGGACAATTTGGTGATTTCAAACGAGCTTATGAGCCAGCTATTAAGGCCCTAAAAACTTTAGGTGCCTCTAGTGTTGAAATGAGGGGACGAAATGACTTAGTTATTGATGGTAAAAAAGTATCAGGTGCAGCAATGACGATAGTAAACGGTCGTATTTACGGTGGTTACTCTCTTTTATTAGATGTTGATTTTGATGCTATGGAAAAAGTGTTAAATCCTAATCGGAAAAAAATTGAATCTAAAGGGATAAAATCTGTCCGAAGTCGAGTAGGAGATATTCGTAGCCACTTGTCAGAAGATTATCGTCATATCACAACCGATCAATTTAAAGATTTAATGGTTTGTCAATTATTACATATTGATCATATTGATCAGGCAAAACGCTATCACCTAACCGAAAAAGATTGGGCTGCGATTGACGCTCTAGCTGATGAAAAATATAAGAATTGGGATTGGAATTATGGTAACTCACCACAGTATTCGTATCACAGAGATGCTCGTTTTCCGTCAGGAACTTACGATTTTCACTTAGAAATTGAGAAAGGTATTATTACGAATTGCCGTATTTATGGTGACTTTTTCAGTTCTAAAGATATTTCAGATATTGAAAACCTTCTCATTGGTTGCCCTATGAAAGAAGAATTAGTCTTGGAAAAATTAAGTACTTTATCATTAGAAGATTATTTTGGTCAGACTAGTCCAGAAGAAATAAAAGCAGTTTTATTTTCA

SEQ ID NO: 20158 - protein, 339 aa, Streptococcus agalactiae; identical to SEQ ID NO: 6576

SEQ ID NO: 20159 - protein, 876 aa, Streptococcus agalactiae
ATGACAGTGTGGAAGACTCTAGAAAAAACTAATCATTCTCAATCAGAAATACTAAGTCAGTTAATAGAAGAATCAGATGCTATTGTAGTTGGTATTGGTGCTGGCATGTCTGCAGCGGATGGATTCACCTATATTGGCCCCAGATTTGAAGAAGCTTTTCCGGATTTTATTGCTAAATATCAACTATTAGATATGTTGCAAGCAAGTCTTTATGACTTTGAAGATTGGGAAGAATATTGGGCCTTCCAAAGTCGTTTTGTGGCACTTAATTATTTAGATCAACCGGTAGGGCAAGCTTATCTTGATTTAAAGGATATTTTAGCGAAAAAAGAATATCATATTATTACAACTAATGCTGATAATGCCTTCGCTGTGGCTGATTATAATTCAGAAAAAGTTTTTCATATTCAAGGTGAATATGGCTTATGGCAGTGTAGTCAACATTGTCATCAACAAACTTATCGAAATGATCAGGCAATTCGTCAAATGATTGCACAACAAAAGGATATGAAGATTCCTAGTAACTTAATCCCCAAATGCCCAAAGTGTGATCAACCGTTTGAAATTAATAAACGTAACGAAGAAAAAGGTATGGTGGAAGATGCTGACTTTCATGCTCAACGACAACGTTATGAAAATTTCTTATCACAACATCAAAATGACAAAGTTCTTTATCTAGAGATTGGAGTTGGACATACCACGCCACAATTTATTAAGCATCCGTTTTGGCGATTCGTCTCTTTAAATGAAAACTCTTTATTTGTTACTCTTAATCACAAGCATTATCGCATTCCTCAAAAGATTCGCTCAAGGAGTGTGCAACTGACACAGCATATCGCTGAATTAATTGCTGAAGCGAAAAAAGAAATTATTGGA

SEQ ID NO: 20160 - protein, 292 aa, Streptococcus agalactiae
MTVWKTLEKTNHSQSEILSQLIEESDAIVVGIGAGMSAADGFTYIGPRFEEAFPDFIAKYQLLDMLQASLYDFEDWEEYWAFQSRFVALNYLDQPVGQAYLDLKDILAKKEYHIITTNADNAFAVADYNSEKVFHIQGEYGLWQCSQHCHQQTYRNDQAIRQMIAQQKDMKIPSNLIPKCPKCDQPFEINKRNEEKGMVEDADFHAQRQRYENFLSQHQNDKVLYLEIGVGHTTPQFIKHPFWRFVSLNENSLFVTLNHKHYRIPQKIRSRSVQLTQHIAELIAEAKKEIIG

SEQ ID NO: 20161 - protein, 816 aa, Streptococcus agalactiae
ATGCCTAATCAAAAACAACTATTGCTAGCCATGATTGAGTATCTTCAGTCAGAAAAATTAACAGACGTTGATGACTTGAGGACCACCGATTTGCAAACGGTTTGGCGTGGTCTAGTTAATCAACAAGATCCTCAAAACATTAGTCAAGAGTACCTGTCTTTAGAAGATAGGTATTTGTCACATTGGTGGAATACTCAAAAAGTAAAAACGATAGACGTCTGTCATCAAACGGTATATTCAAATGTATTTACCTACCATGGGGATATTTGCTTATTACAAGTGGATGCTATTGTTAATGCAGCAAATAGTAAGTTGTTAGGTTGTTTTATTCCTAATCACCATTGTATTGACAATCAGATTCATACGTTTGCAGGTTCACGATTACGTTTAGCATGTCATCAATTGATGACAGAACAAGGACGAATGGAAGCCATAGGACAAGCTAAACTTACCGAATCCTATCATCTTCCTTGTAAGTATGTTATTCATACAGTCGGACCTTATGTAAAAGTTGATCAAAAGCCATCTCGTATAAGAGAGGATTTATTAAAGTCTTCTTATAAATCCTGCTTACAGTTGGCAGTTCGAGCTAATCTTAAAACAATTGTCTTCCCTTGCATATCAACGGGAGAATTTGGTTTTCCTAATCAAAGAGCTGCTGAATTGGCTGTTCAAGCGATATTAGAGTGGCAACGCGAAAATCAGCACAAACTCTATATTATTTTCAATACATTCACACCTAAAGACCAAGAGATTTATCAAAAATTATTATTAAAAGAGGAAATAGATGACAGTGTGGAAGACTCTAGAAAAAAC

SEQ ID NO: 20162 - protein, 272 aa, Streptococcus agalactiae
MPNQKQLLLAMIEYLQSEKLTDVDDLRTTDLQTVWRGLVNQQDPQNISQEYLSLEDRYLSHWWNTQKVKTIDVCHQTVYSNVFTYHGDICLLQVDAIVNAANSKLLGCFIPNHHCIDNQIHTFAGSRLRLACHQLMTEQGRMEAIGQAKLTESYHLPCKYVIHTVGPYVKVDQKPSRIREDLLKSSYKSCLQLAVRANLKTIVFPCISTGEFGFPNQRAAELAVQAILEWQRENQHKLYIIFNTFTPKDQEIYQKLLLKEEIDDSVEDSRKN

SEQ ID NO: 20163 - protein, 330 aa, Streptococcus agalactiae
ATGAAAAAAATTGCGAACTACTTATTAATTGAAAAAAATGAAGAACTTTATACTATCAGCTTAACTCCCGAACTTCAAGATGACTTGGGAACTGTTGGATATGTGGAATTCACAGACGATACAAATTTAGAAGTTGATGATGTTATTTTAAATATTGAAGCTTCAAAGACGGTTATGGCAATTTTATCTCCTCTTACAGGTAAAGTTGTTAAAGTTAATACAGCTGCAAGTCAAGAACCAACTTTGTTAAATTCTGAAAAAGCTGACGAAAATTGGTTGGTTGTGTTAACAGACGTTGATTATGCTGCTTTTGAAGCTTTAGAAAATGCC

SEQ ID NO: 20164 - protein, 110 aa, Streptococcus agalactiae; identical to SEQ ID NO: 6582

SEQ ID NO: 20165 - protein, 984 aa, Streptococcus agalactiae
ATGAAATTAAGTGTCCTTGATTATGGGCTTATTGATTATGGCAAAACTGCAAGTGATGCAATACAAGAAACGATTCTTTTATCACAAGAGGCGGAGCGACTAGGATATCATCAATTTTGGGTGGCTGAACATCACGGTGTTAAGGCATTCAGTATTAGCAATCCAGAATTAATGATAATGCATTTGGCTAACCAGACTAAATCTATCAAAATTGGCTCTGGAGGTATAATGCCTCTGCACTATAGTAGTTTTAAACTCGCGGAGACTCTCAAGACACTAGAGACATGTCATCCGAATCGAGTAAGTATTGGTTTAGGAAATTCACTAGGGACAGTTAAAGTTTCAAATGCACTTCGTAGCTTACATAAAGCACATGACTACGAAGAGGTACTGGAGGAATTGAAGTCATGGCTTGTTGATGAATCATCCAGTAAGGAACCCTTAGTTCAACCGACTCTTTCTAGCTTCCCAGACTTATATGTGTTGGGGAGTGGTCAAAAATCAGCTTATTTAGCGGCTAAACTTGGCTTAGGCTTTACCTTCGGTGTTTTTCCTTTTATGGACAAAGACCCATTGACAGAAGCTAAAAAGCTTTCATCTCTTTATTATCATCAGTTTGAAGAATATTATCCTAATAAGTCTCCTAATTTGATGATAGCTGCATTTGTAGTTATAGCTGATACTTCAGAAGAAGCTGAAAACATAGCAAAGACTTTAGATATCTGGATGCTAGGAAATAAAGACTTCAATGAATTTGCAACATTTCCTACTATTGAAGAAGCTAATCATTACCAATTGACTCCTGAACAAAAAGCAAAAATTAAATCAAATCGCCACCGTATGATTGTAGGTGATCCAAAACAAGTTAAAGAAAGCCTTGACGCTTTAGTTAATGCTAGTCAAGCAGAAGAACTACTTTTGATTCCTCTTGTTCCAGGGCTTGATCAACGAATCAAATCCTTAAAATTATTATCACAGTTATAT

SEQ ID NO: 20166 - protein, 328 aa, Streptococcus agalactiae
MKLSVLDYGLIDYGKTASDAIQETILLSQEAERLGYHQFWVAEHHGVKAFSISNPELMIMHLANQTKSIKIGSGGIMPLHYSSFKLAETLKTLETCHPNRVSIGLGNSLGTVKVSNALRSLHKAHDYEEVLEELKSWLVDESSSKEPLVQPTLSSFPDLYVLGSGQKSAYLAAKLGLGFTFGVFPFMDKDPLTEAKKLSSLYYHQFEEYYPNKSPNLMIAAFVVIADTSEEAENIAKTLDIWMLGNKDFNEFATFPTIEEANHYQLTPEQKAKIKSNRHRMIVGDPKQVKESLDALVNASQAEELLLIPLVPGLDQRIKSLKLLSQLY

SEQ ID NO: 20167 - protein, 1197 aa, Streptococcus agalactiae
ATGAATAATGTCCAAGGTAATTTATTTCGTCCATTAACGCTTCCCAATGGATTGAGCTTAGAAAATCGTTTTGTTCTATCACCTATGGTAACTAATTCTTCTACATCAGAAGGTTTTGTAACTGATGACGACATAGCATATGCTGTTCGTCGTGCTAAATCCGCTCCATTACAAATTACTGGAGCAGCATATATCACAGAATATGGTCAGTTATTTGAATATGGTTTTAGCGTTTCAAAGGATGAGGACATTCCTGGTTTGACTAAATTGGCTAAAGCAATGAAGTCTAAGGGAGCGAAAGCTGTTTTGCAGCTGACGCATGCTGGACGTTTCTCAAGTCACACTTTGGCAAGACACGGATATGTATATGGTCCCAGCCCTATGCAATTACAATCGCCATACCCACATCAGGTTAAAGAACTAACACACAAAGATATACTAAGAATTATCGATGAATATGTCCAGGCTACAAGACGAGCTATACAAGCTGGATTTGATGGTGTTGAAATATCTTCTGCACAACGATTACTAATTCAAACTTTTTTCTCAACCTTCTCAAATCAAAGAAAAGATGAGTATGGTCCTCAAACTTTGACTAATCGCTGTCGTTTAGGCTTAGAAGTTTTTAAAGCGGTACAAAAAGTTATCAGAGAAGAAGCAGAGTCAGATTTTATCCTTGGTTTTAGAGCGACGCCTGAAGAAACTCGCGGTTCACAAATTGGATATAGCATTGAAGAGTTTATGGAATTTCTTGAAAAAATTTTAGCGATTGCTCAGGTAGATTATCTTGCCATTGCAAGCTGGGGGCATGATGTCTTTAGAAATACTATACGTTCTGAGGGAGTTTACAAAGGGCAGCTGGTTAATCAAGTTATATTTGAACATTTTGGTGATAGAGTTCCAATTATGGCAACTGGAGGTATTAATAGTGCTTCAAAGGTGTTTGAAGCCTTACAACATGCTCATATGGTAGGAGCTTCCACGCCCTTAGTAGTTGATCCGGAATTTTTACAAAAAATAAAAGCTAAGCGTTCTGATCAGATTAATTTAAGGATTAAAGTGAGTGATTTAGAAGGTTTGGCGATTCCAAAAGCCTCCTTTAAAGATATTGTTCCTTTGATGGATTATGGAGAATCTTTACCAAAGGAAGCTCGAGAAGTTTTTAGAGAACTTCGAAGCAATTATAGGGAGGAAAGA

SEQ ID NO: 20168 - protein, 399 aa, Streptococcus agalactiae
MNNVQGNLFRPLTLPNGLSLENRFVLSPMVTNSSTSEGFVTDDDIAYAVRRAKSAPLQITGAAYITEYGQLFEYGFSVSKDEDIPGLTKLAKAMKSKGAKAVLQLTHAGRFSSHTLARHGYVYGPSPMQLQSPYPHQVKELTHKDILRIIDEYVQATRRAIQAGFDGVEISSAQRLLIQTFFSTFSNQRKDEYGPQTLTNRCRLGLEVFKAVQKVIREEAESDFILGFRATPEETRGSQIGYSIEEFMEFLEKILAIAQVDYLAIASWGHDVFRNTIRSEGVYKGQLVNQVIFEHFGDRVPIMATGGINSASKVFEALQHAHMVGASTPLVVDPEFLQKIKAKRSDQINLRIKVSDLEGLAIPKASFKDIVPLMDYGESLPKEAREVFRELRSNYREER

SEQ ID NO: 20169 - protein, 831 aa, Streptococcus agalactiae
TTGGAATGGCAAGATCTAGCGCAGTTACCTGTATCTATTTTTAAAGACTATGTTACAGATTCTCAAGACGCGGAAAAACCTTTTATATGGACAGAAGTATTTTTAAGGGAGATTAATCGCTCAAATCAAGAAATTATTTTGCATATTTGGCCGATGACTAAGACAGTCATTCTGGGGATGTTAGATCGAGAATTACCACATTTAGAATTAGCTAAAAAAGAAATCATCAGTCGTGGCTATGAACCAGTTGTTCGGAATTTTGGTGGTCTCGCAGTTGTAGCTGATGAAGGAATTTTAAATTTTTCATTGGTTATTCCAGATGTTTTTGAGAAAAAATTGTCTATCTCAGATGGGTATCTTATAATGGTCGATTTTATTAGAAGTATATTTTCGGATTTTTATCAACCTATTGAACACTTTGAAGTAGAGACCTCCTATTGTCCTGGTAAGTTTGATCTTAGTATAAATGGCAAAAAATTTGCTGGCTTGGCTCAGCGCCGTATAAAGAATGGTATTGCGGTATCGATTTACCTTAGCGTTTGTGGCGATCAAAAAGAACGGAGTCGAATGATTTCAGATTTCTATAAGATTGGTCTAGGTGATACGGGTAGTCCAATTGCTTATCCAAATGTAGATTCTGAAATTATGGCTAATCTATCTGATCTATTAGATTGTCCTATGACAGTAGAAGATGTTATTGATCGTATGTTGATTAGCCTTAAACAAGTAGGTTTTAATGATCGTTTACTGATGATTAGACCCGATTTAGTTGCAGAGTTTGATAGATTTCAGGCTAAGTCTATGGCTAATAAAGGGGATGGTGAGCAGAGA

SEQ ID NO: 20170 - protein, 277 aa, Streptococcus agalactiae
MEWQDLAQLPVSIFKDYVTDSQDAEKPFIWTEVFLREINRSNQEIILHIWPMTKTVILGMLDRELPHLELAKKEIISRGYEPVVRNFGGLAVVADEGILNFSLVIPDVFEKKLSISDGYLIMVDFIRSIFSDFYQPIEHFEVETSYCPGKFDLSINGKKFAGLAQRRIKNGIAVSIYLSVCGDQKERSRMISDFYKIGLGDTGSPIAYPNVDSEIMANLSDLLDCPMTVEDVIDRMLISLKQVGFNDRLLMIRPDLVAEFDRFQAKSMANKGDGEQR

SEQ ID NO: 20171 - protein, 699 aa, Streptococcus agalactiae
ATGTACAATATGGCTATGAAAATTTTGATTACATCAGGTGGAACTACCGAGAAAATTGATACCGTTAGGAGTATCACGAATCACGCAACAGGAACTTTAGGAAAAATAATTGCAGAAAAATATTTACGAGAAGGACATCAGGTGACACTCGTGACTACTAAAAATGCAGTCAAACCAGAATCTGCTACCAACTTATCCATATTTGAGATTGAGGACGTTGACTCATTAATAAAAACCTTGAAGCCATTAGTGAAAGAGCACGATATTTTAATTCATAGCATGGCAGTGTCTGACTATACCCCCGTCTACATGGCCGATTTCGAAAAGGTTAAATCAAGCGATGATTTAGATACTTTTTTGCGCAAAGATAACCACGAAGGGAAAATATCATCTGAATCAGAATATCAAGTCCTTTTTCTCAAAAAAACACCAAAAGTTATCAGCCTTGTGAAAAAATGGAATCCTCAAATTACTCTAGTAGGTTTTAAACTACTTGTGAACGTTACTAAAGAAAATCTTTTTAAAGTTGCTCGTCATAGCTTAATCAAAAATAAAGCTACGTTTATTTTAGCTAATGACCTCATTGATATTACCTCAAAACATCACATAGCCTACCTACTTGATCATGATAATGTGTATAAAGCTACCACCAAAGAAGACATTGCTCAATTAATTTACGAGAAGGTAAAAAAATATGAT

SEQ ID NO: 20172 - protein, 233 aa, Streptococcus agalactiae
MYNMAMKILITSGGTTEKIDTVRSITNHATGTLGKIIAEKYLREGHQVTLVTTKNAVKPESATNLSIFEIEDVDSLIKTLKPLVKEHDILIHSMAVSDYTPVYMADFEKVKSSDDLDTFLRKDNHEGKISSESEYQVLFLKKTPKVISLVKKWNPQITLVGFKLLVNVTKENLFKVARHSLIKNKATFILANDLIDITSKHHIAYLLDHDNVYKATTKEDIAQLIYEKVKKYD

SEQ ID NO: 20173 - protein, 540 aa, Streptococcus agalactiae
ATGATTAAACGTATTACACTAGCCGTCACCGGTTCAATTTCGGCCTATAAAGCAGCAGACCTTACAAGTCAATTAACTAAAATTGGCTATGATGTTCATATCATAATGACACAAGCTGCCACAGAATTTATTACACCGTTAACTCTGCAAGTATTATCAAAAAATCCTATTCATTTAGATGTTATGGATGAGCATAACCCCAAAATCATCAACCATATCGAATTAGCAAAACGCACAGATTTATTTATCGTTGCACCTGCCTCTGCTAATACTATTGCTCATCTAGCATATGGCTTCGCTGATAACATCGTAACAAGCGTTGCTCTTGCTATGCCTGATGAAACTCCAAAACTTATCGCACCAGCAATGAATACAAAGATGTATCATAATACAATCACCCAACGTAATATTGATATTTTGAAAAAAATAGGTTATCAGGAAATTGAACCTCGTATTAGTTTGCTTGCCTGTGGTGATACCGGTCAAGGAGCCCTAGCTGATATCTCTACTATACTTAAATGTATACAAGAAGTTGCAAAT

SEQ ID NO: 20174 - protein, 180 aa, Streptococcus agalactiae; identical to SEQ ID NO: 2002

SEQ ID NO: 20175 - protein, 570 aa, Streptococcus agalactiae; identical to SEQ ID NO: 10897

SEQ ID NO: 20176 - protein, 190 aa, Streptococcus agalactiae; identical to SEQ ID NO: 2004

SEQ ID NO: 20177 - protein, 1715 aa, Streptococcus agalactiae
ATGACTTACACAGAAAATTTTCAAAAATGGTTAGATTTTAGCAGCTTCCTGACTATCTTCGTCAAGAATTACTATCAATGGATGAAAAAACAAAAGAAGATGCTTTTTACACAAACTTAGAATTTGGTACTGCTGGTATGCGTGGTTATATTGGTGCTGGTACAAATCGTATTAATATTTATGTTGTCCGTCAAGCAACCGAAGGATTGGCAAAATTAATCGAAACTAAGGGAGAGGAAGCTAAAAAACGTGGTGTAGCTATCGCTTATGATTCGCGCCACTTCTCTCCAGAATTTGCTTTTGAGTCTGCACAGGTCTTGGCACAGCATGGAATTAAATCTTACGTATTTGAAGCTCTTCGTCCAACACCAGAACTCTCTTTTGCTGTTCGCCATTTAAATGCCTATGCTGGTATTATGGTTACTGCAAGCCACAATCCAGCACCTTTCAATGGTTATAAAGTCTACGGACAAGACGGAGGTCAACTACCACCAGCTGATGCTGATGCACTAACAGACTTTATCCGTGCTATTGAAAATCCATTTGCAGTTGAACTTGCTGATTTAGATGAAAGCAAATCAGCGGGTCTTATTCAAGTTATCGGTGAAGATGTTGATATTGAATATCTTAGAGAGGTTAAAGATGTTAATATCAATCAAGATTTAATCAATAACTTTGGAAAAGACATGAAAATTGTCTATACTCCTCTCCACGGAACTGGTGAGATGTTGACACGCCGTGCCCTTGCTCAAGCCGGTTTTGAATCTGTTGTTGTAGTAGAATCACAAGCTAAGGCAGATCCAGACTTTTCTACTGTCAAATCTCCTAACCCTGAAAGCCAAGCTGCCTTTGCTCTTGCTGAAGAACTCGGACGAGAAGTTGATGCAGATGTCTTAGTAGCTACTGATCCTGATGCAGACCGCCTAGGCGTTGAAATTCGCCAACCAGATGGTTCTTATAAAAACCTTTCTGGAAATCAAATTGGAGCGATTATTGCGAAATACATCCTGGAAGCTCATAAAACAGCAGGAACACTTCCAGAAAATGCTGCTCTCGCTAAATCAATCGTATCAACAGAATTAGTAACAAAAATTGCCGAAAGTTATGGCGCTACAATGTTTAACGTTTTAACTGGATTTAAATTCATCGCTGAGAAAATTCAAGAGTTTGAAGAAAAACATAACCACACCTATATGTTTGGTTTTGAAGAAAGCTTCGGATATCTTATTAAACCATTTGTCCGTGATAAAGACGCTATTCAAGCAGTTCTTTTGGTTGCTGAGATTGCAGCTTATTACCGTTCGCGTGGTTTAACACTTGCAGATGGTATTGATGAAATTTACAAAGAATATGGTTATTTTGCTGAAAAAACGATTTCAGTAACACTTTCAGGTGTGGATGGAGCTGCTGAAATTAAGAAGATTATGGACAAATTCCGTGAAAATGGTCCAAAACAATTTAACAATACTGATATTGTATTATTAGAAGATTTCCAAAAACAAACCGCTACTAAAAATGATGGAACAATATCTAACTTAACAACTCCTCCAAGTAATGTTTTGAAGTACACGTTAGCTGATGATTCATGGATTGCAGTTCGCCCTTCAGGAACTGAACCAAAAATCAAGTTCTATATTGCCACGGTCGGTAATGATTTAGCAGATGCAGAAACAAAAATCGCCAATATTGAAAAAGAGATTACAACATTTGTAAAT

SEQ ID NO: 20178 - protein, 572 aa, Streptococcus agalactiae
  VARIANT 14: Xaa = Any Amino Acid
MTYTENFQKWLDFXQLPDYLRQELLSMDEKTKEDAFYTNLEFGTAGMRGYIGAGTNRINIYVVRQATEGLAKLIETKGEEAKKRGVAIAYDSRHFSPEFAFESAQVLAQHGIKSYVFEALRPTPELSFAVRHLNAYAGIMVTASHNPAPFNGYKVYGQDGGQLPPADADALTDFIRAIENPFAVELADLDESKSAGLIQVIGEDVDIEYLREVKDVNINQDLINNFGKDMKIVYTPLHGTGEMLTRRALAQAGFESVVVVESQAKADPDFSTVKSPNPESQAAFALAEELGREVDADVLVATDPDADRLGVEIRQPDGSYKNLSGNQIGAIIAKYILEAHKTAGTLPENAALAKSIVSTELVTKIAESYGATMFNVLTGFKFIAEKIQEFEEKHNHTYMFGFEESFGYLIKPFVRDKDAIQAVLLVAEIAAYYRSRGLTLADGIDEIYKEYGYFAEKTISVTLSGVDGAAEIKKIMDKFRENGPKQFNNTDIVLLEDFQKQTATKNDGTISNLTTPPSNVLKYTLADDSWIAVRPSGTEPKIKFYIATVGNDLADAETKIANIEKEITTFVN

SEQ ID NO: 20179 - protein, 1731 aa, Streptococcus agalactiae
ATGAAAGCAAGTCATCCTAAAAAGATACAAAAAAAGCTTGTTCAAGATCTTCTTTCTAAAAAAAGCTTAGTAGGAATGGCATTATTAGGGACGGTAGTACAAGTTTGCCTCACTGTTTATTTGCCTGTTCTAATTGGACAAGCGGTAGACGTTGTATTATCGCCTCATTCTATGATATTATTGTTACCTATAATGTGGAAGATGGTTGCAGTTATTTTAGCAAATACTATTATTCAATGGATTAATCCTCTGCTCTATAACCGCTTAATTTTTCATTATGTTGCTTCTTTAAGAAAGGCTGTAATGGAAAAGTTGAATCAATTACCTGTAGCTTACCTTGATAAACGTGGCATAGGTGACTTGATTAGTCGTGTGACTACCGATACGGAGCAATTATCAAATGGTTTATTAATGGTTTTTAACCAGTTCTTTGTTGGTTTATTAACTATTCTAGTTACTATTTTTAGTATGGCAAAGATTGATTTATTAATGCTTTTTTTGGTATTATTTCTGACGCCTTTATCACTCTTTCTAGCCCGCTTTATTGCTAAAAAGAGTTATCACTTATATCAAAATCAAACGGCATCACGAGGACGACAAACTCAATTCATTGAAGAGATGGTGAGTCAAGAAAGCCTTATTCAAGCATTCAGTGCGCAAGAAGAAAGTAGTGATCATTTTAGGACTATTAATCAAGAGTATGCTAACTTTTCTCAATCAGCAATTTTTTATTCTTCAACTGTCAATCCATCAACCCGATTTATCAATAGTTTGATTTATGGCTTCTTAGCTGGGATTGGTGCCCTTCGTATTATGTCAGGGGCTTTTAGTGTTGGTCAATTAATCACTTTCTTAAATTATGTCAATCAATATACTAAGCCATTTAATGACATCTCTTCCGTCCTGTCTGAGATGCAAAGTGCTCTGGCTTGTGCAGAACGCCTTTACTCTATTTTAGAAGAATCGTCACCAAATATAACAGGGACAGAAAAACTTGATTCATCAACGGTCAAGGGTCAAATCGATTTTAAAAATGTTGTTTTTGGTTATAATAAATCAAAACCACTATTGAATGGTATTAATTTACACATTCCAGCAGGAGCTAAGGTCGCTATTGTAGGACCAACAGGTGCTGGGAAGTCTACTTTAATCAATTTATTAATGCGTTTCTATGAAGTTGACGGGGGAAATATCCTTTTAGATGGTAAGCCTATTACTGATTATGAGCCATCACAATTAAGGCAAGAAATTGGAATGGTATTACAAGAAACGTGGTTAAAAAGTGCTACGATTCACGATAACATTGCATATGCCAATCCTAAAGCTAGCCGTGAAGAAGTGATAGAGGCTGCAAAAGCAGCTAATGCAGATTTCTTTATCAAACAATTACCGAATGGATATGATACGTATTTAGAAGATGCTGGAGATTCGCTATCACAGGGGCAATGTCAGCTATTGACAATTGCTCGTATTTTTCTTAAATTACCTAGAATATTGATATTAGATGAGGCGACATCGTCTATAGATACTCGTACTGAAGTTCTTGTTCAAGAAGCATTCCAAATGTTGATGAAGGGGAGAACAAGCTTTATTATTGCACATCGCTTATCTACCATTCAAACAGCAGATATTATTTTAGTTATGGTATCTGGTGAAATTGTAGAAGTGGGTAACCACTCTGAATTAATGGCTCAAAAAGGTATTTATTATCAAATGCAAAATGCACAAAAG

SEQ ID NO: 20180 - protein, 577 aa, Streptococcus agalactiae
MKASHPKKIQKKLVQDLLSKKSLVGMALLGTVVQVCLTVYLPVLIGQAVDVVLSPHSMILLLPIMWKMVAVILANTIIQWINPLLYNRLIFHYVASLRKAVMEKLNQLPVAYLDKRGIGDLISRVTTDTEQLSNGLLMVFNQFFVGLLTILVTIFSMAKIDLLMLFLVLFLTPLSLFLARFIAKKSYHLYQNQTASRGRQTQFIEEMVSQESLIQAFSAQEESSDHFRTINQEYANFSQSAIFYSSTVNPSTRFINSLIYGFLAGIGALRIMSGAFSVGQLITFLNYVNQYTKPFNDISSVLSEMQSALACAERLYSILEESSPNITGTEKLDSSTVKGQIDFKNVVFGYNKSKPLLNGINLHIPAGAKVAIVGPTGAGKSTLINLLMRFYEVDGGNILLDGKPITDYEPSQLRQEIGMVLQETWLKSATIHDNIAYANPKASREEVIEAAKAANADFFIKQLPNGYDTYLEDAGDSLSQGQCQLLTIARIFLKLPRILILDEATSSIDTRTEVLVQEAFQMLMKGRTSFIIAHRLSTIQTADIILVMVSGEIVEVGNHSELMAQKGIYYQMQNAQK

SEQ ID NO: 20181 - protein, 1716 aa, Streptococcus agalactiae
ATGAAAAGACTAACTTATTATTTTAAGGGGTATATCAAAGAAACTATCTTTGGACCCCTTTTCAAATTATTAGAAGCCTCTTTTGAACTTTTGGTACCAATCGTTATTGCAAAAATGATTGACGAGACCATTCCACGAGGGGATAGAAGTAGTTTACTGTTGCAAATTGGATTGATTTTCTTTTTGGCTGCGGTGGGTGTTGTAGTAGCGATAACTGCTCAATATTATTCTTCAAAAGCCGCAGTTGGTTATACGAGACAATTGACAGAGGATCTCTATCAAAAAGTCATGTCGCTGGGTAAAAAAGACAGAGATGAATTGGGAACTGCTAGCTTGATTACTCGTTTGACTGCTGATACATTTCAAATCCAAACTGGTTTAAATCAATTTTTACGTTTATTTTTGAGGGCTCCGATTATTGTTTTTGGTGCCATAATTATGGCTTTTTCCATTAGCCCCTCATTGACTATTTGGTTCTTGGTAATGGTTGTCACGTTATTTATCATTGTTTTTGTAATGTCTCGACTATTAAATCCTATTTACCTTAAAATCAGAACTTCAACCGATTATTTGGTAAAGTTGACTAGGCAACAACTTCAAGGTGTACGAGTTATCCGTGCCTTTAATCAAGTAGATAGAGAGAGTGAAGCATTTAATGATATCAATTATCATTATACGAATTTACAATTAAAAGCAGGTAGGCTTTCTAGTTTAGTAACGCCTCTAACATTTCTAGTTGTTAATATCACTTTGGTTGTGATTATTTGGCGTGGTAATTTAAATATAGCTAATCATCTTTTATCACAAGGAATGTTGGTTGCTTTAATTAATTACTTATTGCAAATTCTTGTTGAATTGTTAAAAATGACAATGTTGGTGACATCACTGAACCAAAGTTATATCAGTGCTAAGCGAATTATAGCCGTTTTTGAAAGACCGTCTGAAATAATTGATGACAAACTTGAGCCAAAATATTCGAATAAGGCTTTAGAAGTACAAGAAATGGCATTTTCTTATCCAAATTCCTCTGAAAAAGCTTTATCTGATATTACTTTTTCTATGAATGTAGGAGAAACTTTAGGGATAATTGGTGGAACTGGCTCTGGGAAATCAACCTTGGTTAATTTACTGCTTCATATTTATAAAGTGCAAGAAGGGGATATTGATATATATCATCAGGGAAAAAGTCCAGATACAATTTCAAATTGGCGTACCCTGGTAAGAGTTGTTCCTCAAAATGCTCAGTTGTTTAAAGGAACTATTCGTTCTAACCTTTCTTTGGGACTTGGTAAAGTTAGTGAGGAAAAACTTTGGACTGCTTTAGAAATAGCACAAGCTAGTGATTTTGTAAAAGAAAAAGATGGTCAACTTGATGCCCCTGTAGAGAGTTTTGGTAGGAATTTCTCTGGTGGTCAAAGGCAAAGGTTGACGATTGCAAGAGCTTTAGTTCAAGATAAGATACCATTTTTGATTTTAGACGATGCAACATCTGCATTGGATTATTTAACAGAAGCTCGTTTATTTAAAGCCATAACTAAACATTTCAACCAAACTAATCTTATTATTGTATCACAGAGAATTAATAGTATACAAAATGCAGATAGAATCTTACTCCTTGATAAGGGGAAACAAGTTGGTTTTGATAATCATCAATCTTTATTAGCTCATAACAAAGTTTATAAGTCCATTTACCATTCACAAAATTTTAAGGAGGAG

SEQ ID NO: 20182 - protein, 572 aa, Streptococcus agalactiae
MKRLTYYFKGYIKETIFGPLFKLLEASFELLVPIVIAKMIDETIPRGDRSSLLLQIGLIFFLAAVGVVVAITAQYYSSKAAVGYTRQLTEDLYQKVMSLGKKDRDELGTASLITRLTADTFQIQTGLNQFLRLFLRAPIIVFGAIIMAFSISPSLTIWFLVMVVTLFIIVFVMSRLLNPIYLKIRTSTDYLVKLTRQQLQGVRVIRAFNQVDRESEAFNDINYHYTNLQLKAGRLSSLVTPLTFLVVNITLVVIIWRGNLNIANHLLSQGMLVALINYLLQILVELLKMTMLVTSLNQSYISAKRIIAVFERPSEIIDDKLEPKYSNKALEVQEMAFSYPNSSEKALSDITFSMNVGETLGIIGGTGSGKSTLVNLLLHIYKVQEGDIDIYHQGKSPDTISNWRTLVRVVPQNAQLFKGTIRSNLSLGLGKVSEEKLWTALEIAQASDFVKEKDGQLDAPVESFGRNFSGGQRQRLTIARALVQDKIPFLILDDATSALDYLTEARLFKAITKHFNQTNLIIVSQRINSIQNADRILLLDKGKQVGFDNHQSLLAHNKVYKSIYHSQNFKEE

SEQ ID NO: 20183 - protein, 600 aa, Streptococcus agalactiae; identical to SEQ ID NO: 15449

SEQ ID NO: 20184 - protein, 200 aa, Streptococcus agalactiae; identical to SEQ ID NO: 2014

SEQ ID NO: 20185 - protein, 975 aa, Streptococcus agalactiae
ATGATGGATTTTTATATCAAACAGATTATTATACATCAGTTTTCTCCTAACGACACAGAGTTAGTGCTATCAGATACTCCGTTAACCCTAACTCCAAGGATTGATGACTACTTTCGTAAAAAATTGAGTAAAGTTTTTTCTGATGAAGCTAAGCGTGGCTATTTTGGAGAGGATAATGTATTTATGAGTCATTTACAAGATGATTTATATGTTTCTTCCTGTCAAATTGCGCAACTTTGGAAAGAAGAGTTTGTCATATCGGAAGATCAAAAAACGAATGACTTAGTTTTTATTCAATTTGACAAGGATGGAATGGAACATTTTGCTTTCCTTCGAATCTCATTAAAGGAACAATTTGCTCATGTTTCTGAAAATCAAGAGCAGCCAATTACAATAACACAGAATAACCTTCCAAGTGCTGCTCAAACTCCAGATGAAGCTTTGGTTGTTAACAAGTCATCAAAGCAATACTATTTAATTGAAAAGCGTATCAAACACAATGGTTCATTTGCTAATTATTTTTCTGAAAATTTATTACAAGTACAACCAGAACAGTCTGTTAAAAAATCTATCAAAATGGTTGAACAGACAGCTCAAAAAATTGCTGAAAATTTCAACAAAGATGATTTTTCTTTCCAATCAAAAATGAAATCGGCTATTTATAAGAATTTAGAAGAAGAGCAAGAATTGTCTCCAGAAAAATTAGCAGATCAATTATTTGATGATAATTTAACAGCCAGGCTGACTTTTGTTGATGAATTGAAAGACGCAATACCTGGACCTGTTCAAGTAAGTGATATTGATCATTCCCGTCAAATTAAGAAGTTAGAGAATCAGAAGCTATCTCTTTCAAATGGTATTGAATTGATTGTACCCAACAATGTCTACCAAGATGCTGAATCAGTTGAATTTATCCAAAACCCTGATGGTACATACTCAATACTAATCAAAAACATACAGGATATTCAAAATAAA

SEQ ID NO: 20186 - protein, 325 aa, Streptococcus agalactiae; identical to SEQ ID NO: 2016

SEQ ID NO: 20187 - protein, 1254 aa, Streptococcus agalactiae
ATGATTTTTGATAAAGACAATTTTAAAGAATTTGACCAAGAACTTTGGCAGGCTATTCATGATGAGGAAATTCGCCAACAAAATAATATTGAATTAATTGCATCAGAAAACGTTGTTTCAAAAGCTGTTATGGCAGCACAAGGTTCTGTTTTGACAAATAAATATGCCGAAGGGTATCCTAGTCATCGTTATTATGGAGGAACAGATTGTGTTGATGTAGTTGAAAGTTTAGCTATAGAACGAGCTAAGACGTTATTTAATGCTGAGTTTGCTAATGTTCAACCACATTCTGGTAGTCAGGCTAATGCAGCAGCTTACATGGCTTTAATTGAGCCGGGAGATACTGTCTTAGGAATGGACTTAGCAGCAGGTGGGCACTTAACACATGGCGCTTCAGTTAGCTTCTCAGGAAAAACTTATCATTTTGTTTCTTACTCTGTTGATCCTAAGACGGAGATGCTAGACTATGATAACATTTTGAAAATAGCACAGGAAACGCAACCTAAATTAATTGTTGCAGGGGCGTCGGCCTATTCTCGCATTATTGATTTTGAAAAATTTCGTCAAATAGCAGACGCAGTAGATGCTTACTTAATGGTTGATATGGCTCACATTGCAGGTTTAGTTGCTTCTGGTCATCACCCTAGTCCTATTCCTTATGCTCATGTAACGACAACGACAACCCATAAGACTCTACGTGGACCTAGAGGTGGTTTGATTTTAACCAATGATGAAGCAATTGCTAAAAAAATTAATTCTGCAGTCTTTCCAGGACTCCAAGGTGGACCGTTAGAACATGTAATTGCTGCAAAAGCTGTAGCTTTGAAAGAAGCCCTAGATCCTTCCTTTAAAATATACGGTGAGGATATTATTAAAAATGCTCAAGCCATGGCTAAAGTTTTTAAAGAAGATGATGACTTTCATTTGATTTCTGATGGTACTGATAATCATTTGTTCTTAGTAGACGTCACAAAAGTTATTGAGAATGGCAAAAAGGCACAAAATGTTCTTGAAGAAGTCAATATCACTCTTAACAAGAACTCTATACCGTTTGAGCGACTATCACCATTTAAAACATCAGGTATTCGAATTGGTACTCCAGCAATCACTAGTCGAGGAATGGGAGTTGAAGAATCTCGAAGAATCGCTGAATTAATGATTAAGGCACTCAAAAATCATGAAAATCAAGATGTCCTCACAGAAGTTCGTCAAGAAATTAAATCATTAACGGACGCTTTCCCTTTGTATGAGAAT

SEQ ID NO: 20188 - protein, 418 aa, Streptococcus agalactiae; identical to SEQ ID NO: 6606

SEQ ID NO: 20189 - protein, 594 aa, Streptococcus agalactiae
ATGAATGATTTGGGACAGATTTTAGAGGATCATGGCGCAGTTATTATGCCGACAGAAACGGTCTACGGAATCTTTGCCAAAGCTTTGAGTGAAGAAGCTGTGAACCACGTCTATGAGCTTAAAAAAAGGCCTCGTGATAAGGCTATGAACTTAAATATATGTGATTTTGAGACTATTTTAAAATATTCTAAAAATCAACCGACCTATTTGAAGCAATTGTACGATGCTTTTTTACCAGGACCGCTAACCATTATTTTGGAAGCTTCACAAGAAGTTCCGGATTGGATCAATTCTGGGTTATCAAGCGTAGGATTTCGGATGCCTAAGCACCCTGTAACCCTTGATATGATTGCTAACCATGGTCCATTGATTGGTCCTTCTGCTAATATTTCTGGATGTGATAGTGGTCGTGTATTCTCAGAAATTCAAAAACAGTTTAATCATCAAGTTTTAGGTATTGAAGATGATAAAGCATTGACAGGTGTGGATTCTACTATTATTGATTTGTCTGGTGATAGAGTTAAGATTTTAAGGCAAGGTGCAATCACGCAAGAGGTACTAACGGCTACGATACCTGAATTAATTTTTGAAAAT

SEQ ID NO: 20190 - protein, 198 aa, Streptococcus agalactiae; identical to SEQ ID NO: 15456

SEQ ID NO: 20191 - protein, 828 aa, Streptococcus agalactiae
ATGAATTATGCGCAATTAATCAAGCATTATGAACAGTTGTTAGAGGCTTGTGGTGAAGAAGTCGAAAATTTTATTTATGTATTAAAAGACCTAAAACAATGGTCAACAACTGATTGCCTTTTAAATCAAAATAGTAGTGTGAGTGATACTGATCAGCAATTAATGGAAAATATTTTTCAACAGCTTAAAAAACATAGATCACCGCAGTATATTACAGGTAAAGCTTACTTTAGAGACCTTATTTTCTTTGTTGATGAACGAGTTTTAATTCCGAGGCCTGAGACAGAGGAGTTGGTTGATCTAATCTTATCAGAGAATAAAGTAGAAGATTGTTCTGTTTTAGATATTGGTACAGGTAGTGGAGCAATTGCCATTTCTCTAAAAAAAGAACGCCCCTCTTGGGATGTTCTAGCTAGTGACATTTCTGTATCTGCATTAGACTTGGCAAAGGAAAATGCTAATAATTGTGATGCGGAAGTGACTTTTATAGAATCAGATGTCTTTAGTAACATTTCAGATAAATTTGATATTATTGTGTCTAATCCTCCCTATATTTCTTACAATGACAAAGACGAGGTGGGGAAGAATGTGCTAGCTTCAGAGCCTCATAGTGCCCTTTTTGCAGACGAAGAAGGATTAGCTATTTATCGTAAAATCATTGAAAACTCAAGAGAATATTTGCAACCTAGAGGTAAATTATATTTTGAAATAGGTTACAAACAAGGTGATGATTTACGAAGTTTATTGAAAAGATATTTTCCAAACAATCGTTGCAGAGTTTTGAAAGATATATTTGGTAAAGATAGAATGGTGGTATTAGATAATGAA

SEQ ID NO: 20192 - protein, 276 aa, Streptococcus agalactiae
MNYAQLIKHYEQLLEACGEEVENFIYVLKDLKQWSTTDCLLNQNSSVSDTDQQLMENIFQQLKKHRSPQYITGKAYFRDLIFFVDERVLIPRPETEELVDLILSENKVEDCSVLDIGTGSGAIAISLKKERPSWDVLASDISVSALDLAKENANNCDAEVTFIESDVFSNISDKFDIIVSNPPYISYNDKDEVGKNVLASEPHSALFADEEGLAIYRKIIENSREYLQPRGKLYFEIGYKQGDDLRSLLKRYFPNNRCRVLKDIFGKDRMVVLDNE

SEQ ID NO: 20193 - protein, 1077 aa, Streptococcus agalactiae
ATGAATATTTATGATCAATTGCAGGCAGTTGAAGATCGTTATGAAGAGTTAGGTGAGTTACTTAGTGATCCAGATGTTGTTTCAGATACAAAGCGATTTATGGAATTATCACGTGAAGAAGCTAATACTCGAGAAACTGTCACAGCTTATAGAGAATATAAGCAAGTCATTCAAAATATTTCAGATGCTGAAGAAATGATCAAAGATGCTTCTGGTGATGCTGAATTGGAAGAAATGGCTAAAGAAGAACTTAAAGAATCAAAAGCAGCTAAAGAAGAGTATGAAGAAAAATTAAAAATCCTTCTATTACCTAAAGATCCTAATGATGATAAAAACATTATTTTAGAAATTCGTGGTGCTGCTGGTGGCGATGAAGCAGCGCTTTTTGCTGGTGATCTTTTAACAATGTATCAAAAATATGCTGAAACTCAAGGATGGCGTTTTGAAGTTATGGAATCATCCGTTAATGGTGTTGGTGGTATTAAAGAAGTGGTTGCTATGGTTTCTGGTCAGTCAGTTTATTCTAAGCTTAAATATGAATCAGGAGCTCATCGTGTTCAACGTGTCCCGGTGACAGAGAGTCAGGGTCGTGTTCATACTTCAACTGCAACTGTTTTGGTAATGCCAGAAGTTGAAGAAGTAGAATACGAAATTGATCAAAAAGACCTTCGCGTCGATATTTACCACGCGTCTGGTGCTGGTGGTCAGAACGTCAATAAAGTTGCTACTGCAGTTCGTATGGTACACATTCCTACAGGAATCAAAGTTGAAATGCAAGAAGAGCGTACTCAGCAAAAAAACCGTGATAAAGCGATGAAAATCATTCGTGCTCGTGTTGCTGACCATTTTGCGCAAATTGCTCAAGATGAACAAGATGCTGAACGTAAATCAACAGTTGGTACTGGTGATCGTTCAGAACGTATTCGCACTTATAATTTCCCACAAAATCGTGTAACAGATCATCGTATTGGTTTGACACTTCAAAAATTAGATACTATTTTATCTGGAAAAATGGATGAAGTTATTGATGCACTTGTTATGTATGATCAGACTCAAAAGTTAGAAGCCTTAAATAAA

SEQ ID NO: 20194 - protein, 359 aa, Streptococcus agalactiae
MNIYDQLQAVEDRYEELGELLSDPDVVSDTKRFMELSREEANTRETVTAYREYKQVIQNISDAEEMIKDASGDAELEEMAKEELKESKAAKEEYEEKLKILLLPKDPNDDKNIILEIRGAAGGDEAALFAGDLLTMYQKYAETQGWRFEVMESSVNGVGGIKEVVAMVSGQSVYSKLKYESGAHRVQRVPVTESQGRVHTSTATVLVMPEVEEVEYEIDQKDLRVDIYHASGAGGQNVNKVATAVRMVHIPTGIKVEMQEERTQQKNRDKAMKIIRARVADHFAQIAQDEQDAERKSTVGTGDRSERIRTYNFPQNRVTDHRIGLTLQKLDTILSGKMDEVIDALVMYDQTQKLEALNK

SEQ ID NO: 20195 - protein, 567 aa, Streptococcus agalactiae; identical to SEQ ID NO: 15461

SEQ ID NO: 20196 - protein, 189 aa, Streptococcus agalactiae; identical to SEQ ID NO: 15462

SEQ ID NO: 20197 - protein, 180 aa, Streptococcus agalactiae; identical to SEQ ID NO: 6615

SEQ ID NO: 20198 - protein, 60 aa, Streptococcus agalactiae; identical to SEQ ID NO: 2028

SEQ ID NO: 20199 - protein, 936 aa, Streptococcus agalactiae
TTGCAACTTTCTCATAGTTTAAGACTCATGGGAACGACTATCGATATTCAAATTAATTCTAAAAATGCTCAAAAACAAATCCAAGAGGTCATAGAAGTCTTGGAGCTCTACAAAAATCGCTTTAGTGCAAATGACTTTAATTCAGAGTTAATGGCTATAAATAATAACGCTGGTATCAAGCCTATTCAAGTACATCCAGACCTCTTTGAATTAATCACAATTGGGAAAGAACACAGCTTAGCTAGGCCTAGTAACCTAAATATTGCTATTGGTCCTTTAGTGCAAACTTGGAGAATTGGATTTTCAGATGCTAAACTACCTAGCCCTAGTGAAATATCAGAAGCTATGATTTTATCTAACCCAACTCATATACTTCTAGATTCAAAAAATCAATCTGTTTTTTTAAATCAGATAGGAATGAAAATTGATTTGGGTGCACTTGCAAAAGGATATATCGCTGACAAAATTATGACCTATCTCAAAAATGAGATGATTGATTCTGCTATCATTAACTTAGGCGGAAACGTTTTAGTTCACGGAGATAATCCTAATCGTTCAGAAGGGTATTGGGTTATCGGCATTCAACATCCGAAAAAGAAACGGGGACAAAATATTGGAGCTGTCAAAATTAAAAACCAATCTGTTGTAACCTCAGGTACTTATGAACGCCGTCTGATTATTGACGATAAGGAATACCATCATATTTTTGATCGACAGACTGGTTATCCGATACAAACAGAGATGGCTAGCATTTCTATTGTTTCTAAACAATCCGTCGACTGTGAAATCTGGACCACAAGGTTGTTTGGCTTATCCATTAAAGAGGCTCTTGATATTTTAAACGCTGTTTCCTACATTGAAGGCATTATCATCACTAAAGATGATCGTATCTATTTATCTGATGGATTAAAACATCATTTTCAACTATTTTATCAT

SEQ ID NO: 20200 - protein, 312 aa, Streptococcus agalactiae
MQLSHSLRLMGTTIDIQINSKNAQKQIQEVIEVLELYKNRFSANDFNSELMAINNNAGIKPIQVHPDLFELITIGKEHSLARPSNLNIAIGPLVQTWRIGFSDAKLPSPSEISEAMILSNPTHILLDSKNQSVFLNQIGMKIDLGALAKGYIADKIMTYLKNEMIDSAIINLGGNVLVHGDNPNRSEGYWVIGIQHPKKKRGQNIGAVKIKNQSVVTSGTYERRLIIDDKEYHHIFDRQTGYPIQTEMASISIVSKQSVDCEIWTTRLFGLSIKEALDILNAVSYIEGIIITKDDRIYLSDGLKHHFQLFYH

SEQ ID NO: 20201 - protein, 597 aa, Streptococcus agalactiae
ATGAAACTTATTGGCATCGTTGGAACTAACTCAAATCATCAACAAATCGTCAATTATTACAATACATGCACAACACTTTGCTGACAAAGCAAAAATTGAACTCATCGAAGTTAAAGACCTTCCGTTATTTAATAAACCTGCTGATAAAAATGTTCCCCAAGTAATTTTGGATATTGCTGCCAAAATTGAAGAAGCTGATGGTGTTATTATTGGTACGCCAGAATATGATCATTCTATACCTTCGGCCTTAATGAGTGTTTTAGCTTGGCTATCATATGGTATTTACCCACTTCTCACAAACCCGTTATGATTACTGGTGCTTCATATGGAACACTTGGATCATCACGTGCACAATTACAATTACGTCAAATACTTAACGCTCCTGAACTAAAAGCAAGTGTTTTACCTGACGAATTCTTGTTATCACACTCTCTCCAAGCCTTTGATAAAGATGGCAACCTACACGATATCGAAACAAGTCAGAAGCTAGATGCTAACTTTGATGATTTTCGTCTTTTTGTTAAGATTACTGGTAAATTATCAAATACTCGTGATTTACTTCAAAAAGAAGCAGAAAATTTTGACTGGGAAAGTTTA

SEQ ID NO: 20202 - protein, 200 aa, Streptococcus agalactiae
  VARIANT 100: Xaa = Any Amino Acid
MKLIGIVGTNSNQSTNRQLLQYMQQHFADKAKIELIEVKDLPLFNKPADKNVPQVILDIAAKIEEADGVIIGTPEYDHSIPSALMSVLAWLSYGIYPLLXKPVMITGASYGTLGSSRAQLQLRQILNAPELKASVLPDEFLLSHSLQAFDKDGNLHDIETSQKLDANFDDFRLFVKITGKLSNTRDLLQKEAENFDWESL

SEQ ID NO: 20203 - protein, 1233 aa, Streptococcus agalactiae
ATGAAATTTGTAGGTATTGTTGGCTCAAATGCAGAGCAATCATATAATCGTATGTTGCTTGAATTTATTCGCAAGAATTTTAAAACCAAATTTGAATTGGAAGTCCTTGAAATCGATGATATTCCAATGTTTAATCAAGACCAAAATTGGGAAGAAAGTTTCCAACTTCGTCTTCTTAATAATAAGATCACACGAGCTGATGGCGTTATTATTGCCACTCCTGAACATAATCATACTATTACGGCCGCTCTTAAAAGTGTGCTTGAGTGGCTCTCATTTGCTGTGCATCCACTCGAAAATAAACCTGTTATGATTGTCGGTGCTTCATATTATGATCAAGGCACATCACGTGCTCAAATACACCTTCGTAAAATCCTTGATGCTCCTGGCGTTAATGCTTACACACTTCCAGGAAATGAATTCTTATTAGGAAAAGCTAAAGAAGCCTTTGACGATAATGGAAACATTATCAATCCTGGGACTGTTCAATTTTTAGAAACTTGTCTTGATAATTTTATCAAATATGTAGGAGTTGTATCATCATTGAGAAAACCTAAAGCTATTGAATCTGAAGACCTCTACTGTCAGGGACAAATTGATACAACCATTACTGGTATCGACCCAGATGATCCTGATTGGTTAGACAAGGCAGCTGAGAAAGTTAACGCCGTTGAAGGGGATGCTTACGTTAAACTAGACAATGGTTTACTTACTGTTAACCAACTTAATATGTTTTTAAATGCTATGCCATTTGAGCTAACGTATGCAGATGATAATAATCAATTTCTATATTACAATAATAATCATCCAGATCCAGATACAATGTTAGGAAAACGTGTTCGTGAACAAGTAGGAAACCGTATGGCTACAGTTCATGGTAGTTTACCACCGGCACGAATGAAAAATGTTGAATGGGTTATCGGTACTCTTCGTAATGGAAATCAAGAATATGTACGTACAGTCGTTCCTGGTACACCTCCAGAAGTTATCAATACTCACAACTATCAAGCTATGTACTACCCAGACGGATCTTATGCTGGTATTAATGAAATTATCTTTAACTTTAAACCGTGGTTAGATTGGTACCTCCAAACTACTGGACAACGTTTAGTCGGTGGAACTACTGCTGCTCCTGGAGCTTCAGCAGTTGACGCTACTTCTAGCGCTTCAACTAGCACAGGGGATGCTCCCGTTAATCAAGCCACAGATGCCACTTCTGGTGCCTCTGAACAT

SEQ ID NO: 20204 - protein, 411 aa, Streptococcus agalactiae
MKFVGIVGSNAEQSYNRMLLEFIRKNFKTKFELEVLEIDDIPMFNQDQNWEESFQLRLLNNKITRADGVIIATPEHNHTITAALKSVLEWLSFAVHPLENKPVMIVGASYYDQGTSRAQIHLRKILDAPGVNAYTLPGNEFLLGKAKEAFDDNGNIINPGTVQFLETCLDNFIKYVGVVSSLRKPKAIESEDLYCQGQIDTTITGIDPDDPDWLDKAAEKVNAVEGDAYVKLDNGLLTVNQLNMFLNAMPFELTYADDNNQFLYYNNNHPDPDTMLGKRVREQVGNRMATVHGSLPPARMKNVEWVIGTLRNGNQEYVRTVVPGTPPEVINTHNYQAMYYPDGSYAGINEIIFNFKPWLDWYLQTTGQRLVGGTTAAPGASAVDATSSASTSTGDAPVNQATDATSGASEH

SEQ ID NO: 20205 - protein, 786 aa, Streptococcus agalactiae
ATGTCACTTTTTCAAGAAAAAATTGCTTACAATTGCGCTAAAAAGGAAGCGCTTTATAAAGAGAGTTTAGGACGCTACGCCTTGAGGTCAATGCTAGCAGGGGCTTATTTAACAATGAGTACTGCTGCTGGTATCGTCGCAGCTGATACTATTGGTAAAATTTCTCCTGCTCTATCAGGTTTTGTATTTGCTTTCATCTTTAGTTTTGGACTTATTTATGTTTTAATATTTAATGGTGAATTGGCGACATCTAATATGCTTTATCTCACTGCAGGAGCCTATAATAAAAATATCTCTTGGAAAAAAGCCATAACAATTTTAATTTATTGTACTTTTTTCAACCTCGTTGGTGCTTGTATATTAGCTTGGTTGTTTAATCAATCGTACTCATTCCAGCATTTAACAAATGATAGCTTTTTAGGGCATGTCGTTGCTAAAAAGTTAGGAAAACCTAGTTCAGGAGCTTTCCTAGAAGGTATTATTGCTAATATGTTTGTGAATTTAGCTATCCTTGCTTACATGTTATTAAAAGAAGAATCGGCAAAAATGACGGTTATTTTATCTGCTATTTTTATGTTTGTTTTTCTATCAAACGAACACTTAATTGCTAATTTTGCATCCTTTATGTTAGCTGCTTTTAGCCATATCGAACATATTAAAGGTTTTACTCTTCTAAACGTTATCCGCCAATGGACACTTGTATTCTTTGGTAACTGGATAGGAGGGGGCGTTTTCATCGGCCTAGCCTATGCTTGGTTAAATAAAACAAAAACTTCTCACCATGAA

SEQ ID NO: 20206 - protein, 262 aa, Streptococcus agalactiae; identical to SEQ ID NO: 2036

SEQ ID NO: 20207 - protein, 1272 aa, Streptococcus agalactiae
ATGAAATTTAATGAGCAAAGTAACTCGCAGGCAGCACTTCTAGGCTTGCAACACCTGTTAGCTATGTATGCAGGATCCATTCTTGTACCTATCATGATTGCTAGTGCTCTTGGTTATAATGCTAAGCAACTAACTTATCTTATTGCGACAGATATTTTTATGTGTGGGATTGCCACCTTATTACAATTACGATTAAGTAAGCACTTTGGAGTGGGTCTTCCAGTTGTATTAGGGTGTGCCTTTCAGTCTGTAGCTCCCTTATCAATTATTGGTGCACAACAAGGTTCTGGCTATATGTTTGGAGCTTTAATTGCTTCAGGAATATATGTCGTTTTAGTTGCTGGCGTTTTTTCTAAAGTTGCAAATTTCTTTCCTCCAATTGTAACAGGATCAGTTATTACTACAATTGGTTTGACATTAATACCAGTTGCGATGGGAAATATGGGTGATAATGCAAAAGAACCGAGCTTACAATCTTTAACTTTATCACTGGTAACGATTGGTGTTGTTTTATTAATTAATATTTTCGCAAAAGGCTTTTTGAAGTCAATTTCAATCCTTATTGGACTCATATCAGGTACAATTCTTGCAGCATTTATGGGCTTAGTTGATGCTTCTGTGGTAGCAGATGCACCACTTGTACATATTCCGAAGCCATTTTATTTTGGAGCTCCTAGATTTGAATTTACTTCTATTTTAATGATGTGTATTATTGCAACAGTTTCTATGGTAGAATCAACAGGTGTTTACCTTGCGCTTTCAGATATTACAAACGATAAATTAGACAGTAAGAGACTTCGTAATGGTTACCGTTCAGAAGGATTGGCAGTATTACTTGGCGGCTTATTTAATACCTTTCCATATACCGGTTTTTCTCAAAATGTAGGATTGGTACAGATATCTGGGATACGTACGCGTAAGCCGATATATTTTACAGCTCTCTTCTTAGTTATACTTGGCTTGTTACCTAAATTTGGCGCAATGGCTCAAATGATTCCAAGTCCAGTTCTTGGTGGTGCTATGTTAGTTTTATTTGGTATGGTAGCACTTCAAGGGATGAAAATGCTTAATCAGGTTGATTTTGAGCATAATGAGCATAACTTTATCATTGCAGCCGTATCAATTGCAGCAGGAGTAGGTTTTAATGGGACAAACCTCTTCATTAGTCTTCCTAATACTTTACAAATGTTTTTGACAAATGGTATTGTTATCTCAACCCTGACAGCTGTTGTTTTAAATATCATTTTGAATGGATTGCCTAAAAAATTAATA

SEQ ID NO: 20208 - protein, 424 aa, Streptococcus agalactiae
MKFNEQSNSQAALLGLQHLLAMYAGSILVPIMIASALGYNAKQLTYLIATDIFMCGIATLLQLRLSKHFGVGLPVVLGCAFQSVAPLSIIGAQQGSGYMFGALIASGIYVVLVAGVFSKVANFFPPIVTGSVITTIGLTLIPVAMGNMGDNAKEPSLQSLTLSLVTIGVVLLINIFAKGFLKSISILIGLISGTILAAFMGLVDASVVADAPLVHIPKPFYFGAPRFEFTSILMMCIIATVSMVESTGVYLALSDITNDKLDSKRLRNGYRSEGLAVLLGGLFNTFPYTGFSQNVGLVQISGIRTRKPIYFTALFLVILGLLPKFGAMAQMIPSPVLGGAMLVLFGMVALQGMKMLNQVDFEHNEHNFIIAAVSIAAGVGFNGTNLFISLPNTLQMFLTNGIVISTLTAVVLNIILNGLPKKLI

SEQ ID NO: 20209 - protein, 579 aa, Streptococcus agalactiae
ATGAAGTTATTGGAAGAACGTATTCTTAAAGATGGTGATGTTTTAGGTGAGAACATTTTAAAAGTTGATTCTTTTTTGACTCATCAGGTAGATTTTGAGTTAATGCAGGAAATAGGTAAAGTTTTTGCTGATAAATATAAAGAAGCCGGCATTACGAAGGTTGTTACAATTGAAGCATCTGGAATTGCGCCAGCAGTGTACGCAGCTCAAGCATTGGGCGTACCAATGATATTTGCTAAAAAAGCTAAGAACATTACTATGACTGAAGGTATCTTAACTGCTGAAGTGTATTCTTTTACAAAGCAAGTTACGAGTCAAGTTTCTATTGTGAGTCGCTTTTTATCTAACGATGATACTGTACTCATCATTGATGACTTTTTAGCAAACGGTCAAGCGGCTAAAGGATTACTTGAAATTATTGGTCAAGCTGGAGCTAAGGTTGCTGGTATCGGAATCGTTATTGAAAAATCTTTCCAAGATGGGCGTGATTTGTTAGAAAAAACAGGTGTTCCAGTTACTTCTCTTGCTCGTATTAAAGCGTTTGAAAATGGTCGAGTTGTTTTTGCGGAGGCTGATGCT

SEQ ID NO: 20210 - protein, 193 aa, Streptococcus agalactiae; identical to SEQ ID NO: 2040

SEQ ID NO: 20211 - protein, 981 aa, Streptococcus agalactiae
ATGTTTAACGATATTCCTGTTTTTGATTATGAAGATATTCAATTAATACCAAACAAGTGTATTATATCTAGCCGCTCACAAGCTGACACAAGTGTCAAACTTGGAAACTATACCTTTAAACTTCCAGTAATCCCTGCTAATATGCAGACTATTATTGATGAAGAGGTAGCTGAAACATTAGCGTGTGAAGGTTATTTTTATATTATGCACCGTTTTAATGAAGAAGCAAGAAGACCTTTTATCAAGCGTATGCATGATAAAGGCTTAATTGCTTCGATTTCGGTTGGGGTCAAAGACTATGAATATGACTTCGTGACAAGTCTGAAAGAAGATGCTCCTGAGTTTATCACTATTGATATTGCACATGGCCATTCTAACAGTGTTATAGAGATGATCCAACACATTAAACAAGAGCTTCCAGAAACTTTCGTTATTGCTGGAAATGTAGGAACGCCTGAAGCTGTTAGAGAATTGGAAAATGCAGGTGCAGATGCAACTAAAGTTGGTATTGGACCTGGTAAAGTTTGTATTACTAAAGTCAAGACAGGTTTTGGTACTGGAGGTTGGCAATTAGCTGCCTTACGTTGGTGTTCTAAAGCTGCTCGCAAGCCAATTATTGCTGATGGTGGTATTCGAACACATGGGGATATTGCAAAATCTATCCGCTTTGGTGCTAGTATGGTAATGATTGGTTCGCTGTTTGCTGGTCACCTTGAAAGTCCTGGAAAACTTGTGGAAGTAGATGGACAGCAATTTAAAGAATACTATGGCTCAGCTTCTGAATATCAAAAGGGAGAACATAAAAATGTTGAAGGTAAGAAAATTCTATTACCTGTTAAAGGGCGACTAGAGGATACTTTGACAGAAATGCAACAAGATTTGCAAAGTTCTATTTCTTACGCAGGAGGAAAAGAATTGGATAGCTTGAGACACGTTGATTACGTTATTGTTAAAAATTCTATTTGGAATGGTGATTCCATT

SEQ ID NO: 20212 - protein, 327 aa, Streptococcus agalactiae
MFNDIPVFDYEDIQLIPNKCIISSRSQADTSVKLGNYTFKLPVIPANMQTIIDEEVAETLACEGYFYIMHRFNEEARRPFIKRMHDKGLIASISVGVKDYEYDFVTSLKEDAPEFITIDIAHGHSNSVIEMIQHIKQELPETFVIAGNVGTPEAVRELENAGADATKVGIGPGKVCITKVKTGFGTGGWQLAALRWCSKAARKPIIADGGIRTHGDIAKSIRFGASMVMIGSLFAGHLESPGKLVEVDGQQFKEYYGSASEYQKGEHKNVEGKKILLPVKGRLEDTLTEMQQDLQSSISYAGGKELDSLRHVDYVIVKNSIWNGDSI

SEQ ID NO: 20213 - protein, 1338 aa, Streptococcus agalactiae
ATGACTAAAAAGGGATGGCGTATTATGCCTGCCATAATTACAACGGCTATATTAGGTTTTTCAGGGATTCTTATTGAAACATCTATGAATGTCACTTTTCCGCTTTTGATGAAAGAATTTGGGGTTAACCCCGCTGTTATTCAATGGGTGACAACAGGAAATTTGTTAGCTGTTGCTGTGACTGTGCCTTTGTCAGCATTTATGATTAAAAATTTATCAGAGAGACAAATTTTTACATTGGCAAATGTGCTTTTTTTATCTGGTGTTTTAATTGATAGCTTTGCCCCTAATTTACCTATATTGTTAGTAGGGAGAGTCTTGCAAGGTGTTGGGACAGGATTAGCCCTCCCTTTATTGTTTCATATCATTCTTACACAAATCCCGATGGAGCGTAGAGGACTAATGATGGGAGTAGCTGCTATGGTCACACTTTTAGCACCGGCAGTTGGACCTACTTATGGCGGTGTTATTTCAGGAATGTTAGGATGGAAGATGATTTTTATGCTTCTGGCACCAATACTTATCATATCCACCTTTATAGGTTTGGCTTCTATTCCCAAACGTCAAGTAAGAATTAATGATAAACTCAATTTTCCTGCCTTTGTCAGTTTAGGTATTGGCTTGGCAACCCTTCTTTTAGCTATTGAAAAGATGTCTATTTTTTACTTATTAGTAGCTATTGTTAGTTTTGTTATTTTTTACTATTTAAATAAACAGCTAGAATTTTTGAATTTGAATGTTTTTAAAGATAAAGATTTCTCAATCTTATTGTATGGCGTCCTGGCTTTTCAAATGATTCCTCTAGCACTTTCGTTCTTATTACCTAACCTCTTGCAACTTGTTTTACATCAAACTTCAACCAAAGCTGGTTTGTTTATGTTTCCAGGTGCAATAGCAGTAGTTTTTTTATCCCCTTTTGCAGGTTATCTCCTGGATAAAATTGGTGCATTTAAGCCAATTATGATAGGTATCTCCCTTTCTTTGATAGGTTTAATTGGTACAGCTATATTCATTCCTGCGAAGTCTGTTGTAGTACTTTTAGCCTTTGATATTCTTACTAAAATTGGTATGGGGATTGGAGCAAGTAATATGGTTACGACAGCTTTAACAAAACTAAAGCCAGCACAGTCAGCGGATGGTAATAGTATCTTGAATACACTACAACAATTTGCGGGAGCTTTTGCAACCGCAGTAGCCTCACAAATTTTTACCATCGGACAAGTAGCTATTCCGAAAAATGGAGCTATAATTGGTAGTCAATTTGCAGTTCTATTCGTTATCGTTGTTGTTATCTTAGCTATTGTAGGATTAACTTATCTTCGAAAAAGAAAAGCAATA

SEQ ID NO: 20214 - protein, 446 aa, Streptococcus agalactiae
MTKKGWRIMPAIITTAILGFSGILIETSMNVTFPLLMKEFGVNPAVIQWVTTGNLLAVAVTVPLSAFMIKNLSERQIFTLANVLFLSGVLIDSFAPNLPILLVGRVLQGVGTGLALPLLFHIILTQIPMERRGLMMGVAAMVTLLAPAVGPTYGGVISGMLGWKMIFMLLAPILIISTFIGLASIPKRQVRINDKLNFPAFVSLGIGLATLLLAIEKMSIFYLLVAIVSFVIFYYLNKQLEFLNLNVFKDKDFSILLYGVLAFQMIPLALSFLLPNLLQLVLHQTSTKAGLFMFPGAIAVVFLSPFAGYLLDKIGAFKPIMIGISLSLIGLIGTAIFIPAKSVVVLLAFDILTKIGMGIGASNMVTTALTKLKPAQSADGNSILNTLQQFAGAFATAVASQIFTIGQVAIPKNGAIIGSQFAVLFVIVVVILAIVGLTYLRKRKAI

SEQ ID NO: 20215 - protein, 690 aa, Streptococcus agalactiae
ATGCTAATACCCAAGAAAATAGTGGCTTTTGCCTCAAATGAATCTGAAAATAATTTCTTTATTACGTTAAAGACTTACTTTAATTATTTATTTTCTATACAAATCATTACAGATATTTCAACTCTCAATCATGCAGATTTTGACGGTAGCTTTGCATTCCATGATATAGAAACTAGCATACCTCATCTGGTAATTGACTCCAACTACTTAGCGATTAGTCAGACTAACTCAAAAATAGAGGCTAACGATATTAAAACGTTCTCGGAACTCTCCAAAACAATGACCGAGTTTCACTATATGCTAAATTTTGACTTATTTAACCATCTCCCATATCGTTTTAGATTGCATAATAAGGACGGTCAAACAATTTATTCGAACCATAAACCTGAAGATCCTTTTGATATTTATCCTGAAGAAGAATATCCTATAGACAAATGGGTTCAAAACAGCCTAATAGAGAAAAAAGCGAAAGAGCTACATTTACTCTTACCTAGCGCATCACAAGATTATATTCTAGTACAATCTTATAAACGCTTAGAAAATGATAGTGGGCAACTAGTTGGTTATATTGAACATGTTCATAATATTAAACCACTGCTAGAGGGTTATTTAAAAGAATCCGGTCAAGCTATCGTTGGATGGTCTGATGTCACGTCTGGTGCTTCTATCTCTAACGATGATTTTGAACTA

SEQ ID NO: 20216 - protein, 230 aa, Streptococcus agalactiae
MLIPKKIVAFASNESENNFFITLKTYFNYLFSIQIITDISTLNHADFDGSFAFHDIETSIPHLVIDSNYLAISQTNSKIEANDIKTFSELSKTMTEFHYMLNFDLFNHLPYRFRLHNKDGQTIYSNHKPEDPFDIYPEEEYPIDKWVQNSLIEKKAKELHLLLPSASQDYILVQSYKRLENDSGQLVGYIEHVHNIKPLLEGYLKESGQAIVGWSDVTSGASISNDDFEL

SEQ ID NO: 20217 - protein, 159 aa, Streptococcus agalactiae
ATGCTAATGAAATCATCTATAAAGCATTGGACAGCAACACCAATACGATGGTTTGGTCTACAATTTTCCGAAGTTACAACAGAAGTAGTTCCTTTGATTTTTACAGCTAATCGAGGTCTACCAATTAAAGAAAAAATTGAACTTACAACAACTGGAGAT

SEQ ID NO: 20218 - protein, 53 aa, Streptococcus agalactiae
MLMKSSIKHWTATPIRWFGLQFSEVTTEVVPLIFTANRGLPIKEKIELTTTGD

SEQ ID NO: 20219 - protein, 1754 aa, Streptococcus agalactiae
ATGCAACATGTCAATCATTCTTCTTTTGATAAAGCATCAAAAGCAGGATTTATTATTGCTTTAGCATTGTTTATGGAGATATTGGTACAAGCCCACTCTATACAATGCAATCATTGTTGAAAACCAAGGTGGTATTTCTAGTGTCACAGAATCGTTTATCTTAGGTTCTATATCTTTAATCATATGACCCTGACACTTATTACAACTATCAAGTATGTGCTTGTAGCTTTAAAGGCGGATAATCACCACGAAGGTGGTATTTTTTCTTTATATACCCTTGTTAGAAAAATGACACCTTGGTTAATTGTGCCAGCTGTTATTGGGGGTGCAACCTTGTTGTCAGATGGAGCTTTGACGCCAGCTGTAACCGTAACTTCAGCCGTTGAGGGATTAAAAGTAGTTCCTAGTTTGCAGCATATTTTCCAGAATCAGAGTAACGTTATTTTTGCGACCTTGTTTATTTTACTGTTACTTTTTGCCATCCAAAGGTTTGGAACGGGTGTGATTGGGAAATTATTTGGGCCAATTATGTTTATATGGTTTGCCTTTTTAGGTATTAGCGGTTTCCTTAATAGTTTTGCCCATCCAGAAGTTTTCAAAGCAATTAATCCATACTACGGTTTGAAATTGTTATTTAGTCCAGAGAATCATAAAGGTATTTTTATTTTAGGATCTATTTTCCTGGCGACAACGGGGGCAGAAGCACTATACTCTGACTTAGGTCATGTTGGGCGTGGAAATATACATGTTTCATGGCCGTTCGTTAAGGTTGCCATTATACTTTCTTATTGTGGGCAAGGGGCATGGATTTTAGCTAATAAGAACGCAGGAAATGAATTGAATCCCTTTTTTGCTAGTATCCCTTCGCAATTTACAATGCATGTCGTTATTTTAGCTACTTTGGCAGCTATCATCGCTTCACAGGCACTGATTTCTGGATCATTTACCTTAGTTTCTGAAGCTATGCGACTAAAAATATTCCCACAATTTCGTTCAACTTATCCTGGTGACAATATTGGTCAAACCTACATACCTGTTATTAATTGGTTCTTATTTGCCATTACAACCTCTATTGTTTTGCTTTTTAAGACTTCAGCGCACATGGAAGCGGCATATGGATTAGCGATAACAATTACGATGCTAATGACAACTATTTTACTGTCTTTCTTTTTAATTCAAAAAGGAGTAAAAAGAGGTTTAGTCTTATTGATGATGATTTTCTTTGGTATTTTAGAGGGAATCTTCTTCCTTGCTTCAGCTGTTAAATTTATGCATGGAGGCTATGTTGTTGTTATTATAGCAGTAGCAATTATATTCATCATGACTATCTGGTATAAAGGTAGTAAAATTGTTTCGCGTTATGTTAAGTTGTTGGATTTAAAGATTACATCGGACAATTAGATAAACTTAGACATGATCATCGTTATCCGATTTATCATACTAACGTTGTTTATTTGACAAATCGTATGGAAGGAGACATGATTGATAAGTCTATCATGTATTCTATCCTTGATAAGCGCCCTAAAAAAGCACAAGTTTATTGGTTTGTAAACATTAAGGTCACTGATGAACCTTATACAGCTGAGTATAAGGTTGACATGATGGGAACCGACTTCATTGTGAAGGTAGAACTTTACCTTGGATTTAAGATGCGTCAGACTGTGTCACGCTATCTTCGTACGATTGTAGAAGAATTACTTAAGTGGACGTCTGCCTACAAGGAAAGACATACAGCGTTAGACCTGATAGTAAAG

SEQ ID NO: 20220 - protein, 587 aa, Streptococcus agalactiae
  VARIANT 22: Xaa = Any Amino Acid
MQHVNHSSFDKASKAGFIIALXIVYGDIGTSPLYTMQSLVENQGGISSVTESFILGSISLIIWTLTLITTIKYVLVALKADNHHEGGIFSLYTLVRKMTPWLIVPAVIGGATLLSDGALTPAVTVTSAVEGLKVVPSLQHIFQNQSNVIFATLFILLLLFAIQRFGTGVIGKLFGPIMFIWFAFLGISGFLNSFAHPEVFKAINPYYGLKLLFSPENHKGIFILGSIFLATTGAEALYSDLGHVGRGNIHVSWPFVKVAIILSYCGQGAWILANKNAGNELNPFFASIPSQFTMHVVILATLAAIIASQALISGSFTLVSEAMRLKIFPQFRSTYPGDNIGQTYIPVINWFLFAITTSIVLLFKTSAHMEAAYGLAITITMLMTTILLSFFLIQKGVKRGLVLLMMIFFGILEGIFFLASAVKFMHGGYVVVIIAVAIIFIMTIWYKGSKIVSRYVKLLDLKDYIGQLDKLRHDHRYPIYHTNVVYLTNRMEGDMIDKSIMYSILDKRPKKAQVYWFVNIKVTDEPYTAEYKVDMMGTDFIVKVELYLGFKMRQTVSRYLRTIVEELLESGRLPNKERHTALDLIVK

SEQ ID NO: 20221 - protein, 757 aa, Streptococcus agalactiae
ATGATATCACGTAAAGTTGCGCTTGTGACGGGGGCATCTGCTGGTTTTGGTGCAGCTATTGTTACTAATTTAGTTTCAGATGGTTATAGCGTTATTGGTTGTGCTCGTCGAATGGATAAATTAAAATGCCTTGGAGAAAAGTTTTCAGAGGGTCACTTTTATCCACTTCAAATGGATATTACAAGTAGAGAATCGGTTGACAAAGCTTTAGAAAGTCTGCCTAAAAATTTGCAATCAATGATTTGTTGGTTAATAATGCAGGTTTAGCACTTGGATTGGATAAATCATATGAAGCTGATTTTGGAGATTGGATGACTATGATTAATACTAACGTTGTAGGATTAATTTACTTGACACGATGCATTTTACCTAAAATGGTAGAAGTTAATAGAGGGTTAATTATCAATTTGGGATCAACTGCAGGAACAATTCCTTATCCAGGAGCTAATGTCTATGGCGCATCAAAAGCTTTTGTAAAACAATTTTCTCTCAACTTGCGTGCCGATTTAGCTGGAACTAAAATCAGAGTGACTAACCTAGAACCCGGTTTATGTGAAGGGACAGAATTTTCAACTGTACGTTTCAAAGGGGACATAAAAGAGTTGAAAAACTTTATGAAGGTGCGCATGCAATTCAAGCAGAGGATATTGCTAATACCGTGTCATGGGTTGCTAGCCAACCAGAACACATTAATATTAATCGCATAGAAATAATGCCAGTCAGTCAAACTTATGGACCTCAACCTGTTTATCGTGAT

SEQ ID NO: 20222 - protein, 253 aa, Streptococcus agalactiae
  VARIANT 198: Xaa = Any Amino Acid
MISRKVALVTGASAGFGAAIVTNLVSDGYSVIGCARRMDKLKCLGEKFSEGHFYPLQMDITSRESVDKALESLPKNLQSIDLLVNNAGLALGLDKSYEADFGDWMTMINTNVVGLIYLTRCILPKMVEVNRGLIINLGSTAGTIPYPGANVYGASKAFVKQFSLNLRADLAGTKIRVTNLEPGLCEGTEFSTVRFKGXHKRVEKLYEGAHAIQAEDIANTVSWVASQPEHININRIEIMPVSQTYGPQPVYRD

SEQ ID NO: 20223 - protein, 990 aa, Streptococcus agalactiae
ATGCGTTCCTTATTTGGTGGTTTAAGAGAAAAAGTTGCAAGTGATTATGTTAAGATTGTTTTCCCTGAGGGAAGCGATGAACGTGTATTACGTGCAGCAGCTCGTTTGAAATTTGAAGGTCTTGTTGATCCTGTTATTTTAGGTAAGGCTGACGAAGTTCACGATTCTTTGGCAAGACTTGGTTTTGTTGATCAAGATTATAGCGTTATTGACCCTGAACAATACGAAAAATTTGAAGAGATGAAAGAAGCTTTTGTTGAGATTCGTAAAGGCAAAGCTACTATGGAAGATGCAGATCGTCTTTTGAAGGATGTTAACTATTTTGGGGTTATGTTAGTAAAACTTGGTTTGGCAGATGGTATGGTATCAGGGGCCATTCATTCAACAGCTGATACTGTACGTCCTGCTCTTCAAATTATTAAAACAAAACCAGGAATTTCACGCACTTCAGGTGTATTCTTGATGAACCGTGAAAATACACAGGAACGTTATATTTTTGCTGACTGTGCTATTAACATTGATCCTAATGCACAAGAGCTAGCAGAAATTGCAGTAAATACTGCGGATACAGCTAAAATATTTGATATTGATCCCAAGATTGCTATGCTTAGTTTTTCAACAAAAGGAAGTGCAAAAGCGCCTCAAGCTGAAAAAGTTCAAGAAGCAGCTAAAATTGCCAAAGATTTATCTCCCGAATTAGCTGTTGATGGAGAATTACAATTTGATGCAGCTTTTGTTCCGGAAACTGCAGAAATTAAAGCTCCTAATAGTGATGTTGCTGGAAAAGCAAATGTTTTTATTTTCCCAGACCTTCAATCAGGAAATATTGGCTATAAAATTGCACAACGTTTGGGTATGTTTGAAGCAATCGGACCGATTTTACAAGGATTGAATGCTCCAGTAAATGATTTATCACGTGGATCAAGTGCTGAAGATATTTATAAACTTGCTATCATTACAGCTGCTCAAGCTATTGATGAGAAATCAAAA

SEQ ID NO: 20224 - protein, 330 aa, Streptococcus agalactiae; identical to SEQ ID NO: 6648

SEQ ID NO: 20225 - protein, 882 aa, Streptococcus agalactiae; identical to SEQ ID NO: 10947

SEQ ID NO: 20226 - protein, 294 aa, Streptococcus agalactiae; identical to SEQ ID NO: 6650

SEQ ID NO: 20227 - protein, 834 aa, Streptococcus agalactiae
ATGACACAGATGAATTTTACAGATAGAGCAACACGTGTTGCTCTAATTGCTAACGGAAAATATCAAAGCAAGCGTGTAGCCTCAAAGCTCTTTGCTGCTTTTAAACATGATCCTGATTTTTATTTATCAAAAAAGGATCCTGATATTGTCATTTCTATTGGTGGAGATGGTATGCTTTTGTCAGCCTTCCATATGTACGAAAAACAACTGGATAAAGTAAGGTTTGTCGGTGTTCATACAGGACATTTAGGGTTTTATACAGACTATCGAGATTTTGAAGTTGACACATTAATTAATAATTTGAAAAATGATGAAGGTGAACAAATCTCCTATCCCATTTTGAAAGTAACTATTACCCTTGAAGATGGTCGAGTTATTCGTGCGCGTGCTTTAAATGAGTCTACTATTAAGCGTATTGAAAAAACAATGGTAGCGGATGTTGTTATTAATCAAGTGGTATTTGAAAGGTTTAGGGGAGATGGCATTTTAGTTTCTACACCAACCGGTAGTACTGCTTACAATAAATCACTAGGGGGGGCAGTACTCCACCCAACGATAGAAGCCTTGCAACTAACAGAAATTTCTAGTCTTAATAATCGCGTCTATCGTACCTTGGGGTCATCGGTTATCATCCCCAAAAAAGATGCTATAGAGATAGTTCCTAAACGAGTTGGTGTCTATACAATTTCTATAGATAACAAAACGGTCCATTACAAAAATGTTACCAAAATAGAATATAGTATTGACGAAAAAAGTATTAACTTTGTTTCAACTCCAAGTCACACTAGCTTTTGGGAACGTGTTAACGATGCTTTTATCGGAGAACCTGAACAT

SEQ ID NO: 20228 - protein, 278 aa, Streptococcus agalactiae
MTQMNFTDRATRVALIANGKYQSKRVASKLFAAFKHDPDFYLSKKDPDIVISIGGDGMLLSAFHMYEKQLDKVRFVGVHTGHLGFYTDYRDFEVDTLINNLKNDEGEQISYPILKVTITLEDGRVIRARALNESTIKRIEKTMVADVVINQVVFERFRGDGILVSTPTGSTAYNKSLGGAVLHPTIEALQLTEISSLNNRVYRTLGSSVIIPKKDAIEIVPKRVGVYTISIDNKTVHYKNVTKIEYSIDEKSINFVSTPSHTSFWERVNDAFIGEPEH

SEQ ID NO: 20229 - protein, 669 aa, Streptococcus agalactiae; identical to SEQ ID NO: 10953

SEQ ID NO: 20230 - protein, 223 aa, Streptococcus agalactiae; identical to SEQ ID NO: 2064

SEQ ID NO: 20231 - protein, 570 aa, Streptococcus agalactiae; identical to SEQ ID NO: 15499

SEQ ID NO: 20232 - protein, 190 aa, Streptococcus agalactiae; identical to SEQ ID NO: 2066

SEQ ID NO: 20233 - protein, 972 aa, Streptococcus agalactiae; identical to SEQ ID NO: 15501

SEQ ID NO: 20234 - protein, 324 aa, Streptococcus agalactiae; identical to SEQ ID NO: 2068

SEQ ID NO: 20235 - protein, 1113 aa, Streptococcus agalactiae; identical to SEQ ID NO: 15503

SEQ ID NO: 20236 - protein, 371 aa, Streptococcus agalactiae; identical to SEQ ID NO: 2070

SEQ ID NO: 20237 - protein, 345 aa, Streptococcus agalactiae; identical to SEQ ID NO: 15505

SEQ ID NO: 20238 - protein, 115 aa, Streptococcus agalactiae; identical to SEQ ID NO: 2072

SEQ ID NO: 20239 - protein, 630 aa, Streptococcus agalactiae
ATGGATAAGTCTATTCCTAAAGCAACTGCTAAACGTTTATCACTGTACTACCGTATTTTTAAACGTTTTAATACTGATGGCATCGAAAAAGCTAGTTCCAAACAAATTGCAGATGCCCTAGGTATCGATTCTGCTACTGTTCGACGTGATTTTTCTTATTTTGGTGAACTAGGACGCCGTGGTTTTGGTTATGATGTCAAAAAACTTATGAACTTCTTTGCAGAAATATTGAACGATCATTCTACAACAAATGTTATGCTGGTGGGGTGTGGAAATATCGGTAGAGCTCTCTTGCATTATCGTTTCCACGATCGCAATAAAATGCAAATTTCAATGGCTTTTGATTTAGATAGCAATGATTTAGTTGGTAAAACAACCGAGGATGGCATTCCTGTCTACGGTATTTCGACTATCAATGACCATTTAATAGATAGTGATATTGAAACTGCTATCCTAACAGTACCTAGTACAGAAGCCCAAGAAGTTGCTGACATCTTAGTCAAAGCAGGTATAAAAGGCATCTTGAGTTTTTCTCCAGTTCATTTAACATTACCAAAAGATATCATTGTTCAGTATGTAGATTTAACAAGCGAATTACAAACTTTACTTTATTTCATGAACCAGCAGCGA

SEQ ID NO: 20240 - protein, 210 aa, Streptococcus agalactiae; identical to SEQ ID NO: 2074

SEQ ID NO: 20241 - protein, 423 aa, Streptococcus agalactiae
ATGCTAGTACTAGCAAAACGGATTCACAAAGCTGAATATGATCGTAAAGAGCAAATTTTAAGTAGTGAACAATTAGCGAGGAAAATGATGCTCGAATTAGGGGATAAAAAACAAGAACATTTAGTAGCTATTTATATGGATACACAAAATCGTATTATCGAACAGAGAACTATTTTTATTGGTACTGTACGTCGTTCAGTAGCAGAGCCAAGAGAAATTCTACATTATGCTTGTAAAAACATGGCAACTTCTTTGATTATTATACATAATCATCCCTCAGGTTCTCCAAATCCCAGTGAAAGTGATTTAAGTTTCACTAAAAAAATAAAACGATCATGTGATCATCTGGGAATTGTCTGCCTAGATCACATCATCGTTGGAAAAAATAAATATTATAGTTTTCGAGAAGAAGCAGATATTTTA

SEQ ID NO: 20242 - protein, 141 aa, Streptococcus agalactiae
MLVLAKRIHKAEYDRKEQILSSEQLARKMMLELGDKKQEHLVAIYMDTQNRIIEQRTIFIGTVRRSVAEPREILHYACKNMATSLIIIHNHPSGSPNPSESDLSFTKKIKRSCDHLGIVCLDHIIVGKNKYYSFREEADIL

SEQ ID NO: 20243 - protein, 111 aa, Streptococcus agalactiae
ATGTCTGCAGCGGATGGATTCGCCTATATTGGCCCCAGATTTGAAGAAGCTTTTCCGGATTTTATTGCTAAATATCAGCTATTAGATATGTTGCAAGCTAAGTCTNNNNNT

SEQ ID NO: 20244 - protein, 37 aa, Streptococcus agalactiae
  VARIANT 36, 37: Xaa = Any Amino Acid
MSAADGFAYIGPRFEEAFPDFIAKYQLLDMLQAKSXX

SEQ ID NO: 20245 - protein, 441 aa, Streptococcus agalactiae
ATGTTTAAATTTTTAAAACGTTTGATAGCATTAATTATTATTATTTTCATTGGGTACCGTCTAGTTATCATCCATGAAAATGTTAAAAAAGTGCTTCAATATCATGATTTAGTGCAGAATACTCTTGCAGAGAATGGTTCAGAGGCTAATGTGCACTTAGTATTATCTATGATTTATACTGAAACTAAGGGAGATGCTATAGATGTGATGCAATCAAGTGAAAGTATCAGTGGAACTACGAACAGTATTACGGATAGTCACACCAGTATTAAACATGGCGTCACTCTGTTGTCACAAAATATAAGTCAAGCTAAAAAAGCTAAGGTTGATGTATGGACTGCTGTCCAAGCATATAATTTTGGTTCTTCTTATATTGATTATGTAGCGGATCATGGGGGTGAAAATTCCATTGAGTTGGCCAAAAATTACTCTAAAAATGTG

SEQ ID NO: 20246 - protein, 147 aa, Streptococcus agalactiae
MFKFLKRLIALIIIIFIGYRLVIIHENVKKVLQYHDLVQNTLAENGSEANVHLVLSMIYTETKGDAIDVMQSSESISGTTNSITDSHTSIKHGVTLLSQNISQAKKAKVDVWTAVQAYNFGSSYIDYVADHGGENSIELAKNYSKNV

SEQ ID NO: 20247 - protein, 216 aa, Streptococcus agalactiae
TTGAAAGACGCAATACCTGGACCTGTTCAAGTAAGTGATATTGATCATTCCCGTCAAATTAAGAAGTTAGAGAATCAGAAGCTATCTCTTTCAAATGGTATTGAATTGATTGTACCCAACAATGTCTACCAAGATGCTGAATCAGTTGAATTTATCCAAAACCCTGATGGTACATACTCAATACTAATCAAAAACATACAGGATATTCAAAATAAA

SEQ ID NO: 20248 - protein, 72 aa, Streptococcus agalactiae
MKDAIPGPVQVSDIDHSRQIKKLENQKLSLSNGIELIVPNNVYQDAESVEFIQNPDGTYSILIKNIQDIQNK

SEQ ID NO: 20249 - protein, 1129 aa, Streptococcus agalactiae
ATGAAATTTGAAAAACGGCAGGTCTATTATGTTGTCATAACATTTGCTATTTGCTATGCTATACAGGCTTATTGGGGAGCTGTTTCTAATATTTTAACTACGCTTCATAAGGCAATATTTCCTTTTTTGATGGGAGCTGGAATTGCCTATATTATTAATATTGTAATGTCAGTCTATGAGCGATTATATATAAAGCTTTTTAAGGATCTAGACTATTAATGGCAATCAAGCGTAGTGTTTCTATGATTTTATCCTATGCAACTTTTATTGGTTTAATTGTCTGGCTATTTTCAATTGTCATTCCAGATTTGATTTCTAGTTTGAGTTCTTTATTGGTTATTGATACCGGAGCACTTGCTAAATTGGTTAATAATCTCAATGAAAATAAACAAATTTCTGAGGCTTTAAATTATATGGGAACAGATAAAGACTTAGTTTCTACTTTAAGTGGTTATAGCCAGCAGATTTTGAAGCAAGTTTTATCTGTTTTAACAAATTTACTAACCTCAGTTTCCTCTATTGCGGCAACACTTCTGAATGTTTTTGTTAGTTTTATTTTTTCAATTTACGTTTTGGCAAACAAGGAGCAGTTGGGACGTCAATTTAATTTGTTAATTGATACCTATTTAGGTTCAACAGGCAAAACATTCCATTACGTTCGTCATATCCTTCATCAACGTTTCCATGGTTTTTTTGTAAGCCAAACTTTAGAAGCTATGATTTTAGGAAGTTTGACGGTTATTGGTATGTTGATTTTCCAATTTCCTTATGCTTTAACAGTTGGGGTTTTAGTTGCTTTTACAGCTCTAATACCGGTTGTGGGAGCCTACATTGGTGTTACAATCGGTTTCATCTTAATTGCTACTGAATCGCTTACTGAAGCATTCTTGTTTGTTCTTTTCTTGATCCTTTTACAACAATTTGAGGGAAATGTCATTTATCCGAAAGTTGTCGGTGGATCGATTGGACTGCCTTCTATGTGGGTTTTAACGGCTATTACTATCGGAGGTGCTTTATGGGGGATCTTAGGCATGTTACTTGCTGTTCCTGTTGCAGCTACTATCTATCAGATTGTAAAAGATCATATTATCAAGCGACAACGCTTAGAAATCGTGCACGAACCTATCGT

SEQ ID NO: 20250 - protein, 377 aa, Streptococcus agalactiae
  VARIANT 367: Xaa = Any Amino Acid
MKFEKRQVYYVVITFAICYAIQAYWGAVSNILTTLHKAIFPFLMGAGIAYIINIVMSVYERLYIKLFKGSRLLMAIKRSVSMILSYATFIGLIVWLFSIVIPDLISSLSSLLVIDTGALAKLVNNLNENKQISEALNYMGTDKDLVSTLSGYSQQILKQVLSVLTNLLTSVSSIAATLLNVFVSFIFSIYVLANKEQLGRQFNLLIDTYLGSTGKTFHYVRHILHQRFHGFFVSQTLEAMILGSLTVIGMLIFQFPYALTVGVLVAFTALIPVVGAYIGVTIGFILIATESLTEAFLFVLFLILLQQFEGNVIYPKVVGGSIGLPSMWVLTAITIGGALWGILGMLLAVPVAATIYQIVKDHIIKRXTLRNRARTYR

SEQ ID NO: 20251 - protein, 1434 aa, Streptococcus agalactiae; identical to SEQ ID NO: 10969

SEQ ID NO: 20252 - protein, 478 aa, Streptococcus agalactiae; identical to SEQ ID NO: 2080

SEQ ID NO: 20253 - protein, 610 aa, Streptococcus agalactiae
ATGTTAGAAGTTATTGACAAAGCTTTAAGAGATTATCAAATGAAACGAGAACAGTTTTTTGAGATTAACAATCAGACAGTACAAGAAGGTGCCATTGTTTTCACAGGAGATTCTATCGTTGAGTTTTTTCCTTTAAAAAAACATTTAGGACGTGACTATCCTTTAGTTAATAGAGGAGTAGCAGGATCAGATACTTATTGGCTTTTAGAAAACTTGAGAACCCAGTATGGGAACTATTACCATCCAAAGTATTTATTTTATTGGAACAAATGATATTGGTTTAGGGCATTCACAGTCAGAAATCATAGCTAATATCACGGATATAATTGCAGAAATTCGTGCGGAATCTTATATGACAGAGATTAATATACTGAGTGTTTTACCTGTTAGTGAAGAAGATGACTATATAGAGCGTGTCAAGGTAAGAAATAATCAAGCAATAAAAGCTTTAAACAAAACCTTATCAGTAATTTCTGGCATTAATTATATTGAATTGTATGATTTATTAGTTGACGAAAAAGGTCAGCTTGCTAGCAGTTTTACAAAAGATGGTTTGCACCTAACAGATCAAGCCTATGCTAAAATTTCTGAAACGATAAAACTCCACCTT

SEQ ID NO: 20254 - protein, 204 aa, Streptococcus agalactiae
  VARIANT 87: Xaa = Any Amino Acid
MLEVIDKALRDYQMKREQFFEINNQTVQEGAIVFTGDSIVEFFPLKKHLGRDYPLVNRGVAGSDTYWLLENLRTQVWELLPSKVFIXIGTNDIGLGHSQSEIIANITDIIAEIRAESYMTEINILSVLPVSEEDDYIERVKVRNNQAIKALNKTLSVISGINYIELYDLLVDEKGQLASSFTKDGLHLTDQAYAKISETIKLHL

SEQ ID NO: 20255 - protein, 819 aa, Streptococcus agalactiae
ATGATTAAAGTAATAGCAACAGATATGGATGGAACTTTTCTACGCTCAGATAAAACTTATGATAAAGCACGGTTTTCTTCTTTATTAACGTTGATGGAGAAGTATGATATTAAATTTGTAGCTGCTAGTGGTAATTTATACGATCAATTGTTGTTAAACTTTTTGGAATACCCTAATCGTATCGCCTACGTCGCTGAAAATGGTGGTCGTGTCATTGACCAAGATGGCACATTACTAAAAGAAACTTATTTATCTAATGATACAGTTGCAGCTGTTCTATCCTATTTATATCAGAACTATCCTGAGACACTCATCAGCTTATCTGGTGAAAAACGTTCATACCTTGAGCGAAGAACTCCTATTAATAGGCGGACTGAATTAGAATACTATATGCCTAATTTTATCTATAAAGACCATTTGCTGCCCTTAGATGATGACCGATATTTTCAAATGACACTTTGGGTAAATGAAAATCTTGTTTCTGAGATGTTGTTAGATATTAGTGAACACTTTAAAAATCATCATATCAGATTGACCTCTAGTGGTTTTGGTTGTATCGATGTCTTACCAGCTGATGTCAATAAAGCGGATGGTATCGCTATTCTCCTTGAAAAGTGGGGATTGAAACAGGATCAAGTGATGGTTTTTGGTGATGGGGGCAATGATGTGGAAATGTTGAGAGCAGCAAATATTTCTTACGCTATGTCAAATGCGCCAGAAGAAATTAAAGCTATTGCTAAATATCAAACAGTTAGTAACGATCAAGATGGTGTGTTAGAAACGATAGAGAACTTTCTTCACAAGATGAGTGATAATGAA

SEQ ID NO: 20256 - protein, 273 aa, Streptococcus agalactiae; identical to SEQ ID NO: 2084

SEQ ID NO: 20257 - protein, 927 aa, Streptococcus agalactiae; identical to SEQ ID NO: 10975

SEQ ID NO: 20258 - protein, 309 aa, Streptococcus agalactiae; identical to SEQ ID NO: 2086

SEQ ID NO: 20259 - protein, 1529 aa, Streptococcus agalactiae
ATGGAAAATCATAAAAATGAATTTCAGTTTTCACTTGAATCAATTCTGGGATTTGTTTGGAGAGGAATAGTAGTAGGCTTAATATCAGGATTTGTTGTCAGCATATTTCGATTAGCGATTGAAAAAATTTTTTTAGTTGTTATGGAACTTTATAAAAGTGCCCATTATCAACCAATTATTTTATTGAGCATTACGGTTACTAGTATTATCGCTGCAGTGATAATAGGTTTTTTTATCAAATCTGATCCTGATATTAAAGGTTCAGGTATCCCGCATGTTGAAGGTGAACTTAAAGGAATGCTATCGCCAGACTGGTTTAGTATTGTATGGAAGAAATTCATTGCGGGTATTTTAGCTATTTCTTCGGGACTTATGCTTGGTCGCGAAGGTCCCAGTATTCAGTTAGGAGCTATGACAGGTAAGGGAATTGCACAGTATCTCAATGCTAGTCGAATGGAAAAACGTGTTTTAATTGCTAGTGGTGCAGCAGCAGGTCTTTCAGCAGCTTCAATGCTCCTATTGCAGGCCTTTTATTTGTAGTTGAAGAAATTTACCATCATTTTTCTCGCTTAGTTTGGATAACAGCTTTGGTAGCAAGTTTAGTGGCAAACTTTGTCTCACTTAATATCTTTGGTTTAACCCCAGTTTTAGCTTTACCATCAGAATTACCATCTTTAAATCTCAACTTTTATTGGATTTTTTTACTCATGGGTCTCTTTTTGGGTATCTTAGGCTTTATCTATGAGTGGGTAATTTTGAGATTTCATGTGATCTATGATTATTTAGGTAAACTATTTCATCTACCATCTCACCTATATGGTATATTAGCGGTAATTTTTATTCTTCCTATTGGTTACTATTTCCCACAATTATTGGGGGGTGGAAATGGCTTAATTGTATCACTGCCTAGGAGTAATCTTAGTCTGATGATGTTAGGATTATTTTTCCTCATTCGTTTTTTATGGAGTATGTTGAGTTACAGTAGTGGCTTGCCAGGAGGAATTTTTTTACCAATTCTAGCTTTAGGATCTTTAGCAGGTGCTTTTTTTGCAGTAGGTATGCAGTACTTTGGTATAATATCTCATCAGCAGATATCTTTATTTGTTGTTCTAGGAATGGCGGGCTATTTTGGTGCAATCTCAAAAGCACCACTAACAGCTATGATTTTGGTTACAGAAATGGTTGGCGATTTAAAACAATTAATGGCTATTGGAATTGTAACAATGGTATCTTATATTGTCATGGATTTATTAAAGGGAGAACCTATTTATGAAGCGATGTTGGCTAAAATGACCTTCAATCCAAAAGATAAAGTAATGACACCTACATTGATTGAATTAACTGTTTCAGATAAAATATCAGGAAAGTATGTCCGAGATTTAGAATTACCAGAAAATGTGCTAATAACGACTCAAATTCATCATAAGACATCGGCTGTAGTATCAGGAAATACTATCTTGAATGCTGGTGACACCATTTTTTTAGTTGTGAATGAATCGGAAATTAAAGAAGTACGTGAGCAGCTGATG

SEQ ID NO: 20260 - protein, 510 aa, Streptococcus agalactiae; identical to SEQ ID NO: 2088

SEQ ID NO: 20261 - protein, 1071 aa, Streptococcus agalactiae
ATGCGTAGAGATTATTCCTTTTTAGGCGGTATTATTCTTGTTATCCTGATCCTCTTTGGTTTAACCACTTACTTAGAAAAGAAGAGTAGTTCAACACCTAACTCAGATAAGTTAGTTATTTATAACTGGGGAGACTATATTGATCCAGCCTTATTAAAAAAATTTACAAAAGAAACTGGAATTGAAGTACAATACGAAACGTTTGACTCTAATGAGGCTATGCACACCAAAATTAAGCAGGGTGGGACGACATATGATATTGCTGTACCTAGTGATTATATGATTGACAAAATGATAAAAGAAAACCTTCTGGTTAAACTTGATCATTCAAAGATAGCTAATTGGGATGCTATTGGAGCTAGGTTTAAAAATTTGAGTTTCGATCCTAAAAATAAATATTCGATTCCTTATTTTTGGGGAACTGTTGGGATTGTTTATAATGATCAATTAGTTAAAACTCCTCCTAAACATTGGGATGATTTATGGCGTCCAGAGTTTCGAAATAAAATCATGCTAGTTGATAGTGCACGTGAGGTTATTGGAGTTGGTTTAAATTCCTTGGGATATGGATTGAATACAAAGAACATATCAGAATTAAAAGCCGCTTCTAAAAAGTTAGATGCTCTAACACCAAACGTTAAGGCTATTGTTGCTGATGAGATGAAAGGCTATATGATTCAGGGAGATGCAGCGATTGGTGTTACATTCTCTGGAGAAGCACGAGAAATGCTTGATGGGAACAAGCATTTGCATTACGTTGTTCCTAGTGAAGGATCGAACCTTTGGTTTGATAATATTGTAATCCCCAAAACAGTAAAGCATCGCAAAGAAGCTTATGCCTTTATTAATTTCATGATGGAACCTAAAAATGCGGCACAAAATGCAGAATATATTGGTTATGCGACCCCTAATCTCAAAGCAAAAGCGCTGTTACCAGCAGATATCAAAAATGATAAAGCATTTTATCCTCCTGATAAAACAATTGATCATTTAGAAGTTTATAATAACTTGGGTCAAAAATGGCTTGGTATTTATAATGATTTGTACTTACAATTTAAAATGTATCGTAAG

SEQ ID NO: 20262 - protein, 357 aa, Streptococcus agalactiae
MRRDYSFLGGIILVILILFGLTTYLEKKSSSTPNSDKLVIYNWGDYIDPALLKKFTKETGIEVQYETFDSNEAMHTKIKQGGTTYDIAVPSDYMIDKMIKENLLVKLDHSKIANWDAIGARFKNLSFDPKNKYSIPYFWGTVGIVYNDQLVKTPPKHWDDLWRPEFRNKIMLVDSAREVIGVGLNSLGYGLNTKNISELKAASKKLDALTPNVKAIVADEMKGYMIQGDAAIGVTFSGEAREMLDGNKHLHYVVPSEGSNLWFDNIVIPKTVKHRKEAYAFINFMMEPKNAAQNAEYIGYATPNLKAKALLPADIKNDKAFYPPDKTIDHLEVYNNLGQKWLGIYNDLYLQFKMYRK

SEQ ID NO: 20263 - protein, 774 aa, Streptococcus agalactiae
ATGAAAAAATTCGCAAATATCTATTTAGCACTTGTTTTTATTATCCTTTATATTCCTATTATTTATTTGATTTTTTATTCTTTCAATAAAGGTGGGGATATGAATTCTTTTACTGGATTCACCTTTAGTCACTATGGAGAACTGTTTCAGGATAGCCGCTTAATGCTAATTTTAGTGCAAACATTCTTTTTGGCTTTTCTTAGCGCCTTATTAGCTACAATTATTGGTACCTTTGGAGCTATTTGGATTTATCAGGTAAGACGTAGACATCAAACCTCTATTTTATCGCTTAATAATATCCTTTTAGTAGCACCAGATGTTATGATTGGTGCAAGTTTTCTCTTAGTATTTACTGTTATTGGTTTACAGTTAGGTTTCACTTCTGTATTATTGAGCCATGTTGCATTCTCTATTCCTATTGTTGTTTTAATGGTCTTACCTCGTTTAAAAGAAATGAATGATGATATGATTAATGCTTCCTATGATTTAGGAGCTTCAACTTGGCAAATGCTTAAAGAAGTTATGTTACCCTATTTGTCGTCGGGTATTATTTCAGGTTTCTTTATGGCTTTCACTTACTCGCTAGATGATTTTGCGGTTACTTTCTTTGTTACAGGTAATGGCTTTTCAACGCTTTCAGTAGAAATCTATTCACGCGCACGTCGCGGTATATCATTGGAAATTAATGCCTTGTCAACTATTGTCTTTTTATTTAGTATTTTATTGGTAATTGGTTATTACTATATTGCGAAAGAGAAGGGAGAAAAGAATGCG

SEQ ID NO: 20264 - protein, 258 aa, Streptococcus agalactiae
MKKFANIYLALVFIILYIPIIYLIFYSFNKGGDMNSFTGFTFSHYGELFQDSRLMLILVQTFFLAFLSALLATIIGTFGAIWIYQVRRRHQTSILSLNNILLVAPDVMIGASFLLVFTVIGLQLGFTSVLLSHVAFSIPIVVLMVLPRLKEMNDDMINASYDLGASTWQMLKEVMLPYLSSGIISGFFMAFTYSLDDFAVTFFVTGNGFSTLSVEIYSRARRGISLEINALSTIVFLFSILLVIGYYYIAKEKGEKNA

SEQ ID NO: 20265 - protein, 792 aa, Streptococcus agalactiae; identical to SEQ ID NO: 10983

SEQ ID NO: 20266 - protein, 264 aa, Streptococcus agalactiae; identical to SEQ ID NO: 2096

SEQ ID NO: 20267 - protein, 1152 aa, Streptococcus agalactiae; identical to SEQ ID NO: 10985

SEQ ID NO: 20268 - protein, 384 aa, Streptococcus agalactiae; identical to SEQ ID NO: 2098

SEQ ID NO: 20269 - protein, 900 aa, Streptococcus agalactiae; identical to SEQ ID NO: 10987

SEQ ID NO: 20270 - protein, 300 aa, Streptococcus agalactiae; identical to SEQ ID NO: 2100

SEQ ID NO: 20271 - protein, 486 aa, Streptococcus agalactiae; identical to SEQ ID NO: 6691

SEQ ID NO: 20272 - protein, 162 aa, Streptococcus agalactiae; identical to SEQ ID NO: 2102

SEQ ID NO: 20273 - protein, 360 aa, Streptococcus agalactiae
ATGGATAAGATTTATTTAAATAAATGTCGGTTTTATGGTTATCATGGTTCTTTTTCGGAAGAACAAACATTGGGGCAAGTTTTTCAAGTTGATGCTGTTCTATCACTTGATTTAGCAAAAGCATCACAAACTGATGATTTAATTGATACGGTTCATTATGGTGAAGTTTTTGACTGTATTAAAAATCATGTTGAAAACGAACAGTATCAATTAATAGAGAAATTAGCAGGTGTTATTGTTGAAGATATTTTCTTACAGTTTCATCCAGTACAAGCTATTACATTAAAGATTACAAAAGACAATCCACCAATTAATGGGCACTATGAATCAGTTGGAATTGAATTGGAGCGCAAGCGAGTA

SEQ ID NO: 20274 - protein, 120 aa, Streptococcus agalactiae
MDKIYLNKCRFYGYHGSFSEEQTLGQVFQVDAVLSLDLAKASQTDDLIDTVHYGEVFDCIKNHVENEQYQLIEKLAGVIVEDIFLQFHPVQAITLKITKDNPPINGHYESVGIELERKRV

SEQ ID NO: 20275 - protein, 801 aa, Streptococcus agalactiae
ATGAAAATAGGACAATATGATATTACAGGTAAAGCTTGTATCATGGGGATTTTAAATGTAACGCCTGATTCCTTCTCAGATGGTGGTTCTTATACCACAATTGATTCAGCTTTAAATCAAGTTGGTGAGATGCTTGAACAAGGGGTGGCAATTGTAGATATTGGGGGAGAATCAACGCGGCCAGGTGCAGTATTTGTGACTGCTGAAGAAGAAATTAAACGTGTAGTTCCAATGATTAAAGCTATTAGAGAGGTCTACCCTGATCTTTTGTTATCAATAGATACTTATAAAACAGAGGTAGCTCAAGCAGCCCTTGATGCAGGTGTACATATTTTAAATGACGTTTGGTCAGGTTTATATGATGGTAAAATGCTATCTTTAGCAGCAGAACGAAATGTTCCAATTATTTTGATGCATAACCAGGAAGAAGCTGTTTATCAAAATATCAAAAAAGAAGTTTGTGAATTCTTACTTGAAAGAGCAGAGCGTGCTTTAGAAGCAGGTGTTTCAAAGGATAATATTTGGATAGATCCTGGCTTTGGTTTTGCTAAAACAGAGGAGCAAAATTTAGAGCTATTAAAAGGTTTGGAACAAGTGTGTGATTTAGGTTATCCTGTGTTATTTGGGATCTCTCGAAAACGTACTGTTAATTATCTTCTAGGTGGTAATAGGGAAGTAACTGAACGTGATATGGGGACTGCTGCTTTATCGGCATGGGCAATAGCAAAGGGGTGTCAGATTGTACGTGTTCACAATGTTGAAGTAAATAAGGACATTGTGACAGTAATTAGTCAGTTGGTG

SEQ ID NO: 20276 - protein, 267 aa, Streptococcus agalactiae
MKIGQYDITGKACIMGILNVTPDSFSDGGSYTTIDSALNQVGEMLEQGVAIVDIGGESTRPGAVFVTAEEEIKRVVPMIKAIREVYPDLLLSIDTYKTEVAQAALDAGVHILNDVWSGLYDGKMLSLAAERNVPIILMHNQEEAVYQNIKKEVCEFLLERAERALEAGVSKDNIWIDPGFGFAKTEEQNLELLKGLEQVCDLGYPVLFGISRKRTVNYLLGGNREVTERDMGTAALSAWAIAKGCQIVRVHNVEVNKDIVTVISQLV

SEQ ID NO: 20277 - protein, 561 aa, Streptococcus agalactiae
ATGCCCAATCAAGAAAAAATGGAAAAAGCTATTTATCAATTTTTAGAGGCTTTAGGAGAAAATCCTGATCGAGAAGGATTGAAAGATACACCGAAGCGTGTGGCAAAAATGTATATAGAAATGTTCTCAGGACTTAATCAAGATCCAAAGGAGCAATTCACTGCAGTCTTTTCTGAAAATCATGAAGAGGTTGTGATTGTCAAGGATATTCCATTCTATTCCATGTGTGAACATCATTTGGTTCCTTTTTATGGTAAAGCTCATATTGCTTATTTACCAAACGATGGACGTGTTACTGGACTTAGTAAGCTTGCACGTGCAGTTGAAGTGGCGAGTAAGCGTCCTCAACTTCAGGAACGTTTAACAGCACAAGTTGCACAAGCTTTAGAGGATGCTTTAGCGCCTAAAGGTATTTTTGTTATGATAGAAGCAGAGCATATGTGCATGACAATGCGTGGCATTAAAAAACCAGGAAGTAAGACGATTACAACGGTAGCTCGTGGTTTATACAAGGACGATCGATATGAAAGACAAGAAATTCTATCGCTAATACAAAAAGGA

SEQ ID NO: 20278 - protein, 187 aa, Streptococcus agalactiae; identical to SEQ ID NO: 6698

SEQ ID NO: 20279 - protein, 1260 aa, Streptococcus agalactiae
ATGACTTATCAAGAAGCGCTAGAATGGATTCATAGCAAATTAGCTTTTGGTATTAAACCAGGTTTGGAACGTATGAGATGGATGCTAGAGCAGTTAGGAAACTCTCAAAACAACCTATCTGCCATTCATGTTGTTGGAACGAATGGTAAAGGATCAACAACTAGTTATTTACAACATATTTTTACAAATTCTGGTTATCAAGTTGGAACATTTACATCACCATATATTGTTGACTTTAGAGAGCGTATTAGCATTGATGGTCAAATGATTCCAGAGTCTGATTTTATCAAACTTGTTGAAACTGTTCGTCCAGTTGTTGAACGGTTGCACCTTGAGACCAACCTAGAACCAGCTACAGAATTTGAAGTTATAACAGTTTTGATGTTCTATTATTTTGGCAATAGCTGTCCAGTTGATATCGTCATTATTGAGGCTGGAATGGGCGGTTATTATGATTCTACCAACATGTTCAAGGCTTTAGCGGTTACTTGTCCGTCAATTGGATTAGATCATCAGGAGGTTTTAGGACGAACTTATGTAGATATAGCTGAACAAAAAGTAGGTGTTTTAAAAAAAGGAGTTCCATTCGTATATGCTAATGATCGTCAGGATGTTGAAGAAGTCTTTCAAATAAAAGCCAAGGAAACCCACAGCCAGACTTATCGTTTACACAATGACTTTTATATAAAAGAAGAGGAAAATTATTTTAACTATATAGGTCCTCAAGCAAATATTGATCATATTCAGTTGCAAATGCCGGGACATCACCAAGTTTCCAATGCTAGCATAGCTATAACTACCAGTTTATTATTAAGAGACAAATATCCAAAGTTAACCCTACAGACCATTAAAGATGGGCTTGAAATGACAAAATGGGTAGGCCGTACAGAATTAATCTTTCCAAATGTAATGATTGATGGCGCTCATAATAATGAAAGTGTCGATGCTCTCGTTCAAGTTATAAAAAAATATCAGCAGAAAAACGTGCATATTCTATTTGCTGCAATTAATACTAAACCGATAGAGAGTATGTTAGAATCATTGTCTAGTATCGCTCCGGTTTCGGTTACTAGCTTTGATTACCCTAAATCAATAAACTTAGACAAATATCCTAAAGCGTACACTAGAGTTAGTGATTGGAAGAAATGGCTACATGATATAAATCTGACATCAGATAAAGATTTCTATGTGATTACTGGCTCCCTTTATTTTATTTCTCAAGTTCGTCAGGAACTACTATTAATCAAAACTACAACAACT

SEQ ID NO: 20280 - protein, 420 aa, Streptococcus agalactiae
MTYQEALEWIHSKLAFGIKPGLERMRWMLEQLGNSQNNLSAIHVVGTNGKGSTTSYLQHIFTNSGYQVGTFTSPYIVDFRERISIDGQMIPESDFIKLVETVRPVVERLHLETNLEPATEFEVITVLMFYYFGNSCPVDIVIIEAGMGGYYDSTNMFKALAVTCPSIGLDHQEVLGRTYVDIAEQKVGVLKKGVPFVYANDRQDVEEVFQIKAKETHSQTYRLHNDFYIKEEENYFNYIGPQANIDHIQLQMPGHHQVSNASIAITTSLLLRDKYPKLTLQTIKDGLEMTKWVGRTELIFPNVMIDGAHNNESVDALVQVIKKYQQKNVHILFAAINTKPIESMLESLSSIAPVSVTSFDYPKSINLDKYPKAYTRVSDWKKWLHDINLTSDKDFYVITGSLYFISQVRQELLLIKTTTT

SEQ ID NO: 20281 - protein, 885 aa, Streptococcus agalactiae; identical to SEQ ID NO: 6701

SEQ ID NO: 20282 - protein, 295 aa, Streptococcus agalactiae; identical to SEQ ID NO: 2112

SEQ ID NO: 20283 - protein, 864 aa, Streptococcus agalactiae; identical to SEQ ID NO: 15545

SEQ ID NO: 20284 - protein, 288 aa, Streptococcus agalactiae; identical to SEQ ID NO: 2114

SEQ ID NO: 20285 - protein, 1281 aa, Streptococcus agalactiae; identical to SEQ ID NO: 6705

SEQ ID NO: 20286 - protein, 427 aa, Streptococcus agalactiae; identical to SEQ ID NO: 2116

SEQ ID NO: 20287 - protein, 885 aa, Streptococcus agalactiae; identical to SEQ ID NO: 6707

SEQ ID NO: 20288 - protein, 295 aa, Streptococcus agalactiae; identical to SEQ ID NO: 6708

SEQ ID NO: 20289 - protein, 225 aa, Streptococcus agalactiae
TTGGGGGCTAGTGTTGGCAGTGATTGCTATTGTCTTACTCTTGTCGGTGGTCTGTTAGCGCTGCAGAACGTTTTAATTATTGTCGCTCTGCCATTTTCATTCGTAATGATTTTGATGATGCTAGCGCTATTAGTGGAGCTTTTCCATGAGAAAAAAGAAATGGGCTTATCGATTTCTCCAGATCGTTATCCACGTAAAAATGAACCATTTAAATCTTATGAAGAA

SEQ ID NO: 20290 - protein, 75 aa, Streptococcus agalactiae
MGASVGSDCYCLTLVGGLLALQNVLIIVALPFSFVMILMMLALLVELFHEKKEMGLSISPDRYPRKNEPFKSYEE

SEQ ID NO: 20291 - protein, 564 aa, Streptococcus agalactiae
TTGGGACCAACGGTTCGTATTTTTGATACCCTAACAGAGTCTTTAGGCTCTTATTTACAAAATTTCTTTGGAATGAGCTTTCGTGCAGCTGCTTTTGACAATACTAAACGTTCTTGGATTGATAATTGGACGATTTTTTATTGGGCGTGGTGGATTTCCTGGTCTCCTTTTGTTGGAGTTTTCATCGCTCGTATTTCTAAAGGGCGTAGCATTCGGGAGTTTTTAACGGTAGTTCTTTTAATACCGACATTATTGAGTTTTGTATGGTTTGCAGCATTTGGCACATTATCAACTCAGGTACAACAACTGGGTATTAATTTGACAAAGTTTGCAACAGAGGAAGTATTGTTTGCTACTTTTAATCACTACACTTTAGGTTGGCTTTTATCCACTATTGCTATCATTTTAATTTTTTCATTTTTTATTACATCAGCAGATTCTGCAACGTACGTTTTGGCTATGTTGACAGAAGATGGTAATTTAAATCCAAAAAATCGAACTAAAGTAATTTGGGGGCTAGTGTTGGCAGTGATTGCTATTGTCTTACTCTTGTCGGTGGTCTGT

SEQ ID NO: 20292 - protein, 188 aa, Streptococcus agalactiae
MGPTVRIFDTLTESLGSYLQNFFGMSFRAAAFDNTKRSWIDNWTIFYWAWWISWSPFVGVFIARISKGRSIREFLTVVLLIPTLLSFVWFAAFGTLSTQVQQLGINLTKFATEEVLFATFNHYTLGWLLSTIAIILIFSFFITSADSATYVLAMLTEDGNLNPKNRTKVIWGLVLAVIAIVLLLSVVC

SEQ ID NO: 20293 - protein, 387 aa, Streptococcus agalactiae; identical to SEQ ID NO: 6711

SEQ ID NO: 20294 - protein, 129 aa, Streptococcus agalactiae; identical to SEQ ID NO: 882

SEQ ID NO: 20295 - protein, 381 aa, Streptococcus agalactiae; identical to SEQ ID NO: 6713

SEQ ID NO: 20296 - protein, 127 aa, Streptococcus agalactiae; identical to SEQ ID NO: 880

SEQ ID NO: 20297 - protein, 186 aa, Streptococcus agalactiae; identical to SEQ ID NO: 6715

SEQ ID NO: 20298 - protein, 62 aa, Streptococcus agalactiae; identical to SEQ ID NO: 6716

SEQ ID NO: 20299 - protein, 399 aa, Streptococcus agalactiae
TTGTATTTGTTGTTAGTTACTTCAATTCTTGCTTTGTGTGTCTTTTTTATTATGAGTCCTCTTGGACAAATACGTTTAGGGCGACCTCATTCACGTCCTGAATATTTAACTGTATCATGGATAGCAATGATGTTTTCAGCAGGTATGGGGATTGGTTTGGTCTTCTACGGAGCAGCTGAACCCTTATCGCATTTTGCTATTTCGACACCTGGCGCACCTAAGGAATCGCAAACAGCATTAGCTGATGCATTTCGTTTTACATTTTTTCACTGGGGGATACATGCTTGGGCAGTATATGCATTGGTTGCTTTGGCTCTAGCTTATTTTGGATTTCGAAAGCAAGAGAAATACCTCTTGTCTGTCACTTTAAAGCCTCTTTTCGGTGATAAGACAGATGGT

SEQ ID NO: 20300 - protein, 133 aa, Streptococcus agalactiae
MYLLLVTSILALCVFFIMSPLGQIRLGRPHSRPEYLTVSWIAMMFSAGMGIGLVFYGAAEPLSHFAISTPGAPKESQTALADAFRFTFFHWGIHAWAVYALVALALAYFGFRKQEKYLLSVTLKPLFGDKTDG

SEQ ID NO: 20301 - protein, 141 aa, Streptococcus agalactiae; identical to SEQ ID NO: 6719

SEQ ID NO: 20302 - protein, 47 aa, Streptococcus agalactiae; identical to SEQ ID NO: 6720

SEQ ID NO: 20303 - protein, 1374 aa, Streptococcus agalactiae
ATGGCATATAAAACAATTTATCCGTACACTAACGAAGTATTGCATGAATTCGATAATATCAGTGACAGTGATCTCGAACAGTCATTAGACATAGCGCATGCCCTCTACAAGACATGGCGCAAAGAAGATAATGTTGAAGAACGCCAAAATCAATTGCATAAAGTAGCAGATTTATTACGTAAGGACCGTGATAAGTACGCTGAAGTTATGACTAAAGATATGGGAAAACTTTTCACTGAAGCACAAGGAGAAGTGGACTTGTGTGCAGACATAGCTGACTATTATGCTGATAATGGGCAAAAGTTTTTAAAACCTGTTCCGTTAGAAAGTCCAAATGGAGAGGCTTACTATTTGAAACAAGCTGTCGGTGTTTTACTTGCTGTCGAGCCATGGAATTTCCCATTTTATCAGATTATGCGTGTATTTGCCCCTAACTTTATAGTGGGTAATACTATGCTTTTAAAACATGCTTCTATTTGTCCTGCATCAGCTCAAGCATTTGAGGATTTAGTCCGAGAAGCAGGAGCTCCGGAAGGAGCGTTTAAAAATATTTTTGCTTCGTATGATCAAGTTTCAAACCTTATATCAGATCCTCGTGTTGCAGGTGTGTGTTTAACTGGTTCTGAGCGTGGTGGGGCATCAATAGCAGCTGAGGCTGGTAAAAATTTGAAAAAATCGTCTATGGAATTAGGTGGGAACGATGCTTTTCTTATTTTAGATGATGCTGATTTTGATTTACTTAGTAAAACAATATTCTTTGCGCGTTTATATAATGCAGGTCAAGTATGTACATCTTCAAAACGTTTCATTGTTATGGCTGATAAGTATGACGAATTTGTAAATATGGTAGTTGAGACCTTTAAGTCTGCTAAATGGGGTGACCCAATGGATTCGGAAACAACCTTGGCTCCACTGTCATCTGCAGGTGCAAAGGATGATGTTTTAAAACAAATTAAATTGGCGGTAGACCACGGTGCTGAGGTAGTTTTTGGAAATGACACTATAGATCATCCAGGAAACTTCGTCATGCCAACTGTTTTAACGAATATCACTAAAGCAAATCCAATCTATAATCAAGAAATTTTCGGCCCCGTAGCCTCTATCTATAAAGTGGATACTGAAGAAGAAGCTATTGCTTTAGCTAATGATTCTAGTTATGGTTTAGGAAGTACTGTTTTCTCTTCTGATCCAGAACATGCTAAAAAAGTGGCGGCTCAGATTGAAACAGGGATGACATTTATTAATTCAGGGTGGACATCATTACCGGAATTACCGTTTGGAGGTATTAAAAATTCAGGATATGGTCGTGAATTGAGCCAACTTGGATTTGATGCCTTTGTCAACGAACATTTGGTATTTACACCAAATAGTGAT

SEQ ID NO: 20304 - protein, 458 aa, Streptococcus agalactiae; identical to SEQ ID NO: 6722

SEQ ID NO: 20305 - protein, 1005 aa, Streptococcus agalactiae; identical to SEQ ID NO: 6723

SEQ ID NO: 20306 - protein, 335 aa, Streptococcus agalactiae; identical to SEQ ID NO: 6724

SEQ ID NO: 20307 - protein, 684 aa, Streptococcus agalactiae
ATGAAAAAGTTTTTAAAAGTTTTTTTAACTGTACTAGTACTGATTCTAATTGTAGGTGCAGGCGGTCTCTATTTCTGGAATAATCATCAGTCACTAGAGGGGAAATGGCGTACAGTTTCTTTAGAGAAGCAAGTTGAGAAAGAAATAGAACAACAACTTGGAAGTCAGGCAGCGGATATGGGGATTAGTGCAGCTGATTTGGTTAAGGGCGCTAATATGCATATGAACGTCAAAAACGATGAGGCAAAGATAACAGTCACTGCTCAAATTGATGAGGTAAAATTCCATCAAGCTATAAAAACTTTTATTGATAAAGCTCTTGAAAAACAATTAAAAGATCAAGGTTTGACTTACAATGATTTAAGTGAAGCAGGTAAAAAGATTTTTGATGAAACAAAAATCACTGACAAACAAATTGACCAACAAATTGATAGAAGTTTCCAAAGTGCTGCACAAGCTGCCGGAGGAAAATATAATACTAATACTGGTGAAATGACATTGCCAGTTATGGATGGTAAAGTACATCGCTTAACAAGTGTTATTAAAGTATCGCACATCAATAAAAAGGCAAATGCGTTCTATGGTAATATTGTGAAAAATGGTGAAAAAACAGCCTATAAAAAAGAGGGCTCAAAATTGATTTTAGGTAATGAAAAATCATATCCATTTATGAAAGTAACTAAA

SEQ ID NO: 20308 - protein, 228 aa, Streptococcus agalactiae; identical to SEQ ID NO: 6726

SEQ ID NO: 20309 - protein, 1068 aa, Streptococcus agalactiae; identical to SEQ ID NO: 6727

SEQ ID NO: 20310 - protein, 356 aa, Streptococcus agalactiae; identical to SEQ ID NO: 6728

SEQ ID NO: 20311 - protein, 105 aa, Streptococcus agalactiae; identical to SEQ ID NO: 6729

SEQ ID NO: 20312 - protein, 35 aa, Streptococcus agalactiae; identical to SEQ ID NO: 6730

SEQ ID NO: 20313 - protein, 93 aa, Streptococcus agalactiae; identical to SEQ ID NO: 6731

SEQ ID NO: 20314 - protein, 31 aa, Streptococcus agalactiae; identical to SEQ ID NO: 6732

SEQ ID NO: 20315 - protein, 108 aa, Streptococcus agalactiae; identical to SEQ ID NO: 6733

SEQ ID NO: 20316 - protein, 36 aa, Streptococcus agalactiae; identical to SEQ ID NO: 6734

SEQ ID NO: 20317 - protein, 147 aa, Streptococcus agalactiae; identical to SEQ ID NO: 6735

SEQ ID NO: 20318 - protein, 49 aa, Streptococcus agalactiae; identical to SEQ ID NO: 6736

SEQ ID NO: 20319 - protein, 490 aa, Streptococcus agalactiae
ATGACAACATTCTTGGAATCCTGTTACTTTTACAGGAAAACAGCTACAAGTTGGGGATATTGCAAAAGATTTTTTACTAATAGCTACAGACTTATCTCAAAAATCTTTAAAAGATTTTGAAGGGAAAAAGAAAGTTATTAGCGTTGTTCCTTCTATTGATACAGGTATTTGTTCAAAACAAACACGTACTTTTAATGAGGAATTATCAGAGCTAGATAACACAGTGGTTATTACTGTTTCTATGGACCTTCCATTTGCTCAGAAGCGTTGGTGCAGCGCTGAAGGCCTTGATAACGTGATTTTATTATCAGATTTTTATGATCATTCGTTTGGTCAAGAGTACGCTCTTTTGATGAATGAGTGGCATTTGTTAACGCGTGCAGTTCTTATTTTGGATGAGCATAATAAGGTGACTTACACCGAATACGTTGACAATGTTAATTCAGATGTTGACTACGAAGCGGCGATTAATGCTGCAAAGATATTACCA

SEQ ID NO: 20320 - protein, 164 aa, Streptococcus agalactiae
  VARIANT 4: Xaa = Any Amino Acid
MTTXLGNPVTFTGKQLQVGDIAKDFLLIATDLSQKSLKDFEGKKKVISVVPSIDTGICSKQTRTFNEELSELDNTVVITVSMDLPFAQKRWCSAEGLDNVILLSDFYDHSFGQEYALLMNEWHLLTRAVLILDEHNKVTYTEYVDNVNSDVDYEAAINAAKILP

SEQ ID NO: 20321 - protein, 657 aa, Streptococcus agalactiae; identical to SEQ ID NO: 6739

SEQ ID NO: 20322 - protein, 219 aa, Streptococcus agalactiae; identical to SEQ ID NO: 6740

SEQ ID NO: 20323 - protein, 537 aa, Streptococcus agalactiae
GTGGATAGTTACTATTTACAAAGTGACTTTTTTAGTACTATTATTTCATATTGTCATCGCTATCAGATTCCATATTTTGTTGATGAGGTCTTTAATTACGCTACTTATCAGGCTTCTAAAATTCCCTTTATTGCTTATGTTGATCCTCAAAAAAGGGGAGAGCTTCTAGAAGTTTCTAAAATTGAGAAACCGATAAAAATGGTGTTGTATTTTGGTGATCAGCTGGGAAGGGCAGATCAAATGTTAGCGAAATTAAATCGTTTTGGACTTAGTAGTCACTTTTTCCACGAATTTGAAAAATGTTTGTACATAAATCCCATTGCAGTTGACAAGGGAAAAGCCACTAAGAAATTATTTGGGAATCGTTTTATAGCTTTTGGCAATGATAAAAATGATATTTCTATGTTTGATGCTGCGCATTATAGTGTTCAAGTAGGGGATTTTGATGAACTGACTCCTTACGCTAATTTACGTGTATCAAGAGAATCTGTACATGAAGGAATTACAACGCTTTTTGAAAAATACAAGGGGATTACG

SEQ ID NO: 20324 - protein, 179 aa, Streptococcus agalactiae; identical to SEQ ID NO: 6742

SEQ ID NO: 20325 - protein, 90 aa, Streptococcus agalactiae; identical to SEQ ID NO: 6743

SEQ ID NO: 20326 - protein, 30 aa, Streptococcus agalactiae; identical to SEQ ID NO: 6744

SEQ ID NO: 20327 - protein, 537 aa, Streptococcus agalactiae
TTGAAATCTAGAACAACTATTGCTTCAACATTCAACGTATCACCAGAAACAGCACGTAAGGGTCTTAATATTTTAGCAGATTTACAGATTTTAACTTTAAAGCATGGCAGTGGAGCCATTATTCTTTCTAAAGAAAAAGCAATTGAATTCTTAAACCAATATGAAACCTCTCATTCAGTTGCTATTTTGAAAGGTAAAATCCGTGATAATATTAAGGCTCAGCAACAAGAAATGGAAGAGTTAGCTACTTTAGTTGATGATTTTTTGCTTCAAACACGTGCGGTTAGTAAACAATACCCATTAGCACCATATGAAATTATTGTCAGTGAAGATTCTGAACACCTTGGTAAGTCAATAGGAGAATTAAATGTATGGCATCAAACTGGTGCGACTATTGTGGCTATTGAACACGAAGGGAAATTTATTGTTTCTCCGGGGCCTTTCTCAGTTATAGAGCAAGGAGATCATATCTTTTTTGTTGGTGATGAAGATGTTTATGCACGTATGAAAACCTATTTTAACTTAAGGATGGGACTT

SEQ ID NO: 20328 - protein, 179 aa, Streptococcus agalactiae
MKSRTTIASTFNVSPETARKGLNILADLQILTLKHGSGAIILSKEKAIEFLNQYETSHSVAILKGKIRDNIKAQQQEMEELATLVDDFLLQTRAVSKQYPLAPYEIIVSEDSEHLGKSIGELNVWHQTGATIVAIEHEGKFIVSPGPFSVIEQGDHIFFVGDEDVYARMKTYFNLRMGL

SEQ ID NO: 20329 - protein, 212 aa, Streptococcus agalactiae
ATGGAAAATCAAAAACAAGATATTAAAACTTCAGTAACTTATGAAGAAAGGTAATTGCTAAAATTGTTGGACATGCTTTAGAATCAGTAGACGGACTCTTGGCTGTGAGTGGAGGTTTCTTCTCTAATCTAAAAAATAGCGTTGTAAATTCTGACTCAGTAACTGATGGTGTAAATGTTGAAGTTGGTACTAAAGAAGTTGCNNNNNTTAAT

SEQ ID NO: 20330 - protein, 71 aa, Streptococcus agalactiae
  VARIANT 69, 70: Xaa = Any Amino Acid
MENQKQDIKTSVTYEEKVIAKIVGHALESVDGLLAVSGGFFSNLKNSVVNSDSVTDGVNVEVGTKEVAXXN

SEQ ID NO: 20331 - protein, 112 aa, Streptococcus agalactiae
ATGTCTGAAGAAAAATTTGATGCAAAAGTTGATAAGGTTTCTGGTTCAGTAAAAGAATCTGTTGGGAAACTTACTGGCGATAAAGAAGAATCTGAAGGTAAAGTCGATAAAT

SEQ ID NO: 20332 - protein, 38 aa, Streptococcus agalactiae
MSEEKFDAKVDKVSGSVKESVGKLTGDKEVNLKVKSIN

SEQ ID NO: 20333 - protein, 540 aa, Streptococcus agalactiae; identical to SEQ ID NO: 6751

SEQ ID NO: 20334 - protein, 180 aa, Streptococcus agalactiae; identical to SEQ ID NO: 6752

SEQ ID NO: 20335 - protein, 192 aa, Streptococcus agalactiae; identical to SEQ ID NO: 6753

SEQ ID NO: 20336 - protein, 64 aa, Streptococcus agalactiae; identical to SEQ ID NO: 6754

SEQ ID NO: 20337 - protein, 578 aa, Streptococcus agalactiae
ATGTCAAAAGGACTAAAAAGTTTATATACTTTACTAGGTCTAATCTCCCTTACCCTACTAGGATTTGTAGCTGTTATCAGTAAACAACACATTTATCTACCATCTTTTAATTGGTTAGATTGGGATTTTAATTTGCCATCACCGATTGACGTTGGTATGTATCATTATTCTTCTGGGGAGCATTAGTGCTGTTTGTAATCGTTTTACTGGCTATATTGGTAGTTCTGTTTTATCCAAGACGATACACAGAGTATAAACTGGCTGATAAAACTGGTAAATTGATGTTAAAAAAATCTGCAATAGAGGGATTTGTTAAAACAGAAGTATTAAAAACTGGTTTGATAAAATCTCCTAGCGTGACAGCTCATTTATATAAGAAAAAAGTAAAAGTTGATGTTAAAGGGCTTTTAACTTCTCGTACAAATGTACCAGAACAACTTGAACATATTCAAAGTGATGTTGAACTTGGCTTAAAAGAATTCTTTGGGTTGGAAAAGAAAATGAACACTAGAGTATTTGTTAAGCAAGTTGAAGAAGAAAATGTTGGGAATGCTAAGACGAATAAAAGTCGTGTAGAA

SEQ ID NO: 20338 - protein, 193 aa, Streptococcus agalactiae; identical to SEQ ID NO: 6756

SEQ ID NO: 20339 - protein, 246 aa, Streptococcus agalactiae; identical to SEQ ID NO: 6757

SEQ ID NO: 20340 - protein, 82 aa, Streptococcus agalactiae; identical to SEQ ID NO: 6758

SEQ ID NO: 20341 - protein, 336 aa, Streptococcus agalactiae; identical to SEQ ID NO: 6759

SEQ ID NO: 20342 - protein, 112 aa, Streptococcus agalactiae; identical to SEQ ID NO: 6760

SEQ ID NO: 20343 - protein, 2277 aa, Streptococcus agalactiae; identical to SEQ ID NO: 6761

SEQ ID NO: 20344 - protein, 759 aa, Streptococcus agalactiae; identical to SEQ ID NO: 6762

SEQ ID NO: 20345 - protein, 161 aa, Streptococcus agalactiae
TTGAGGGCAGGCCGATTAGATGATCTGCTTACTGTCATCGGTACTTGTGTTCATAATGGTCGTACTACAAAAGTCGTTGATGTTCACATTAAAAATCAGAAAGACGAAATGGTTACAATGCTATTTTTACAATGTTTGTAACTGGAGAGAGAAAAGAGAAG

SEQ ID NO: 20346 - protein, 54 aa, Streptococcus agalactiae
  VARIANT 40: Xaa = Any Amino Acid
MRAGRLDDLLTVIGTCVHNGRTTKVVDVHIKNQKDEMVTXAIFTMFVTGERKEK

SEQ ID NO: 20347 - protein, 356 aa, Streptococcus agalactiae
ATGAAATCATTTAGAACAAGTAAAAGTATTTGAGAATTACGAAATGAAACTGGGAAGAAGGTCAAGTTACCTTAACAACGAAGGTCGTTGACTCTTCGCTCAACTATTATGGTAATGCTCATGGTGGTTATTTGTTTACACTGTGTGATCAAGTCAGTGGTTTAGTTGCTATTTCAACAGGATATGAAGCGGTAACTCTACAATCAAATATCAACTATTTGAGGGCAGGGGCGATAGATGATCTGCTTACTGTCATCGGTACTTGTGGTCATAATGGTCGTACTACAAAAGTCGTTGATGGTCACATTAAAATCAGAAAGACGAAATGGGTTACACTGCTATTTTTACAATGTTTG

SEQ ID NO: 20348 - protein, 120 aa, Streptococcus agalactiae
MKFNLEQVKVFENYEIENWEEGQVTLTTKVVDSSLNYYGNAHGGYLFTLCDQVSGLVAISTGYEAVTLQSNINYLRAGAIDDLLTVIGTCGHNGRTTKVVDGHIKIRKTKWVTLLFLQCL

SEQ ID NO: 20349 - protein, 1322 aa, Streptococcus agalactiae
ATGACTTTAAATGCTAAAGGTGAAAGTAATCAAATTCTAGTAGATAAGGAAGTACATTCTACTAACTTATTACTAGATATCGATGAAAAACCAGAATTATTTCAAGGTTTGTTGTTAAGTTTTCAACATGTTTTTGCCATGTTTGGAGCTACGATATTAGTTCCGCTTATTTTAGGGATGCCTGTATCAGTGGCTTTATTTGCTTCTGGTTGCGGAACGCTCATTTATCAAGTTGCGACAAAATTTAAAGTCCCTGTTTACCTAGGCTCATCATTTGCTTATATTACAGCTATGGCATTAGCCATGAAACAAATGCATGGCGATATTTCGGCTGCTCAAACAGGTATTCTTTTTGTAGGTCTAATCTATGTCGTTGTGGCGACGGTTATTAAGTTCGTAGGAAATTCATGGGTTGATAAGATTTTGCCACCAATAATCATTGGACCTATGATTATTGTTATTGGTTTAGGTTTGGCAAACTCTGCTGTAACTAATGCAGGTTTTGTCGCTAAAGGTGATTGGCGTAAAATGCTAGTTGCTGTTGTTACATTCTTGATTGCAGCTTTTATCAATACTAAAGGGAAAGGTTTTATCAAGATTATTCCATTTTTATTTGCAATTATTGGAGGTTATATTTTATCAATCATTCTTGGCTTGGTAGATTTATCTCCAGTTGAAAAAGCTGCCTGGTTTGAATTACCAAAATTCTATTTACCGTTTAAGACAGGTTTATTTCACAGTTATAAACTTTACTTTGGACCAGAAATGCTTGCAATCCTTCCAATCTCAATTGTAACGATTGCTGAAAATATCGGTGATCATACAGTTTTAGGTCAGATTTGTGGGCGTAACTTTCTAAAAAAACCAGGTTTAAATCGTCTTTTAATTGGAGATGGTTTAGCAACCGCATTTTCTGCTCTTATAGGAGGGCCAGCTGAAACTACTTATGGTGAAAATACAGGTGTTATTGGCATGACGCGTATAGCTTCTGTAACGGTTATTCGTAATGCAGCTTTTATTGCAATCGCTTTTTCATTCTTTGGTAAATTTACAGCTTTGATCTCTACAATTCCTAGTGCAGTACTTGGTGGAATGGCTATATTACTTTATGGTGTTATTGCAAGTAATGGATTAAAAGTGTTGATTGAAAATCGTGTCAATTTTGCTGAGGTTCGTAATCTGATTATTGCCAGTTCCATGTTAGTTTTAGGCCTCGGTGGAGCAGTCCTTGATCTAGTGCTCTAACTTTATCAGGAACAGCATTAAGTGCTATAGTGGGTATTATATTAAATTTAATATTGCCAAAAGAAAGCATGAAATCA

SEQ ID NO: 20350 - protein, 441 aa, Streptococcus agalactiae
  VARIANT 413: Xaa = Any Amino Acid
MTLNAKGESNQILVDKEVHSTNLLLDIDEKPELFQGLLLSFQHVFAMFGATILVPLILGMPVSVALFASGCGTLIYQVATKFKVPVYLGSSFAYITAMALAMKQMHGDISAAQTGILFVGLIYVVVATVIKFVGNSWVDKILPPIIIGPMIIVIGLGLANSAVTNAGFVAKGDWRKMLVAVVTFLIAAFINTKGKGFIKIIPFLFAIIGGYILSIILGLVDLSPVEKAAWFELPKFYLPFKTGLFHSYKLYFGPEMLAILPISIVTIAENIGDHTVLGQICGRNFLKKPGLNRLLIGDGLATAFSALIGGPAETTYGENTGVIGMTRIASVTVIRNAAFIAIAFSFFGKFTALISTIPSAVLGGMAILLYGVIASNGLKVLIENRVNFAEVRNLIIASSMLVLGLGGAVLDLXALTLSGTALSAIVGIILNLILPKESMKS

SEQ ID NO: 20351 - protein, 1342 aa, Streptococcus agalactiae
ATGCTAACACTTTTTACTCATATCAATAGCTTCGTTTGGGGTCCACCTTTACTTGCTTTATTAGTCGGAACAGGTATTTACCTATCATTTCGCTTAGGTTTTATTCAATTGAGACAACTTTCTAGAGCTTTCAAATTGATTTTCCGAGAGGATAACGGGCAAGGAGATATTTCAAGTTATGCTGCCCTTGCAACTGCTCTTGCTGCAACGGTAGGGACAGGTAATATCGTTGGTGTGGCTACGGCTATTAAATCTGGAGGACCAGGAGCTTTGTTTTGGATGTGGGTAGCCGCCTTTTTTGGAATGGCAACAAAATACGCAGAAGGATTATTAGCTATCAAATATCGCACAAAAGATACTAATGGAGAAATTTCTGGGGGACCAATGTACTACATTGTCAATGGAATGGGACAAAAATGGAAACCATTAGCAGTCTTTTTTTCTGCAGCAGGTATCTTAGTAGCTCTTTTAGGAATAGGGACATTCACTCAAGTCAATGCAATTACCTCTTCTCTTGAGCATACTTTCAAAATATCAACTAGATTTACCAGCCTCATTCTTGCTGTATAGATTATTTATTATATTTGGAGGTATAAAATCTATTTCAAAAGTTTCAGAAAAAATAGTGCCTTTTATGGCTATAAGCTATATTTTAGCAACTCTGATTATTATTGCAGTTAATTACAATAAGATTCCACATACTTTCCAACTCATCTTTAGCGGTGCTTTTTCTGGGACAGCAGCCATTGGTGGTTTTTCTGGAGCTATCGTTAAAGAAGCAATTCAAAAGGGAATTGCTAGAGGAGTTTTCTCAAATGAATCTGGATTGGGTTCTGCTCCAATAGCTGCAGCAGCAGCTAAAACAAAAGAACCTGTTGAACAAGGGCTTATTTCAATGACAGGAACCTTCATTGACACTATTGTTATTTGTACTTTGACAGGGATTGCAATTTTAGTTACAGGAAAATGGCTAGAATTTGATTTACAGGGTGCTCCATTAACACAAGCATCTTTTAATACCGTATTTGGCTCACTAGGTAGTTTTGCTCTAACCTTCTGCCTTGTCTTATTTGCTTTTACTACTATTTTAGGATGGAGCTACTACGGAGAGCGTTGCTTTGAATATCTATTTGGGACTAAATTTATTAACGCTTATCGTATTATTTTTGTCATTATGGTTGGCTTAGGTGGTTTCTTACAGCTCGATCTTATTTGGGTTATCGCTGATATCGTTAATGGTTTAATGGCTTTACCAAATCTAATAGCTCTCCTAGTTTTGTCACCAATTATTGTTAAAGAAACACAGAAATATTTTTCAGAGACTAAAAATATCACTAAGCCT

SEQ ID NO: 20352 - protein, 448 aa, Streptococcus agalactiae
  VARIANT 189, 191: Xaa = Any Amino Acid
MLTLFTHINSFVWGPPLLALLVGTGIYLSFRLGFIQLRQLSRAFKLIFREDNGQGDISSYAALATALAATVGTGNIVGVATAIKSGGPGALFWMWVAAFFGMATKYAEGLLAIKYRTKDTNGEISGGPMYYIVNGMGQKWKPLAVFFSAAGILVALLGIGTFTQVNAITSSLEHTFKISTRFTSLILAXIXLFIIFGGIKSISKVSEKIVPFMAISYILATLIIIAVNYNKIPHTFQLIFSGAFSGTAAIGGFSGAIVKEAIQKGIARGVFSNESGLGSAPIAAAAAKTKEPVEQGLISMTGTFIDTIVICTLTGIAILVTGKWLEFDLQGAPLTQASFNTVFGSLGSFALTFCLVLFAFTTILGWSYYGERCFEYLFGTKFINAYRIIFVIMVGLGGFLQLDLIWVIADIVNGLMALPNLIALLVLSPIIVKETQKYFSETKNITKP

SEQ ID NO: 20353 - protein, 1233 aa, Streptococcus agalactiae
ATGGCAACTTCTACTGAAAACTTACAACTTGCAAAAAGAGGGCCTATTATTAGTATCATTGCCTATATAACACTGGCAGTCGCTAAATTAGCTGCAGGTTATTGGTTTGATGCTACTTCACTTGTAGCAGATGGATTTAATAACTTATCTGATATCTTAGGAAATGTAGCACTCTTAATTGGTTTACACTTGGCTAGTCAACCAGCCGACTCAAACCATCGTTTTGGTCACTGGAAAATTGAAGATTTAGCAAGCCTGATCACCTCTTTTATCATGTTTGTTGTAGGTATTCAAGTTTTTATTCAAACTGTCACTAAGATTATTAATAATACTGATACTAACATTGATCCTCTAGGTGCTATAGTAGGTGCTATATCTGCTCTTGTTATGCTTGGCGTTTATCTCTATAATAAACAATTATCTCAAAGAGTAAAGTCTAGCGCTCTGGTTGCAGCTTCTAAAGATAACCTTTCTGATGCTGTGACATCTATCGGCACATCTATTGCTATCATTGCAGCTTCTCTAAATTTTCCTATTATTGATCGTTTAGCTGCTATCATTATTACTTATTTTATTCTTAAAACAGCTTATGATATTTTTATAGAATCTGCTTTCAGCTTATCGGATGGTTTCGATGATTATCAATTAAAACAATACGAAAAAGCTATATTAACAATTCCTAAAATATCCGCTGTAAAATCTCAACGTGGACGTACTTACGGTAGTAATATTTACCTTGATATTGTTCTCGAAATGAACCCTGATCTCTCAGTCTTTGAAAGTCATGCCATTACCGAAAGAGTGGAAAAACTACTCAGTGATAAATTTTCTGTATATGACATAGATATTCATGTAGAACCCGCTTCTATTCCAGAAGACGAAATTTTCGATAATGTTTACCAAAAATTATACAAAAATGAAAAAATCATCCTAGCAAAAATTCCCGGTTATGAGACCTTTATTAGCCCTGACTTTTATATGATTAATGAAAAGGGAAATATTATCACTTCTGACATGCTTACTAATGCTACAAATCATTCATTGGCAAGCAACTTTAAATATTTCAATGTAAAATCAATTAGTCAAAAAACAAAACTTGTGTCTTATGAATTGGAAGGTAAACGACATACTAGTATTTGGCGCCGTAATGAAAAATGGTTCTTAATCTACCATCAAATAACTGCCAAGTCAAGTCCGTATAAAACGAGACGATATCAAATCACTTCCCTTGAT

SEQ ID NO: 20354 - protein, 411 aa, Streptococcus agalactiae
MATSTENLQLAKRGPIISIIAYITLAVAKLAAGYWFDATSLVADGFNNLSDILGNVALLIGLHLASQPADSNHRFGHWKIEDLASLITSFIMFVVGIQVFIQTVTKIINNTDTNIDPLGAIVGAISALVMLGVYLYNKQLSQRVKSSALVAASKDNLSDAVTSIGTSIAIIAASLNFPIIDRLAAIIITYFILKTAYDIFIESAFSLSDGFDDYQLKQYEKAILTIPKISAVKSQRGRTYGSNIYLDIVLEMNPDLSVFESHAITERVEKLLSDKFSVYDIDIHVEPASIPEDEIFDNVYQKLYKNEKIILAKIPGYETFISPDFYMINEKGNIITSDMLTNATNHSLASNFKYFNVKSISQKTKLVSYELEGKRHTSIWRRNEKWFLIYHQITAKSSPYKTRRYQITSLD

SEQ ID NO: 20355 - protein, 390 aa, Streptococcus agalactiae; identical to SEQ ID NO: 11057

SEQ ID NO: 20356 - protein, 130 aa, Streptococcus agalactiae; identical to SEQ ID NO: 2138

SEQ ID NO: 20357 - protein, 693 aa, Streptococcus agalactiae; identical to SEQ ID NO: 11059

SEQ ID NO: 20358 - protein, 231 aa, Streptococcus agalactiae; identical to SEQ ID NO: 2140

SEQ ID NO: 20359 - protein, 621 aa, Streptococcus agalactiae
ATGATACCGTTAAAAAAAATAACTGTTGGAACGATTGTCTGTCTCTCATTTTTGGGTTTAACAGCATGCTCTTCTTCAAATACTCAGCAAACCTCTACTTCAAAATCAAATGTATCACAACATAAAAATATCAAAGCTGACCACGAAGAATTACGTTTGAAATTTAATAAAGTAAAGTTAGGGGTTAAAGCAAATAACTTTAAAGGAGGCACTAGTCTCGCTGAATTAAAACAATTATTTGGTGGCGAACCAAATGAAAAATTTGATACACCAGCGGGAAATGTCACTCTTAAAGGCTATCGTTGGAATGTCGATGATATCTCCATCACTATACAATTATTAAACGATAGTAGCATTGTTCGTTCAATTAGTAATTTTAAGTTTATTCGTGATGCCAACATCACAACAAAAGATTATAATAGTTTAAAAAATGGCATGTCATACAATAAAGTAAAAGAACTTCTAGGAGAACCTGATGATATTTCTCAAGCAGTTTCTTCAGATAAAGAGGAACTACAGGCTGCATGGATTAGTGGCATCCAGTCGTCAGACAGTGATCCGGGAATTAACCTTACATTTGAAAATGATAAACTCACTAACAAACAACAGCATGGTTTAAAA

SEQ ID NO: 20360 - protein, 207 aa, Streptococcus agalactiae; identical to SEQ ID NO: 2142

SEQ ID NO: 20361 - protein, 273 aa, Streptococcus agalactiae; identical to SEQ ID NO: 9903

SEQ ID NO: 20362 - protein, 91 aa, Streptococcus agalactiae; identical to SEQ ID NO: 9904

SEQ ID NO: 20363 - protein, 165 aa, Streptococcus agalactiae; identical to SEQ ID NO: 9901

SEQ ID NO: 20364 - protein, 55 aa, Streptococcus agalactiae; identical to SEQ ID NO: 9902

SEQ ID NO: 20365 - protein, 156 aa, Streptococcus agalactiae
GTGGAATGGACAAACTTAGATCAAAAAGTATATAAAGAAGAAGACGGTTTAAGATTGGTATCTATAAATAAGAAGTACAAAGATAAATTTGCTAGTTGGAGTGAAAATCCAAGAATTATTGGAAAGATTGTTGGACACTTTACACCAGAAGAATAT

SEQ ID NO: 20366 - protein, 52 aa, Streptococcus agalactiae; identical to SEQ ID NO: 9900

SEQ ID NO: 20367 - protein, 624 aa, Streptococcus agalactiae; identical to SEQ ID NO: 9897

SEQ ID NO: 20368 - protein, 208 aa, Streptococcus agalactiae; identical to SEQ ID NO: 9898

SEQ ID NO: 20369 - protein, 788 aa, Streptococcus agalactiae
TTGTCTAAGATAAAAGGGTATTTCGATAAAGCCAAATTATCATCAATTAAACCAAGTCATTACCAAAAATTTATTAGTGATTATTTAAACCAGTATAACTGGCAAACTATTAAAATGATAAATACTCACATCAGACAATCAATAAAAATAGCTATCCATGAAGGTTATATTACTAAAGATTTCACTGCTTTCGTCATCCTTCCGAAACCAGATGATAGTAATGTAGATAGTAAACTTTTAGAGCTATCAGAATATCAAAAATTAATTTCAGAGACTAGTAAAGAAGTGAAATATAAGTCACATTTTTTTATTTATTAATAGCAAAAACTGGATTAAAATTTTCAGAGGCTATGGGTTTGACTTGGAGCGATATAGATAGAGATGAGTTACTACTACATGTCAACAAGGCTTACAAAGTATTTGGAAGTGATAAAGGATTTCAACCAACTAAAAATAAATACTTAATTAGGTATGTACCAATAAATAACACAACTATCAAATTGCTAGATCAATATAGGTTGTTATTCAAAACAGAAACAAGAATATTTGAAGGAATATCAAATACAGCTGTCAACAAGACACTAAAAAAAATAGTTGGCAGAAATATACACATTCATTCTCTAAGACATACTTATGTGTCTTATTTAATATCAGAAGGAATCGACTTGTTTGCTATTTCCAAGATAGTTGGACACAAAGATTTAAATATCACACTAAGCACGTATGCTCATTTGCTGGAAGATACAAAAAACAAGAACAATGAAATTGTTAGGGAATTATTTGGGGCA

SEQ ID NO: 20370 - protein, 263 aa, Streptococcus agalactiae
MSKIKGYFDKAKLSSIKPSHYQKFISDYLNQYNWQTIKMINTHIRQSIKIAIHEGYITKDFTAFVILPKPDDSNVDSKLLELSEYQKLISETSKEVKYKSHFFIYLIAKTGLKFSEAMGLTWSDIDRDELLLHVNKAYKVFGSDKGFQPTKNKYLIRYVPINNTTIKLLDQYRLLFKTETRIFEGISNTAVNKTLKKIVGRNIHIHSLRHTYVSYLISEGIDLFAISKIVGHKDLNITLSTYAHLLEDTKNKNNEIVRELFGA

SEQ ID NO: 20371 - protein, 1071 aa, Streptococcus agalactiae
TTGACACTTCGTGAATTGACTAACGATCGTGATGCTGATATCAATGATTTTGTTAAAGCTGGCGACACAGTTGAAGTACTTGTTCTTCGTCAAGTTGTAGGTAAAGATACTGATACAGTAACTTTCCTTGTATCTAAAAAACGCTTGGAAGCTCGTAAAGCATGGGACAAACTTGTTGGTCGTGAAGGTGAAGTTGTTACTGTTAAAGGTACACGTGCTGTTAAAGGCGGACTTTCAGTTGAATTTGAAGGACTTCGTGGTTTCATCCCAGCTTCAATGATTGATACTCGTTTTGTACGTAACACTGAAAAATTTGTTGGACAAGAATTTGATGCTAAAATCAAAGAAGTTGATGCAGCAGAAAATCGCTTCATCCTTTCACGTCGTGAAGTTGTTGAAGAATCTGCAGCTGCAGCACGTAAAGAAGTTTTCTCAAACATTGAAGTAGGTTCAGTTGTAACTGGTAAAGTTGCTCGTTTAACAAGCTTTGGTGCTTTCATTGACCTTGGTGGTGTTGATGGACTTGTACACGTAACTGAATTATCACATGAGCGCAATGTTTCACCTAAATCAGTTGTAACTGTTGGTGAAGAAGTTGAAGTTAAAGTACTTTCAATTGATGAAGAAGCTGGTCGTGTATCACTTTCACTTAAAGCAACTACACCTGGCCCATGGGATGGCGTTGAACAAAAACTTGCTGCTGGTGATGTTATTGAAGGTAAAGTAAAACGCTTGACTGACTTTGGTGCTTTTGTTGAAGTGTTACCTGGCATTGATGGACTTGTACACATTTCACAAATTTCACACAAACGTGTTGAAAATCCTAAAGACGTATTATCTGCAGGACAAGAAGTTACTGTTAAAGTTCTTGAAGTTAATTCAGATGCAGAACGTGTATCACTTTCAATGAAAGCTCTTGAAGAGCGTCCAGCGCAAGCAGAAGGAAAAAGAAGAAAAACGTCAATCACGTCCACGTCGTCCACGTCGTCAAGAAAAGCGACTACGAGCTTCCAGAAACACAAACTGGATTCTCTATGGCTGACTTATTCGGTGATATTGAATTATAATAAT

SEQ ID NO: 20372 - protein, 358 aa, Streptococcus agalactiae
MTLRELTNDRDADINDFVKAGDTVEVLVLRQVVGKDTDTVTFLVSKKRLEARKAWDKLVGREGEVVTVKGTRAVKGGLSVEFEGLRGFIPASMIDTRFVRNTEKFVGQEFDAKIKEVDAAENRFILSRREVVEESAAAARKEVFSNIEVGSVVTGKVARLTSFGAFIDLGGVDGLVHVTELSHERNVSPKSVVTVGEEVEVKVLSIDEEAGRVSLSLKATTPGPWDGVEQKLAAGDVIEGKVKRLTDFGAFVEVLPGIDGLVHISQISHKRVENPKDVLSAGQEVTVKVLEVNSDAERVSLSMKALEERPAQAEGEKEEKRQSRPRRPRRQENATTSFQKHKLDSLWLTYSVILNYNN

SEQ ID NO: 20373 - protein, 228 aa, Streptococcus agalactiae; identical to SEQ ID NO: 6791

SEQ ID NO: 20374 - protein, 76 aa, Streptococcus agalactiae; identical to SEQ ID NO: 4036

SEQ ID NO: 20375 - protein, 261 aa, Streptococcus agalactiae
TGCTTCCTTGCTAAAGAAAGGTTTGGTATGGAAGCGATGAGGAGATGTCTTGTCGACGAATTAGATAAATTCACAGAAGCTGGCGCATGTGGTACAGCCGCAGTTATTTCACCAATTGGAGGAATTCAAAACGGAGATGACTTCCATGTCTTCTACAGTGAGACAGAAGTTGGTCCAGCGACACGTAAACTATATGATGAGTTAGTAGGGATCCAGTTTGGTGATGTTGAAGCACCAGAAGGGTGGATTTATAAAGTAGAT

SEQ ID NO: 20376 - protein, 89 aa, Streptococcus agalactiae
  VARIANT 1, 3, 19: Xaa = Any Amino Acid
XLXLAKERFGMEAIEGDVXVDELDKFTEAGACGTAAVISPIGGIQNGDDFHVFYSETEVGPATRKLYDELVGIQFGDVEAPEGWIYKVD

SEQ ID NO: 20377 - protein, 749 aa, Streptococcus agalactiae
ATGACAGTAAATTTAGATTGGGATAATTTAGGCTTTGCTTACAGAAAATTACCATTCCGATACATTTCGCATTTTAAAGATGGGAAATGGGATGATGGCAAGTTGACAGATGATGCAACACTACATATTTCAGAAAGTTCACCTGCTCTCCATTATGGGCAACAAGCTTTTGAAGGATTGAAAGCTTATAGAACTAAAGATGGCTCTATTCAGTTATTTCGTCCAGATCAAAATGCAGAACGACTTCAAAGAACAGCAGATCGTCTTTTAATGCCACATGTTCCGACAGACAAATTTATTGCAGCGGTTAAATCTGTTGTACGCGCTAATGAGGAGTTTGTTCCACCGTATGGTACAGGGGCAACATTATACATTCGTCCCTTATTAATTGGTGTGGGAGATATTATTGGAGTTAAACCTGCTGAAGAATATATTTTTAGTATTTGCAATGCCAGTAGGTAGTTATTTTAAAGGTGGTTTAACACCAACTAACTTTATTGTTTCCAAAGAATATGATAGAGCAGCACCGAATGGTACAGGAGCTGCAAAAGTTGGTGGTAACTATGCTGCTAGTCTTCTTCCTGGGAAATATGCTCATGAGAAACAATTTTCAGATGTTATCTATCTTGATCCAGCGACACATACTAAAATTGAAGAGGTTGGAGCAGCTAATTTCTTTGGAATTACTAAAGATAATCAGTTTATCACCCCTTTGAGTCCTTCAATTTTACCTTCAATTACTAAATATT

SEQ ID NO: 20378 - protein, 251 aa, Streptococcus agalactiae
  VARIANT 147, 251: Xaa = Any Amino Acid
MTVNLDWDNLGFAYRKLPFRYISHFKDGKWDDGKLTDDATLHISESSPALHYGQQAFEGLKAYRTKDGSIQLFRPDQNAERLQRTADRLLMPHVPTDKFIAAVKSVVRANEEFVPPYGTGATLYIRPLLIGVGDIIGVKPAEEYIFXVFAMPVGSYFKGGLTPTNFIVSKEYDRAAPNGTGAAKVGGNYAASLLPGKYAHEKQFSDVIYLDPATHTKIEEVGAANFFGITKDNQFITPLSPSILPSITKYX

SEQ ID NO: 20379 - protein, 2457 aa, Streptococcus agalactiae
ATGTCTAATATTCAAAATATGTCCCTTGAGGACATTATGGGAGAGCGTTTTGGGCGCTATTCTAAGTATATCATTCAAGAACGGGCGTTGCCGGATATTCGTGATGGCTTAAAACCTGTTCAACGTCGAATCCTTTATTCAATGAATAAAGATGGTAATACTTTTGAAAAGGGATTTCGCAAATCTGCAAAGTCAGTCGGTAATGTTATGGGGAATTTCCATCCTCATGGGGATTCCTCTATTTATGACGCGATGGTTCGTATGTCTCAAGATTGGAAAAATCGTGAGACATTGATTGAAATGCACGGAAATAATGGTTCTATGGATGGAGATCCTGCGGCGGCTATGCGTTATACGGAAGCCCGTCTATCAGAAATTGCTGGTTATCTTCTTCAAGATATTGATAAGAATACCGTACCCTTTGCGTGGAATTTTGATGATACAGAGAAAGAACCAACTGTTTTACCAGCTGCCTTTCCTAATCTTTTAGTCAACGGAGCAACAGGAATATCTGCAGGCTATGCGACAGATATTCCACCACATAATTTAGCAGAAGTCATTGATGCTGTCGTGTACATGATTGATCACCCTAAAGCTAAATTAGATAAATTAATGGAATTTCTACCTGGTCCAGATTTTCCAACTGGCGCTATCATTCAAGGAAAAGATGAAATTCGTAAGGCATATGAGACTGGTAAGGGGAGAGTAGCGGTTCGCTCGCGAACTGCTATTGAAACCTTAAAAGGTGGTAAGAAACAAATTATTGTTACTGAAATTCCTTATGAAGTTAATAAGTCAGTTTTAGTAAAACGAATTGATGATGTTCGCGTTAATAATAAAGTTCCAGGAATAGCAGAGGTGCGTGATGAGTCTGATAGAGATGGCCTTCGTATCGCTATTGAGCTCAAAAAAGAAGCCGATGAAACAATTGTCTTAAATTATCTTTTTAAATATACAGACCTACAAGTGAATTATAATTTCAATATGGTTGCTATTGATGACTACACCCCTAAGCAGGTGGGTCTATCAAGAATATTAACTAGCTATATCGCTCACCGAAGAGAAATTATTATTGCTCGTTCAAAATTTGATAAAGAAAAAGCCGAAAAACGTCTCCATATTGTTGAGGGACTGATTAGGGTTCTTTCTATTTTGGATGAAGTGATTGCATTAATTCGTGCTTCTGAGAATAAAGCTGATGCGAAAGAGAATTTGAAGGTCAGCTATGAGTTTTCAGAAGCTCAAGCAGAGGCTATCGTCACATTGCAATTATATCGTCTCACAAATACTGATATTGTGACGTTGAGAGAAGAAGAAGAAGAACTTCGTCAACAAATCACAATGCTTAAGGCAATTATTAGTGATGAACGTACGATGTATAACGTAATGAAACGTGAGTTACGTGAGGTCAAAAAGAAATTTGCCAATACTAGACGTTCTGAACTTCAAGAATTAGCTGAAACTATTGAAATCGATACTGCAAGTTTAATTATCGAAGAGGACACATACGTCAGTGTTACTAGAGGCGGATATGTAAAACGCACCAGCCCTCGCTCTTTCAATGCATCAACTGTTGATGAACTTGGTAAGCGAGAAGATGACGAATTGATATTTGTGAGCAATGCAAAGACTACCCAACATTTATTGATGTTTACTAACCTTGGTAATCTTGCTTATCGTCCAGTTCATGAATTAGCTGATATTCGATGGAAAGACGTTGGTGAACATTTATCACAAAATCTTGTTAACTTTGCTTCAAATGAAGAAATTATTTATGCTGAATTAGTAGATGATTTTACTAAAGAAACTTATTTTGCTGTCACTAGCTTAGGGCAAATAAAGCGTTTTGAACGTCAAGAAATCAGTCCATGGCGGACATATAAGTCAAAAACAGCTAAATATGCTAAGTTAAAAAATGTAGATGATTACGTTGTGACTGTTGCTCCTATCCAATTAGAGGATGTTATACTTGTCACTTATAATGGTTATGCGTTGAGATTTAGTATAAATGATGTACCAGTCGTTGGTAGTAAAGCCGCAGGTGTAAAAGCGATGAATTTAAAAGATAGTGATCACATCGTATCTGCATTTATAGCTAACACCACAAGTTTATATTTATTAACTCATAGAGGAAGTCTTAAACGAATGGCCATTGATGTTATCCCCACAACTAGTCGTGCTAATCGAGGACTTCAAGTTCTTCGTGAATTGAAATCCAAACCGCATCGCGTTTTTAAAGCAGGACCTGTATATTTAGAGGATTCATCTTTTGAATTTGATTTATTTAGTTCAGTATCGAATCATGAAGGAGATACTTTCGTACTTGAGATTATGTCTAAAACAGGAAAAGTTTACGATGTTGATTTAAGTCAATGGAGTTTTTCTGAACGTACAAGTAATGGCTCTTTTGTATCTGATAAGATTTCTGGCGAAGAAGTATTCTCAGTTAAAATTAAG

SEQ ID NO: 20380 - protein, 819 aa, Streptococcus agalactiae
MSNIQNMSLEDIMGERFGRYSKYIIQERALPDIRDGLKPVQRRILYSMNKDGNTFEKGFRKSAKSVGNVMGNFHPHGDSSIYDAMVRMSQDWKNRETLIEMHGNNGSMDGDPAAAMRYTEARLSEIAGYLLQDIDKNTVPFAWNFDDTEKEPTVLPAAFPNLLVNGATGISAGYATDIPPHNLAEVIDAVVYMIDHPKAKLDKLMEFLPGPDFPTGAIIQGKDEIRKAYETGKGRVAVRSRTAIETLKGGKKQIIVTEIPYEVNKSVLVKRIDDVRVNNKVPGIAEVRDESDRDGLRIAIELKKEADETIVLNYLFKYTDLQVNYNFNMVAIDDYTPKQVGLSRILTSYIAHRREIIIARSKFDKEKAEKRLHIVEGLIRVLSILDEVIALIRASENKADAKENLKVSYEFSEAQAEAIVTLQLYRLTNTDIVTLREEEEELRQQITMLKAIISDERTMYNVMKRELREVKKKFANTRRSELQELAETIEIDTASLIIEEDTYVSVTRGGYVKRTSPRSFNASTVDELGKREDDELIFVSNAKTTQHLLMFTNLGNLAYRPVHELADIRWKDVGEHLSQNLVNFASNEEIIYAELVDDFTKETYFAVTSLGQIKRFERQEISPWRTYKSKTAKYAKLKNVDDYVVTVAPIQLEDVILVTYNGYALRFSINDVPVVGSKAAGVKAMNLKDSDHIVSAFIANTTSLYLLTHRGSLKRMAIDVIPTTSRANRGLQVLRELKSKPHRVFKAGPVYLEDSSFEFDLFSSVSNHEGDTFVLEIMSKTGKVYDVDLSQWSFSERTSNGSFVSDKISGEEVFSVKIK

SEQ ID NO: 20381 - protein, 1947 aa, Streptococcus agalactiae
TTGGCTAAACAAGATATAACAGTGACGAATTATGGCGACGATGCTATTCAAGTCTTAGAAGGATTAGATGCTGTTCGTAAGCGTCCAGGGATGTATATCGGTTCCACAGATGGAACTGGTTTACATCATTTAGTGTGGGAAATTGTAGATAATGCAGTTGATGAAGCTCTATCAGGTTTTGGAAATCGCATTGATGTGATTATTAACAAAGATGGGAGTATAACTGTTACAGACCATGGACGTGGTATGCCAACTGGAATGCATGCTATGGGAAAACCTACTGTTGAAGTCATCTTCACGGTGCTTCATGCAGGTGGAAAATTTGGACAAGGTGGTTATAAAACATCAGGTGGTCTCCATGGTGTTGGATCATCTGTAGTTAATGCTTTGTCTTCTTGGTTAGAAGTTGAAATCATTCGCGACGGAGCTATTTACAGACAACGTTTTGAAAACGGTGGTAAGCCCGTTACAACCCTGAAAAAAATCGGCACAGCACCAAAATCAAAATCTGGAACTTCTGTCAGCTTTATGCCAGATCAATCAGTATTTTCAACGATAGATTTTAAGTTTAATACAATTGCAGAGCGCTTAAAGGAATCTGCCTTTCTCTTAAAAAATGTTACTTTAACCTTAACAGATAATCGTTCAGAAGAAGCAGAGCATCTAGAATTTCATTATGAAAACGGTGTTCAAGATTTTGTAGAGTATTTAAATGAAGATAAAGAAACGTTGACACCAATCATGTTTTTCGAAGGTGAAGAACAAGAATTTCATATCGAAGTTGCTTTGCAGTATAATGATGGTTTTTCAGATAATATCCTTTCTTTTGTCAATAATGTTCGTACTAAAGATGGTGGAACACATGAAACTGGCTTGAAATCAGCTATTACAAAGTCTATGAATGACTATGCACGTAAAACAGGACTTCTTAAAGAAAAAGATAAAAACCTTGAAGGTTCTGATTATCGTGAGGGGCTATCAGCCATTTTATCTATTCTTGTACCTGAGGAGCACTTGCAATTTGAAGGTCAAACTAAAGATAAACTAGGAAGTCCCTTAGCACGACCAATTGTTGATAGTATTGTTTCTGAAAAGTTAACTTACTTTCTTATGGAAAATGGAGATTTAGCATCTAATTTAATCCGTAAGGCAATAAAAGCACGTGATGCGCGTGAAGCTGCACGTAAAGCACGTGATGAAAGTAGGAATGGGAAAAAGTCGAAAAAAGATAAAGGTCTACTTTCTGGAAAATTAACCCCTGCACAATCAAAAAATGCTAAGAAAAATGAACTCTATTTAGTCGAAGGAGACTCTGCAGGTGGTTCTGCTAAGCAAGGTCGTGATAGAAAGTTTCAAGCTATTTTACCGTTGCGAGGGAAAGTATTGAATACAGCTAAGGCAAAGATGGCTGATATTATAAAAAACGAAGAAATTAATACAATGATCCATACCATTGGTGCAGGTGTTGGTCCTGATTTTAATCTTGACGATATTAATTATGATAAAGTTATCATTATGACCGATGCTGATACTGACGGAGCTCATATTCAGACACTATTATTAACTTTCTTTTATCGCTATATGAGACCTCTTGTTGAAGAGGGACATGTCTATATTGCTTTGCCACCTTTGTATAAAATGTCAAAAGGAAAAGGTAAAAAAGAAATTGTTGAGTACGCTTGGACAGATATAGAGTTAGAAGAATTACGACAAAAATTTGGTAAAGGCTCACTATTACAACGATATAAAGGGCTTGGGGAAATGAATGCCGATCAATTGTGGGAAACTACTATGAACCCTGAGACAAGGACATTAATTCGTGTAACAATTGAAGATTTAGCAAGAGCAGAACGTCGAGTTAATGTCTTGATGGGTGATAAAGTTCCTCCAAGACGCCAATGGATTGAAGATAATGTCAAGTTTACTTTAGAAGAGAATACAGTATTT

SEQ ID NO: 20382 - protein, 649 aa, Streptococcus agalactiae
MAKQDITVTNYGDDAIQVLEGLDAVRKRPGMYIGSTDGTGLHHLVWEIVDNAVDEALSGFGNRIDVIINKDGSITVTDHGRGMPTGMHAMGKPTVEVIFTVLHAGGKFGQGGYKTSGGLHGVGSSVVNALSSWLEVEIIRDGAIYRQRFENGGKPVTTLKKIGTAPKSKSGTSVSFMPDQSVFSTIDFKFNTIAERLKESAFLLKNVTLTLTDNRSEEAEHLEFHYENGVQDFVEYLNEDKETLTPIMFFEGEEQEFHIEVALQYNDGFSDNILSFVNNVRTKDGGTHETGLKSAITKSMNDYARKTGLLKEKDKNLEGSDYREGLSAILSILVPEEHLQFEGQTKDKLGSPLARPIVDSIVSEKLTYFLMENGDLASNLIRKAIKARDAREAARKARDESRNGKKSKKDKGLLSGKLTPAQSKNAKKNELYLVEGDSAGGSAKQGRDRKFQAILPLRGKVLNTAKAKMADIIKNEEINTMIHTIGAGVGPDFNLDDINYDKVIIMTDADTDGAHIQTLLLTFFYRYMRPLVEEGHVYIALPPLYKMSKGKGKKEIVEYAWTDIELEELRQKFGKGSLLQRYKGLGEMNADQLWETTMNPETRTLIRVTIEDLARAERRVNVLMGDKVPPRRQWIEDNVKFTLEENTVF

SEQ ID NO: 20383 - protein, 636 aa, Streptococcus agalactiae
ATGAATATTATAATTATGATTATCATTGCCTATCTGTTAGGCTCTATCCAAACTGGACTTTGGATTGGTAAATATTTTTACCAAGTCAATCTTCGTCAACACGGTAGTGGTAATACTGGCACCACGAACACCTTCCGTATTTTAGGTGTAAAAGCTGGCATTGTCACTTTGACTATTGACATTTTAAAAGGGACTCTAGCAACACTTATTCCTATCATGTTAGGTGTAACGACAGTATCTCCATTTTTTATCGGTTTTTTTGCTATTATAGGTCACACTTTCCCTATTTTTGCACAATTCAAAGGTGGGAAAGCCGTTGCTACAAGCGCTGGGGTTTTGCTAGGATTTGCACCTTCTTTTTTCCTTTACTTATTAGTTATCTTTTTATTAACGCTTTATCTTTTTAGCATGATTTCGGTATCCAGTATTACAGTAGCTATCGTAGGTATCCTGAGTGTCTTAATTTTTCCATTAGTAGGTTTTATACTAACAGACTACGACTGGATATTTACCACTGTGGTTATCTTAATGGCCCTAACGATTATTATCCGACATCAGGATAATATCAAACGTATTCGAAAAAGGCAAGAAAATTTGGTTCCGTTTGGCTTAAACCTAAGTAAACAAAAAAATAAA

SEQ ID NO: 20384 - protein, 212 aa, Streptococcus agalactiae
MNIIIMIIIAYLLGSIQTGLWIGKYFYQVNLRQHGSGNTGTTNTFRILGVKAGIVTLTIDILKGTLATLIPIMLGVTTVSPFFIGFFAIIGHTFPIFAQFKGGKAVATSAGVLLGFAPSFFLYLLVIFLLTLYLFSMISVSSITVAIVGILSVLIFPLVGFILTDYDWIFTTVVILMALTIIIRHQDNIKRIRKRQENLVPFGLNLSKQKNK

SEQ ID NO: 20385 - protein, 651 aa, Streptococcus agalactiae
ATGAAGCATTCTAGTTGGCATGATTTAATAAAAAGAGAACTACCCAATCATTACTACAATAAAATTAATACATTTATGGATGCAGTTTACGAAAGCGGAATCGTTTATCCTCCAAGAGATAAGGTGTTCAATGCCATACAGATAACACCACTAGAAAACGTAAAAGTAGTTATTATTGGCCAAGATCCTTATCATGGACCTCAACAAGCTCAAGGACTCTCATTTTCTGTTCCAGACAATTTACCAGCTCCTCCTTCACTTCAAAATATTCTAAAAGAATTAGCAGAAGATATCGGGTCACGTTCACATCATGACTTAACATCATGGGCGCAACAAGGAGTGCTGCTATTAAATGCTTGTTTAACAGTTCCAGAACACCAAGCTAATGGTCATGCTGGGCTTATATGGGAACCCTTTACTGATGCTGTTATCAAAGTGGTTAACCAAAAGGAAACACCAGTAGTCTTTATTCTGTGGGGTGGCTATGCTCGAAAGAAAAAGTCGCTAATTGATAATCCTATTCATCATATTATTGAGAGTCCTCATCCGAGTCCCCTATCTGCTTATCGTGGCTTCTTTGGTAGCAGACCTTTTTCTAGAACAAATCATTTCTTAGAAGAAGAAGGAATAAATGAGATTGATTGGTTAAAT

SEQ ID NO: 20386 - protein, 217 aa, Streptococcus agalactiae; identical to SEQ ID NO: 6802

SEQ ID NO: 20387 - protein, 482 aa, Streptococcus agalactiae
ATGAGAGAAACTGAAACACACGATCACCAAGCGCTAATTCAAAAATTGTTAGTCAGTATTCATTATTTAACCTTGTTTCGTGATGAAATTATATTAGTAGAAAAAACCCATCTTTACTGGGGAAACATTTTTCTATTGCTATTGTGCAGAATGAACTAGGTGAGATACTTTCTAAAATAGAAGCTTTGAGTAAGCAAAAAAAACTGATTCGTTCTATTTATTGGTATGATGAATCGTCATTTAAAGTCATGAATAAGGCTCTGGCTATTGTAGAAGAATGGATTAAGGGCTTAGATAATCTTTTAGAATTCTGTCAATCACAGACGGTTTTTCAAGCAATTTTAGGTGATGAACGTGCACATGTATTTGGAATCCTTATTGATGTTTATACTTCTTTAAACATTATAAATACTTCTTTGAAAGAAGAAAATTCTAGACCAGTGTCCTTATCTGATTTGGCTCTAGGTCTTAAGGACGAAGAT

SEQ ID NO: 20388 - protein, 161 aa, Streptococcus agalactiae; identical to SEQ ID NO: 11080

SEQ ID NO: 20389 - protein, 1239 aa, Streptococcus agalactiae
ATGAAGCCAATTTGTATTATTCCTGCGCGATCAGGGTCAAAAGGATTACCAGATAAGAATATGTTATTCCTAGCAGGTAAACCCATGATTTTCCATACTATAGATGCTGCAATTGAATCTGGAATGTTTGATAAGAAAGATATTTTTGTTAGTACAGATTCAGAATTGTACAGAGAGATTTGTTTAGAACGCGGTATTTCAGTGGTGATGAGAAAACCGGAACTTTCAACTGATCAGGCAACTTCGTATGATATGTTAAAAGATTTTTTATCTGACTATGAAGATAATCAGGAGTTTGTGTTACTTCAAGTAACTTCTCCACTAAGAAAATCATGGCATATAAAGGAAGCAATGGAGTATTATTCTTCACATGATGTTGACAATGTTGTAAGTTTTTCTGAAGTTGAGAAACACCCTAGTCTGTTTACAACATTATCTGATGAAGGCTATGCTATAGATATGGTGGGAGCAGATAAAGGTTATCGTCGCCAAGATTTACAACCTTTATACTATCCGAACGGCGCTATTTTTATTTCTAATAAAGAAACTTACTTAAGGGAAAAAAGTTTTTTCACTTCTAAGACATATGCTTATCAAATGGCAAAGGAATTTTCATTAGATGTTGATACGAGAGATGATTTTATCCACGTCATCGGTCACCTCTTTTTCGATTATGCCATTAGGGAAAAAGAGAATAAAGTTTTTTATAAAGAAGGCTATAGTCGTTTGTTCAATAGAGAAGCTTCAAAGATAATTTTAGGTGATTCAAAAACGATATCTATCTCACTAGAAAGTTACCATAATTATTCCCAAGGTGGTGTAACATTAGCAACGATGTTGGAAAACTTACCTAACTTTTTGACAGCTAATGTAACAGAGGCTTTTGTTTCTATAGGGGTAAATGATCTCATTACAGGTTATAGTGTGGAAGAAATATTCAGCAATTTCCAAAAACTCTACTCATTATTAGCTGAGAATAAAATAAAGATGAGATTGACAACTATTGCTTACACCCTTTTTAGAGAAACTGTCAATAATGCAGATATTGAGAAAATCAATCAATGGCTAACAGAATTTTGTTATCAAAATCAGATTCCACTGTTAGATATTAATAGATTTTTATCAAAGGATGGTAATCTAAATTATCATTTAACTAGTGATGGATTACATTTTACTCAAGAGGCTAATGATTTGTTACAAAGTCAATATCAATTATTTGTAGACGAAGTTAAAACCTTA

SEQ ID NO: 20390 - protein, 413 aa, Streptococcus agalactiae; identical to SEQ ID NO: 11082

SEQ ID NO: 20391 - protein, 627 aa, Streptococcus agalactiae
ATGAAAAAAAAGTTGGCATTTTTAGGCGCAGGAAGTCATGCTGATGCGATTGCTCCGGTTATTGATCCTCTTGTGTATGATTTCGTAGGTTTTTTTGATGATAAAGATATTACGGAGCATGATGGTTATCCTGTTCTTGGAAAACTTTATGATGTGCTACCTTACCTTGAAGATGGCTCAATAGATGCAGTATTTATTACAATAGGTGATAATGCTAAAAGGAAAGAACTATTTGAATATGTAGCAAAGGATTATTATGACTTTATTATTAACATCATTAGTCCCAATGCTTTAGTATTGACACCAGATAGCATTTGTGGGCGTGGTATCTTTATTGGTTTTGGGGCTTTTATAGGTTCTAAAGTGAAGCTGTTTGATAACAACGTTGTTAATACAGGAGCGCTCATTGAACATCATACTGTTGTAGAATCGCACTGTAATATAGCACCTAATGCTACCATAAATGGTCTTTGTTATATTAGAGAAGAAGTTTATGTAGGTAGTGCCAGTGTTATTATTCAAACCTTAGATATTTCATCGTGTACGACAATTGGAGCAGGAGCTGTTGTTGTAAAAGATATTATAGAACCTGGAACCTATGTAGGGGTTCCAGCCAAAAAAATAAAA

SEQ ID NO: 20392 - protein, 209 aa, Streptococcus agalactiae; identical to SEQ ID NO: 2168

SEQ ID NO: 20393 - protein, 1149 aa, Streptococcus agalactiae
ATGAAAAAAATTTGTTTAGTAACCGGATCGCGTGCTGAATACGGAATAATGAAGCCATTGATTCAAAGATTATCAAAAGATAAAGAAGTCAACTTACAAATTATTGCAACAGCAATGCATCTGGAAGAAAAGTACGGCTATACTTATCGTCAAATTGAAGAAGACGGTTTTGATATTGCTTATAAAGTTCCCTTACATCTTTATGATACTGACAGAAGAACTGTATCTACTGCAATGGCGCATTTACAACTAGGATTGACCAAAATTTTTGACAAGGAAGACTATGATCTAGTCATCATTTTAGGGGATCGTTATGAAATGTTACCAGTTGTGAATGTAGCGTTGATTTATAATGTCCCAGTATGCCACCTTCATGGAGGGGAGACCTCATTAGGCAATTTTGATGAGTATATTCGCCATGCAATTACTAAGATGAGTCACCTACACTTAGTCTCTACAGAGGACTTTCGTCACGTGTGATTCAGATGGGAGAACACCTCAATTTGTAATTAACACAGGAGCTCTTGGAGTGGAAAATGCTCTATCAATCCCTCCTCTAACCAAAGAAGCAATAGAAAAGCAATTAGGTATTGCACTAGAGGGATCCTATTTTGTTGTTCTCTATCATCCTGTTACTTTTGAACAAGGAAAAGGTGCTGGAGAGCAGATGAAAGCGGTACTATCTGCCCTTTCTAAGTTTGGTGTACAGTGTCTATTTATAGGATCCAATTCAGATACTGGTTCTGATGATATTGCAAAGGCTATCAATACTTATTTGACAAATCATGAAAATAGTCATTGCTTTGCTTCTTTATCAACCCAACTTTATCATTCCTTAATTCGTCATTCACTAGGACTGATTGGTAATTCGTCTTCTGGTTTAATAGAAGTTCCTTCTTTGATGAAACCTACTCTTAATATTGGTGATCGCCAAAAAGGTAGGCTACATGGAGAAAGTGTAGTAAGTGTACCAGTCGAAACCTCCTCTGTATTGGAGGGATTATCAAAATTGAATGAAGTGACCAACTTTGACAATCCCTACTACAAAGAGAATGCTTCATCTATTGCATATAAGCAATAAAGCTGTATTTGAAAGATGAACCTTCAATTTCCCAACCATTTTATGATTTAAAGGAGAATAATCTAAAA

SEQ ID NO: 20394 - protein, 384 aa, Streptococcus agalactiae
  VARIANT 158, 166: Xaa = Any Amino Acid
MKKICLVTGSRAEYGIMKPLIQRLSKDKEVNLQIIATAMHLEEKYGYTYRQIEEDGFDIAYKVPLHLYDTDRRTVSTAMAHLQLGLTKIFDKEDYDLVIILGDRYEMLPVVNVALIYNVPVCHLHGGETSLGNFDEYIRHAITKMSHLHLVSTEDFRXRVIQMGEXPQFVINTGALGVENALSIPPLTKEAIEKQLGIALEGSYFVVLYHPVTFEQGKGAGEQMKAVLSALSKFGVQCLFIGSNSDTGSDDIAKAINTYLTNHENSHCFASLSTQLYHSLIRHSLGLIGNSSSGLIEVPSLMKPTLNIGDRQKGRLHGESVVSVPVETSSVLEGLSKLNEVTNFDNPYYKENASSIAYEAIKLYLKDEPSISQPFYDLKENNLK

SEQ ID NO: 20395 - protein, 1023 aa, Streptococcus agalactiae
ATGGTTTATATTATTGCAGAGATTGGTTGCAATCATAATGGAGATATTAATCTTGCGAAAAAAATGGTAGATGTTGCCGTGTCTTGTGGTGTTGATGCTGTTAAATTTCAGACTTTTAAAGCTGAGAAACTTATTTCTAAATTTGCTCCCAAAGCTGAATATCAAAAAGCAACTACAGGAACAGCAGACAGTCAACTTGAGATGACGAAACGTTTAGAGTTAAGCTTTGAAGAATACTTAGAAATGCGTGATTATGCAATTTCAAAAGGTGTGGAGACCTTTTCAACACCTTTTGATGAAGAGTCATTAGAGTTCTTAATTTCTACAGACATGCCAATTTACAAAATTCCATCAGGAGAAATCACTAATTTACCTTACTTAGAAAAGATTGGCAAGCAACAAAAAAAAGTTATTCTTTCGACGGGTATGGCGGTAATGGAAGAGATCCATCAAGCGGTGAATATTTTACGTCAGAATGGTACAACCGACATTTCTATTTTACATTGTACAACAGAGTACCCGACACCTTACCCCTCTCTAAATTTAAACGTTATTCATACTTTGAAAGATGAATTTAAAGATTTAACGATAGGTTATTCGGATCATTCAATTGGATCAGAAGTACCTATCGCAGCAGCAGCAATGGGTGCAGAAGTTATTGAAAAACACTTTACTTTAGATACTAATATGGAAGGTCCGGATCATAAAGCCAGTGCAACACCCGATATTTTAGCTGCTTTAGTTAAAGGGGTTCGCATTGTTGAACAAGCCTTAGGTAGATTTGAAAAAATCCCAGATCCAGTAGAAGAGAAAAATAAGATTGTTGCTCGTAAATCAGTCGTTGCTTTAAAACCAATTAAAAAAGGCGATATTTATTCAATAGAAAATATTACGGTGAAGCGCCCAGGTAATGGTATTTCTCCTATGAACTGGTATGACATCTTGGGACAAGAAGCGCAAGATGATTTCGAAGAGGATGAAGTTATTCGTGATTCACGCTTTGAAAATCAATTGCCCGAGTTA

SEQ ID NO: 20396 - protein, 341 aa, Streptococcus agalactiae; identical to SEQ ID NO: 2172

SEQ ID NO: 20397 - protein, 1397 aa, Streptococcus agalactiae
ATGAATACTAAGAAATTACTTCAATCTGGTTTTATTTATACAATCGGGAATTTATTGGTGCAAGGATTAGCCTTTATCACACTTCCCATCTATACTCGGGTCATCTCAACAGAAGTTTATGGCCAATACAGTTTATATGTTGCTTGGATGAATATTATTATGCTTTTTATTGGCCTTCAGACGAGCGGTTCTTTAAGTTCAGCTCGGGTCAAATATGGAGAAGAGTTTAAAAGCTACTCTGGGAGTGCCTTTTCTGTAGGTAATATATGGTTTCTTATTGTACTTTTGATAGCTTTTCTATTTAGAAGTTTTCTTGCACCATTAGTTGGTTTTTCTGAATCTATTTTTTTATTAATGGTGTGTCAAAGTTACGCTAACTATGTGGTGACTTTCTTTGGTCAGTATTTTATACAACAACAGAGGAGCTTGGCTAATTTAATACTATCCTTAGCCAATGCAGTTTCATCTGTTGCACTATCTCTATTTTAATTTTTCATTGGTCCGATGACTTTTTATCTAGGGTTTTGGGAGTTTTTGTTCCTACTATAATAACTGGAATAGTTGCCTTTGCTTATATTTATTATCATAGCAAATCTTTTTACAATCCTAAGTATTTTCGGTTCATTGTCACTGTGTCTATTCCTTTGATTTTTCATTTGTTAGGACATCAGTTATTAAATCAATTAGATAGGATTATGCTAGCTCGCTTATATAGTACTAAAGAAGTTGCAATGTATAGTTTCGGTTATTCGCTTGGAATGATTATTCAGATTGTTTTGAATAGTATTAATATGGCTTGGATTCCATGGTTTTTTGATGCTAGAAAAGAAAAATTACTGCAACTTTCAACTTATATTAGCCGTTATCTCTATTTAGGAGTTTTCTTAACATTAGGTTATTTGACTGTTTTTCCTGAGTTAGCTCAAATAATGGGAGGAGACCAGTATAGTAGTAGTGTTCAATTTATTTCTTTAATTATTGTCAGCTACTTTTTAGTCTTTCTCTATACATTTCCTGTAAATATCCAATTCTTCTATGCTAATACGACATGGATTCCTATTGGGACATTATTAGCTGCTGGTGTAAATTGGTTACTAAACCTTGTATTAATTCCTCATTATGCAGCCTATGGCGCTGCTATGGCTACAATAATATCTTATTTAGCCTTGTTGATTTTTCATCATATTGTTTCGAAAGTTAAATACCATTATTCAGATGTCTCAGTTAGGCAGTACATCATTTTAAGTGGTATAGTATTTAGTTATGCTATGTTAATGAACATGTTCCTAGATAATATCGTTATTAGATGGAGTTTAGGAATAATTATTCTTATAGTATATAGCATTGTTTTTCAAAAAGTCATTTTAGACTTATTGAGTAAAAAAAGAAGGAGAAGA

SEQ ID NO: 20398 - protein, 466 aa, Streptococcus agalactiae
MNTKKLLQSGFIYTIGNLLVQGLAFITLPIYTRVISTEVYGQYSLYVAWMNIIMLFIGLQTSGSLSSARVKYGEEFKSYSGSAFSVGNIWFLIVLLIAFLFRSFLAPLVGFSESIFLLMVCQSYANYVVTFFGQYFIQQQRSLANLILSLANAVSSVALSLFLIFHWSDDFLSRVLGVFVPTIITGIVAFAYIYYHSKSFYNPKYFRFIVTVSIPLIFHLLGHQLLNQLDRIMLARLYSTKEVAMYSFGYSLGMIIQIVLNSINMAWIPWFFDARKEKLLQLSTYISRYLYLGVFLTLGYLTVFPELAQIMGGDQYSSSVQFISLIIVSYFLVFLYTFPVNIQFFYANTTWIPIGTLLAAGVNWLLNLVLIPHYAAYGAAMATIISYLALLIFHHIVSKVKYHYSDVSVRQYIILSGIVFSYAMLMNMFLDNIVIRWSLGIIILIVYSIVFQKVILDLLSKKRRRR

SEQ ID NO: 20399 - protein, 936 aa, Streptococcus agalactiae
GTGACTAATAGAAAAATTTATGTATGTCATACTCTTTATCATTTATTGATTTGTTTATATAAAGAAGAGATATATTCAAATTTAGAAATTATTCTCTCTTCTTCTATTCCTGATGTTGATAATTTAGAGAAAAAATTAAAATCAAAAACAATAAATATACATATTTTAGAAGAATCTAGTGGTGAAAGTGAAGAATTATTATCAGTACTTAAAGATGCTGGTCTAAGTTATAGTAAGTTTGATAGTAATTGTTTTATTTTTAATGATGCAACGCCTATTGGGAGGACACTAATAAAGCATGGTATTTATTATAATCTAATTGAAGATGGTTTAAATTGTTTTACTTACTCTATATTTAGTCAAAAACTTTGGAAGTATTATGTAAAAAAATATATTCTTCACAAAATTCAGCCACATGGATTTTCACGATATTGTTTAGGGATTGAAGTTAATTCATTAGTTAATTTGCCAAAGGATCCGCGTTATAAAAAATTTATTGAAGTCCCTAGGAAAGAACTTTTTGACAATGTAACAGAATATCAAAAAGAAATGGCAATAAATCTTTTTGGAGCAGTAAGAGTTAGTATTAAATCACCTTCAGTACTAGTATTAACGCAGCCTCTATCTATAGATAAAGAGTTTATGAGTTATAACAATAAGATAGAAACGTCCGAAGAACAATTTAATTTTTATAAATCAATAGTCAATGAATATATAAATAAAGGGTACAATGTTTATTTAAAAGTTCATCCTAGAGATGTAGTAGATTATTCCAAATTGCCGGTAGAGCTATTACCATCAAATGTTCCTATGGAAATTATAGAGTTGATGTTAACAGGTCGGTTCGAATGTGGGATAACACATTCGTCCACTGCGCTGGATTTTTTAACTTGTGTTGATAAAAAAATAACTTTAGTAGATCTGAAGGATATTAAA

SEQ ID NO: 20400 - protein, 312 aa, Streptococcus agalactiae
MTNRKIYVCHTLYHLLICLYKEEIYSNLEIILSSSIPDVDNLEKKLKSKTINIHILEESSGESEELLSVLKDAGLSYSKFDSNCFIFNDATPIGRTLIKHGIYYNLIEDGLNCFTYSIFSQKLWKYYVKKYILHKIQPHGFSRYCLGIEVNSLVNLPKDPRYKKFIEVPRKELFDNVTEYQKEMAINLFGAVRVSIKSPSVLVLTQPLSIDKEFMSYNNKIETSEEQFNFYKSIVNEYINKGYNVYLKVHPRDVVDYSKLPVELLPSNVPMEIIELMLTGRFECGITHSSTALDFLTCVDKKITLVDLKDIK

SEQ ID NO: 20401 - protein, 939 aa, Streptococcus agalactiae
ATGAATTATAGTATCATTATGTCGGTATATAATGAGCCTTTAAATTATGTGAGAGATTCAGTAGAATCTATATTAAATCAAACGCTTACTGATTTTGAGTTCATAATTGTCATTGATAATCCAAGTAGAGGTGATTTAAAGCAATTCTTAACAGAATATTCAGTTGTAGATAATAGAATAAAAATCTTGCTTAATGAAGAAAATATTGGTTTAGCATCAAGTTTGAACAAAGCGGTGAAAATTTCTAAGGGAGAATATATTTTTAGAATGGATGCTGATGATATTTCATATCCAAGTAGATTTGATAAGCAAATTCGTTTTATGGAGGAAAATTCATTGGATTTCTCAGCAACTCTAATAGAATTGATAGACCAAAAAGGAAATTTAGTATATAAACAACGAGAAAGTAATAAAATATACTTAACTAATGATATACGGAAGATGTTATTGAATAGATCTATACTTGCCCACCCAACGTGGTGCGTAAAAAAGAAAGTTTTCGATAAGTTAATGGGATATAGAGATTTAGTACCTGTTGAAGATTATGATTTTGCAATAAGAGGAGCTCTGGCTGATTTCAAAATCGGCTTACTCAATAAAGTACTTTTACAGTATAGATTAAACGAGAATGGAATATCACAAACCAATAAGTTTAAGCAATATATTTACTCAGCTATTTTACAAGATTTTTATAAAGAAAAATCTTATATTGATATCACAAAAATTACTAATTACTTTCAAGAGTATGTGATAAAGAAACGCTATACTCAGCAAGAGCTCTCTAAATATTTTGAGCTAAAATCTACCCCTAGTATTACTATTAGAAAACTATATATTTGTTTATATTTATACTTTAAGTCTCCCTTGGTTAGGAGGTTATTAATAAATGATATTAATATTTTAGTACTGAAATTGTTTGGAGGAGAGAAACAAAGTGAC

SEQ ID NO: 20402 - protein, 313 aa, Streptococcus agalactiae
MNYSIIMSVYNEPLNYVRDSVESILNQTLTDFEFIIVIDNPSRGDLKQFLTEYSVVDNRIKILLNEENIGLASSLNKAVKISKGEYIFRMDADDISYPSRFDKQIRFMEENSLDFSATLIELIDQKGNLVYKQRESNKIYLTNDIRKMLLNRSILAHPTWCVKKKVFDKLMGYRDLVPVEDYDFAIRGALADFKIGLLNKVLLQYRLNENGISQTNKFKQYIYSAILQDFYKEKSYIDITKITNYFQEYVIKKRYTQQELSKYFELKSTPSITIRKLYICLYLYFKSPLVRRLLINDINILVLKLFGGEKQSD

SEQ ID NO: 20403 - protein, 972 aa, Streptococcus agalactiae
ATGGAAAAACAAATACTTGTTTCTATCGTTATACCTATATACAACTCGGAAGCATATCTTAAAGAATGCGTGCAATCCGTCCTACAACAGACTCATTCATTGATAGAAGTTATACTGATTAATGATGGATCCACTGATAATAGTGGAGAAATTTGTGATAATTTATCTCAAAAAGACGATCGCATACTTGTATTTCATAAAAAAAATGGAGGGGTATCTTCGGCAAGGAACCTAGGTCTTGATAAATCCACAGGCGAATTCATAACGTTTGTAGATAGTGATGATTTTGTAGCACCGAATATAATTGAAATAATGTTAAAAAATTTAATCACTGAGGATGCTGATATAGCAGAAGTAGATTTTGATATTTCGAATGAGAGAGATTATAGAAAGAAAAAAAGACGAAACTTTTATAAGGTCTTTAAAAACAATAATTCTTTAAAAGAATTTTTATCAGGTAATAGAGTGGAAAATATTGTTTGTACAAAATTATATAAAAAAAGTATAATTGGTAACTTGAGGTTTGATGAGAATTTAAAAATTGGTGAGGATTTACTTTTTAATTGTAAAATTTTATGTCAAGAGCACTGCATAGTCGTAGATACGACTTCTTCCTTGTACACCTATCGCATCGTAAAGACTTCTGCAATGAATCAGGAGTTCAACGAAAATTCATTAGATTTTATAACAATTTTTAATGAAATAAGCAGTATTGTTCCTGCAAAATTAGCTAATTATGTTGAAGCGAAATTTTTAAGAGAAAAGGTAAAGTGTCTCCGAAAAATGTTTGAATTAGGTAGTAATATTGACAGTAAAATCAAATTACAACGAGAGATTTTTTTCAAAGATGTTAAATTATACCCTTTCTATAAAGCGGTTAAGTACTTATCATTAAAGGGATTATTGAGTATTTACTTAATGAAATGTTCACCCATCTTGTATATAAAATTATATGACAGGTTTCAAAAACAG

SEQ ID NO: 20404 - protein, 324 aa, Streptococcus agalactiae
MEKQILVSIVIPIYNSEAYLKECVQSVLQQTHSLIEVILINDGSTDNSGEICDNLSQKDDRILVFHKKNGGVSSARNLGLDKSTGEFITFVDSDDFVAPNIIEIMLKNLITEDADIAEVDFDISNERDYRKKKRRNFYKVFKNNNSLKEFLSGNRVENIVCTKLYKKSIIGNLRFDENLKIGEDLLFNCKILCQEHCIVVDTTSSLYTYRIVKTSAMNQEFNENSLDFITIFNEISSIVPAKLANYVEAKFLREKVKCLRKMFELGSNIDSKIKLQREIFFKDVKLYPFYKAVKYLSLKGLLSIYLMKCSPILYIKLYDRFQKQ

SEQ ID NO: 20405 - protein, 1137 aa, Streptococcus agalactiae
ATGCAACTTTTGTTACTTTTAGCATTAATAGTTTTACTTATTTGTAGTAGTTATAATGAAAAAATGAAATTTTTAAATATGGCTGAAATTTTTTTCATTGTATTTTATATGGTTTATTTAGTATCAATAGTATTAAATTCGTTATTTAGAAGTCCAGAATTTCATAGAGTCATTGCTGCATTCAATTCACTGGCAGTAGGGGTTGTGTCCTTATTATTTTACCATTACTATAAGAATACTAATATTGAATTAACAAAATTGCTAAAATCATTTTTGTTTAATGCAATTATTTTGTTTTGTTTAGGATTTCTATATTATTATGCCATATATTTTGATGTAGAGAATGTAAGTCTTTTTGGAAGAAATTTAATTGGATCAGATTGGATAAATGGGATGCATACGCAGAGAGCAATGGCTTTCTTTGAATATTCAAATCTTATAATACCCTTAACTATCATAACTAATATATATATATATATATATATTAAGCAAAGATATAGCTCAGGGATGATGATACTCGGTGCTCTTCTCTCCACTATTATACTACCCATCGGGTCTGGATCTAGAGCTGGTATTATAGTTGTGCTACTACAGGTTATAATTTTATTGTTGAATACAATTGTAATAAAAAGACAAACGATAAGATTTTTCCTGTATTTAGTTCCGATACTAATATTACTATTAGTGATATTACGTTTTGATAATTTGGTGAGCATATATAATAGAATAATCAATTTGCGGTCGGGAAGTAGTGAATCTAGATTTTCTTTGTACAAGGATACCGTACACTCAGTAATTACTGACTCACTATTTCTGGGAAAAGGTGTAAAAGAATTGTGGTTAAATAGTGATTTACCACTAGGATCGCATTCGACCTACATAGGTTATTTCTATAAAACTGGCCTATTTGGACTAATAAATGTGATTTTAGGTTTGTTTCTAATTCTTATTAGCATTATCAAGGAAGCTAAAAAGTCAGATTTCTATTATGAGATAGTAGGGTCTGTCATACTCCTATTTTCATTTTTTGCACTTGAAGATATTGATGGCGCCAATTGGCTCATTATTTTTGTCTTTACAGTGTTGGGAATTTTAGAAAATAAGGATTTCTATAGTCAACTTAAAAGGTGGGAAAGT

SEQ ID NO: 20406 - protein, 379 aa, Streptococcus agalactiae
MQLLLLLALIVLLICSSYNEKMKFLNMAEIFFIVFYMVYLVSIVLNSLFRSPEFHRVIAAFNSLAVGVVSLLFYHYYKNTNIELTKLLKSFLFNAIILFCLGFLYYYAIYFDVENVSLFGRNLIGSDWINGMHTQRAMAFFEYSNLIIPLTIITNIYIYIYIKQRYSSGMMILGALLSTIILPIGSGSRAGIIVVLLQVIILLLNTIVIKRQTIRFFLYLVPILILLLVILRFDNLVSIYNRIINLRSGSSESRFSLYKDTVHSVITDSLFLGKGVKELWLNSDLPLGSHSTYIGYFYKTGLFGLINVILGLFLILISIIKEAKKSDFYYEIVGSVILLFSFFALEDIDGANWLIIFVFTVLGILENKDFYSQLKRWES

SEQ ID NO: 20407 - protein, 479 aa, Streptococcus agalactiae
ATGATTTTTGTCACAGTAGGGACACATGAACAGCAGTTCAACCGTCTTATTAAAGAAGTTGATAGATTAAAAGGGACAGGTGCTATTGATCAAGAAGTGTTCATTCAAACGGGTTACTCAGACTTTGAACCTCAGAATTGTCAGTGGTCAAAATTTCTCTCATATGATGATATGAACTCTTACATGAAGAAGCTGAGATTGTTATCACACACGGCGGTCCAGCAACGTTTATGAATGCAGTTTCTAAAGGGAAAAAAACTATTGTGGTTCCTAGACAAGAACAGTTTGGAGAGCATGTGAATAATCATCAGGTGGATTTTTTGAAAGAGTTATTCTTGAAATATGAGTTAGATTATATTTTGAATATCAGTGAATTAGAGAATATTATTAAGGAAAAAAATATATCTACTAGTAAAGTAATATCACAAAACAATGATTTTTGTTCCTCTTTCAAAAATGAACTTTCTAAACTATTTGAA

SEQ ID NO: 20408 - protein, 160 aa, Streptococcus agalactiae; identical to SEQ ID NO: 6824

SEQ ID NO: 20409 - protein, 447 aa, Streptococcus agalactiae
ATGAAAATTTGTCTGGTTGGTTCAAGTGGTGGTCACCTAGCACACTTGAACCTTTTGAAACCCATTTGGGAAAAAGAAGATAGGTTTTGGGTAACTTTTGATAAAGAAGATGCTAGGAGTATTCTAAGAGAAGAGATTGTATATCATTGCTTCTTTCCAACAAACCGTAATGTCAAAAACTTGGTAAAAAATACTATTCTAGCTTTTAAGGTCCTTAGAAAAGAAAGACCAGATGTTATCATATCATCTGGTGCCGCTGTAGCAGTACCATTCTTTTATATTGGTAAGTTATTTGGCTGTAAGACCGTTTATATAGAGGTTTTCGACAGGATAGATAAACCAACTTTGACAGGAAAATTAGTGTATCCTGTAACAGATAAATTTATTGTTCAGTGGGAAGAAATGAAAAAAGTTTATCCTAAGGCAATTAATTTAGGAGGAATTTTT

SEQ ID NO: 20410 - protein, 149 aa, Streptococcus agalactiae; identical to SEQ ID NO: 4194

SEQ ID NO: 20411 - protein, 1386 aa, Streptococcus agalactiae
TTGAAAGAAAAAGAAAATATACAAAAGATTATTATAGCGATGATTCAAACCGTTGTGGTTTATTTTTCTGCAAGTTTGACATTAACATTAATTACTCCCAACTTTAAAAGCAATAAAGATTTATTGTTTGTTCTATTGATACATTATATTGTCTTTTATCTTTCTGATTTTTACAGAGACTTTTGGAGTCGTGGCTATCTTGAAGAGTTTAAAATGGTATTGAAATACAGCTTTTACTATATTTTCATATCAAGTTCATTATTTTTTATTTCTAAAAACTCTTTTACAACGACACGACTTTCCTTTTTTACTTTTATTGCTATGAATTCGATTTTATTATATCTATTGAATTCATTTTTAAAATATTATCGAAAATATTCTTACGCTAAGTTTTCACGAGATACCAAAGTTGTTTTGATAACGAATAAGGATTCTTTATCAAAAATGACCTTTAGGAATAAATACGACCATAATTATATCGCTGTCTGTATCTTGGATTCCTCTGAAAAGGATTGTTATGATTTGAAACATAACTCGTTAAGGATAATAAACAAAGATGCTCTTACTTCAGAGTTAACCTGCTTAACTGTTGATCAAGCTTTTATTAACATACCCATTGAATTATTTGGTAAATACCAAATACAAGATATTATTAATGACATTGAAGCAATGGGAGTGATTGTCAATGTTAATGTAGAGGCACTTAGCTTTGATAATATAGGAGAAAAGCGAATCCAAACTTTTGAAGGATATAGTGTTATTACATATTCTATGAAATTCTATAAATATAGTCACCTTATAGCAAAACGATTTTTGGATATCATGGGTGCTATTATAGGTTTGCTCATATGTGGCATTGTGGCAATTTTTCTAGTTCCGCAAATCAGAAAAGATGGTGGACCGGCTATCTTTTCTCAAAATAGAGTAGGTCGTAATGGTAGGATTTTTAGATTCTATAAATTCAGATCAATGCGAGTAGATGCAGAACAAATTAAGAAAGATTTATTAGTTCACAATCAAATGACGGGGCTAATGTTTAAGTTAGACGATGATCCTAGAATTACTAAAATAGGAAAATTTATTCGAAAAACAAGCATAGATGAGTTGCCTCAATTCTATAATGTTTTAAAAGGTGATATGAGTTTAGTAGGAACACGCCCTCCCACAGTTGATGAATATGAAAAGTATAATTCAACGCAGAAGCGACGCCTTAGTTTTAAGCCAGGAATCACTGGTTTGTGGCAAATATCTGGTAGAAATAATATTACTGATTTTGATGAAATCGTAAAGTTAGATGTTCAATATATCAATGAATGGTCTATTTGGTCAGATATTAAGATTATTCTCCTAACGCTAAAGGTAGTTTTACTCGGGACAGGAGCTAAG

SEQ ID NO: 20412 - protein, 462 aa, Streptococcus agalactiae
MKEKENIQKIIIAMIQTVVVYFSASLTLTLITPNFKSNKDLLFVLLIHYIVFYLSDFYRDFWSRGYLEEFKMVLKYSFYYIFISSSLFFISKNSFTTTRLSFFTFIAMNSILLYLLNSFLKYYRKYSYAKFSRDTKVVLITNKDSLSKMTFRNKYDHNYIAVCILDSSEKDCYDLKHNSLRIINKDALTSELTCLTVDQAFINIPIELFGKYQIQDIINDIEAMGVIVNVNVEALSFDNIGEKRIQTFEGYSVITYSMKFYKYSHLIAKRFLDIMGAIIGLLICGIVAIFLVPQIRKDGGPAIFSQNRVGRNGRIFRFYKFRSMRVDAEQIKKDLLVHNQMTGLMFKLDDDPRITKIGKFIRKTSIDELPQFYNVLKGDMSLVGTRPPTVDEYEKYNSTQKRRLSFKPGITGLWQISGRNNITDFDEIVKLDVQYINEWSIWSDIKIILLTLKVVLLGTGAK

SEQ ID NO: 20413 - protein, 687 aa, Streptococcus agalactiae
ATGACTCGTTTAGAAATAGTTGATAGCAAGTTAAGACAAGCAAAAAAAACAGAAGAATACTTCAATGCGATCCGTACAAACATACAGTTTAGTGGAAAGGAAAATAAAATTCTTGCAATTACCTCTGTTAGGGAAGGGGAAGGAAAATCCACTACTTCAACAAGTTTAGCTTTATCTTTAGCTCAAGCAGGATTTAAAACATTATTAATTGATGCGGATACTAGGAACTCTGTTATATCTGGAACCTTTAAAGCAACTGGAACTATTAAAGGCTTGACGAATTATTTATCAGGTAATGCAGATCTTGGAGATATTATCTGTGAAACCAATGTTCCTAGACTGATGGTCGTTCCTTCAGGGAAAGTACCACCAAATCCAACAGCATTACTTCAGAACGCTTATTTTAATAAGATGATTGAAGCTATTAAAAATATATTTGATTATATTATCATCGATACTCCACCTATTGGTTTAGTTGTTGATGCCGCAATAATCGCTAATGCTTGCGATGGTTTTATTTTAGTAACCCAAGCAGGTAGAATAAAACGTAATTATGTTGAAAAAGCAAAAGAACAGATGGAACAAAGTGGTTCAAAGTTCTTAGGTATTATTCTTAATAAAGTTAATGAATCTGTTGCTACTTACGGCGATTATGGAAATTACGGAAAAAGGGATAGAAAAAGGAAG

SEQ ID NO: 20414 - protein, 229 aa, Streptococcus agalactiae
MTRLEIVDSKLRQAKKTEEYFNAIRTNIQFSGKENKILAITSVREGEGKSTTSTSLALSLAQAGFKTLLIDADTRNSVISGTFKATGTIKGLTNYLSGNADLGDIICETNVPRLMVVPSGKVPPNPTALLQNAYFNKMIEAIKNIFDYIIIDTPPIGLVVDAAIIANACDGFILVTQAGRIKRNYVEKAKEQMEQSGSKFLGIILNKVNESVATYGDYGNYGKRDRKRK

SEQ ID NO: 20415 - protein, 690 aa, Streptococcus agalactiae
ATGAATAAAATAGCTAATACAGAAGTTGAAATAAATATATTCAACCTTTTAAAAAAATTGTGGAAAAAGAAATTTTTAATCACATTTGTTGCCATTGCATTTGCAACAGCTGGACTTTTCTATAGTCTTTTTATTGTTACGCCACAATATACTTCTTCAACAAGGATATATGTCATTAACCCTAATACCCCTAATAATAGTATTACTGCACAAGATCTACAAGCGGGGAGTTTTCTTGCAAATGACTATAAGGAGATTATTACGTCTACTGACGTTCTAGAAAAAGTTATTTCTTCTGAAAAGTTGAATTATCCTTCGTCTCAGTTGCTACAAAAAATAACAGTTTCTATTTTAAAAGATACACGTGTTATTTCAATATCGGTCGAAGATGCTAATCCAAAAATGTCTCAAAAATTAGCAAATTCAGTTAGAGAAGCAGCAGTTTCAAAAATCAAGGCAGTTACTCAAGTAGAGGATATCACTACTCTTGAGAAAGGAAATTTACCTAAAGCACCATCTTCTCCTAATATTAAAAAGAATGTACTAATCGGGTTTATTGTTGGTGCAGGATTATCAACTATTGTTTTAGTTATTATGGGTATTTTGGATGATCGTGTTAATACTGAAGAAGATATTGAAAAGGTCCTAGGACTTACTTCTTTAGGTATAGTACCAGATTTGAATAAACTT

SEQ ID NO: 20416 - protein, 230 aa, Streptococcus agalactiae; identical to SEQ ID NO: 11108

SEQ ID NO: 20417 - protein, 728 aa, Streptococcus agalactiae
ATGATTGATATTCATTCTCATATCGTTTTTGATGTAGATGATGGGCCTAAAACGCTTGAAGAGAGTTTATCTTTGATAGAAGAAAGTTATCGACAAGGTGTTAGAATAATTGTTTCGACATCACATAGAAGAAAAGGTATGTTTGAAACACCTGAAGATATTATCTTCAAAAACTTTTCTATAGTTAAACACGAAGCGGAAAAAAGATTTGAACATCTTCAAATCTTATATGGTGGAGAATTGTACTATACAAGTGATATGTTAGAAAAACTGAAGTTAAAGCAAATTCCAACTTTAAACAATACGAAATTTGCTTTAATTGATTTTCTATGCAAACTTCTTGGAAAGATATTCATACAGCTTTGTCAAATGTTTTAATGCTTGGTATTACACCAGTCGTTGCGCATATAGAGAGGTATAACGCTTTAGAGAATCAAAAAGAACGGGTGAAGGAAATTATTAATATGGGGTGTTACACACAAATAAATAGTTCCCATATTTTGAAACAAAAACTTTTTAATGATAAGCATAAACGCTTTAAGAAAAGAGCCCGTTATTTTTTAGAGGAAAATTTAGTGCATTTTGTAGCGAGTGATATGCATAACCTTGATGTTAGACCGCCATTTTTAGCAGAAGCTTATAAGATTATCTGTAGAGATTTCGGTAAAGAACGTGCTAACCAACTTTTTATTGAAAATGCTCAATCTATATTAAAAAACCATTACATT

SEQ ID NO: 20418 - protein, 243 aa, Streptococcus agalactiae; identical to SEQ ID NO: 2180

SEQ ID NO: 20419 - protein, 1455 aa, Streptococcus agalactiae
ATGTCTAATCATTCGCGCCGTCAACAAAAGAAACACTCACATACACCTCTACGGGTGATTAATTTATTTCTTTTGGTGATTTTTATTTTGTTAAGTGTAGTCTCATTATTTCTTATGTATCGTCACCATTTTTTGGCATTTAGACACCTGAACGTCATTTATGGAGTTGTAATTGTTTTAATCATTTTAGCAAGTTTATTTCTTTGTATTAAGAATAAAGCTAGAATTTTTACAACTATAATTTTAGTATTAGCATCTATTTTCGTTGCTACTACTTTATATGGATTTAAGTCAACCATTGATTTGACAAATAATCTAAATAAAACTGCTTCATACTCTGAAATTGAGATGAGTGTAGTTGTACCAAAAGATTCTAAAATAACCAATATAGAAGCTGTCAGCAAATTAGCCGCACCAGTTAAAAACGATACTTCAAATATTACTGATTTGATAGAACATATAAAATCAGAAAAAGGAATCTCTATTACACCACAAAAAACAGATTCTTACCAGGATGCATACAATAGAATTAAAAATGGTAATAGTCAGGCTATGGTTTTAAATAATGCTTATGTTAGCTTAATTGAACTTAGCACCCCTGATTTTAAATCGCAGATAAAAACGATTTATACTTACAAAATTAAGAAAAAAATTAATCGTAAAAATACTAATCATAAAGAAGGGGTATTTAATATCTATATTAGCGGTATTGATACTTTTGGCTCTATATCAACAGTATCAAGATCTGATGTAAATATTATTATGACGGTTAATACCAATACCCACAAAGTATTGTTAACGACAACACCACGAGATGCCTATGTAAAAATTCCAGATGGTGGGGGCAATCAATATGATAAATTAACCCATGCAGGTTTGTATGGCGTTGAGACATCAATGAAAACACTTGAAAACCTTTACGACATCAACCTTGATTATTATGCTAGAATTAATTTTTCATCATTTTTAAAATTAATAGACCTCTTGGGAGGAGTGACAGTTTATAACGATCAAGCTTTTACAAGTAAACATGGTAATTTTGACTTCCCTGTTGGTCAAGTAACATTGAATTCTGAGCAGGCTTTGGGCTTTGTTAGAGAACGTTATTCTCTACAAGGAGGCGATAACGATAGAGGTAGAAATCAAGAAAAAGTGATTGCAGCTATTATAAATAAGTTAGCTTCTAGTCAGTCAGTAACAAAATTAAATAGCATTACCTCACAGCTCCAAACGTCCGTTCAAACTAATATGACTATTGATAATATTAATGATTTGATTAACAATCAATTGTCAACTGGACAACGCTTCACTGTCGAGTCACAAGCATTAACTGGTCATGGTTCAACGGGTGAACTCCCTTCATATGCAATGCCAGGAGCTCAACTTTATATGATGTCAATTGATCAATCTAGCTTATCTAATGCAAAATCAAAAATTAAGAACACAATGGAGGAA

SEQ ID NO: 20420 - protein, 485 aa, Streptococcus agalactiae
MSNHSRRQQKKHSHTPLRVINLFLLVIFILLSVVSLFLMYRHHFLAFRHLNVIYGVVIVLIILASLFLCIKNKARIFTTIILVLASIFVATTLYGFKSTIDLTNNLNKTASYSEIEMSVVVPKDSKITNIEAVSKLAAPVKNDTSNITDLIEHIKSEKGISITPQKTDSYQDAYNRIKNGNSQAMVLNNAYVSLIELSTPDFKSQIKTIYTYKIKKKINRKNTNHKEGVFNIYISGIDTFGSISTVSRSDVNIIMTVNTNTHKVLLTTTPRDAYVKIPDGGGNQYDKLTHAGLYGVETSMKTLENLYDINLDYYARINFSSFLKLIDLLGGVTVYNDQAFTSKHGNFDFPVGQVTLNSEQALGFVRERYSLQGGDNDRGRNQEKVIAAIINKLASSQSVTKLNSITSQLQTSVQTNMTIDNINDLINNQLSTGQRFTVESQALTGHGSTGELPSYAMPGAQLYMMSIDQSSLSNAKSKIKNTMEE

SEQ ID NO: 20421 - protein, 921 aa, Streptococcus agalactiae
ATGAGAATTCAACAATTACAATATGTTATTAAGATTGTAGAAACTGGTAGCATGAATGAAGCCGCTAAACAACTCTACATTACCCAACCTTCACTTTCAAACGCTGTTAGGAACCTTGAGACTGAGATGGGTATCCAAATTTTTATTCGAAATCCAAAAGGAATAACGTTAACAAAAGATGGTATGGAATTTCTGTCATATGCGCGACAAATTCTAGAACAAACAGCACTTCTTGAAGAGCGTTATAAGGGTGATAATACAAGTCGTGAGCTGTTCAGCGTCTCTTCGCAACACTATGCATTTGTGGTTAACGCTTTTGTAGCTCTCTTTAATGGCACAGATATGACCCAATACGAACTTTTTTTACGTGAAACTAGGACTTGGGAAATTATTGATGATGTTAAAAATTTCCGTTCAGAGATTGGTGTTCTGTTTCTTAATAGCTATAATAGAGATGTATTAACCAAATTATTCGACGATAATTCCTTAATTGCCACAACTCTTTTTACTACTACACCTCATATTTTCGTGAGCAAATCCAATCCCTTAGCTAATAGAAAAAAATTAAATATGAAAGATTTAGAAGATTATCCTTATCTGAGTTATGATCAAGGCCTGCATAATTCTTTCTACTTTTCTGAGGAAATGATGTCTCAAATTCCTCACCCAAAATCCATTGTTGTCAGTGATAGAGCAACTCTGTTTAATTTAATGATTGGATTAGATGGTTATACAGTGGCAACTGGTATCCTCAACTCAAAATTGAACGGTGACGAAATTGTCGCAATCCCTCTTGACGTGGATGATGTTATTGATATTGTCTATATCCGACACGACAAAGCAAACCTTTCAAAAATGGGACAAAAATTTATTGACTATTTATTAGAGGAAGTTTCGTTTAATCATAAAAATAAACAGTCC

SEQ ID NO: 20422 - protein, 307 aa, Streptococcus agalactiae
MRIQQLQYVIKIVETGSMNEAAKQLYITQPSLSNAVRNLETEMGIQIFIRNPKGITLTKDGMEFLSYARQILEQTALLEERYKGDNTSRELFSVSSQHYAFVVNAFVALFNGTDMTQYELFLRETRTWEIIDDVKNFRSEIGVLFLNSYNRDVLTKLFDDNSLIATTLFTTTPHIFVSKSNPLANRKKLNMKDLEDYPYLSYDQGLHNSFYFSEEMMSQIPHPKSIVVSDRATLFNLMIGLDGYTVATGILNSKLNGDEIVAIPLDVDDVIDIVYIRHDKANLSKMGQKFIDYLLEEVSFNHKNKQS

SEQ ID NO: 20423 - protein, 765 aa, Streptococcus agalactiae
ATGTCAGATTTTTCAACTGCTCTTAAAGTATTAGTGGATCAGTATTCTTATCATAATGCTTTCTTATTATTACAAAAACATGGTCCTTTAAACTCAGATTTATTATTTTTATTGGAAATGATGAAAGAGCGTCGAGAGTTAAACATTGATTTTCTTTTTGCTCATCAAGAACAAGTTGTTATATTACAAGAAAAATACAATATAAAGCTTTTGCATAACCCGTATGATTTAGAGTTGCTGGCAAATTACATCATGGATTTAGAAGCAAAAGTAAAAAATGGATTAATCATAGATTTTGTCCGTAGTGTTAGTCCTATTTTATATCGTCTATTTATGATTTTACTTGCACAAGAAGTACCTCACTTGCATGATTACATCCATAATGCAAGAGATGATCACTACGATACTTGGAAGTTTAAAGAATTAAAGGAGTCAAACCACCCAGTCCTTTTGGCATTCTCTGAAAGGTGGCACGATAGTCGCTTGACTTCTAAAAGCCTTGCAGAATGTTTACAATTAACCGACCTTGATGAAGAAGTGAAATCGACCATCATTCAATTAAGACAGTTCGAAAAATCAGTCAGAAATCCTTTGGCTCACCTGATTAAACCTTTTGATGAGCAAGAACTATATCGTACAACTCAATTTTCTTCTCAAGCATTTTTAGACCAGATTATCTTCTTGGCAAAGGTAATTGGTGTTGAGTATGATACTGTTAATTTTCACTACGATACGGTTAACAAGCTTATTATAAAGATACTTGAG

SEQ ID NO: 20424 - protein, 255 aa, Streptococcus agalactiae
MSDFSTALKVLVDQYSYHNAFLLLQKHGPLNSDLLFLLEMMKERRELNIDFLFAHQEQVVILQEKYNIKLLHNPYDLELLANYIMDLEAKVKNGLIIDFVRSVSPILYRLFMILLAQEVPHLHDYIHNARDDHYDTWKFKELKESNHPVLLAFSERWHDSRLTSKSLAECLQLTDLDEEVKSTIIQLRQFEKSVRNPLAHLIKPFDEQELYRTTQFSSQAFLDQIIFLAKVIGVEYDTVNFHYDTVNKLIIKILE

SEQ ID NO: 20425 - protein, 708 aa, Streptococcus agalactiae
ATGTCAATCCATATTGAAGCAAAACAAGGTGAAATTGCAGATAAAATTTTACTTCCAGGAGATCCACTCCGTGCGAAATTTATTGCCGAGAATTTTTTAGAAGATGTGGTGTGTTTTAATACAGTTCGCAATATGTTTGGTTATACAGGTACCTATAAAGGACATCGTGTTTCTGTTATGGGAACTGGTATGGGTATGCCTTCAATTTCAATTTATGCTCGCGAACTAATTGTTGATTATGGGGTTAAAACATTGATTCGCGTAGGAACAGCAGGTGCTATTAATCCTGATATCCATGTTCGTGAACTTGTTTTAGCACAAGCAGCAGCAACAAATTCTAATATTATCCGTAATGATTGGCCTGAATTTGATTTTCCGCAAATTGCTGATTTTAAACTTTTGGATAAAGCTTATCACATCGCAAAGGAAATGGATATTACAACTCATGTAGGCAGTGTATTATCTTCAGACGTGTTTTATTCAAACCAACCAGATCGTAATATGGCCTTGGGTAAACTAGGTGTTCATGCTATTGAGATGGAAGCAGCAGCTCTCTACTATCTTGCAGCTCAACACAATGTTAATGCTCTTGCTATGATGACGATTTCAGATAACTTGAATAATCCAGAAGAAGATACAAGTGCAGAAGAGCGTCAAACAACATTTACTGATATGATGAAAGTTGGTCTCGAAACACTTATTTCTGAA

SEQ ID NO: 20426 - protein, 236 aa, Streptococcus agalactiae
MSIHIEAKQGEIADKILLPGDPLRAKFIAENFLEDVVCFNTVRNMFGYTGTYKGHRVSVMGTGMGMPSISIYARELIVDYGVKTLIRVGTAGAINPDIHVRELVLAQAAATNSNIIRNDWPEFDFPQIADFKLLDKAYHIAKEMDITTHVGSVLSSDVFYSNQPDRNMALGKLGVHAIEMEAAALYYLAAQHNVNALAMMTISDNLNNPEEDTSAEERQTTFTDMMKVGLETLISE

SEQ ID NO: 20427 - protein, 1170 aa, Streptococcus agalactiae
ATGCACTATGTATTAATGTTTACAGAGTGGTTAGCATTTGGTAATAGTAGAGAAAATACTCTGTCTTTGTTAAATAGTGTCACACCAATTAAAAGAGTGTTATCACTTACTTTAGTCTCCTTTTTAGCATCCCTTAGTTGGTATTACTTACAAATCAAACCAAAGCAAATAACTAGTATTAAACAACAGGTTGTTTTTAAGGATTTTTCTGTAAAAAAATCACCTTACTGGCTACATATAGGTCACGCATTTTTGCAATTGATTTATGTAGGAGCTGGTGGCCCTATTGGAAAAGAAGGAGCGCCACGAGAGTTTGGAGCCATAAATGCTGGGAAAATATCGGATTTATTAGCACTTAAAGTGCTGGATAAACGTTTATTAATCATTAGTGCTGCAGCTGCAGGTTTGTCAGCAGTTTATCAAGTCCCCCTAGCTAGTGTATTCTTTGCTTTTGAAACTTTAGCTTTAGGAATCTCACTGAAAAATATTGTGACATTGCTAGCCTCTACTTTTGGTGCAGCTAGTATTGCTCAATTAGTTATTTCGACAGCCCCTCTTTATCATATTTCAAAGATGAGTCTGAATTCACAGTCATTAGCTTTTATGTTCTTGATCGTTTTATGTGTAACTCCTATTGCGATTAGCTTTAGATATTTAAATCAAAAAGTGACAGAGAGACGTATTAAAAATATAAAAATATTGTTAAGTTTGCCAGTAGTGTCATTGATAGTATCTGTTTTATCAATAGTCTATCCCCAGATTTTAGGAAATGGTAATGCCCTAGTTCAAGAAGTCTTTAAAGGGACCACAGTTAGCTTGATCGCTATTTTAGTTGTTCTCAAGATGATAGCAACATTATCCACTCTTTGCGCTGGTGCTTATGGCGGTATACTGACACCATCTTTTTCCATTGGTGCTTGTTTAGGTTTTTTGTTAGCTAGTATTTCTATTCCTTTACTTCCCCACATATCGATAGTAACCAGTATGTTGGTTGGTGCAGCTATTTTTTTAGCTATTACAATGAGAGCGCCACTGACAGCTGTCGGTTTAGTCATATCTTTTACTGGTCAATCCGTTATAACTATTGTTCCCTTAACTATAGCAGTACTTTTTGCTACTGCCTATGATTATTTTATAAGAAAAATGAGGAGTTTATATGTCAATCCATAT

SEQ ID NO: 20428 - protein, 390 aa, Streptococcus agalactiae
MHYVLMFTEWLAFGNSRENTLSLLNSVTPIKRVLSLTLVSFLASLSWYYLQIKPKQITSIKQQVVFKDFSVKKSPYWLHIGHAFLQLIYVGAGGPIGKEGAPREFGAINAGKISDLLALKVLDKRLLIISAAAAGLSAVYQVPLASVFFAFETLALGISLKNIVTLLASTFGAASIAQLVISTAPLYHISKMSLNSQSLAFMFLIVLCVTPIAISFRYLNQKVTERRIKNIKILLSLPVVSLIVSVLSIVYPQILGNGNALVQEVFKGTTVSLIAILVVLKMIATLSTLCAGAYGGILTPSFSIGACLGFLLASISIPLLPHISIVTSMLVGAAIFLAITMRAPLTAVGLVISFTGQSVITIVPLTIAVLFATAYDYFIRKMRSLYVNPY

SEQ ID NO: 20429 - protein, 807 aa, Streptococcus agalactiae
ATGACATTATTAGAAAAAATTAATGAGACTAGAGACTTTTTGCAAGCAAAAGGCGTCACAGCACCAGAATTTGGCCTTATTTTAGGCTCTGGTTTAGGAGAATTAGCTGAAGAAATCGAAAATCCCATTGTTGTGGATTATGCAGACATCCCAAATTGGGGACAGTCAACAGTAGTTGGTCATGCTGGAAAATTAGTGTATGGGGATTTATCAGGCCGTAAGGTATTAGCACTTCAAGGTCGTTTTCACTTTTATGAAGGAAATACAATGGAAGTCGTTACTTTCCCAGTACGTATCATGAGAGCATTGGCTTGCCACAGTGTGCTTGTGACTAATGCAGCGGGTGGGATTGGATACGGACCAGGAACTTTAATGCTGATCAAAGACCACATCAATATGATTGGGACTAACCCTCTCATAGGTGAGAACCTTGAAGAATTTGGACCACGTTTCCCAGACATGTCGGATGCTTATACAGCAACATATCGACAAAAAGCTCACCAAATTGCTGAAAAACAGAATATCAAACTCGAAGAAGGTGTGTACTTGGGTGTATCAGGACCCACTTATGAAACACCTGCAGAAATTCGTGCATTCCAAACAATGGGCGCACAGGCGGTAGGTATGTCCACGGTTCCAGAGGTGATCGTTGCAGCTCACTCAGGGCTTAAAGTGTTAGGAATTTCAGCAATTACTAACTTTGCCGCTGGCTTCCAATCTGAGCTCAATCATGAGGAGGTCGTTGAAGTTACTCAGCGTATTAAAGAAGATTTCAAGGGATTAGTTAAATCATTAGTTGCTGAACTT

SEQ ID NO: 20430 - protein, 269 aa, Streptococcus agalactiae; identical to SEQ ID NO: 2192

SEQ ID NO: 20431 - protein, 405 aa, Streptococcus agalactiae
ATGGAAAAAATTAGGATTTACCATAACCCAAATTGTGGGACATCAAGGAACGTACTTGCCATTATTCGTCATTGTGGTATTGAACCAGAAATTATTTATTATCTGAAAACACCACCTAGCAGGATGGAACTGGTTGAACTGTTGTTAGAAATGAAACTTTCTGCGAGGGAACTTCTAAGAACAGATGTTCCTGCTTATGAGAAATTCAATTTGGAATCTTCTAGCGTTACAGATGAAGAAATGATTGATGCGATGATACAAGATCCTATTCTTATTAATCGTCCCATAGTTGTTACGAGTAAAGGTGCAAAACTCTGCCGACCCTGTGAAGCAATTTTAACCATTTTACCTGTAAAGATGGAAAAAGATTTTGTTAAAGAAGATGGACAGATTATCCAAAGTTTA

SEQ ID NO: 20432 - protein, 135 aa, Streptococcus agalactiae; identical to SEQ ID NO: 11124

SEQ ID NO: 20433 - protein, 1209 aa, Streptococcus agalactiae
ATGTCACAATTTGATCGCATTCACTTAGTTGTCTTAGATTCAGTGGGTATTGGAGCGGCACCAGATGCCAATGATTTTGTCAATGCAGGAGTTCCTGATGGTGCTTCAGACACGCTTGGCCACATTTCAAAAACAGTTGGACTTGCGGTGCCAAACATGGCTAAAATTGGACTTGGTAATATTCCTCGTCCCCAAGCGCTTAAGACCGTCCCTGCAGAAGAAAGTCCAAGTGGCTACGCGACGAAGTTACAAGAAGTATCACTTGGTAAAGATACAATGACAGGGCATTGGGAGATCATGGGCTTAAATATTACAGAGCCATTTGATACTTTCTGGAATGGTTTTCCAGAAGATATTATCACAAAGATTGAGGATTTTTCAGGACGTAAAGTTATTCGTGAAGCGAATAAACCTTATTCAGGGACAGCTGTTATTGATGACTTTGGACCACGCCAAATGGAAACTGGTGAGCTCATTATCTATACCTCAGCTGACCCAGTCCTACAAATTGCAGCTCATGAGGATATCATCCCTCTAGAAGAACTTTACCGTATTTGTGAATATGCTCGTAGTATCACAATGGAGCGTCCAGCTCTCCTTGGTCGTATTATCGCTCGTCCATATGTAGGTGAACCAGGCAACTTTACGCGTACAGCCAACCGTCACGACTATGCAGTATCACCATTTGAAGATACCGTATTAAATAAACTAGATCAAGCTGGCATCGATACTTATGCTGTTGGTAAAATCAATGATATTTTCAATGGTTCAGGCATTAATCATGATATGGGACATAACAAATCAAATAGTCATGGTATTGATACTTTGATAAAAACAATGGGGTTATCAGAGTTTGAAAAAGGCTTCTCCTTTACTAATTTGGTTGACTTTGATGCTCTCTATGGTCACCGTCGTGATTCTCATGGTTATCGTGATTGTCTTCATGAGTTTGATGAGCGTCTTCCAGAGATCATTTCAGCAATGCGTGACAAAGACTTACTTTTGATCACTGCCGATCATGGTAATGACCCAACTTATGCAGGCACAGACCATACAAGAGAATACATTCCTCTCTTAGCCTATAGTCCATCCTTCACAGGAAACGGACTTATCCCAGTAGGGCATTTCGCAGATATTTCAGCAACAGTTGCGGATAACTTTGGTGTTGATACTGCGATGATTGGAGAGAGCTTCTTGCAGGACTTGGTA

SEQ ID NO: 20434 - protein, 403 aa, Streptococcus agalactiae
MSQFDRIHLVVLDSVGIGAAPDANDFVNAGVPDGASDTLGHISKTVGLAVPNMAKIGLGNIPRPQALKTVPAEESPSGYATKLQEVSLGKDTMTGHWEIMGLNITEPFDTFWNGFPEDIITKIEDFSGRKVIREANKPYSGTAVIDDFGPRQMETGELIIYTSADPVLQIAAHEDIIPLEELYRICEYARSITMERPALLGRIIARPYVGEPGNFTRTANRHDYAVSPFEDTVLNKLDQAGIDTYAVGKINDIFNGSGINHDMGHNKSNSHGIDTLIKTMGLSEFEKGFSFTNLVDFDALYGHRRDSHGYRDCLHEFDERLPEIISAMRDKDLLLITADHGNDPTYAGTDHTREYIPLLAYSPSFTGNGLIPVGHFADISATVADNFGVDTAMIGESFLQDLV

SEQ ID NO: 20435 - protein, 669 aa, Streptococcus agalactiae
ATGGACGAACTAAAAAAACTTGCTGGAGTGACCGCTGCAAAATACGTTAAAAACGGTATGATTGTAGGTTTAGGGACAGGTTCTACAGCATATTTTTTTGTTGAAGAAATTGGACGCCGTGTCAAAGAAGAGGGATTGCAAGTCGTAGGCGTTACAACGTCAAACCGTACGACTGAGCAGGCAAGAGGATTAGCTATTCCGTTGAAATCAGCAGATGATATTGATGTCATTGATGTCACTGTGGATGGAGCAGATGAAGTAGACCCTGATTTTAATGGTATCAAGGGTGGCGGTGGTGCGCTGCTCATGGAAAAAATAGTAGCTACTCCAACTAAAGAATATATCTGGGTTGTCGATGAGAGCAAACTTGTTGAAACGTTAGGTGCATTTAAATTGCCTGTTGAGGTTGTTAGATATGGTTCTGAGCGTCTTTTTCGGGTTTTTAAATCAAAAGGTTATTGTCCTTCTTTCCGTGAAACAGAAGGTGACCGCTTTATCACTGATATGGGGAACTACATTATCGACCTAGATTTGAAAAAAATAGAGGATCCAAAGCAGTTAGCGAATGAACTTGACCATACAGTTGGTGTTGTTGAACATGGTTTATTTAATGGTATGGTTAATAAAGTTATAGTAGCAGGCAAAAACGGTCTTGACATACTTGAAAAA

SEQ ID NO: 20436 - protein, 223 aa, Streptococcus agalactiae
MDELKKLAGVTAAKYVKNGMIVGLGTGSTAYFFVEEIGRRVKEEGLQVVGVTTSNRTTEQARGLAIPLKSADDIDVIDVTVDGADEVDPDFNGIKGGGGALLMEKIVATPTKEYIWVVDESKLVETLGAFKLPVEVVRYGSERLFRVFKSKGYCPSFRETEGDRFITDMGNYIIDLDLKKIEDPKQLANELDHTVGVVEHGLFNGMVNKVIVAGKNGLDILEK

SEQ ID NO: 20437 - protein, 381 aa, Streptococcus agalactiae
TTGGTCTCTGCTTACGAGCAAGCAATCTCCAATTGGAATGCAACAGGTGCTTTTGTGTTACAAACAACAGACAATCCTAATGCTGATATTATTGCTAAGGATTACTCAGATGCTAAAACACAAGCTGCGGGTGTAGCTGAAACCGAGAAAAATGCTTTAACTAATCGTATTTCAAAGGTAACAGTTAAATTAAACACATTTTACCTTAAGAATAAACAGTTTGGTTATGACCATACTAGGATTGTTAATACGGCCGAACATGAATTAGGACATGCTTTAGGTCTAGGACATAATGATCAACAACATTCCGTTATGCAGTCAAAAGGTTCGCATTATGGCATTCAAGAAGTTGATATTCAAACGCTAAAAAACTTATATGCA

SEQ ID NO: 20438 - protein, 127 aa, Streptococcus agalactiae
MVSAYEQAISNWNATGAFVLQTTDNPNADIIAKDYSDAKTQAAGVAETEKNALTNRISKVTVKLNTFYLKNKQFGYDHTRIVNTAEHELGHALGLGHNDQQHSVMQSKGSHYGIQEVDIQTLKNLYA

SEQ ID NO: 20439 - protein, 126 aa, Streptococcus agalactiae
ATGGGGATTTATCAGGCCCGTAAGGTATTAGCACTTCCAAGGGTCGTTTTCACTTTTATGAAGGGAAAAATTTACCAAATGGGGAAAGTTTCCGTTTACTTTTTTCCCCCAGTTAACCGTATTCCA

SEQ ID NO: 20440 - protein, 42 aa, Streptococcus agalactiae
MGIYQARKVLALPRVVFTFMKGKIYQMGKVSVYFFPPVNRIP

SEQ ID NO: 20441 - protein, 219 aa, Streptococcus agalactiae
ATGACATTATTAGAAAAAATTAATGAGACTAGAGACTTTTTGCAAGCAAAAGGCGTCACAGCACCAGAATTTGGCCTTATTTTAGGCTCTGGTTTAGGAGAATTAGCTGAAGAAATCGAAAATCCCATTGTTGTGGATTATGCAGACATCCCAAATTGGGGACAGTCAACAGTAGTTGGTCATGCTGGAAAATTAGTGTATGGGGATTTATCAGGCCCG

SEQ ID NO: 20442 - protein, 73 aa, Streptococcus agalactiae
MTLLEKINETRDFLQAKGVTAPEFGLILGSGLGELAEEIENPIVVDYADIPNWGQSTVVGHAGKLVYGDLSGP

SEQ ID NO: 20443 - protein, 195 aa, Streptococcus agalactiae
TTGGAATCTTCTAGCGTTACAGATGAAGAAATGATTGATGCGATGATACAAGATCCTATTCTTATTAATCGTCCCATAGTTGTTACGAGTAAAGGTGCAAAACTCTGCCGACCCTGTGAAGCAATTTTAACCATTTTACCTGTAAAGATGGAAAAAGATTTTGTTAAAGAAGATGGACAGATTATCCAAAGTTTA

SEQ ID NO: 20444 - protein, 65 aa, Streptococcus agalactiae
MESSSVTDEEMIDAMIQDPILINRPIVVTSKGAKLCRPCEAILTILPVKMEKDFVKEDGQIIQSL

SEQ ID NO: 20445 - protein, 786 aa, Streptococcus agalactiae
ATGGCATTTTTTAATATTGAATATCACTCTAAGGTACTAGGAACGGAACGTCAAGTCAATGTTATTTACCCAGATGCTTTTGAGATGTCTGATGATAAAATTGATGATTGTGACATTCCTGTTTTATATCTTCTTCATGGAATGGGGGGAAATGAGAATTCTTGGCAAAAACGCACAAATATAGAGCGTCTTTTACGTCATACTAATCTTATCGTCGTGATGCCATCAACAGACTTAGCATGGTATACCAACACAAAGTATGGGTTGGATTATTTTGATGCAATAGCTATCGAGTTACCAAAAGTTTTGAAACGTTTCTTTCCTAATATGTCTGATAAGAGAGAGAAAAATTTCATTGCCGGATTATCTATGGGGGGATATGGAGCATATAAAATAGCTCTACTGACTAATCGTTTTTCTCATGCTGCCTCTTTGTCAGGTGCACTTTCTTTTGACTTTGATTTATTATTCAATAATGGCAACGATAACACTAACTATTGGTCGGGAATTTTTGGTGATTTGAATAACACTGATAACATAGAGCGTCATTCACTAAGGCGTTACGTTGAGTCTTTTGATATGAAGACTAAATTTTATGCATGGTGTGGTTATGAAGATTTTCTTTTTGAAGCTAATGAAGTCGCAATTGATGAACTTCGTCAATTAGGTTTAACTATTGACTATTCCAATGATCATGGTAAACATGAATGGTATTACTGGAATCAACAATTAGAAAAAGTCTTAGAATGGCTCCCTATTGATTATGTCAAAGAAGAGCGCCTTTCG

SEQ ID NO: 20446 - protein, 262 aa, Streptococcus agalactiae
MAFFNIEYHSKVLGTERQVNVIYPDAFEMSDDKIDDCDIPVLYLLHGMGGNENSWQKRTNIERLLRHTNLIVVMPSTDLAWYTNTKYGLDYFDAIAIELPKVLKRFFPNMSDKREKNFIAGLSMGGYGAYKIALLTNRFSHAASLSGALSFDFDLLFNNGNDNTNYWSGIFGDLNNTDNIERHSLRRYVESFDMKTKFYAWCGYEDFLFEANEVAIDELRQLGLTIDYSNDHGKHEWYYWNQQLEKVLEWLPIDYVKEERLS

SEQ ID NO: 20447 - protein, 1279 aa, Streptococcus agalactiae
GATTCAAGATGCTGATTCGTTCTTTAAAACGACTCATTCAATTCCAGAGTCATGGGAATGTTATGGGACAAAAGAGGGAAATATCGTTTACACAGGTGACTTTAAATTTGATCAAGCTGCAAGGAAATATTACCAAACAGATCTGGCGCGTTTAGCTGAAATTGGTCGTGATGGTGTTTTAGCACTTTTATCAGATTCTGCAAATGCTACAAGCAATGAGCAAGTTGCTAGCGAATATGAGGTCGGTGATGAAATTAAGAGCGTTATTGAAGACGCAGAAGGTAGAGTCATCGTAGCAGCAGTTGCAAGTAATCTCATTCGTATTCAACAGGTCTTTGATGCAGCGGCAGAAAACGGTCGTCGAGTAGTTTTAACGGGTTTTGATATTGAAAATATTGTTCGTACGGCCATTCGTATGAAACGCATTCATATTGCTGATGAAAATATGATTATCAAACCTAAAGATATGACACGTTACGAAGATAACGAATTATTAATCCTTGAAACTGGACGTATGGGAGAGCCGATAAATGGTCTCCAAAAAATGGCGATCGGACGTCATCGTTATGTTCAAATTAAAGATGGTGATTTAGTATTTATCGTAACAACACCAAGTATTGCAAAAGAGGCAGTTGTAGCGCGTGTTGAAAATCTGATTTATAAAGCTGGTGGCTCAGTTAAATTGATAACACAGAATTTGCGCGTATCAGGTCATGCAAATGGTCGCGAATTACAATTATTAATGAATCTATTGAAACCTAAATACCTTTTCCCAATTCAAGGAGAGTATAGGGATTTGTCAGCACATGCGGGCTTAGCTCAAGAGGTAGGAATGTCAGCAGATGATATTTATATTGTGAAGCGTGGTGACATCATGGTTCTTGAAAAAGATGGCTTCTTCCATAGTGGGTCTGTTCCTGCTGGAGATATTATGATTGATGGAAATGCTATTGGTGACGTTGGTAATATTGTACTTCGTGACCGCAAGGTATTATCTGAAGATGGAATTTTTATTGTTGTTATAACTGTCAGCAAAAAAGAAAAGAAAATTATTTCTAAAGCTCGTGTTAATACGCGTGGTTTTGTGTATGTGAAAAAAAGCAGAGATATTTTGCGTGAGAGCGCAGAATTAGTTAATACAACGGTAGAAGATTACTTAAGTAAAGATACATTTGACTGGGGTGAACTTAAAGGGAAAGTGCGTGATGAGGTCAGCAAGTTCTTATTTGACCAAACGAAACGTCGCCCAGCAATCCTTCCTGTGGTTATGGAAGTTCGT

SEQ ID NO: 20448 - protein, 429 aa, Streptococcus agalactiae
  VARIANT 24: Xaa = Any Amino Acid
MNSRCVISFFKTTHSIPESMGIVXGTKEGNIVYTGDFKFDQAARKYYQTDLARLAEIGRDGVLALLSDSANATSNEQVASEYEVGDEIKSVIEDAEGRVIVAAVASNLIRIQQVFDAAAENGRRVVLTGFDIENIVRTAIRMKRIHIADENMIIKPKDMTRYEDNELLILETGRMGEPINGLQKMAIGRHRYVQIKDGDLVFIVTTPSIAKEAVVARVENLIYKAGGSVKLITQNLRVSGHANGRELQLLMNLLKPKYLFPIQGEYRDLSAHAGLAQEVGMSADDIYIVKRGDIMVLEKDGFFHSGSVPAGDIMIDGNAIGDVGNIVLRDRKVLSEDGIFIVVITVSKKEKKIISKARVNTRGFVYVKKSRDILRESAELVNTTVEDYLSKDTFDWGELKGKVRDEVSKFLFDQTKRRPAILPVVMEVR

SEQ ID NO: 20449 - protein, 987 aa, Streptococcus agalactiae
ATGAGCGACATAAAAATCATGGCTCTTGGAGGTGTTCGTGAAAACGGAAAAAACCTATATGTAGTAGAAGTCAATGATTCTATCTTTGTTTTGGATGCTGGACTCAAATATCCTGAAAATGAACAACTGGGTGTTGATGTTGTTATTCCAAATCTTGATTACTTAATTGAAAATAAAAAACGTGTTCAGGGGATTTTCTTAACCCATGGACATGCGGATGCTATTGGTGCATTGCCTTATATTATCGCCGAAGTCAAAGCACCTGTGTTTGGCTCACCTCTCACAATTGAATTAGCTAAGTTATTCGTTAAAAATAGTACAGCAGTCAAGAAATTCAATAATTTCCATGTGATTGATAGTGAAACGGAAATTGAATTTCAAGATGCGGTGATTTCGTTCTTTAAAACGACTCATTCAATTCCAGAGTCAATGGGAATTGTTATTGGGACAAAAGAGGGAAATATCGTTTACACAGGTGACTTTAAATTTGATCAAGCTGCAAGGAAATATTACCAAACAGATCTGGCGCGTTTAGCTGAAATTGGTCGTGATGGTGTTTTAGCACTTTTATCAGATTCTGCAAATGCTACAAGCAATGAGCAAGTTGCTAGCGAATATGAGGTCGGTGATGAAATTAAGAGCGTTATTGAAGACGCAGAAGGTAGAGTCATCGTAGCAGCAGTTGCAAGTAATCTCATTCGTATTCAACAGGTCTTTGATGCAGCGGCAGAAAACGGTCGTCGAGTAGTTTTAACGGGTTTTGATATTGAAAATATTGTTCGTACGGCCATTCGTATGAAACGCATTCATATTGCTGATGAAAATATGATTATCAAACTAAAGATATGACACGTTACGAAGATAACGAATTATTATCCTGAAACTGGAAACGTATGGGGGGAGGAAGCCCGAATTAAAATGGTTTCTCCCAAAAAAATGGGGCGATCGGGGACGTCATTTCGTTATGTTCAAATTAAAGATNNNNNT

SEQ ID NO: 20450 - protein, 331 aa, Streptococcus agalactiae
  VARIANT 295, 330, 331: Xaa = Any Amino Acid
MSDIKIMALGGVRENGKNLYVVEVNDSIFVLDAGLKYPENEQLGVDVVIPNLDYLIENKKRVQGIFLTHGHADAIGALPYIIAEVKAPVFGSPLTIELAKLFVKNSTAVKKFNNFHVIDSETEIEFQDAVISFFKTTHSIPESMGIVIGTKEGNIVYTGDFKFDQAARKYYQTDLARLAEIGRDGVLALLSDSANATSNEQVASEYEVGDEIKSVIEDAEGRVIVAAVASNLIRIQQVFDAAAENGRRVVLTGFDIENIVRTAIRMKRIHIADENMIIKPKDMTRYEDNELLILXKPGNVWGEEARIKMVSPKKMGRSGTSFRYVQIKDXX

SEQ ID NO: 20451 - protein, 758 aa, Streptococcus agalactiae
ATGGTGATGAAAATCATAGAGTTAAAAGAAGCAACCGTACAAGTCAGTAATGGTTTAGCAGAAATGAAAACGATATTAGATCATGTTAATTTGAGTATTTATGAACATGACTTCATTACAATATTGGGTGGAAATGGAGCTGGAAAATCAACGCTTTTTAATGTAATTGCAGGTACCTTGATGTTAAGCAGTGGAAATATTTACATCATGGGACAAGATGTTACTAATTTACCAGCAGAAAAACGAGCTAAATATTTATCACGGGTATTTCAAGATCCGAAAATGGGAACAGCACCTAGGATGACAGTTGCTGAAAATTTATTAGTTGCTAAATTTCGAGGTGAAAAGAGACCGTTAGTTCCTAGAAAGATTATTAACTATACCGAAGATTTCAAAAATTGATTGCTAAAACTGGTAATGGACTTGATCGCCATTTAGAGACACCTACAGGTTTATTATCGGGTGGACAAAGACAAGCGCTTAGTTTATTAATGGCAACTTTGAAAAAACCAAATCTGTTATTATTGGACGAACACACAGCAGCGCTTGATCCTAGAACAAGTGTTTCGCTTATGGGCTTGACTGATGAGTTTATCAAACAAGATTCGTTGACTGCCTTAATGATTACACATCATATGGAAGATGCTCTCAAATATGGAAATCGTGTATTAGTAATGAAAGATGGCAAGATTGTCAGAGATTTAAATCAGGCACAAAAAAACAAGATGGCTATAGCTGACTATTATCAATTATTTGAT

SEQ ID NO: 20452 - protein, 253 aa, Streptococcus agalactiae
MVMKIIELKEATVQVSNGLAEMKTILDHVNLSIYEHDFITILGGNGAGKSTLFNVIAGTLMLSSGNIYIMGQDVTNLPAEKRAKYLSRVFQDPKMGTAPRMTVAENLLVAKFRGEKRPLVPRKIINYTEEFQKLIAKTGNGLDRHLETPTGLLSGGQRQALSLLMATLKKPNLLLLDEHTAALDPRTSVSLMGLTDEFIKQDSLTALMITHHMEDALKYGNRVLVMKDGKIVRDLNQAQKNKMAIADYYQLFD

SEQ ID NO: 20453 - protein, 861 aa, Streptococcus agalactiae
ATGATTATTTCATCAGTTTCACAAGGTTTATTATGGGGGATATTAGGATTAGGGATATACTTAACCTTTAGAATCTTAAAATTTCCAGACATGACAACAGAGGGCTCCTTCCCTCTAGGGGGAGCGGTTTGTGTTACCTTAATGAATCAAGGGGTTAATCCTATTTTGGCGACGATTCTAGGCATGCTATCAGGGATGTTAGCAGGATTTGTTACTGGTTTACTTTATACTAAAGGAAAGATACCGACGATTTTAGCAGGAATTTTAGTAATGACCTCATGCCACTCCATTATGCTAATGGTTATGAAAAGAGCAAATCTAGGTTTAAATGAGATTCAAACATTGAAAGATTTTCTTCCGTTTTCAAATGATTTAAATCTTCTCGTATTAGGTTTGATAGCTATTCTCTTGGTGATTTCTGCCTTAATTTATTTTCTCTACACACGCTTGGGGCAAGCTTATATTGCAACAGGAGACAACCCTGATATGGCAAAGAGCTTCGGCATTGATACCGACAAAATGGAAATGCTTGGCTTAATTGTATCAAATGGCTTAATTGCTTTATCAGGAGCTTTAGTAAGTCAACAAGATGGATATGCTGATGTATCAAAAGGTATAGGTGTTATTGTTATTGGGTTAGCTAGTATTATTATTGGAGAGGTACTTTACTCTACTGGTTTAACTCTCTTTGAACGTTTAATTGCTATAGTGGTGGGTTCTATTCTTTATCAATTTTTAATAACGGCAGTAATCGCCTTAGGATTTAATACGAATTACCTAAAATTATTTAGTGCAATAGTGCTTGGAATTTGTTTAATGGTTCCTGTCCTAAAAACGAAGATTTTGAAAGGAGTACGCTTA

SEQ ID NO: 20454 - protein, 287 aa, Streptococcus agalactiae; identical to SEQ ID NO: 2212

SEQ ID NO: 20455 - protein, 1001 aa, Streptococcus agalactiae
ATGAAAAATAAAGGACTGATAGCTACGCTAATTCTATTGACTATATTAGTGGTGGAGAATTATTTTATAACAAATCAGAAAAACGTCTTAATTTATCAGAAAAGCAAGTTGTTAAAATTGGTATTTTACAGTATGTAACCCATGATGCTTTGGATGCTATTGAAAAGGGAGTTGAAGATGGTCTAGCTCGAGAAGGATATAAAGGGAAAAAAGTTAAATTAACCGTTTTAAACGCCGAGGCTGATCAAAGTAAAATTCAAGCGATGAGTAAACAATTAGTTAATCATCACAATGACATTTTGATTGGAATTGCGACACCATCAGCACAAGGTTTAGCAGCTTCGACTAAGGATACTCCTATAATCATGGGAGCTGTTTCTGATCCTTTAGGGGCCAAGTTAGTAACGAATATGAAGAAACCAACAACTAATGTTACAGGATTATCAAATGTTGTTCCGACCAAGCAAACTGTGCAATTAATCAAGGATATAACTCCCAATGTTAAACGTATAGGAATTCTTTATGCTAGTAGCGAAGATAATTCTGTGTCACAAGTAACTGAGTTTACAAAATATGCTCAAAAAGCAGGGCTAGAAGTTCTTAAATATTCTGTACCATCTACAAATGAAATTAAGACAAGTATGTCAGTCATGACCAAAAAAGTAGACGCTGTCTTTGTTCCACAAGATAATACTATTGCGAGTGCTTTTAGAACAGTTATCGTAGCAGCAAACCAAGCTAATATACCTGTGTATTCCAGTGTTGATACTATGGTTGAACAAGGAAGTATAGCATCAGTAGCGCAGAGTCAATATGGCTTAGGGTTAGAAACTGCAAAACAGGCCATTAAAGTCCTAAGAGGGAAGCCAGTTAAAGATGTACCAGTCAAAGTTATTGATACAGGGAAGCCAAGCCTCAATTTGAAAGCAGCCAAACACTTAGGAATTAAAATTCCTAAGAAGATTATGAAACAGGCAGAAATTACCGTTAAGGTTGACGAT

SEQ ID NO: 20456 - protein, 334 aa, Streptococcus agalactiae
MKNKGLIATLILLTILVVGELFYNKSEKRLNLSEKQVVKIGILQYVTHDALDAIEKGVEDGLAREGYKGKKVKLTVLNAEADQSKIQAMSKQLVNHHNDILIGIATPSAQGLAASTKDTPIIMGAVSDPLGAKLVTNMKKPTTNVTGLSNVVPTKQTVQLIKDITPNVKRIGILYASSEDNSVSQVTEFTKYAQKAGLEVLKYSVPSTNEIKTSMSVMTKKVDAVFVPQDNTIASAFRTVIVAANQANIPVYSSVDTMVEQGSIASVAQSQYGLGLETAKQAIKVLRGKPVKDVPVKVIDTGKPSLNLKAAKHLGIKIPKKIMKQAEITVKVDD

SEQ ID NO: 20457 - protein, 1653 aa, Streptococcus agalactiae
ATGTCTTTTGATGGATTTTTTTTACATCACCTCACAAATGAATTACAAGAACAGATTGAAAAAGGACGTATCCAAAAAGTTAACCAACCTTTTGACCATGAATTGGTATTAACAATACGCAATAATCGTCGCAACTATAAACTACTCCTATCTGCTCATCCTGTATTTGGACGTATCCAAACTACCGAAGCAAATTTCCAAAATCCTCAAAATCCAAATACTTTTACAATGATCATGAGAAAGTATTTGCAAGGTGCAGTGATTGAAACCATTCAACAAATTGAAAATGACCGTATATTAGAAATCGTCGTGTCTAATAAAAACGAAATCGGTGATCACATTAAAGCGACACTTGTTGTTGAAATCATGGGAAAACACAGTAACATTATCTTGATTGATAAAAATGAACATAAAATTATTGAATCAATTAAGCATGTTGGTTTCTCGCAAAACTCCTATCGTACTATCCTTCCTGGTTCGACTTACATTGCCCCACCCAAAACAAAAGCAATCAATCCTTTTGATATTTCTGATCAAACTCTATTTGAGCTGCTTCAAACCAATGATCTAAGCCCTAAAAACCTCCAACAACTCTTCCAAGGTTTAGGACGCGATACTGCGCTAGAATTATCTCACTGTTTGAAAGACAATAAACTTAACGATTTTCGTCAATTCTTTTCGAGAGAATATTATCCTAGCCTAACAGAAAAATCCTTTTCCGCTGTCCAATTCTCAAGCAGTCACGAAACATTTCAGTCTCTTGGACAATTGTTAGATTATTACTACCAAGAGAAGGCTGAAAAAGATCGCATAGCACAGCAAGCTAGTGACCTCATTCACCGTGTTCAAAGTGAGTTAGAGAAAAATATCAAAAAACTAGCTAAGCAACAAGACGAACTTCTAGCTACTGAAAATGCAGAGGAATTTCGCCAAAAAGGAGAGCTTCTAACTACCTATCTCTCTATAGTACCAAATAATCAAGATATCGTTGTTCTTGATAATTATTACACCAACCAAACGATTGAAATTTCACTTGATCGAGCTTTAACACCCAACCAAAATGCCCAACGCTACTTTAAAAAATATCAAAAATTAAAAGAAGCTGTAAAACATTTAAAAGGAATTATTTCAGATACGAAAAATACAATCACCTACCTTGAATCTGTTGAAACATCGCTAAATCATGCTTCTATGGAAGATATCAATGATATTCGTGAAGAACTTGTTGAAACTGGATTTATTAAGCGACGCGCACATGATAAACAACATAAGCGCAAAAAACCTGAACAATATTTAGCATCCGATGGCAAGACTATTATTATGGTGGGACGTAATAATCTCCAAAATGACGAGTTAACATTTAAAATGGCTCGTAAAGGGGAGTTGTGGTTTCATGCCAAGGATATCCCCGGAAGTCATGTGTTAATTCGGGATAACCTCAATCCAAGTGACGTGGTTAAGACAGATGCCGCCGAGTTAGCTGCTTATTACTCTAAAGCTCGTCTCTCCAATCTTGTTCAAGTAGACATGATTGAAGCAAAAAAACTCAATAAACCAAGTGGTACTAAGCCAGGTTTTGTAACTTACACTGGTCAAAAAACCTTACGAGTCACTCCCACACAAGAAAAAATAGATAGCCTTAAACTAAAAAAA

SEQ ID NO: 20458 - protein, 551 aa, Streptococcus agalactiae
MSFDGFFLHHLTNELQEQIEKGRIQKVNQPFDHELVLTIRNNRRNYKLLLSAHPVFGRIQTTEANFQNPQNPNTFTMIMRKYLQGAVIETIQQIENDRILEIVVSNKNEIGDHIKATLVVEIMGKHSNIILIDKNEHKIIESIKHVGFSQNSYRTILPGSTYIAPPKTKAINPFDISDQTLFELLQTNDLSPKNLQQLFQGLGRDTALELSHCLKDNKLNDFRQFFSREYYPSLTEKSFSAVQFSSSHETFQSLGQLLDYYYQEKAEKDRIAQQASDLIHRVQSELEKNIKKLAKQQDELLATENAEEFRQKGELLTTYLSIVPNNQDIVVLDNYYTNQTIEISLDRALTPNQNAQRYFKKYQKLKEAVKHLKGIISDTKNTITYLESVETSLNHASMEDINDIREELVETGFIKRRAHDKQHKRKKPEQYLASDGKTIIMVGRNNLQNDELTFKMARKGELWFHAKDIPGSHVLIRDNLNPSDVVKTDAAELAAYYSKARLSNLVQVDMIEAKKLNKPSGTKPGFVTYTGQKTLRVTPTQEKIDSLKLKK

SEQ ID NO: 20459 - protein, 717 aa, Streptococcus agalactiae
ATGTCAGAAACAGTTAAATTATTTCAATACAGTACCTTGAGTTCACTGATGGCAGGATTGTACAAAGGCAGTCTAACTATCGGAGAATTATTAACTCACGGTGACTTAGGAATCGGTACTGTTCATATGATTGATGGTGAATTGATTGTATTGGATGGGAAAGCTTATCAAGCTATTGGTACAGATGGTAAAGCAGAGATTATCCAATTATCAGATGATGTGACAGTACCCTATGCAGCGGTTTTACCACACCATATCCAAAAACAATTTGATATCAATGCTGAGATAGATAATAAGGATTTGGAAGAGATGATTCTAAAAAACTTTGAAGGTCAAAATCTCTTTAAGTCTTTAAAAATCAAAGGAACGTTTTCAAGAATGCACGTTCGTATGATTCCAAAATCTCCACAACATAAACGTTTTGCAGATATTGCATCTAATCAACCAGAATTTACCAGAGAGAATGTATCTGGTACGTTGGTTGGGATTTGGACGCCGGAATTATTTCATGGTGTGGGGGTAAAAGGGTTCCATGTCCACTTTATTTCAGACGATTTAACTTTCGGTGGGCATGTTATGGATTACTCGCTCACACAAGGAAAAGTTGAAATTGGGAAGGTTGACCAACTTGACCAATGTTTCCCAACTCAAGATCAAGAATTTTTGGAAGCTAACTTTGACCTACAAAAGCTTAGAGAAGATATTGATTTAAGTGAA

SEQ ID NO: 20460 - protein, 239 aa, Streptococcus agalactiae
MSETVKLFQYSTLSSLMAGLYKGSLTIGELLTHGDLGIGTVHMIDGELIVLDGKAYQAIGTDGKAEIIQLSDDVTVPYAAVLPHHIQKQFDINAEIDNKDLEEMILKNFEGQNLFKSLKIKGTFSRMHVRMIPKSPQHKRFADIASNQPEFTRENVSGTLVGIWTPELFHGVGVKGFHVHFISDDLTFGGHVMDYSLTQGKVEIGKVDQLDQCFPTQDQEFLEANFDLQKLREDIDLSE

SEQ ID NO: 20461 - protein, 1679 aa, Streptococcus agalactiae
ATGACAGAATCACATAATCAATATGGGGCTGACTTAATTGTCGATAGCCTCATTAATCATGATGTCAAATATGTTTTTGGTATCCCAGGAGCTAAGATTGACCGCGTATTTGACACTCTAGAAGATAAAGGTCCAGAGTTAATTGTTGCTCGTCATGAGCAGAACGCGACTTTTATGGCTCAGGCTGTCGGGCGTATTACGGGAGAACCAGGAGTTGTTATTGCAACTAGTGGACCTGGGATCTCGAACTTGGCAACAGGGTTAGTTACTGCGACAGATGAAGGTGATGCTGTTCTTGCAATTGGTGGACAGGTTAAGCGAGGAGATTTATTGAAACGTGCTCATCAATCAATGAATAACGTTGCTATGCTAGAACCTATTACAAAATATTCTGCTGAGGTTCATGACCCTAATACTTTGTCAGAAACTGTTGCAAACGCCTATCGTCTTGCTAAATCTGGTAAACCAGGAGCAAGTTTTATCTCTATTCCTCAAGACGTTACAGACAGTCCAGTCTCAGTAAAAGCAATCAAACCTCTTAGTGCACCTAAATTGGGTTCGGCATCTGTTTTAGATATTAATTATTTAGCGCAGGCTATTAACAATGCTGTTTTACCGGTACTGTTATTAGGAAATGGCGCATCTTCAGAGGGAGTAACTGCTGCCGTACGTCGACTTCTTGATGCTGTTAAACTACCAGTAGTAGAAACTTTCCAAGGTGCGGGTATTGTGTCACGTGAGCTCGAGGATGAAACATTCTTTGGTCGTGTAGGCCTCTTCCGTAATCAACCTGGAGATATGCTTTTGAAGCGTGCAGATCTAGTTATTGCTATTGGGTATGACCCTATTGAATATGAGGCGCGTAACTGGAATGCTGAAATTTCTGCTCGTATTATTGTTATTGACGTTGAACAAGCAGAAATTGATACGTATTTCCAACCCGAGCGAGAACTGATTGGAGACATGGCACATACACTTGATTTACTTTTACCAGCTATTAAAGGATATGAATTGCCAGAAGGTTCAAAAGAGTATTTGAAAGGTCTTCGTAATAACATTGAAAACGTTAGCGATGTTAAATTTGATCGTGACTCAGCTCATGGACTTGTTCATCCTCTTGATCTCATTGATGTACTCCAAGAAAATACCACCGATGACATGACTGTTACAGTTGATGTGGGAAGCCATTATATTTGGATGGCTCGCTACTTTAAATCATATGAAGCACGTCACTTGCTCTTCTCAAACGGAATGCAAACATTAGGAGTTGCTCTACCTTGGGCAATTTCTGCGGCTCTTTTGCGTCCCAACACAAAAGTTATTTCCGTTTCTGGTGATGGTGGCTTCTTATTCTCAGCTCAAGAGTTAGAAACTGCAGTTCGTCTTCATCTACCAATTGTTCACATTATTTGGAACGATGGAAAATATAACATGGTTGAATTCCAGGAAGAAATGAAGTATGGGCGTTCTTCAGGTGTTGACTTTGGACCAGTTGATTTTGTAAAATACGCTGAAAGTTTCGGTGCTAAAGGTTACCGTGTAGACAGCAAAGACAGTTTGAAGAAACACTCAAACAAGCTCTAATCGATGCTGAAAATGGACCAGTGTTGATTGATGTGCCTATTGACTATAAAGATAACGTGACACTAGGTGAAACAATCTTACCTGACGAGTTCTAC

SEQ ID NO: 20462 - protein, 560 aa, Streptococcus agalactiae; identical to SEQ ID NO: 6874

SEQ ID NO: 20463 - protein, 1224 aa, Streptococcus agalactiae
ATGTTGAATAGTGAAAAAATGATTGTTTCTATCCAAAATCAGGATTTAGAACATGCTAACAAGTATTTCGAAAAAGCGTTGAAAAATGATCCTGAGGAAGTCTTATTGGAACTAGGAGCTTATTTGGAGAGTATTGGTTTTTTACCCCAAGCAAAACGTCTCTATGATCAAATCCGACCAAATTATCCAGAAGTTGCTATCAATTTAGCTCAAATTGTTGCCGAAGATGGAGATATTGAACAAGCATTCTTATACTTAGATTATATCTCAGAAGATAGTCAAGAGTATGTTTCAGCACTCCTTGTTATGGCTGACTTATATGATATGGAAGGCTTGACTGATGTTGCGCGTGAAAAGCTTTTGCTAGCCAGCAAACTTAGCGATGCCCCATTGGTTACATTTGGTTTAGCTGAAATGAACCTTAGTTTGGAACATTATCAAGAAGCGATAGAAGGATATGCTTCACTTGATAATCGAGAAATCTTAGAAACGACTGGGGTTTCAACTTATCAGCGTATTGGTAAATCCTACGCTATTATGGGGAAATTTGATGCAGCTATCGAATTTTTAGAAAAAGCCGTTGACATTGAGTATGATGATTTAACAGTTTTTGAGTTAGCAACAATCCTTTATGATCAAGAAGAATATCAAAAAGCTAACCTTTATTTTAAACAGTTGGATACTATTAATCCAGACTTTGATGGCTATGAATATATCTATGGTTTATCTCTTCGTGAGGAGCATAAATCTGAAGAAGCTTTACGTCTAGTTCAGCAAGGTCTTCGTAAAAATAGTTTTGATGGTCAACTTCTCTTACTAGCCTCACAATTATCGTATGAATTACATGATGTTCCTTCGTCGGAGTCTTATTTGAAACAAGCTGAAAAAGTTTCTGAAAACCAAGATGAAATTGTTATGAGATTGTCAAATTTGTATCTTGAAGAAGAGCGGTTTGAGGAAGTCTTGGAATTAGACAATGATGATTTAGAAAATATCCTTGCAAAATGGAATATCGCTAAAGCACACAAGGCTTTAGAAATGGATGATAGTGTAGACTATTATCAATCTTTATATAATGATTTAAAAGATAATCCAGAATTTTTACAAGATTATGCTTACATTTTGAGAGAATTTGGTTACCTTGATAAGGCACAAGAAGTAGGAAAGGTTTATTTAAAATTAGTTCCAGATGATATAGAGATGTCAGAATGGGTGAATAACATT

SEQ ID NO: 20464 - protein, 408 aa, Streptococcus agalactiae
MLNSEKMIVSIQNQDLEHANKYFEKALKNDPEEVLLELGAYLESIGFLPQAKRLYDQIRPNYPEVAINLAQIVAEDGDIEQAFLYLDYISEDSQEYVSALLVMADLYDMEGLTDVAREKLLLASKLSDAPLVTFGLAEMNLSLEHYQEAIEGYASLDNREILETTGVSTYQRIGKSYAIMGKFDAAIEFLEKAVDIEYDDLTVFELATILYDQEEYQKANLYFKQLDTINPDFDGYEYIYGLSLREEHKSEEALRLVQQGLRKNSFDGQLLLLASQLSYELHDVPSSESYLKQAEKVSENQDEIVMRLSNLYLEEERFEEVLELDNDDLENILAKWNIAKAHKALEMDDSVDYYQSLYNDLKDNPEFLQDYAYILREFGYLDKAQEVGKVYLKLVPDDIEMSEWVNNI

SEQ ID NO: 20465 - protein, 1188 aa, Streptococcus agalactiae
ATGAATCGACCATCAGAAAAAGAATTTAAAAATAGTTTGTTTTTTAAATGGATCTTAAATAATCAAGCAGTTATTGCTCTCATGATTACCTTTTTGGTATTTTTAACGATTTTTATTTTTACCAAAATCTCTTTTATGTTTAAACCTGTGTTTGATTTTCTTGCTGTGCTGATATTGCCGCTTGTAATTTCTGGCTTGCTTTATTACCTATTAAAACCTATGGTTACATTTTTAGAGAAGCGGGGAATTAAGCGTGTAACAGCGATATTATCAGTTTTTACTATTATAATCCTTCTGTTAATTTGGGCAATGTCTAGTTTTATTCCCATGATGAGTAATCAATTACGCCATTTTATGGAAGATCTCCCTTCATATGTGAATAAAGTGCAAATGGAAACAAGTTCGTTTATAGATCACAACCCTTGGTTAAAATCTTATAAAGGGGAAATATCGAGCATGTTATCTAATATCAGTAGCCAAGCGGTCTCTTATGCTGAAAAATTTTCAAAGAATGTTTTAGATTGGGCAGGAAATTTAGCTAGTACAGTTGCACGTGTGACAGTAGCAACAATTATGGCTCCCTTTATTTTGTTTTATCTTTTAAGAGATAGCCGCAACATGAAGAATGGTTTCTTAATGGTTTTACCAACCAAACTACGCCAACCAACTGACCGTATTTTGCGAGAAATGAATAGTCAAATGTCAGGGTATGTGCAAGGACAAATCATTGTTGCTATTACTGTTGGTGTCATTTTTTCAATAATGTATAGTATTATAGGCCTTAGATATGGCGTGACATTAGGGATCATTGCCGGTGTGTTAAATATGGTTCCCTATTTGGGAAGTTTTGTCGCCCAAATTCCAGTGTTTATCTTAGCGCTTGTCGCAGGACCTGTTATGGTTGTTAAAGTTGCGATTGTTTTTGTTATTGAGCAAACTCTAGAGGGACGCTTTGTCTCACCCTTGGTTTTAGGTAATAAACTTAGCATTCATCCAATTACAATTATGTTTATTTTATTAACCTCTGGAGCGATGTTTGGTGTTTGGGGAGTATTCCTCAGTATTCCGATTTATGCATCTATCAAAGTCGTTGTTAAAGAATTGTTTGATTGGTACAAAGCTGTCAGTGGGCTATATACAGTAGATGTTGTTACTGAAGAAAGAAGTGAAGAAGTTAAAAATGTTGAA

SEQ ID NO: 20466 - protein, 396 aa, Streptococcus agalactiae
MNRPSEKEFKNSLFFKWILNNQAVIALMITFLVFLTIFIFTKISFMFKPVFDFLAVLILPLVISGLLYYLLKPMVTFLEKRGIKRVTAILSVFTIIILLLIWAMSSFIPMMSNQLRHFMEDLPSYVNKVQMETSSFIDHNPWLKSYKGEISSMLSNISSQAVSYAEKFSKNVLDWAGNLASTVARVTVATIMAPFILFYLLRDSRNMKNGFLMVLPTKLRQPTDRILREMNSQMSGYVQGQIIVAITVGVIFSIMYSIIGLRYGVTLGIIAGVLNMVPYLGSFVAQIPVFILALVAGPVMVVKVAIVFVIEQTLEGRFVSPLVLGNKLSIHPITIMFILLTSGAMFGVWGVFLSIPIYASIKVVVKELFDWYKAVSGLYTVDVVTEERSEEVKNVE

SEQ ID NO: 20467 - protein, 480 aa, Streptococcus agalactiae
TTGAAAAGACGGTTAATTTTTATGAAAAATAGAGATTTTAGGGTTAGAGAACAGCTCGAAACATTCGGAGTCAGAGTTTCTGCTTTAATCATAGAAAATCAAAAACTGCTATTAATATATGCTCCTCATCTCGATAAATACTATTTGCCAGGTGGGGCGCTTCAAGTTGGAGAAGATAGCAATAAGGCTGTTGCGAGAGAAGTACTTGAGGAAATAGGTCTTCACAGCCAGGTTGGTGATTTAGCCTATATTGTTGAGAATCAGTTTAATATTAAGAGACATCATTACCACTCAGTTGAATTTTTATATTTTGTTAATCTCTTGGGTCAGGCGCCAGAATCTATCAAAGAAGGAACGCATAAGCGACATTTTGTATGGCTTCCAATAAAAGAATTAACAAAAATTGATTGTAATCCTAATTTTTTAGCACAGGATTTGATAGAATGGCCAGGTCATGTTGTGCATAAAATCGTTCAAAAT

SEQ ID NO: 20468 - protein, 160 aa, Streptococcus agalactiae
MKRRLIFMKNRDFRVREQLETFGVRVSALIIENQKLLLIYAPHLDKYYLPGGALQVGEDSNKAVAREVLEEIGLHSQVGDLAYIVENQFNIKRHHYHSVEFLYFVNLLGQAPESIKEGTHKRHFVWLPIKELTKIDCNPNFLAQDLIEWPGHVVHKIVQN

SEQ ID NO: 20469 - protein, 480 aa, Streptococcus agalactiae
ATGACTAAATTAGCAACAATTTGTTACATTGACAATGGCAAGGAATTACTTCTATTGCACCGCAACAAAAAAGAGAATGATGTTCATGAGGGAAAGTGGATCTCGGTAGGCGGTAAACTGGAGGCAGGTGAAACTCCTGATGAATGTGCTAAGCGTGAAATTCTAGAAGAAACCCATTTAACAGTAAAAAAAATGGATTTTAAAGGAGTCATCACTTTTCCTGAATTTACGCCAGGTCATGATTGGTATACCTATGTCTTTAAAGTAACAGATTATGAAGGAGAGTTAATTTCAGATGATGAATCACGAGAAGGAACCTTAGAATGGGTACCATATGATCAAGTTCTCTCTAAGCCAACGTGGCAAGGAGATTACGAAATTTTTAAATGGATTTTAGAAGATGTTCCTTTCTTTTCTGCTAAGTTTGTTTATGATGAACACCAAAATTTAATTGAAAAGACGGTTAATTTTTATGAAAAA

SEQ ID NO: 20470 - protein, 160 aa, Streptococcus agalactiae; identical to SEQ ID NO: 2228

SEQ ID NO: 20471 - protein, 3243 aa, Streptococcus agalactiae
ATGGAAATCAAAAAGAAACATCGTATTATGCTTTATTCAGCCCTTATTTTAGGAACAATATTGGTTAACAATAGTTACCAAGCTAAAGCTGAAGAGTTTACCAAAACTACCTCAACGTCACAAATAAGAGATACTCAAACCAATAATGTTGAAGTTCCCCAAACTGAAAGTACCACTGTCAAAGGGACTAGCACCACAACCACACAACAAGATCTGTCTAACTCCACAGCTTCAACCGCAACTGCAACAGCCACTCATAGCACAATGAAACAAGTAGTAGATAATCAAACTCAAAATAAGGAGCTGGTGAAAAACGGAGATTTTAAAGAAAAAATCATTGATAAGAAAATTGATAAGAAAAGTCAATGGACAAATCTTTACGGAGCCAAGGATTGGAATACTTATATCGACCAAACTAAATCTGTAAATAAATCACCTATTATCCAACGTACCGAACAAGGCCAAGTAAGTCTATCCAGCGACAAAGGCTTTAGAGGTGCTGTGACACAAAAAGTGAACATTGATCCCACTAAAAAATATGAGGTCAAGTTTGATATTGAAACAAGTAACAAGGTTGGACAAGCTTTCCTTCGTATTATGGAGAAAAAAGACAAGAATACGCGACTTTGGCTTTCTGAGATGACCAGCGGTACCACTAACAAACATACCTTAACAAAGATATATAACCCAAAGTTAAATGTCTCCGAGGTGACACTTGAACTTTATTATGAAAAAGGAACTGGTTCTGTTACTTTTGATAATATATCAATGAAAGCAAAAGGCCCTAAAGACTCAGAGCATCCACAACCCGTCACAACACAAATTGAAGAAAGCGTTAATACGGCTTTAAACAAAAATTACGTTTTTAATAAAGCTGACTACCAATACACTCTAACCAATCCGTCTCTTGGGAAAATTGTTGGTGGAATATTGTATCCAAGCGCTACTGGTTCAACAACTGTTAAAATATCTGATAAATCTGGCAAAATAATTAAAGAAGTACCGTTATCAGTTACAGCTTCAACAGAAGATAACTTTACAAAACTCCTCGACAAATGGAACGACGTGACTATTGGTAATCATGTTTACGATACTAATGATTCGAACATGCAAAAGCTTAATCAGAAATTAGATGAAACTAACGCCAAAAACATCAAAGATATCAAACTGGATTCTAATCGCACTTTCCTTTGGGAAGACTTGAAAGGTCTCAATAATTCAGCACAGTTAACCGCTACTTATCGTCGTTTGGAAGATTTAGCTAAACAAATCACCAATCCACACTCTACTATTTACAAAAATGAAAAAGCTATTCGTACTGTAAAAGAGAGTCTGGCTTGGCTTCATCAAAACTTCTACAATGTTAATAAAGATATAGAAGGCTCTGCCAATTGGTGGGATTTTGAAATCGGTGTCCCTCGCTCAATTACAGCTACCCTAGCTCTCATGAATAACTACTTCACTGACGCTGAAATAAAAACTTATACCGACCCAATTGAACACTTTGTTCCTGATGCAGGATATTTCCGTAAAACGCTTGTCAATCCATTTAAAGCCCTTGGTGGTAATCTAGTCGATATGGGGCGCGTTAAAATCATTGAAGGTTTACTTCGTAAAGACAATACTATTATCAAAAAAACTTCTCATTCTCTAAAAAATCTTTTTACTACTGCTACTAAAGCTGAAGGCTTCTATGCTGACGGTTCTTACATCGACCATACAAATGTTGCTTATACTGGCGCCTATGGTAATGTTCTGATAGATGGTTTGACACAATTGCTGCCTATCATTCAAGAAACTGACTATAAAATCTCTAATCAAGAACTTGATATGGTTTATAAATGGATTAATCAATCATTTTTACCTTTAATTGTAAAAGGTGAGTTAATGGATATGAGTCGTGGACGCTCAATTAGTAGAGAGGCTGCTTCTTCGCATGCGGCTGCAGTTGAAGTTCTCAGAGGTTTCCTCAGATTGGCTAACATGTCTAATGAAGAGCGAAACTTAGACCTCAAATCAACTATTAAAACGATTATCACTTCAAATAAATTCTACAACGTCTTCAATAACCTCAAATCGTATTCCGATATTGCCAACATGAATAAGCTGCTTAATGACAGTACAGTCGCTACTAAACCTTTAAAAAGTAATTTATCAACCTTTAATAGCATGGACCGCTTAGCTTATTATAATGCCGAGAAAGACTTTGGTTTCGCACTTTCATTACATTCTAAACGTACCCTCAACTATGAAGGAATGAATGATGAAAATACACGTGGTTGGTATACCGGAGATGGTATGTTCTATCTTTATAATAGTGATCAATCTCATTATAGTAATCATTTTTGGCCAACCGTCAATCCTTATAAAATGGCTGGAACAACTGAAAAAGATACTGGTCGTGAAGACACTATAAAGAAATTAATGAATAGATATGACAAAACCAATAAAAATTCTAAAGTTATGACTGGCCAAGTTACAGGAACATCTGACTTTGTTGGTTCCGTCAAACTTAATGATCACTTTGCTCTTGCCGCTATGGACTTTACTAACTGGGATCGCACCTTAACAGCACAAAAAGGTTGGGTTATCTTAAATGATAAGATTGTCTTTTTAGGTAGCAATATCAAGAATACTAACGGCGTTGGAAATGTTTCTACAACAATTGATCAACGAAAAGACGATTCTAAAACACCTTATACTACATACGTCAATGGAAAAACTGTTGATTTAAAGCAAGCAAGTTCTCAACAATTTACAGATACAAAAAGTGTCTTTTTAGAATCAAAAGAACCTGGTCGCAATATTGGTTATATCTTCTTTAAAAATAGCACTATTGATATTGAACGCAAAGAGCAAACAGGTACTTGGAACAGCATTAATCGTACTTCTAAAAATACCTCAATCGTTAGCAATCCTTTTATCACTATAAGCCAAAAGCATGACAATAAAGGTGATAGCTATGGTTACATGATGGTTCCAAACATTGATCGCACAAGTTTTGATAAATTAGCCAACAGCAAAGAAGTAGAATTACTAGAAAATAGTTCAAAACAACAGGTTATCTATGATAAAAACAGTCAAACTTGGGCTGTTATCAAACACGATAATCAAGAGAGTCTCATTAACAATCAATTCAAAATGAATAAAGCGGGACTTTACCTAGTACAAAAAGTTGGTAATGACTATCAAAATGTCTATTACCAACCTCAAACCATGACAAAAACAGACCAATTAGCTATC

SEQ ID NO: 20472 - protein, 1081 aa, Streptococcus agalactiae
MEIKKKHRIMLYSALILGTILVNNSYQAKAEEFTKTTSTSQIRDTQTNNVEVPQTESTTVKGTSTTTTQQDLSNSTASTATATATHSTMKQVVDNQTQNKELVKNGDFKEKIIDKKIDKKSQWTNLYGAKDWNTYIDQTKSVNKSPIIQRTEQGQVSLSSDKGFRGAVTQKVNIDPTKKYEVKFDIETSNKVGQAFLRIMEKKDKNTRLWLSEMTSGTTNKHTLTKIYNPKLNVSEVTLELYYEKGTGSVTFDNISMKAKGPKDSEHPQPVTTQIEESVNTALNKNYVFNKADYQYTLTNPSLGKIVGGILYPSATGSTTVKISDKSGKIIKEVPLSVTASTEDNFTKLLDKWNDVTIGNHVYDTNDSNMQKLNQKLDETNAKNIKDIKLDSNRTFLWEDLKGLNNSAQLTATYRRLEDLAKQITNPHSTIYKNEKAIRTVKESLAWLHQNFYNVNKDIEGSANWWDFEIGVPRSITATLALMNNYFTDAEIKTYTDPIEHFVPDAGYFRKTLVNPFKALGGNLVDMGRVKIIEGLLRKDNTIIKKTSHSLKNLFTTATKAEGFYADGSYIDHTNVAYTGAYGNVLIDGLTQLLPIIQETDYKISNQELDMVYKWINQSFLPLIVKGELMDMSRGRSISREAASSHAAAVEVLRGFLRLANMSNEERNLDLKSTIKTIITSNKFYNVFNNLKSYSDIANMNKLLNDSTVATKPLKSNLSTFNSMDRLAYYNAEKDFGFALSLHSKRTLNYEGMNDENTRGWYTGDGMFYLYNSDQSHYSNHFWPTVNPYKMAGTTEKDTGREDTIKKLMNRYDKTNKNSKVMTGQVTGTSDFVGSVKLNDHFALAAMDFTNWDRTLTAQKGWVILNDKIVFLGSNIKNTNGVGNVSTTIDQRKDDSKTPYTTYVNGKTVDLKQASSQQFTDTKSVFLESKEPGRNIGYIFFKNSTIDIERKEQTGTWNSINRTSKNTSIVSNPFITISQKHDNKGDSYGYMMVPNIDRTSFDKLANSKEVELLENSSKQQVIYDKNSQTWAVIKHDNQESLINNQFKMNKAGLYLVQKVGNDYQNVYYQPQTMTKTDQLAI

SEQ ID NO: 20473 - protein, 1044 aa, Streptococcus agalactiae
ATGACTGAATTTAAAAACATTATCGTAACTGGTGGAGCTGGTTTCATCGGTTCAAACTTTGTACACTATGTTTACAACAACCATCCAGATGTTCATGTAACTGTACTTGATAAATTGACTTATGCAGGTAACCGTGCAAACATCGAAGATATCCTTGGTGACCGTGTTGAGTTGGTTGTTGGTGATATTGCTGACGCTGAATTGGTAGACAAATTGGCTGCTAAAGCGGATGCTATTGTTCACTATGCGGCTGAAAGCCACAACGACAACTCACTTAACGATCCAAGTCCATTTATCCATACAAACTTTATCGGAACTTACACTTTGCTTGAAGCAGCTCGTAAATACGATATCCGTTTCCACCACGTGTCAACTGATGAAGTTTATGGAGATCTTCCACTTCGTGAAGACCTTCCAGGAAATGGTGAAGGACCAGGTGAAAAATTCACTGCTGAAACAAAATACAATCCATCATCACCTTACTCATCAACTAAGGCAGCTTCTGACCTTATCGTTAAGGCATGGGTACGTTCCTTCAGCGTAAAAGCGACCATTTCGAACTGTTCAAATAACTATGGACCATACCAACACATCGAAAAATTCATTCCACGTCAAATTACAAATATTTTGGCAGGAATCAAACCGAAACTTTATGGTGAAGGTAAAAACGTCCGTGACTGGATCCACACAAATGATCATTCAACAGGTGTCTGGGCTATTTTGACTAAGGGTCGTATTGGTGAAACATACCTTATTGGTGCCGACGGTGAGAAAAACAACAAGGAAGTTCTTGAACTTATCCTTGAGAAAATGGGTCAACCAAAAGACGCTTACGATCACGTAACTGACCGTGCTGGTCATGATCTTCGTTACGCTATCGATTCTACAAAATTGCGTGAAGAACTCGGCTGGGAACCACAATTTACAAACTTTTCAGAAGGTTTGGAAGAAACTATTAAATGGTATACAGAAAATGAGACATGGTGGAAAGCAGAAAAAGATGCTGTAGAAGCCAAGTATGCTAAAACTCAAGAAGTCATTAAG

SEQ ID NO: 20474 - protein, 348 aa, Streptococcus agalactiae
MTEFKNIIVTGGAGFIGSNFVHYVYNNHPDVHVTVLDKLTYAGNRANIEDILGDRVELVVGDIADAELVDKLAAKADAIVHYAAESHNDNSLNDPSPFIHTNFIGTYTLLEAARKYDIRFHHVSTDEVYGDLPLREDLPGNGEGPGEKFTAETKYNPSSPYSSTKAASDLIVKAWVRSFSVKATISNCSNNYGPYQHIEKFIPRQITNILAGIKPKLYGEGKNVRDWIHTNDHSTGVWAILTKGRIGETYLIGADGEKNNKEVLELILEKMGQPKDAYDHVTDRAGHDLRYAIDSTKLREELGWEPQFTNFSEGLEETIKWYTENETWWKAEKDAVEAKYAKTQEVIK

SEQ ID NO: 20475 - protein, 591 aa, Streptococcus agalactiae
ATGACTGAACAATTTTTTGATAAAGAATTAACTTGTCGCCCAATTGAAGCCATTCCTGGATTGTTGGAATTCGATATTCCCGTTCGTGGAGACAACCGTGGATGGTTCAAAGAGAACTTTCAAAAAGAAAAAATGATACCGCTTGGTTTCCCAGAAAGCTTCTTTGAGGCAGACAAACTACAAAATAATATTTCGTTTAACAAAAAAAATACTTTGCGAGGTCTCCATGCAGAGCCTTGGGATAAATATGTTTCGATCGCTGATGAAGGACGTGTGATCGGTACTTGGGTTGACCTCCGTGAAGGTGACAGTTTTGGTAACGTTTACCAAACGATTATCGATGCCTCAAAAGGTATCTTTGTTCCACGCGGCGTTGCTAATGGTTTCCAAGTTCTTTCAGATAAAGCAGCTTATACTTATCTCGTTAACGATTATTGGGCACTTGAACTCAAACCAAAATATGCTTTCGTTAACTATGCAGATCCAAATCTAGGCATTCAGTGGGAAAACCTTGAAGAAGCAGAAGTCTCAGAAGCAGATAAGAATCACCCACTTCTCAAAGATGTAAAACCTTTGAAGAAGGAAGATTTG

SEQ ID NO: 20476 - protein, 197 aa, Streptococcus agalactiae
MTEQFFDKELTCRPIEAIPGLLEFDIPVRGDNRGWFKENFQKEKMIPLGFPESFFEADKLQNNISFNKKNTLRGLHAEPWDKYVSIADEGRVIGTWVDLREGDSFGNVYQTIIDASKGIFVPRGVANGFQVLSDKAAYTYLVNDYWALELKPKYAFVNYADPNLGIQWENLEEAEVSEADKNHPLLKDVKPLKKEDL

SEQ ID NO: 20477 - protein, 867 aa, Streptococcus agalactiae
ATGAAAGGTATTATTTTAGCGGGAGGTTCAGGTACTCGCTTGTACCCATTAACTCGTGCTGCATCAAAACAATTGATGCCAATTTATGATAAACCAATGATTTATTATCCATTGTCAGTTTTGATGTTGGCAGGAATAAAAGAAATACTGATTATTTCTACTCCACAAGATTTGCCTCGCTTTGAAGATATGCTTGGAGATGGTTCAGAACTAGGAATCTCTCTTTCTTATGCTGAACAACCAAGCCCAGATGGGTTAGCACAGGCCTTCATTATCGGTGAAGATTTTATTGGCGATGATCACGTTGCTTTAGTATTAGGTGATAATATTTACCATGGACCAGGTTTATCTGCAATGCTACAACGTGCAGCTAGTAAAGAAAGTGGAGCAACCGTCTTTGGCTATCAAGTAAAAGATCCAGAACGTTTTGGTGTTGTCGAGTTTGATACTGATATGAATGCCATTTCTATTGAAGAAAAACCAGCGCAACCTAAGTCTAATTATGCTGTCACAGGTCTTTATTTCTATGATAACGATGTGGTTGAAATCGCTAAAAATATTAAGCCAAGTCCTCGTGGAGAACTTGAAATTACTGATGTTAACAAAGCCTATCTTGATAGAGGTGACTTATCAGTTGAGTTAATGGGACGTGGATTTGCGTGGTTAGACACTGGAACTCACGAAAGTCTTCTTGAAGCAGCACAATATATTGAAACAGTACAACGCATGCAAAACGTTCAAGTTGCTAACCTTGAGGAAATTGCTTACCGCATGGGCTACATCACTCGTGAACAAGTCCTTGAGTTGGCACAACCACTTAAGAAAAATGAGTATGGTCAATACCTACTTCGTTTGATTGGAGAAGCC

SEQ ID NO: 20478 - protein, 289 aa, Streptococcus agalactiae; identical to SEQ ID NO: 11164

SEQ ID NO: 20479 - protein, 1101 aa, Streptococcus agalactiae
ATGAAAAAGATAGCAATTATTGGTGCAGGAGCAGTCGGAGCGACACTAGCCTATTACTTATCAAAAGAAAAGGATATTCAGGTTACTGTTTTTGATTATGGAGTTGGACAAGCAACTAAGGCTGCTGCGGGGATTATTAGCCCATGGTTTTCAAAACGTCGTAATAAAGCCTGGTATCGTATGGCGAGGTTGGGGGCTGATTTTTATTCAAAGCTAGTCACGGATTTACAAAAAGATGGTTTTGAAACAAAATTTTATCAGCAAACTGGTGTTTTCTTATTAAAAAAGGACGAGAGTCAGTTAGAGTCATTGTTTGCACTAGCAGATAAACGTCGACTAGAATCTCCTCTAATAGGCGATTTACAAATACTAAATAAAAGTGAAGCAAATACTCACTTTCCTGAGTTAGATGGCTATGAACAGTTACTTTATGCGAGTGGAGGAGCGCGAGTAGAAGGGGCGGACTTAACACGAATATTGTTAGAAGCAAGTGGTGTTAATGTCATCAAGGATGAAGTTCACTTTACGATAACTGATAATGGCTTTCGTGTTCAAGGAATTGATTTTGATAAACTTGTTTTAGCGAGTGGAGCCTGGCTAGCTAAGATATTAGATGAGCACAACTATCAGGTAGATGTTCGCCCTCAAAAAGGGCAATTGCGAGACTATTATTTTAGCAATATTAATACAGGAAAATATCCTGTTGTAATGCCAGAAGGCGAGCTAGATATTATCCCATTTGATAATGGTAAAGTCTCTGTAGGTGCAAGTCACGAAAATGATATGGCTTTTGATTTAAACATTGATTTTAAAGTTTTAGACAAGTTTGAAGAGCAAGCTATTGGCTATTTTCCGCAATTAAAAAAAGCAGATACGACTTCTGAACGTGTTGGAATTCGTGCCTATACAAGTGATTTTTCTCCATTTTTTGGCCCTGTCCCTTGTATGGAGGGTGCATATGCTGCAAGTGGATTAGGATCAACTGGCTTAACAGTGGGCCCATTAATTGGTTATGAATTATGTCAATTAATCTTAAATAAAGAAAATCAGCTAAATTTAGAGGATTACGATATTACGAAATACGTGAAAAAGATTAGTAGA

SEQ ID NO: 20480 - protein, 367 aa, Streptococcus agalactiae
MKKIAIIGAGAVGATLAYYLSKEKDIQVTVFDYGVGQATKAAAGIISPWFSKRRNKAWYRMARLGADFYSKLVTDLQKDGFETKFYQQTGVFLLKKDESQLESLFALADKRRLESPLIGDLQILNKSEANTHFPELDGYEQLLYASGGARVEGADLTRILLEASGVNVIKDEVHFTITDNGFRVQGIDFDKLVLASGAWLAKILDEHNYQVDVRPQKGQLRDYYFSNINTGKYPVVMPEGELDIIPFDNGKVSVGASHENDMAFDLNIDFKVLDKFEEQAIGYFPQLKKADTTSERVGIRAYTSDFSPFFGPVPCMEGAYAASGLGSTGLTVGPLIGYELCQLILNKENQLNLEDYDITKYVKKISR

SEQ ID NO: 20481 - protein, 786 aa, Streptococcus agalactiae
ATGAAAGCTAGAGAACTTATTGATGTATATGAAACTTATTGTCCACAGGAATTATCTATGGAAGGAGATATTTCAGGTCTTCAAATTGGATCTTTAGATAAAGAAATAAAGACAGTCATGGTAGCTTTAGATGTTCGAGAGACTACAGTAGCTGAAGCAATTGAACGTCAAGTAGATCTTCTTATTGTAAAGCATGCTCCTATTTTTCGTCCATTAAAGGATTTGGTAGCAACACCGCAAAATAAGATTTATATAGACCTTCTTAAATCAGACATTGTTGTTTATGTGAGCCATACTAATATAGATATCGTTCCTAATGGACTTAACGACTGGTTTTGTGAATTATTAGATATTCAATATCCCGATATATTATCTGAGACAAGTAATGGTTATGGTATTGGTCGCATTGGTGATGTTAGACCCCAGAGTTTTGAATTTTTTGCATGGAAAATTAAAGATGTGTTTGGTTTAGATAGCGTTCGTTTAGTTTCATATGATAAATCTAATCCTGAAATTCAACGAGTTGCTATTTGTGGGGGTAGTGGGCAAAGTTTCTACAAAGAAGCTATTGCAAAAGGAGCAGATGTTTTTGTAACGGGAGATATTTATTATCATACTGCACAAGAAATGATCACAAATGGTTTGCTTGCGATTGACCCAGGCCATCATATTGAGGTTTTATTTGTTTCTAAAATAGCTACTATGATTGAGCAGTGGAAACTTGAAAAAGGCTGGGATATTTCAGTTTTAGAGAGTAAAGCTCCAACAAATCCCTTTTACCATATG

SEQ ID NO: 20482 - protein, 262 aa, Streptococcus agalactiae
MKARELIDVYETYCPQELSMEGDISGLQIGSLDKEIKTVMVALDVRETTVAEAIERQVDLLIVKHAPIFRPLKDLVATPQNKIYIDLLKSDIVVYVSHTNIDIVPNGLNDWFCELLDIQYPDILSETSNGYGIGRIGDVRPQSFEFFAWKIKDVFGLDSVRLVSYDKSNPEIQRVAICGGSGQSFYKEAIAKGADVFVTGDIYYHTAQEMITNGLLAIDPGHHIEVLFVSKIATMIEQWKLEKGWDISVLESKAPTNPFYHM

SEQ ID NO: 20483 - protein, 681 aa, Streptococcus agalactiae
ATGGATTTACAATTATCAAAACGATTACAAAAAGTTGCAAACTATGTTCCAAAAGGAGCTCGGTTATTAGATGTAGGAAGTGATCATGCTTACTTACCTATTTTTTTGTTGCAGATGGGATACTGTGATTTTGCCATCGCTGGTGAAGTGGTGAATGGACCGTATCAGTCTGCGTTGAAAAACGTTTCAGAACATGGTCTCACTTCAAAGATAGATGTTCGCTTAGCAAATGGTTTGTCAGCTTTTGAAGAAGCAGATAATATTGATACGATAACTATCTGTGGAATGGGTGGTCGTTTGATTGCTGATATTTTGAATAACGATATAGACAAACTTCAGCACGTTAAAACACTAGTCTTACAACCTAATAATCGGGAAGATGATTTAAGAAAATGGTTAGCTGCAAATGATTTTGAAATAGTAGCAGAAGATATCTTGACTGAAAATGACAAATGCTATGAAATTTTAGTTGTTAAGCATGGTCATATGAATTTAACTGCTAAAGAATTGCGATTTGGTCCATTTTTATTATCCAATAACACAACGGTTTTTAAAGAAAAATGGCAAAATGAGCTTAATAAATTAACTTTTGCTTTAAACTCTATTCCCAATAGTAAAATGGAAGAACGCGCTATTTTGGAAGATAAAATACAGGATATAAAGGAGGTTCTTGATGAAAGC

SEQ ID NO: 20484 - protein, 227 aa, Streptococcus agalactiae
MDLQLSKRLQKVANYVPKGARLLDVGSDHAYLPIFLLQMGYCDFAIAGEVVNGPYQSALKNVSEHGLTSKIDVRLANGLSAFEEADNIDTITICGMGGRLIADILNNDIDKLQHVKTLVLQPNNREDDLRKWLAANDFEIVAEDILTENDKCYEILVVKHGHMNLTAKELRFGPFLLSNNTTVFKEKWQNELNKLTFALNSIPNSKMEERAILEDKIQDIKEVLDES

SEQ ID NO: 20485 - protein, 678 aa, Streptococcus agalactiae
ATGACTTATTTGGAACAATATCAGTCAGGGCAATTGACTCTACCAAGTGCTTTATTTTTTCACTTTAAATCTATTTTTAAGACAGCAGACGATTTTTTAGTTTGGCAATTTTTCTATTTACAAAATACAACTAATTTATCCGATCTAACACCGAGCCGTATTGCGACATCACTTGATAAAACAGTGGCAGATATTAATCGTTCTATATCGAATTTAACAAGTCAAGGTTTACTAGATGTCAAAACAATTGAGTTGAATCATGAAATCGAGATTATCTTTGATACAAGCCCTGTGTTTACTAAATTAGATAAACTTTTCGAAGAGGATAATCAAGTAATAATAGACAATAAAACCTCTGATTCGAATCGTCTGAAAGATTTAGTAGGAGACTTCGAACGTGAATTAGGTCGCTTATTAAGTCCTTTTGAATTAGAAGATTTACAAAAGACACTGCAAGAAGATCAGACAGATCCTGATATTGTTAGGGCAGCTCTTAGAGAAGCGGTTTTCAATGGGAAAACAAGTTGGAATTATATCAATGCTATCCTTCGCAACTGGCGGCGTGAAGGATTGACGACACTTCGACAAATTGAAGAGAGAAAACAAGCACGTGAAGATAACCAAATGAAAGATTTAGCGATTTCGGATGATTTTAAAAATGCAATGAATTTATGGGAA

SEQ ID NO: 20486 - protein, 226 aa, Streptococcus agalactiae
MTYLEQYQSGQLTLPSALFFHFKSIFKTADDFLVWQFFYLQNTTNLSDLTPSRIATSLDKTVADINRSISNLTSQGLLDVKTIELNHEIEIIFDTSPVFTKLDKLFEEDNQVIIDNKTSDSNRLKDLVGDFERELGRLLSPFELEDLQKTLQEDQTDPDIVRAALREAVFNGKTSWNYINAILRNWRREGLTTLRQIEERKQAREDNQMKDLAISDDFKNAMNLWE

SEQ ID NO: 20487 - protein, 516 aa, Streptococcus agalactiae
ATGGATTTAAATAATTACATCGCTTCAATTGAAAACTATCCTCAAGAAGGAATTACTTTCCGTGATATCTCCCCATTAATGGCTGATGGTAAAGCATATAGCTATGCTGTTCGTGAAATTGTACAATATGCTGCTGATAAAGATATTGATATGATTGTTGGACCAGAAGCTCGTGGCTTTATTGTTGGTTGCCCAGTTGCTTATGCTCTTGGTATTGGTTTTGCTCCAGTCCGTAAACCAGGTAAATTACCACGCGAAGTTATTTCAGCTAACTATGAAAAAGAATATGGTCTTGATACATTGACAATGCACGCAGATGCTATTAAACCAGGTCAACGTGTTTTAATTGTTGATGACCTTTTAGCTACTGGTGGAACAGTAAAAGCGACAATTGAAATGATTGAAAAACTCGGTGGCGTTGTCGCAGGCTGTGCTTTCCTAGTTGAACTTGATGGATTAAATGGCCGTAAAGCTATTGAAGGTTATGATACTAAGGTATTGATGAACTTTCCAGGA

SEQ ID NO: 20488 - protein, 172 aa, Streptococcus agalactiae
MDLNNYIASIENYPQEGITFRDISPLMADGKAYSYAVREIVQYAADKDIDMIVGPEARGFIVGCPVAYALGIGFAPVRKPGKLPREVISANYEKEYGLDTLTMHADAIKPGQRVLIVDDLLATGGTVKATIEMIEKLGGVVAGCAFLVELDGLNGRKAIEGYDTKVLMNFPG

SEQ ID NO: 20489 - protein, 2562 aa, Streptococcus agalactiae
ATGAGACCTATCGTTAGAAAAAAGATGTACAAAAAAGGTAAATTTTGGGTCGTTGCAGGTATCGTTACTATTTTAGGTGGTAGTGCAATTCTTGGTCAAGATGTCAAGGCAGAACAGGCAGAAGCAGTAACTTCAACGATCTCAGAGAAAACTGATAGCAGTCAGACTATTTCGGATACTTCCAAGTTAACGTTACCTGTTAATTCCTCGGAGGCTATGAAAAATAGTGCAGAGCCTTTAATAAAAACAGCCTTTGCTACATCTGTTTCATCTAATCCTAGAGAGATAGCAGCTACCCCAGTCAAAACCTTTGATGCTAGCTCAAAAGTTGTTGTAAAAGCTAGTACTGCTGAGCACTCAGCAAATCAAACAAATTCTAATGTTAATCAAGTAGCTAATGATAGTGAAGTTATTACTCAACAAAATTCAACAAAGCAATTACCAACAGTGACTTACTCTGCTCATGTTCAAGATATTGGATGGCAAAAGTCGGTTGATAATGCAACAGTTTCAGGAACAGTAGGACAAGAAAAGCAGATTGAGGCAATAAAATTGTCTATTAAAGCACCTGAAGGAATAACAGGAAAACTTAGCTATAAAACTTATGTTAAAGGACAAGGTTGGCAACCTTCAGTAGAGAGTGGTCAAGTTAGTGGTACTGTTGGTCAGAGTAGACCTATTGAAGCACTAAGCATTAACCTTACTGATAATTTACAAAAATTATATGATGTCTATTATCGTGTTCATGTTCAAGATATAGGGTGGATGGCTTGGGCTAAAAATGGAGCTTACGCTGGAACTTTGGGAATGTCAAAGCGCCTTGAAGCTTACGAAGTAAAGTTTACCCTTAAAGGACAATCTGTTTTAACACCAATTATACCTAAGGAAGAGAGACCTGTCTTAAATTATCAGGTTAAGGTAGGCCAAAATGGTTGGCAATCTAATAAACTTGAAGGACAAATGGCGGGAACTTTAGGAGAATCCAAAGCCCTAGATGGAGTAAAATTCACTCTTAGCACCTTGAAGTATGGGGACATTCTCTATCGTACTCATGTACAAGATAAAGGTTGGGGAGAAATTTTAGGTAGTCAAACAAGTAAGGATTATCAAGGAAAAAGACTAGAAGCTATTCAATTGGACTTAAGTGGGAATTTAAAACAAAATTATGATATTTATTATCGCGCTCACGTCCAAGATAAAGGTTGGATGGCTTGGCAAAAAAATAATAGTGTAGCAGGTACAGTCGGAGAATCGAAACGTTTAGAGGCTTTGGAAGTAAAACTAGTAGCTAAAGCTTCAGATTTTAGTTCCCAAACAAATCATTCATTCTTAGAAATGAAACATCCTGGATTAAGTTATCAAACTTATCTTCAAAAAGATGGTTGGCAACCAACGGTTTTGGAAGGCCAATTAGGAGGTAGTATTGGACTTTCAAAATCTATAAAAGCCATCAAACTTAACTTAGGTAGTACAGCTCTAGGAAATATAGAATATAGAACTTTTCTTAATGGTTCAGGTTGGCAAACTGTTGTTAATGCAGGGAGAGAAAGTAATGTACCAAATGAATCTCAACAAGTAGAAGCTATTCAGATGCGATTGACAGGTCTGCTATCGAAAACCTATAGTGTGATGTATCGAGTTCACATGCAAGATTATGGTTGGCAGGATTGGACTTATAACAATAACATCGCTGGTAGTACTAACCAAGGAAAACGAATTGAAGCAATCGAAATTAAATTAGTTGAGACTGCTAAAATACCGGTAACTGTCCAAACGACTTATAAGGGAACTGGAAACTATAATGTACGAGTGACAAATGTTATTAGTCCTGGGGATTTAAAAATTGCTATTTGGTCAGATAAAAACAATCAGGATGACCTTAAGTGGTATACCGTCGCACCCAAAAATCATGAAGCTACATTGACATTTAATGTTACAAATCATAGAGACAATGGTAAATACTTTATCCATGTTTATCAGGAAAATGCTTCTAATCAAAAACAATTATTGGTAAAAACTTCTCTACAAGTCGCACATTCAAATTATAATACTCCTTACTTTAGCCAACGTGATGGAAGGTGGGCAAGTCGAAGATATGGTATGGCAACTTTAGGAGAAACTGGTTGTGTACCAACTTCTCTAGCTATGATTTTGTCTTCTTTGAAAGGAGAAACTGTTTTACCAACGCAAATTGCAGATTACCTTTACCATAAGACAGTTGAATTTAATCGTGGTGTTCAAGGAACAACTTCTAGAGGAATCTTAAAAGCAGCCAAAGAATGGGGTGTAACTGCAACTGCATTAGGAACTCAAGCTAACCTTGTACAAGCGTTGAAGGATGGTTATCATGTCCTAGCGGCAGTACAAAATAATGTTTTTGTTCTTCATGGAAGTCATGAAATCGTTCTCAAAGGATATAATAACGGACTGACACATGTCTCTGACCCTTACACACCGTCCTTGTCTGGTTGGTATCCAATTTCACAACTTTGGAAAGAACAGAGCTATTATAGTGAGGATAGAATTGATATTGGAGCACCTTTTGTCAAGGTAACAGATGCC

SEQ ID NO: 20490 - protein, 854 aa, Streptococcus agalactiae
MRPIVRKKMYKKGKFWVVAGIVTILGGSAILGQDVKAEQAEAVTSTISEKTDSSQTISDTSKLTLPVNSSEAMKNSAEPLIKTAFATSVSSNPREIAATPVKTFDASSKVVVKASTAEHSANQTNSNVNQVANDSEVITQQNSTKQLPTVTYSAHVQDIGWQKSVDNATVSGTVGQEKQIEAIKLSIKAPEGITGKLSYKTYVKGQGWQPSVESGQVSGTVGQSRPIEALSINLTDNLQKLYDVYYRVHVQDIGWMAWAKNGAYAGTLGMSKRLEAYEVKFTLKGQSVLTPIIPKEERPVLNYQVKVGQNGWQSNKLEGQMAGTLGESKALDGVKFTLSTLKYGDILYRTHVQDKGWGEILGSQTSKDYQGKRLEAIQLDLSGNLKQNYDIYYRAHVQDKGWMAWQKNNSVAGTVGESKRLEALEVKLVAKASDFSSQTNHSFLEMKHPGLSYQTYLQKDGWQPTVLEGQLGGSIGLSKSIKAIKLNLGSTALGNIEYRTFLNGSGWQTVVNAGRESNVPNESQQVEAIQMRLTGLLSKTYSVMYRVHMQDYGWQDWTYNNNIAGSTNQGKRIEAIEIKLVETAKIPVTVQTTYKGTGNYNVRVTNVISPGDLKIAIWSDKNNQDDLKWYTVAPKNHEATLTFNVTNHRDNGKYFIHVYQENASNQKQLLVKTSLQVAHSNYNTPYFSQRDGRWASRRYGMATLGETGCVPTSLAMILSSLKGETVLPTQIADYLYHKTVEFNRGVQGTTSRGILKAAKEWGVTATALGTQANLVQALKDGYHVLAAVQNNVFVLHGSHEIVLKGYNNGLTHVSDPYTPSLSGWYPISQLWKEQSYYSEDRIDIGAPFVKVTDA

SEQ ID NO: 20491 - protein, 2196 aa, Streptococcus agalactiae
ATGATATCTGCTAAGTATAGTTGGGTCCTCAATAACCAAAAGCCAGACGCTGGCTTTTTTGAGGCTTCAAAAAAAGAAAAGATAAGTGAAGCGGTGGCTTCCTTAATTTATTCGCGAGGTATTAAGACATCAGCGGAATTACATCATTTTTTACAAACTAATTTGGAAAATCTCCATGATCCTTATTTGTTAAATGATATGGATAAAGCTGTTAATCGTATTAGACGAGCTATTGAAAATAATGAAACTATTTTAGTTTATGGAGACTATGATGCTGATGGAATGACATCAGCATCAATCATGAAAGAAGCTTTAGATATGATGGGAGCTGAAGTCCAGGTTTATCTCCCAAATCGCTTTACAGATGGTTACGGTCCCAATGAAAGTGTTTATAAATATTTTATTGAACAACAAGGTGTTTCATTAATCATTACGGTTGATAATGGTGTGGCGGGGCATGAAGCAATTGCATATGCTCAAAATCAAGGTGTGGACGTGGTAGTTACTGATCATCACAGTATGCCAGCAGATTTACCTTGTGCTTATGCTATTATTCACCCAGAACATCCTGATGCTAATTATCCATTTCCTTATTTAGCAGGGTGTGGTGTTGCTTTTAAAGTAGCTTGTGCTCTCTTAGAAACAATCCCGACAGAAATGTTGGATTTGGTTGCTATTGGGACGATTGCAGATATGGTTAGCCTAACTGATGAAAATCGTATCATGGTAAAAGCTGGACTTGAAGTTATGAAAGATAGTGAAAGAATAGGCTTACAGGAGCTAATATCTTTATCAAATATTGATTTAAAAACACTAAATGAAGAAACTATTGGATTTAAAATTGCTCCACAATTAAACGCTTTAGGAAGACTTGATGACCCTAATCCAGCTATTGAATTACTGACAGGGTTTGATGATGAAGAATCTCAAGCAATAGCCCAAATGATTGATCAAAAAAATGAAGAGCGCAAAGAAATCGTTCAAACTATCTTTGACCAAGCTATGCAAATGCTTGATCAAACAAAGCCTGTACAAGTTTTAGCAAAAGAAAATTGGCATCCAGGGGTTTTAGGTATTGTGGCGGGTCGTATTTTAGAGAGAACTGGACAACCTGTTATTGTTTTGAATATTGAAGATGGTATTGCTAAAGGAAGTGCCAGAAGTGTAGAAGCACTTGATATTTTTCAAGCTTTTGACCAGCATCGAGAATTATTCATTGCTTTTGGAGGTCACAGCGGAGCAGCAGGCATGACTTTAGAGGAAAGTAAGGTGGGGGATCTTTCTCAAGTTTTATGTGACTATATCTCTAAAAAACAATTGGACATGGGTCAGAAAAAAACTCTGACAATTGATAGTGAGCTACGTTTTGACGAACTTAGTTTAGACACTGTTAGAGATTTTGAAAAGTTAGCGCCATTTGGAATGGATAATAAAAAGCCAGTCTTTTTGTTAAAAGATTTTAAAGTGAGTCAAGCTAGAGTCATGGGGCAAAACGGTGCTCATCTGAAATTAAAACTAGAACAAGATGGACAAGCACTTGATTTGGTAGCATTTAATATGGGGAGTCAACTACAAGAGTTCCAACAAGCACAACATTTGGAGTTAGCTGTCACTTTATCTGTTAATCAATGGAATGGTGCCACAACCCTACAATTAATGTTGGAGGATGCGCGTGTAGATGGTATTCAATTATTTGATATTAGAAGCAAAGCAAGTAGCTTACCTCATGGAGTGCCAATCCTATCTCAAGAAGAGCAGAGCAAAGAAGTTATTCTTTTGACTGTTCCCGATCATCCACAAGAATTAAAACAAATGACTCAAGGTAAACAGTTTGATGCCATCTATTTTAAAAATGAGATACCAAAAAATTATTTTATATCTGGTTATGGTACACGTGATCAGTTTGCTAGTTTATATAAAACAATATATCAATTCCCAGAATTTGACGTTCGTTATAAGTTAAAAGAGCTCAGTTCCTACCTTCATATTCCTGATATTTTATTAATTAAAATGATTCAAATTTTTGAAGAACTACATTTTGTTACGATTACAGAAGGGATTATGACAGTCAATAAAGAAGCAGAAAAGCGAGATATCTCTGAGAGTCAAATTTATCAAGAATTAAAAGAGACAGTTAAGTTTCAAGAATTAATGGCTTTAGGGACACCTAAAGAAATATATGATTTTATGATGAGT

SEQ ID NO: 20492 - protein, 732 aa, Streptococcus agalactiae
MISAKYSWVLNNQKPDAGFFEASKKEKISEAVASLIYSRGIKTSAELHHFLQTNLENLHDPYLLNDMDKAVNRIRRAIENNETILVYGDYDADGMTSASIMKEALDMMGAEVQVYLPNRFTDGYGPNESVYKYFIEQQGVSLIITVDNGVAGHEAIAYAQNQGVDVVVTDHHSMPADLPCAYAIIHPEHPDANYPFPYLAGCGVAFKVACALLETIPTEMLDLVAIGTIADMVSLTDENRIMVKAGLEVMKDSERIGLQELISLSNIDLKTLNEETIGFKIAPQLNALGRLDDPNPAIELLTGFDDEESQAIAQMIDQKNEERKEIVQTIFDQAMQMLDQTKPVQVLAKENWHPGVLGIVAGRILERTGQPVIVLNIEDGIAKGSARSVEALDIFQAFDQHRELFIAFGGHSGAAGMTLEESKVGDLSQVLCDYISKKQLDMGQKKTLTIDSELRFDELSLDTVRDFEKLAPFGMDNKKPVFLLKDFKVSQARVMGQNGAHLKLKLEQDGQALDLVAFNMGSQLQEFQQAQHLELAVTLSVNQWNGATTLQLMLEDARVDGIQLFDIRSKASSLPHGVPILSQEEQSKEVILLTVPDHPQELKQMTQGKQFDAIYFKNEIPKNYFISGYGTRDQFASLYKTIYQFPEFDVRYKLKELSSYLHIPDILLIKMIQIFEELHFVTITEGIMTVNKEAEKRDISESQIYQELKETVKFQELMALGTPKEIYDFMMS

SEQ ID NO: 20493 - protein, 759 aa, Streptococcus agalactiae
ATGGCAAGAACGATACTGATTACAGGAGCTTCTGGTGGTTTAGCACAGGCAATTATTAACCAATTACCTCAAGACGACCATTTAATTGTCACAGGGAGATCAAGAGAAAAACTTGAAAAGCTTTATGGAAAGAGACCAAATACCTTATGTTTATCACTAGACATAATTAATGACACTGCTGTAACGAATACGATTGAAAAAATTTATGGTGAATTTGGTCAAATTGATATTTTAATTAATAATGCTGGATTTGGTTCTTTTAAAGAATTTTGGGATTATAGTGATGAAGAAGTCAAAGACATGTTTGCTGTGAATACATTTGCAACGATGTCTATAGCTCGTCAGATAGGACATAAGATGTCTCTTGTAAAATCTGGTCATATCGTTAACATTGCAAGCATGGCCGGCCTCATAGCAACAAGTAAAGCAAGTGTTTATGGGGCTAGTAAGTTTGCTGTCGTTGGATTTTCGAATGCTCTTCGTTTAGAATTAGCAGAAAAAAATGTTTATGTGACAAGTGTAAACCCTGGACCACTCAAAACAGGATTTTTTGCTCAGGCTGATCCAAGTGGCGATTATTTAGCAAGTATAGGTCGTTTTGCTCTAACACCAGAAAAAGTAGCTAAAAAAGTAGTTTCTATTCTTGGAAAAAATAAGAGAGAATTAAATCTTCCTTTTATATTAGCTTTTGCGCATAAATGTTATAGTTTATTTCCAAAAACAGCTGATTATTTTGCCAGAAAGGTATTCAATTATAAA

SEQ ID NO: 20494 - protein, 253 aa, Streptococcus agalactiae
MARTILITGASGGLAQAIINQLPQDDHLIVTGRSREKLEKLYGKRPNTLCLSLDIINDTAVTNTIEKIYGEFGQIDILINNAGFGSFKEFWDYSDEEVKDMFAVNTFATMSIARQIGHKMSLVKSGHIVNIASMAGLIATSKASVYGASKFAVVGFSNALRLELAEKNVYVTSVNPGPLKTGFFAQADPSGDYLASIGRFALTPEKVAKKVVSILGKNKRELNLPFILAFAHKCYSLFPKTADYFARKVFNYK

SEQ ID NO: 20495 - protein, 927 aa, Streptococcus agalactiae
ATGGAAATTCAATTTTTAGGAACTGGAGCTGGTCAACCAGCGAAAGCTCGTAATGTTTCAAGTTTAGTCTTGAAATTATTAGATGAAATTAACGAGGTTTGGATGTTTGATTGTGGAGAGGGTACACAGCGTCAAATTTTAGAAACCACGATTAAACCTCGTAAAGTTAAAAAAATTTTTATCACGCACATGCACGGAGACCATGTTTTTGGTCTTCCAGGTTTTTTATCCAGTCGGGCTTTTCAAGCCAATGAAGAGCAGACAGATTTAGATATTTATGGACCAGTTGGTATAAAAAGTTTTGTTATGACTGGCTTAAGGACATCAGGTTCACGTTTACCTTATCGAATCCATTTTCACGAGTTTGATGAATCATCACTCGGAAAAATTATGGAAACAGATAAATTTACCGTTTATGCAGAAAAGCTAGATCATACTATCTTTTGCATGGGATATCGTGTTGTGCAAAAAGATCTTGAGGGCACTTTAGATGCTGAAGCATTGAAACTAGCAGGTGTTCCCTTTGGTCCTCTTTTTGGGAAAGTCAAAAATGGTGAGAATGTTACCTTAGAAGATGGTAGAGAAATTATTGCTAAAGATTATATTTCTGAACCGAAAAAGGGTAAAGTAATCACTATTTTGGGAGATACTAGAAAAACAGATGCAAGTATTAGGTTAGCTTTGGGCGCTGATGTTTTAGTTCACGAATCTACTTATGGTAAGGGTGATGAGCGAATTGCTAAATCGCATGGGCATTCAACCAATATGCAAGCAGCTGATATCGCTAAACAAGCAAATGCTAAACGACTATTATTAAATCATGTTAGTGCTCGTTTTATGGGGCGAGATTGTTGGCAAATGGAAGAAGATGCAAAGACGATTTTTTCAAATACCCATCTTGTTAGAGATTTGGAAGAAGTAGGTATA

SEQ ID NO: 20496 - protein, 309 aa, Streptococcus agalactiae; identical to SEQ ID NO: 2262

SEQ ID NO: 20497 - protein, 645 aa, Streptococcus agalactiae
ATGATTGATTATATTGATTTAGCTTTGACTTATGGTGGTTTTACGAGCTTAGATAAAGTTTATCTAGAGAAAAAACTAGATGACCTCTCTAAGCAACAACGACTTGATTTTATCACCCCACCTCCTAGTGTGATTAATGCTTATTTTGCTGAAATATATCAAAAGCAAGGGCCAGAAGCGGCAACTGATTACTATTTTGATCTTTCCAAAGCCTTGGGCTTGTTTCCAAAACATTTATCGTTTGATGAAGAAAAACCCTTTATTCGTTTGAATTTATCAGGAAAATCATTTGGTTTTGCTTACCTAAATGATCAAGAAGAAGCGAGTGTTTTTTCTGAAGTTAAAGAAATCATTACACCGCAGTTACTCTTAGAAATTGCACAGATTTTTCCTCAATATAAAGTCTATCAAGATCGGTCTGGTATCAGAATGGCAAAAATAGATTTTGACGAAACAGAATCTCAAAATATTACACCAGAAACAAGTTTACTAGGGAATGTCTTACAACTTAAAAAAGATATTATTAAAATAACTAGTTTCAATCAAGAAGAGCTATTAGAGTTGGTTAAAACAAAGTCAGGTAAATACTATTATTCTAGTCAAGGACGTGAGTCAGTTATTTATATTGATACTAAATCTACTCAT

SEQ ID NO: 20498 - protein, 215 aa, Streptococcus agalactiae
MIDYIDLALTYGGFTSLDKVYLEKKLDDLSKQQRLDFITPPPSVINAYFAEIYQKQGPEAATDYYFDLSKALGLFPKHLSFDEEKPFIRLNLSGKSFGFAYLNDQEEASVFSEVKEIITPQLLLEIAQIFPQYKVYQDRSGIRMAKIDFDETESQNITPETSLLGNVLQLKKDIIKITSFNQEELLELVKTKSGKYYYSSQGRESVIYIDTKSTH

SEQ ID NO: 20499 - protein, 1236 aa, Streptococcus agalactiae
GTGATAGAAACTAAAGAAGAGCAAGAACGTGTTATTTTAGTTGGGGTAGAACTTCAAGATACTGAGAATTTTGAAATGTCCATGGAAGAACTTGCTAGCTTAGCTAAGACAGCAGGAGCAAATGTTGTTAATCATTATTATCAAAAAAGAGATAAATATGATAGTAAATCATTTATCGGATCTGGTAAATTAGAGGAGATAAAAGCTATTGTAGAAGCAGATGAGATTGATACCGTTGTGGTTAATAATCGTTTGACTCCGAGACAAAACTCTAATTTGGAAGCTGAACTTGGTGTTAAAGTTATTGACCGTATGCAACTTATTTTAGATATCTTTGCTATGCGTGCTAGAAGTCATGAAGGGAAATTACAGGTTCATCTAGCGCAATTGAAATATATGTTACCACGCTTAGTTGGACAAGGTATTATGCTTAGTCGTCAAGCAGGGGGAATCGGAAGCCGAGGTCCAGGAGAATCTCAGTTAGAGTTGAATCGTCGTTCCATTCGTCATCAAATTTCTGATATCGAAAGACAATTGAAGATTGTAGAAAAAAATCGCGAGACGGTTCGAGAAAGACGTGTTGATTCGACAACCTTCAAAATTGGATTAATTGGATATACAAATGCTGGCAAGTCAACTATTATGAATGTTTTGACCGATGATAAGCAATATGAAGCCAATGAATTATTTGCAACGTTAGACGCTACAACCAAGCAGATCTATTTACAAAATCAATTTCAAGTCACTTTAACAGATACTGTTGGTTTTATTCAAGATTTACCTACAGAGTTAGTTGCGGCTTTCAAGTCTACCTTAGAAGAAAGTCGACATGTCGATTTATTACTTCATGTTATTGATGCTAGTGACCCTAATCATGAAGAACACGAAAAAGTTGTTATGGAGATTCTTAAAGACTTAGATATGATAGATATTCCTCGTTTAGCGATATACAACAAGATGGATGTCACGGAGCAGCTGAATGCAACAACTTTTCCTAATGTGAGAATTGCAGCCAAAAAACAAGGGAGTAGGGATTTATTACGCCGTCTTATTGTGGATGAAATACGACATATCTTTGACGAATTTTCGATTAGAGTGCATCAAAATCAAGCATATAAGCTCTATGATCTCAATAAAATAGCATTGCTTGACACCTACACCTTTGAAGAAGAATACGAGAATATTACAGGCTATATTTCTCCTAAACAAAAATGGAAGCTGGAAGAATTTTATGAT

SEQ ID NO: 20500 - protein, 412 aa, Streptococcus agalactiae; identical to SEQ ID NO: 11188

SEQ ID NO: 20501 - protein, 888 aa, Streptococcus agalactiae
ATGAGAAAAATCAAGCTTATAGCAGTTGTTGGTCCAACTGCGGTTGGGAAGACAGCATTAGGAATTGAATTAGCTAAAACTTTCAATGGCGAAATCATTAGTGGTGATAGTCAGCAAGTTTATCAGAAGTTAGATATCGGAACGGCTAAAGCTAGTAAAGAAGAGCAAGAACAAGCTTATCATCACTTGATTGATGTTCGTGAAGTAAATGAGAACTATTCGGTTTATGATTTTGTCAAAGAGGCAAAAGTAGCTATTGATACGATTATTTCTAAGGGGAAAATCCCTATTATTGTTGGAGGTACTGGCCTATATTTACAGAGTTTGTTTGAGGGCTATCATTTAGGAGGCGAAGTCAATCAAGAAACTCTTATGGCCTATCGTGAAAAATTAGAGTCTCTAAGTGATGAAGATTTATTTGAAAAGTTGACAGAACAATCCATTGTTATACCGCAAGTTAATCGTCGACGTGCCATTCGTGCATTAGAATTGGCGAAGTTTGGGAATGATTTGCAAAATAGTGAAAGTCCGTATGATGTTTTATTAATTGGATTGAATGATGACCGTCAGGTGCTTTATGATCGTATCAATAGACGAGTTGATTTGATGATAGACAATGGTCTCTTAGATGAAGCTAAATGGCTATACGATAACTACCCGAGTGTTCAAGCAAGTAGAGGAATTGGCTATAAAGAATTATTTCCTTACTTTTCAAAGCAAATACCATTAGAAGAAGCTGTTGATAAACTAAAACAAAATACCAGACGTTTTGCAAAACGCCAATTAACATGGTTTAGAAACCGTATGAATGTCGAATTTATTATGGTTGGTGAGGAAAATTATCAACAAAAAATCAAGCGAAAAGTCAGTGATTTTTTATCATCAAAG

SEQ ID NO: 20502 - protein, 296 aa, Streptococcus agalactiae
MRKIKLIAVVGPTAVGKTALGIELAKTFNGEIISGDSQQVYQKLDIGTAKASKEEQEQAYHHLIDVREVNENYSVYDFVKEAKVAIDTIISKGKIPIIVGGTGLYLQSLFEGYHLGGEVNQETLMAYREKLESLSDEDLFEKLTEQSIVIPQVNRRRAIRALELAKFGNDLQNSESPYDVLLIGLNDDRQVLYDRINRRVDLMIDNGLLDEAKWLYDNYPSVQASRGIGYKELFPYFSKQIPLEEAVDKLKQNTRRFAKRQLTWFRNRMNVEFIMVGEENYQQKIKRKVSDFLSSK

SEQ ID NO: 20503 - protein, 174 aa, Streptococcus agalactiae; identical to SEQ ID NO: 6917

SEQ ID NO: 20504 - protein, 58 aa, Streptococcus agalactiae; identical to SEQ ID NO: 2270

SEQ ID NO: 20505 - protein, 915 aa, Streptococcus agalactiae
ATGAAAAATTGGGAAAAACCACCATTAGTGATGGCGGGATTAGTATTAGGGCTATTAGCTTTGGGGAACCTTCTAGAGGGATATGGCACCTATTTTCGCTATTGTTTAGGGCTAGTAGCACTTGTTTTTTGGATTTTTTTAATCAAAGGAATATTAAAAAATAAAAAAGAAAGCAGGAAGGAGTTAAGCAATCCTTTGATTGCTTCTGTCTTTACTACTTTTTTTATGGCAGGTATGATTTTATCAACCTATATCTTATTATTTAGAAGTTTAGGAATATGGGTAGCAGTTCTGTCAAAAGGTGTATGGTGGTTGTCATTTATTGCGTTAATCATTCATATGGCTATTTTTTCATGGAAATATTTGAGACACTTTTCGATGGCTAATCTTTTTCCTTCTTGGTCTGTCCTCTATGTTGGTATAGGGGTAGCTAGCCTGACAGCACCAATTAGTGGACAATTCACTATTGGGAAAATAGTTTTTTGGTATGGTTTTATTGCAACTTTAGTATTATTACCATTTCTATTCATTAAAGCATATAAAATCGGGCTACCTTCGGCAGTTAAGCCTAATATAACTACTATTTGCGCTCCAATGTCGCTAATCACAGCGGGATATGTCAATAGTTTTGTGTCACCAAATAGAGGTTTATTACTGCTATTAATCATAATGGCACAATTTCTTTATTTTTTCATTCTTTTTCAGGTGCCTAAATTACTGATTGGTGATTTTACACCAGGTTTCTCAGCCTTTACTTTCCCCCTTGTTATCTCAGCTACCTCACTTAAATTAAGTATTCAGCATCTATCATTACCAGTTGATATACAGGGGCTAGTCCACTTTGAAATTGGGACAACAACTCTTATTGTTATGATAGTAATGGTACGTTATATTTTCTTTTTAAGGCGAACAATT

SEQ ID NO: 20506 - protein, 305 aa, Streptococcus agalactiae
MKNWEKPPLVMAGLVLGLLALGNLLEGYGTYFRYCLGLVALVFWIFLIKGILKNKKESRKELSNPLIASVFTTFFMAGMILSTYILLFRSLGIWVAVLSKGVWWLSFIALIIHMAIFSWKYLRHFSMANLFPSWSVLYVGIGVASLTAPISGQFTIGKIVFWYGFIATLVLLPFLFIKAYKIGLPSAVKPNITTICAPMSLITAGYVNSFVSPNRGLLLLLIIMAQFLYFFILFQVPKLLIGDFTPGFSAFTFPLVISATSLKLSIQHLSLPVDIQGLVHFEIGTTTLIVMIVMVRYIFFLRRTI

SEQ ID NO: 20507 - protein, 3755 aa, Streptococcus agalactiae
ATGAAAAGAAAAGACTTATTTGGTGATAAACAAACTCAATACACGATTAGAAAGTTAAGTGTTGGAGTAGCTTCAGTTGCAACAGGGGTATGTATTTTTCTTCATAGTCCACAGGTATTTGCTGAAGAAGTAAGTGTTTCTCCTGCAACTACAGCGATTGCAGAGTCGAATATTAATCAGGTTGACAACCAACAATCTACTAATTTAAAAGATGACATAAACTCAAACTCTGAGACGGTTGTGACACCCTCAGATATGCCGGATACCAAGCAATTAGTATCAGATGAAACTGACACTCAAAAGGGAGTGACAGAGCCGGATAAGGCGACAAGCCTGCTTGAAGAAAATAAAGGTCCTGTTTCAGATAAAAATACCTTAGATTTAAAAGTGGCACCATCTACATTGCAAAATACTCCCGACAAAACTTCTCAAGCTATAGGTGCTCCAAGTCCGACCTTGAAAGTAGCTAATCAAGCTCCACGGATTGAAAATGGTTACTTTAGGCTACATCTTAAAGAATTGCCTCAAGGTCATCCTGTAGAAAGCACTGGACTTTGGATATGGGGAGATGTTGATCAACCGTCTAGTAATTGGCCAAATGGTGCTATCCCTATGACTGATGCTAAGAAAGATGATTACGGTTATTATGTTGATTTTAAATTATCTGAAAAACAACGAAAACAAATATCTTTTTTAATTAATAACAAAGCAGGAACAAATTTAAGCGGCGATCATCATATTCCATTATTACGACCTGAGATGAACCAAGTTTGGATTGATGAAAAGTACGGTATACATACTTATCAGCCCCTCAAAGAAGGGTATGTCCGTATTAACTATCTGAGTTCATCTGGTAACTATGACCACTTATCAGCATGGCTCTTTAAAGATGTTGCAAACCCCTCAACAACTTGGCCAGATGGTAGTAATTTTGTGAATCAAGGACTATATGGAAGGTATATTGATGTACCACTGAAAACTAACGCCAAAGAGATTGGTTTTCTAATCTTAGATGAAAGTAAGACAGGAGATGCAGTGAAAGTTCAACCCAACGACTATGTTTTTAGAGATTTAGCTAACCATAACCAAATTTTTGTAAAAGATAAGGATCCGAAGGTTTATAATAATCCTTATTACATTGATCAAGTGCAGCTAAAGGATGCCCAACAAATTGATTTAACAAGTATTCAAGCAAGTTTTACAACTCTAGATGGGGTAGATAAAACTGAAATTTTAAAAGAATTGAAAGTGACAGATAAAAATCAAAATGCTATACAAATTTCTGATATCACTCTCGATACTAGTAAATCTCTTTTAATAATCAAAGGCGACTTTAATCCTAAACAAGGTCATTTCAATATATCTTATAATGGTAACAATGTCACGACAAGGCAATCTTGGGAATTTAAAGACCAACTTTATGCTTATAGTGGAAATTTAGGTGCAGTTCTCAATCAAGATGGTTCAAAAGTTGAAGCCAGCCTCTGGTCACCGAGTGCTGATAGTGTCACTATGATTATTTATGACAAAGATAATCAAAACAGGGTTGTAGCGACTACCCCCCTTGTGAAAAATAATAAAGGTGTTTGGCAGACGATACTTGATACTAAATTAGGTATTAAAAACTATACTGGTTACTATTATCTTTACGAAATAAAAAGAGGTAAGGATAAGGTTAAGATTTTAGATCCTTATGCAAAGTCATTAGCAGAGTGGGATAGTAATACTGTTAATGACGATATAAAAACGGCTAAAGCAGCTTTTGTAAATCCAAGTCAACTTGGACCTCAAAATTTAAGTTTTGCTAAAATTGCTAATTTTAAAGGAAGACAAGATGCTGTTATATACGAAGCACATGTAAGAGACTTCACTACTGATCGATCTTTGGACGGAAAATTAAAAAATCAATTTGGTACCTTTGCAGCCTTTTCAGAGAAACTAGATTATTTACAGAAATTAGGAGTTACACACATTCAGCTTTTACCGGTATTGAGTTATTTTTATGTTAATGAAATGGATAAGTCACGCTCAACAGCTTACACTTCCTCAGACAATAATTACAATTGGGGCTATGACCCACAGAGCTATTTTGCTCTTTCTGGAATGTATTCAGAGAAACCAAAAGATCCATCAGCACGTATTGCCGAATTAAAACAATTAATACATGATATTCATAAACGTGGCATGGGTGTTATACTTGATGTCGTCTATAATCACACTGCAAAAACTTATCTCTTTGAGGATATAGAACCTAATTATTATCACTTTATGAATGAAGATGGTTCACCAAGAGAAAGTTTTGGAGGGGACGTTTAGGAACCACCCATGCAATGAGTCGTCGTGTTTTGGTTGATTCCATTAAATATCTTACAAATGAATTTAAAGTTGATGGTTTCCGTTTTGATATGATGGGAGATCATGATGCGGCTGCGATTGAATTAGCTTATAAAGAAGCTAAAGCTATTAATTCTAATATGATTATGATTGGTGAGGGCTGGAGAACATTCCAAGGTGATCAAGGTAAGCCGGTTAAACCAGCTGACCAAGATTGGATGAAGTCAACCGATACAGTTGGCGTCTTTTCAGATGACATTCGTAATAGCTTGAAATCTGGTTTTCCAAATGAAGGTACTCCAGCTTTCATCACAGGTGGCCCACAATCTTTACAAGGTATTTTTAAAAATATCAAAGCACAACCTGGGAATTTTGAAGCAGATTCGCCAGGAGATGTGGTGCAGTATATTGCTGCACATGATAACCTTACCTTGCATGATGTGATTGCAAAATCAATTAATAAAGACCCTAAGGTAGCTGAAGAAGAGATTCATAGACGTCTGCGTTTAGGAAATGTAATGATTTTAACATCTCAAGGGACAGCATTCATTCATTCTGGTCAAGAGTATGGTCGTACGAAGCGTTTACTTAACCCTGATTACATGACAAAAGTTTCAGATGACAAATTGCCTAATAAAGCAACACTTATTGAAGCTGTTAAAGAATACCCATATTTTATTCATGATTCATATGATTCTTCAGATGCCATTAATCATTTTGATTGGGCAGCAGCCACAGATAATAACAAACACCCAATTTCAACGAAAACACAGGCCTATACAGCAGGTTTAATCACATTAAGGCGTTCAACAGATGCTTTCCGGAAATTGAGCAAAGCAGAAATTGATCGTGAGGTTAGCTTGATTACAGAGGTAGGTCAAGGTGATATTAAAGAAAAAGATTTGGTTATTGCTTACCAAACAATAGATTCTAAAGGTGATATTTACGCAGTATTTGTTAATGCTGATAGTAAAGCTAGAAACGTTTTACTAGGTGAAAAATATAAACACCTTTTAAAAGGGCAAGTAATTGTTGATGCTGATCAGGCGGGGATTAAACCAATCTCAACTCCTAGAGGTGTTCATTTTGAAAAAGATAGTTTGCTGATTGATCCATTAACAGCAATTGTGATTAAAGTTGGCAAAGTTGCCCCTAGTCCTAAGGAGGACTTGCAAGCAGATTATCCCAAAACACAATCTTTCAAGGAATCTAAAACGGTAGAAAAAGTAAATAGAATAGCTAATAAGACCTCAATAACTCCTGTAGTTTCTAAGAAGGCCGATTCATATCTGACAAATGAAGCTAATTTGCCAAAAACTGGAGATAAGTCATCAAAAATACTAAGTGTAGTAGGAATAAGCATTCTAGCAAGTCTACTTGCTCTAGTAGGTCTCTCTTTAAAGAGGAATCGTCACTTAAAA

SEQ ID NO: 20508 - protein, 1252 aa, Streptococcus agalactiae
MKRKDLFGDKQTQYTIRKLSVGVASVATGVCIFLHSPQVFAEEVSVSPATTAIAESNINQVDNQQSTNLKDDINSNSETVVTPSDMPDTKQLVSDETDTQKGVTEPDKATSLLEENKGPVSDKNTLDLKVAPSTLQNTPDKTSQAIGAPSPTLKVANQAPRIENGYFRLHLKELPQGHPVESTGLWIWGDVDQPSSNWPNGAIPMTDAKKDDYGYYVDFKLSEKQRKQISFLINNKAGTNLSGDHHIPLLRPEMNQVWIDEKYGIHTYQPLKEGYVRINYLSSSGNYDHLSAWLFKDVANPSTTWPDGSNFVNQGLYGRYIDVPLKTNAKEIGFLILDESKTGDAVKVQPNDYVFRDLANHNQIFVKDKDPKVYNNPYYIDQVQLKDAQQIDLTSIQASFTTLDGVDKTEILKELKVTDKNQNAIQISDITLDTSKSLLIIKGDFNPKQGHFNISYNGNNVTTRQSWEFKDQLYAYSGNLGAVLNQDGSKVEASLWSPSADSVTMIIYDKDNQNRVVATTPLVKNNKGVWQTILDTKLGIKNYTGYYYLYEIKRGKDKVKILDPYAKSLAEWDSNTVNDDIKTAKAAFVNPSQLGPQNLSFAKIANFKGRQDAVIYEAHVRDFTTDRSLDGKLKNQFGTFAAFSEKLDYLQKLGVTHIQLLPVLSYFYVNEMDKSRSTAYTSSDNNYNWGYDPQSYFALSGMYSEKPKDPSARIAELKQLIHDIHKRGMGVILDVVYNHTAKTYLFEDIEPNYYHFMNEDGSPRESFGGGRLGTTHAMSRRVLVDSIKYLTNEFKVDGFRFDMMGDHDAAAIELAYKEAKAINSNMIMIGEGWRTFQGDQGKPVKPADQDWMKSTDTVGVFSDDIRNSLKSGFPNEGTPAFITGGPQSLQGIFKNIKAQPGNFEADSPGDVVQYIAAHDNLTLHDVIAKSINKDPKVAEEEIHRRLRLGNVMILTSQGTAFIHSGQEYGRTKRLLNPDYMTKVSDDKLPNKATLIEAVKEYPYFIHDSYDSSDAINHFDWAAATDNNKHPISTKTQAYTAGLITLRRSTDAFRKLSKAEIDREVSLITEVGQGDIKEKDLVIAYQTIDSKGDIYAVFVNADSKARNVLLGEKYKHLLKGQVIVDADQAGIKPISTPRGVHFEKDSLLIDPLTAIVIKVGKVAPSPKEDLQADYPKTQSFKESKTVEKVNRIANKTSITPVVSKKADSYLTNEANLPKTGDKSSKILSVVGISILASLLALVGLSLKRNRHLK

SEQ ID NO: 20509 - protein, 732 aa, Streptococcus agalactiae
ATGAGAGATAATCATCTACACACGCATTTTTCCTATGATTGTCAAACGGCATTTGAGGACTATATTAATGGTTTTACAGGTGAATTTATCACAACAGAACATTTTGATTTATCAAATCCTTACACCGGTCAAGACGATGTTCCTGATTATAGTGCTTATTGTCAAAAAATAGATTATCTTAATCAGAAATATGGAAATCGATTTAAAAAAGGAATTGAAATCGGTTATTTTAAAGATAGGGAATCAGATATTTTAGATTATTTAAAAAATAAAGAATTTGATTTAAAACTATTGTCAATCCATCATAATGGTAGGTATGATTATCTGCAAGAAGAAGCTCTGAAAGTACCAACAAAGGAGCTTTTAGCAGATTACTTTAATCGTATGGAATTTGCCATAGGCCGTGTGGAAGCGCACGTTTTAGCTCACTTTGATTATGGTTTTCGTAAGTTAAACTTAGATGTAGAAGATTTAAAACCGTTTGAAACACAATTGAAGCGCATTTTCAGAAAGATGTTATCTAAGGGGTTAGCTTTTGAACTAAATACCAAATCCCTTTATCTATATGGGAATGAAAATCTTTATCGTTATGCTTTAGAGATACTAAAACAGCTTGGTTGTAAACAATACTCTATAGGCTCTGACGGTCATATTCCTGAACATTTTTGTTATGAATTTGATAGGCTTCAAGGCCTGTTAAAGGACTATCAAATTGATGAAAATCATTTGATA

SEQ ID NO: 20510 - protein, 244 aa, Streptococcus agalactiae
MRDNHLHTHFSYDCQTAFEDYINGFTGEFITTEHFDLSNPYTGQDDVPDYSAYCQKIDYLNQKYGNRFKKGIEIGYFKDRESDILDYLKNKEFDLKLLSIHHNGRYDYLQEEALKVPTKELLADYFNRMEFAIGRVEAHVLAHFDYGFRKLNLDVEDLKPFETQLKRIFRKMLSKGLAFELNTKSLYLYGNENLYRYALEILKQLGCKQYSIGSDGHIPEHFCYEFDRLQGLLKDYQIDENHLI

SEQ ID NO: 20511 - protein, 582 aa, Streptococcus agalactiae
ATGACTGACTTGGAAAAAATTATTAAAGCAATAAAAAGTGATTCACAGAATCAAAATTATACAGAAAATGGTATTGATCCTTTGTTTGCTGCTCCTAAAACAGCTAGGATCAATATTGTTGGCCAAGCACCTGGTTTAAAAACTCAAGAAGCAAGACTCTATTGGAAAGATAAATCTGGAGATCGTCTACGCCAGTGGCTTGGAGTTGATGAAGAGACATTTTACCATTCTGGAAAATTTGCTGTTTTGCCTTTAGATTTTTATTACCCAGGCAAAGGAAAATCAGGAGATTTACCCCCTAGAAAAGGTTTTGCGGAGAAATGGCACCCTCTTATTTTAAAAGAAATGCCTAATGTTCAATTGACCTTGCTAGTTGGTCAATATGCTCAGAAATATTATCTTGGAAGCTCCGCACATAAAAATCTAACAGAAACAGTGAAAGCTTACAAAGACTATCTACCCGATTATTTACCCCTGGTTCACCCATCACCGCGAAATCAAATTTGGCTAAAGAAGAATCCATGGTTTGAAAAAGATCTAATCGTTGATTTACAAAAGATAGTAGCAGATATTTTAAAAGAT

SEQ ID NO: 20512 - protein, 194 aa, Streptococcus agalactiae; identical to SEQ ID NO: 6928

SEQ ID NO: 20513 - protein, 1404 aa, Streptococcus agalactiae
ATGACAATTGATTTTAGAGCAGAAGTAGACAAACGCAAAGACGCTTTGATGGACGATTTAATAAATCTTCTTCGCATTAACTCGGAGCGTGATGATTCACAAGCTGATGCAGAGCATCCATTTGGTCCTGGACCTGTAAAAGCCTTGGAATTTTTCCTTGAGATGGCTGAGCGAGATGGCTACGAAACAAAAAACGTAGATAATTATGCGGGACACTTTACATTTGGTCAAGGCGAAGAAGAACTAGGTATTTTTGGGCATTTAGATGTTGTTCCTGCAGGCAGCGGTTGGGATACAGACCCTTATGAACCAGTTATCAAGGATAACCGTTTATATGCTCGAGGCTCATCAGACGATAAGGGACCAACAATGGCATGTTATTATGCTCTAAAAATTATTAAAGAGCTTGGGCTACCAACATCTAAGAAAGTTCGTTTTGTTGTAGGAACTGATGAAGAATCTGGATGGGGAGATATGGATTACTACTTCGAACATGTTGGTCTTCCAAAACCTGATTTTGGTTTCTCTCCAGATGCAGAATTTCCAATTATAAATGGTGAAAAAGGTAATATTACTGAATATTTACATTTTTCAGGAGAAAATAAGGGAGCTGTTAGACTGCATAGCTTTTCTGGCGGACTTCGCGAAAACATGGTTCCAGAATCAGCCACAGCACGTTTCACAAGTCATTTAGATCAGACAACACTTGGGGCTAGTCTAGCTGATTTTGCAAGTAAACATAATTTGAAAGCAGAATTATCTGTAGAAGATGAGCAATATATAGCAACAGTTTATGGTAAATCTGCTCATGGTTCAACACCACAAGAAGGTGTTAATGGGGCGACTTATTTAGCTCTTTATCTAAGTCAATTTGATTTTGAAGGTCCTGCTCGTGCTTTCTTAGATGTTACAGCCAACATTATTCACGAAGACTTCTCAGGTGAAAAACTTGGAGTAGCTTATGAAGATGACTGTATGGGACCATTGAGCATGAATGCAGGTGTCTTCCAGTTTGATGAAACTAATGATGATAATACTATCGCTCTTAATTTCCGTTACCCACAAGGGACAGATGCTAAAACTATCCAAACTAAGCTTGAGAAACTTAACGGAGTTGAAAAAGTGACTCTTTCTGACCATGAACACACACCACACTATGTACCTATGGACGATGAATTAGTATCAACCTTACTAGCTGTCTATGAAAAGCAAACTGGTCTTAAAGGACATGAACAGGTTATTGGTGGTGGGACATTTGGTCGCTTACTTGAACGGGGTGTTGCATACGGTGCCATGTTCCCAGGAGATGAAAATACTATGCATCAAGCTAATGAGTACATGCCTTTAGAAAATATTTTCCGTTCGGCTGCTATCTACGCAGAAGCTATCTATGAATTAATCAAA

SEQ ID NO: 20514 - protein, 468 aa, Streptococcus agalactiae
MTIDFRAEVDKRKDALMDDLINLLRINSERDDSQADAEHPFGPGPVKALEFFLEMAERDGYETKNVDNYAGHFTFGQGEEELGIFGHLDVVPAGSGWDTDPYEPVIKDNRLYARGSSDDKGPTMACYYALKIIKELGLPTSKKVRFVVGTDEESGWGDMDYYFEHVGLPKPDFGFSPDAEFPIINGEKGNITEYLHFSGENKGAVRLHSFSGGLRENMVPESATARFTSHLDQTTLGASLADFASKHNLKAELSVEDEQYIATVYGKSAHGSTPQEGVNGATYLALYLSQFDFEGPARAFLDVTANIIHEDFSGEKLGVAYEDDCMGPLSMNAGVFQFDETNDDNTIALNFRYPQGTDAKTIQTKLEKLNGVEKVTLSDHEHTPHYVPMDDELVSTLLAVYEKQTGLKGHEQVIGGGTFGRLLERGVAYGAMFPGDENTMHQANEYMPLENIFRSAAIYAEAIYELIK

SEQ ID NO: 20515 - protein, 600 aa, Streptococcus agalactiae
ATGAAATTTCTAGAATTAAATAAGAAGCGCCATGCTGTGAAACATTTTAATGATAAACCAGTCGACTTTAAAGATGTTAGAACTGCTATTGAAATTGCGACATTAGCGCCATCTGCTAATAATATTCAGCCTTGGAAGTTTGTTGTTGTCCAAGAAAAAAAATCTGCTCTAGCAGAAGGTTTACCGGAAAGTAATTGTAACCAAATTAATCAAGCGCAGTATGTTATTGCTTTATTTACAGATACAGATTTAGGACAGAGATCACGGAAAATAGCTCGTATTGGTCGTAGATCTCTTCCTGATGATTTAATTGGTTATTACATGGAAACTCTACCACCACGCTATGCTTTATATAGTGAAAAACAAACTGGAGAGTATCTCTCTTTAAATGCAGGTATCGTTGCTATGAATTTAGTACTTGCCTTGACAGATCAAGGTATTAGTTCTAATATGATTTTAGGATTCGATAAAGCGATTACCAATGATGTCTTAGAGATAGATAAACGTTTTAGACCAGAAATATTAATTACTGTTGGTTATAGTGATGAAAAGGTTGAGCCTAGTTATCGTTTGCCAGTTGATCATATTATTGAAAAACGT

SEQ ID NO: 20516 - protein, 200 aa, Streptococcus agalactiae; identical to SEQ ID NO: 2292

SEQ ID NO: 20517 - protein, 1631 aa, Streptococcus agalactiae
TTGATACTGTCAAATACTCCCGCAGTGACTAAAGACAATTGGACTTTGCTTTTTAATCATCCCTTAGCTTTATTACTCTTTATACTTTATATCGTAATCCTAATTGGGTTCATCTATACTGAGTTCGCTATCTATACTATTGCCATACTGAAAACTGAATTTTCTCTCAGTATCAAAAAATGGCTAACATCTTTCCTAAAAAAATAAAATCACTTTTAGGACCACAGCTAATTTGGGTATCAATCTACTTACTTTTGACAATTCCTCTAGCTAACCTTGGTCTAAGGTCAAGTATACTAGAGCATCTTAAAATCCCTGACTTTATTTCTGGCGAGTTAACAAAGACAGTCTTTGGAAAGATAGGTTACTCTACCCTTTTACTGCTTATTTGTTACTTAAACCTTCGATTAATTTATTTTCTCCCGCTGACCATTTTAACTGACTACAACGCTAAAGAAGCACTTTTAGAGAGTTGGAAACTTAGCCGCGGAAAGCATCAGTGGCGTCTTCTAAGTAAAATTATTTTAACCAGTTTATTTATATCTGTAATTGGAACAGTTGCACTAGCTGTTGTTGCTGGTACATTTTCATTCATTGATCATTCTGGAAACAATTTTCCTCTTCAAGCCACTTTCTATAACCTTTTAAAATCAATACTTTTTGCCGTAACACTTCTTATTAAATGTTTAATCATAAGTCACCTATTAGCAGATATTAAACAAAATAAAAGTATTGTTCAACAATGGAGAGCTTGGAAAGGCGTCCACCATAAGCAAAAATTTAAACACATTGCTTGTGTTATTCTAGCTCTAGCTATTGGTACCACTGCCTTAAAAAATGCTATAGCTCTGGCTCTCTTACAAGATAACATTTCAATTAAAAAAGAATTAATAGCCCATCGTGGTGATACATCACATGGCGTTGAAAATTCTATTGAAGCATTAAAAGCAGCCCATAAAGCAAAAGCAGATTATTCAGAGATGGATGTTATCATGACAAAAGATCATAAATTAGTAGTCATTCATGATGATAATCTCAAACGACTCTCTGGTATGAACAAAGATGTTTCTAAACTAACTTTAGATCAAGTTACAAAAATCCCAATTCACCAAGGGCGTTTTGCTAGTTACATTCCATCATTTGCAGAATTTATGAAGACCGCTCAGTCACTAGATCAAAAAATCATGATTGAATTGAAACCGTATAATCAAAACCTCGATATCTATGCGGATGAATTTATCAAAGAATTTAAAGAGCTTCGTCTATCAACCAAGCATAAAGTAATGTCTCTCAACTTGACACTCATTGAAAAGATTGAGAAAAAATTGCCACAACTTGATACAGGTTACCTAATCCCACTACATTGGGGAACGCTTCAAAATCATAACGTTGACTTTTATGGGATTGAGGAATTTTCATACAATGATTGGATTGCATATCTCGCCCAAGAATATAATAAACAGCTCTATGTTTGGACTATTAACCGTGATAACCTTATGATACGTTATTTACAAAGCCCAGTTAATGGAATCATCACAGATGAACTCAATCTTTTCAAGGTCATTAATAAAGATATCAAAAATAGCCCTAATTATTATCAAAGAGCTCTCCAACTTATTGATAGCGAGGGT

SEQ ID NO: 20518 - protein, 544 aa, Streptococcus agalactiae
  VARIANT 64: Xaa = Any Amino Acid
MILSNTPAVTKDNWTLLFNHPLALLLFILYIVILIGFIYTEFAIYTIAILKTEFSLSIKKWLTXFPKKIKSLLGPQLIWVSIYLLLTIPLANLGLRSSILEHLKIPDFISGELTKTVFGKIGYSTLLLLICYLNLRLIYFLPLTILTDYNAKEALLESWKLSRGKHQWRLLSKIILTSLFISVIGTVALAVVAGTFSFIDHSGNNFPLQATFYNLLKSILFAVTLLIKCLIISHLLADIKQNKSIVQQWRAWKGVHHKQKFKHIACVILALAIGTTALKNAIALALLQDNISIKKELIAHRGDTSHGVENSIEALKAAHKAKADYSEMDVIMTKDHKLVVIHDDNLKRLSGMNKDVSKLTLDQVTKIPIHQGRFASYIPSFAEFMKTAQSLDQKIMIELKPYNQNLDIYADEFIKEFKELRLSTKHKVMSLNLTLIEKIEKKLPQLDTGYLIPLHWGTLQNHNVDFYGIEEFSYNDWIAYLAQEYNKQLYVWTINRDNLMIRYLQSPVNGIITDELNLFKVINKDIKNSPNYYQRALQLIDSEG

SEQ ID NO: 20519 - protein, 1779 aa, Streptococcus agalactiae
ATGAATGAACTGATTAAACATAAGCTAGAATTGTTACCAGACAGTCCTGGTTGTTACCTTCATAAAGATAAGAATGGGACAATTATTTATGTAGGTAAGGCTAAAAATCTTAAGAATCGTGTGAGAAGTTATTTTCATGGGAGTCATAATACTAAGACAGAACTTTTGGTCTCTGAGATTGAAGACTTTGAATACATTGTGACAACATCTAATACCGAAGCTCTATTATTGGAAATTAATTTAATCCAAGAAAATATGCCGAAGTATAATATTCGATTAAAAGATGACAAGTCTTACCCATATATCAAAATAACAAATGAACGTTATCCTCGTCTTATGATTACACGTCAAGTAAAAAAATCAGATGGCACTTATTTTGGACCTTATCCGGATTCTGGGGCAGCAACTGAGATTAAGCGGTTACTAGATAGGCTCTTTCCTTTTAAGAAATGTACTAATCCAGCAAATAAAGTATGCTTTTATTATCATTTAGGGCAATGCAATGCACATACAGTTTGTCAAACTAATAAAGCTTATTGGGATAGTCTGAGAGAAGATGTAAAACAGTTTCTTAATGGTAAAGATAATAAAATTGTTAACGGATTAACTGAAAAAATGAAGAGCGCTGCTATGACTATGGAATTTGAGCGTGCGGCTGAATATCGAGATTTGATCGAAGCAATTAGTTTGTTGCGTACTAAGCAGCGTGTTATTCATCAAGATATGAAGGATAGAGATGTTTTTGGTTATTTCGTTGATAAGGGTTGGATGTGTGTACAGGTCTTTTTTGTTCGAAATGGAAAATTGATTCAGCGTGACGTGAATATGTTTCCTTATTATAATGAACCAGAGGAAGATTTTCTAACTTACATAGGGCAATTTTATCAAGATACAAAACATTTTCTACCCAAAGAAGTCTTTATTCCACAGGATATTGATGCTAAGTCGGTTGAAACAATTGTAGGCTGTAAGATTGTTAAACCACAACGTGGTGAAAAGAAACAGTTAGTAAATCTGGCAATAAAAAATGCTCGTGTCAGTTTACAACAGAAGTTTGACTTACTGGAAAAAGATATTCGTAAAACTCATGGGGCAATTGAAAATTTAGGTAATCTTCTTAATATCCCTAAACCAGTACGCATAGAAGCATTTGATAATTCCAATATTCAAGGGACAAGTCCAGTAGCTGCTATGGTGGTATTTGTGAATGGAAAGCCAAGTAAAAAAGACTATCGAAAGTTTAAAATTAAGACTGTTATCGGACCAGATGATTATGCTAGTATGAGAGAAGTCATTCATCGGCGTTATAGTAGGGTTTTAAAAGATGGCTTGACACCTCCGGACTTGATTGTAATTGATGGTGGTCAGGGGCAAGTAAATATAGCGCGTGATGTTATTGAGAACCAATTAGGTTTAGCCATACCTATTGCAGGTTTGCAAAAGAATGATAAACACCAAACACATGAATTACTTTTTGGAGATCCTTTAGAAGTAGTAGAACTACCGCGTAATTCAGAAGAATTTTTCTTACTTCACCGTATTCAAGATGAGGTACATCGTTTTGCTATTACTTTTCATCGTCAATTACGCTCCAAAAATTCCTTTTCTTCAAAATTAGATGGTATCACTGGGTTGGGACCAAAACGTAAACAATTGCTAATGAAACATTTTAAAAGCTTACCTAATATCCAAAAAGCTGATATTGAGGACATTATTATGTGTGGTATTCCTAGGACAGTTGCAGAAAGTCTCCGAGATTCTCTTAATGATCCTCCTAAA

SEQ ID NO: 20520 - protein, 593 aa, Streptococcus agalactiae
MNELIKHKLELLPDSPGCYLHKDKNGTIIYVGKAKNLKNRVRSYFHGSHNTKTELLVSEIEDFEYIVTTSNTEALLLEINLIQENMPKYNIRLKDDKSYPYIKITNERYPRLMITRQVKKSDGTYFGPYPDSGAATEIKRLLDRLFPFKKCTNPANKVCFYYHLGQCNAHTVCQTNKAYWDSLREDVKQFLNGKDNKIVNGLTEKMKSAAMTMEFERAAEYRDLIEAISLLRTKQRVIHQDMKDRDVFGYFVDKGWMCVQVFFVRNGKLIQRDVNMFPYYNEPEEDFLTYIGQFYQDTKHFLPKEVFIPQDIDAKSVETIVGCKIVKPQRGEKKQLVNLAIKNARVSLQQKFDLLEKDIRKTHGAIENLGNLLNIPKPVRIEAFDNSNIQGTSPVAAMVVFVNGKPSKKDYRKFKIKTVIGPDDYASMREVIHRRYSRVLKDGLTPPDLIVIDGGQGQVNIARDVIENQLGLAIPIAGLQKNDKHQTHELLFGDPLEVVELPRNSEEFFLLHRIQDEVHRFAITFHRQLRSKNSFSSKLDGITGLGPKRKQLLMKHFKSLPNIQKADIEDIIMCGIPRTVAESLRDSLNDPPK

SEQ ID NO: 20521 - protein, 765 aa, Streptococcus agalactiae
ATGATAGACGTTGAGAATATTCTTGAAAAAATGAAACCTAACCAAAAAATCAATTACGATTGGGTCATGCAACAAATGGTTAAGCAGTGGCAAGCTAGTGATATCCGTCCTAAAATTCTGATGCATGTCTGCTGTGCTCCTTGTAGTACATATACCCTTGAATACTTATCACAATGGGCAGATATTACCATCTATTTTGCTAATTCAAATATCCATCCTAAAGATGAATATTATCGCCGCGAATATGTTACTCAAAAATTTGTTCATGATTTCAACAAAAATACTGGATATTCTGTACAATTCTTATCAGCACCATATGAACCAAATGAATTTTTCAAAATTGTTCATGGGTTAGAAGAAGAACCTGAAGGTGGGGATCGTTGTAAAGTTTGCTATGATTTCCGTCTTGATAAGACAGCGGAAAAAGCCGTTGAACTAGGTTTTGATTACTTTGGCAGTGCCCTAACTATTAGTCCTCACAAAAACTCTCAAACAATCAATACTATTGGTATTGATGTCCAAAAAATTTATGATACTCAGTATCTTCCTAGCGACCTTAAAAAAAATAAAGGTTACCAACGTTCCGTTGAGATGTGTAAAGATTATGATATCTACCGACAATGTTACTGTGGGTGTATTTTCGGTGCTAAAGATCAAGGGATAAATCTTCTCCAAATCAAAAAAGATGCGAAAGCTTTCATGAGTGATAAAGACGGCAAAGAAGAATTTCCTAATATACACTTCACATTTAATGGCAAGTCAATG

SEQ ID NO: 20522 - protein, 255 aa, Streptococcus agalactiae
MIDVENILEKMKPNQKINYDWVMQQMVKQWQASDIRPKILMHVCCAPCSTYTLEYLSQWADITIYFANSNIHPKDEYYRREYVTQKFVHDFNKNTGYSVQFLSAPYEPNEFFKIVHGLEEEPEGGDRCKVCYDFRLDKTAEKAVELGFDYFGSALTISPHKNSQTINTIGIDVQKIYDTQYLPSDLKKNKGYQRSVEMCKDYDIYRQCYCGCIFGAKDQGINLLQIKKDAKAFMSDKDGKEEFPNIHFTFNGKSM

SEQ ID NO: 20523 - protein, 1104 aa, Streptococcus agalactiae
TTGGGTAGAGGAAATAAAGAACAAATTCGCACAGATTTTCATCAATTTCTATATTTAGGTTTGATACTGTCCTTAATATTATTTTTAATCATGCAATTCATTGCTCAACCTGTCTTGGGGAGTTTGGGTTTAGAAGATGAAGTTCTAACAGTTGGTCGTGGTTATTTAAATTATATGTTGATTGGAATCATGCCGCTGGTGTTGTTTAGCATTTGCCGTTCATTCTTTGATGCATTGGGGTTAACAAGGTTATCTATGTATCTGATGCTTTTAATTCTACCCTTTAATTCATTTTTTAATTATATGCTTATCTACGGTAAATTTGGTATGCCTAGACTAGGAGGTGCGGGGGCAGGTCTTGGAACTTCTTTAACTTATTGGGCTATTTTTATTGTTATTATTATTGTGATGGCGCTTCATCCTCAAATTAAAACATATCATATATGGACTCTGGAAAGAATAAAAGCTCCTTTGATTATTGAAGATATTCGATTGGGATTACCGATTGGTTTACAAATTTTTGCAGAAGTTGCAATTTTTGCAGTAGTAGGCTTATTCATGGCAAAATTTTCTTCAATCATTATTGCAGCACATCAGGCTGCTATGAATTTTTCATCACTAATGTATGCCTTTCCTCTAAGTATTTCCACTGCTCTAGCTATTACAATATCGTTTGAAGTAGGGGCAGAGCGCTTTCAGGATGCAAACACTTATAGTAGGATAGGACGCTTAACAGCGGTAGGGATTACATCAGGAACCTTACTATTTTTATTTCTATTTCGTGAGAATGTAGCAGCAATGTATAATAGTGACCCTCACTTTGTCGCTATTACAGCTCAATTCCTAACTTATAGTCTCTTTTTCCAGTTTGCAGATGCTTATGCAGCTCCTGTACAGGGGATTTTACGAGGCTATAAGGATACAACAAAACCGTTTATGATCGGTGCGGGCTCTTATTGGTTATGTGCTTTGCCATTAGCGGTTATCTTAGAAAAAAATAGCCAGTTAGGTCCGTTTGCCTATTGGATTGGTTTAATCACAGGTATTTTTGTTTGCGGTCTATTTCTAAACCAACGTCTGCAAAAGATTAAGAAGTTGTATTAT

SEQ ID NO: 20524 - protein, 368 aa, Streptococcus agalactiae
MGRGNKEQIRTDFHQFLYLGLILSLILFLIMQFIAQPVLGSLGLEDEVLTVGRGYLNYMLIGIMPLVLFSICRSFFDALGLTRLSMYLMLLILPFNSFFNYMLIYGKFGMPRLGGAGAGLGTSLTYWAIFIVIIIVMALHPQIKTYHIWTLERIKAPLIIEDIRLGLPIGLQIFAEVAIFAVVGLFMAKFSSIIIAAHQAAMNFSSLMYAFPLSISTALAITISFEVGAERFQDANTYSRIGRLTAVGITSGTLLFLFLFRENVAAMYNSDPHFVAITAQFLTYSLFFQFADAYAAPVQGILRGYKDTTKPFMIGAGSYWLCALPLAVILEKNSQLGPFAYWIGLITGIFVCGLFLNQRLQKIKKLYY

SEQ ID NO: 20525 - protein, 603 aa, Streptococcus agalactiae
ATGATACAGGGAGCCCAGCTCAAATTGAAAGCAGCCAAACACTTAGGAAATAAAATCCCTAGGAAGATTATGAAACAGGCAGAAATTACCGTTAAGGTGGACGATAGAAAAGAGGGTTTTATGATTATTTCATCAGTTTCACAAGGTTTATTATGGGGGATATTAGGATTAGGGATATACTTAACCTTTAGAATCTTAAAATTTCCAGACATGACAACAGAGGGCTCCTTCCCTCTAGGGGGAGCGGTTTGTGTTACCTTAATGAATCAAGGGGTTAATCCTATTTTGGCGACGATTCTAGGCATGCTATCAGGGATGTTAGCAGGATTTGTTACTGGTTTACTTTATACTAAAGGAAAGATACCGACGATTTTAGCAGGAATTTTAGTAATGACCTCATGCCACTCCATTATGCTAATGGTTATGAAAAGAGCAAATCTAGGTTTAAATGAGATTCAAACATTGAAAGATTTTCTTCCGTTTTCAAATGATTTAAATCTTCTCGTATTAGGTTTGATAGCTATTCTCTTGGTGATTTCTGCCTTAATTTATTTTCTCTACACACGCTTGGGGCAAGCTTATATTGCAACCAGGAGACAACCC

SEQ ID NO: 20526 - protein, 201 aa, Streptococcus agalactiae
MIQGAQLKLKAAKHLGNKIPRKIMKQAEITVKVDDRKEGFMIISSVSQGLLWGILGLGIYLTFRILKFPDMTTEGSFPLGGAVCVTLMNQGVNPILATILGMLSGMLAGFVTGLLYTKGKIPTILAGILVMTSCHSIMLMVMKRANLGLNEIQTLKDFLPFSNDLNLLVLGLIAILLVISALIYFLYTRLGQAYIATRRQP

SEQ ID NO: 20527 - protein, 465 aa, Streptococcus agalactiae
ATGATTATTTCATCAGTTTCACAAGGTTTATTATGGGGGATATTAGGATTAGGGATATACTTAACCTTTAGAATCTTAAAATTTCCAGACATGACAACAGAGGGCTCCTTCCCTCTAGGGGGAGCGGTTTGTGTTACCTTAATGAATCAAGGGGTTAATCCTATTTTGGCGACGATTCTAGGCATGCTATCAGGGATGTTAGCAGGATTTGTTACTGGTTTACTTTATACTAAAGGAAAGATACCGACGATTTTAGCAGGAATTTTAGTAATGACCTCATGCCACTCCATTATGCTAATGGTTATGAAAAGAGCAAATCTAGGTTTAAATGAGATTCAAACATTGAAAGATTTTCTTCCGTTTTCAAATGATTTAAATCTTCTCGTATTAGGTTTGATAGCTATTCTCTTGGTGATTTCTGCCTTAATTTATTTCTCTACCACGCTTGGGGCAGCTTATNNNNNT

SEQ ID NO: 20528 - protein, 155 aa, Streptococcus agalactiae
  VARIANT 154, 155: Xaa = Any Amino Acid
MIISSVSQGLLWGILGLGIYLTFRILKFPDMTTEGSFPLGGAVCVTLMNQGVNPILATILGMLSGMLAGFVTGLLYTKGKIPTILAGILVMTSCHSIMLMVMKRANLGLNEIQTLKDFLPFSNDLNLLVLGLIAILLVISALIYFSTTLGAAYXX

SEQ ID NO: 20529 - protein, 360 aa, Streptococcus agalactiae
ATGTCAGTCATGACCAAAAAAGTAGACGCTGTCTTTGTTCCACAAGATAATACTATTGCGAGTGCTTTTAGAACAGTTATCGTAGCAGCAAACCAAGCTAATATACCTGTGTATTCCAGTGTTGATACTATGGTTGAACAAGGAAGTATAGCATCAGTAGCGCAGAGTCAATATGGCTTAGGGTTAGAAACTGCAAAACAGGCCATTAAAGTCCTAAGAGGGAAGCCAGTTAAAGATGTACCAGTCAAAGTTATTGATACAGGGAAGCCAAGCCTCAATTTGAAAGCAGCCAAACACTTAGGAATTAAAATTCCTAAGAAGATTATGAAACAGGCAGAAATTACCGTTAAGGTTGACGAT

SEQ ID NO: 20530 - protein, 120 aa, Streptococcus agalactiae
MSVMTKKVDAVFVPQDNTIASAFRTVIVAANQANIPVYSSVDTMVEQGSIASVAQSQYGLGLETAKQAIKVLRGKPVKDVPVKVIDTGKPSLNLKAAKHLGIKIPKKIMKQAEITVKVDD

SEQ ID NO: 20531 - protein, 406 aa, Streptococcus agalactiae
ATGTCTAAAGATAGTATCATTGAAAAATTAAAAAAGGATTCTAAGAAATATCGTCAAGAAGACATCAACTTTGTGATTAATAACCTCAAGGTTGATTACAAAAAAAATGCCTTGATTTCTGCCAAAATTTATTCAAAGACCATGAATTTATCTAAACAATCTATCTTTGAACAGCTCTATTCGGAGTCTCCAGATAAGGCAACCCACTCTGATAAATTTACAAAAGAAGAATCCCAATATGCTATAGACCATCTCAAAGTAGATTTCAAAGAAAATGCTCTTGAGACTGCTAAAAGTTATCAAAGTAGTTCTTCTTTATCCAAAGAAGAAATCTATAAACAATTGACATCTACGCTGGGCGATAAATTCACAAATGATGAAGCCCAATATGCTGTAGATCATTGAA

SEQ ID NO: 20532 - protein, 136 aa, Streptococcus agalactiae; identical to SEQ ID NO: 6950

SEQ ID NO: 20533 - protein, 759 aa, Streptococcus agalactiae
ATGCCACACTCAAGTTATTACTATCAAGCCGTGGAGTCAGTATCTGAAACGGAGTTTGAAGAAACTATTAAAAGAATTTTCCTCGATAGCGAGTCCAGATACGGATCCAGAAAAATCAAAATATGCTTGAATAACGAAGGTATCACACTTTCACGTCGTCGGATTCGACGCATTATGAAGCGACTCAATTTGGTTTCTGTTTATCAGAAAGCCACCTTCAAACCACATTCTAGAGGCAAGAATGAAGCCCCTATTCCCAACCACTTAGACAGGCAATTTAAGCAAGAAAGACCACTACAGGCCTTAGTCACTGACTTAACCTATGTTCGTGCAGGCAATCGTTGGGCTTATGTTTGCCTCATCATTGACCTATACAACCGTGAAATCATCGGCCTGTCTCTTGGTTGGCACAAGACCGCTGAACTCGTTAAGCAAGCCATACAAAGCATCCCTTACGCCCTGACCAAAGTCAAGATGTTCCATTCAGATCGTGGCAAAGAGTTTGATAATCAGTTAATTGATGAAATATTGGAAGCCTTTGGAATCACACGTTCGCTTAGTCAGGCTGGTTGTCCTTATGACAATGCCGTAGCTGAAAGTACGTATCGTGCTTTCAAAATTGAATTTGTTTATCAAGAAACCTTTCAATTGCTGGAAGAACTAGCTCTTAAGACTAAAGACTATGTTCATTGGTGGAATTACCACCGCATTCATGGTAGTCTCAACTACCAAACACCAATGACTAAAAGATTAATTGCC

SEQ ID NO: 20534 - protein, 253 aa, Streptococcus agalactiae
MPHSSYYYQAVESVSETEFEETIKRIFLDSESRYGSRKIKICLNNEGITLSRRRIRRIMKRLNLVSVYQKATFKPHSRGKNEAPIPNHLDRQFKQERPLQALVTDLTYVRAGNRWAYVCLIIDLYNREIIGLSLGWHKTAELVKQAIQSIPYALTKVKMFHSDRGKEFDNQLIDEILEAFGITRSLSQAGCPYDNAVAESTYRAFKIEFVYQETFQLLEELALKTKDYVHWWNYHRIHGSLNYQTPMTKRLIA

SEQ ID NO: 20535 - protein, 288 aa, Streptococcus agalactiae; identical to SEQ ID NO: 6955

SEQ ID NO: 20536 - protein, 96 aa, Streptococcus agalactiae; identical to SEQ ID NO: 2304

SEQ ID NO: 20537 - protein, 378 aa, Streptococcus agalactiae; identical to SEQ ID NO: 6957

SEQ ID NO: 20538 - protein, 126 aa, Streptococcus agalactiae; identical to SEQ ID NO: 6958

SEQ ID NO: 20539 - protein, 231 aa, Streptococcus agalactiae; identical to SEQ ID NO: 6959

SEQ ID NO: 20540 - protein, 77 aa, Streptococcus agalactiae; identical to SEQ ID NO: 6960

SEQ ID NO: 20541 - protein, 2463 aa, Streptococcus agalactiae
GTGAAGAAAACATATGGTTATATCGGCTCAGTTGCTGCCATTTTACTAGCTACTCATATTGGAAGTTACCAACTTGGTAAGCATCATATGGGTCTAGCAACAAAGGACAATCAGATTGCCTATATTGATGACAGCAAAGGTAAGGCAAAAGCCCCTAAAACAAACAAAACGATGGATCAAATCAGTGCTGAAGAAGGCATCTCTGCTGAACAGATCGTAGTCAAAATTACTGACCAAGGCTATGTGACCTCACACGGTGACCATTATCATTTTTACAATGGGAAAGTTCCTTATGATGCGATTATTAGTGAAGAGTTGTTGATGACGGATCCTAATTACCGTTTTAAACAATCAGACGTTATCAATGAAATCTTAGACGGTTACGTTATTAAAGTCAATGGCAACTATTATGTTTACCTCAAGCCAGGTAGTAAGCGCAAAAACATTCGAACCAAACAACAAATTGCTGAGCAAGTAGCCAAAGGAACTAAAGAAGCTAAAGAAAAAGGTTTAGCTCAAGTGGCCCATCTCAGTAAAGAAGAAGTTGCGGCAGTCAATGAAGCAAAAAGACAAGGACGCTATACTACAGACGATGGCTATATTTTTAGTCCGACAGATATCATTGATGATTTAGGAGATGCTTATTTAGTACCTCATGGTAATCACTATCATTATATTCCTAAAAAGGATTTGTCCAGTGAGCTAGCTGCTGCACAAGCCTACTGGAGTCAAAAACAAGGTCGAGGTGCTAGACCGTCTGATTACCGCCCGACACCAGCCCCAGGTCGTAGGAAAGCCCCAATTCCTGATGTGACGCCTAACCCTGGACAAGGTCATCAGCCAGATAACGGTGGCTATCATCCAGCGCCTCCTAGGCCAAATGATGCGTCACAAAACAAACACCAAAGAGATGAGTTTAAAGGAAAAACCTTTAAGGAACTTTTAGATCAACTACACCGTCTTGATTTGAAATACCGTCATGTGGAAGAAGATGGGTTGATTTTTGAACCGACTCAAGTGATCAAATCAAACGCTTTTGGGTATGTGGTGCCTCATGGAGATCATTATCATATTATCCCAAGAAGTCAGTTATCACCTCTTGAAATGGAATTAGCAGATCGATACTTAGCTGGCCAAACTGAGGACAATGACTCAGGTTCAGAGCACTCAAAACCATCAGATAAAGAAGTGACACATACCTTTCTTGGTCATCGCATCAAAGCTTACGGAAAAGGCTTAGATGGTAAACCATATGATACGAGTGATGCTTATGTTTTTAGTAAAGAATCCATTCATTCAGTGGATAAATCAGGAGTTACAGCTAAACACGGAGATCATTTCCACTATATAGGATTTGGAGAACTTGAACAATATGAGTTGGATGAGGTCGCTAACTGGGTGAAAGCAAAAGGTCAAGCTGATGAGCTTGCTGCTGCTTTGGATCAGGAACAAGGCAAAGAAAAACCACTCTTTGACACTAAAAAAGTGAGTCGCAAAGTAACAAAAGATGGTAAAGTGGGCTATATGATGCCAAAAGATGGTAAGGACTATTTCTATGCTCGTGATCAACTTGATTTGACTCAGATTGCCTTTGCCGAACAAGAACTAATGCTTAAAGATAAGAAGCATTACCGTTATGACATTGTTGACACAGGTATTGAGCCACGACTTGCTGTAGATGTGTCAAGTCTGCCGATGCATGCTGGTAATGCTACTTACGATACTGGAAGTTCGTTTGTTATCCCACATATTGATCATATCCATGTCGTTCCGTATTCATGGTTGACGCGCGATCAGATTGCAACAGTCAAGTATGTGATGCAACACCCCGAAGTTCGTCCGGATGTATGGTCTAAGCCAGGGCATGAAGAGTCAGGTTCGGTCATTCCAAATGTTACGCCTCTTGATAAACGTGCTGGTATGCCAAACTGGCAAATTATCCATTCTGCTGAAGAAGTTCAAAAAGCCCTAGCAGAAGGTCGTTTTGCAACACCAGACGGCTATATTTTCGATCCACGAGATGTTTTGGTCAAAGAAACTTTTGTATGGAAAGATGGCTCCTTTAGCATCCCAAGAGCAGATGGCAGTTCATTGAGAACCATTAATAAATCTGATCTATCCCAAGCTGAGTGGCAACAAGCTCAAGAGTTATTGGCAAAGAAAAATACTGGTGATGCTACTGATACGGATAAACCCAAAGAAAAGCAACAGGCAGATAAGAGCAATGAAAACCAACAGCCAAGTGAAGCCAGTAAAGAAGAAAAAGAATCAGATGACTTTATAGACAGTTTACCAGACTATGGTCTAGATAGAGCAACCCTAGAAGATCATATCAATCAATTAGCACAAAAAGCTAATATCGATCCTAAGTATCTCATTTTCCAACCAGAAGGTGTCCAATTTTATAATAAAAATGGTGAATTGGTAACTTATGATATCAAGACACTTCAACAAATAAACCCT

SEQ ID NO: 20542 - protein, 822 aa, Streptococcus agalactiae
  VARIANT 233: Xaa = Any Amino Acid
MKKTYGYIGSVAAILLATHIGSYQLGKHHMGLATKDNQIAYIDDSKGKAKAPKTNKTMDQISAEEGISAEQIVVKITDQGYVTSHGDHYHFYNGKVPYDAIISEELLMTDPNYRFKQSDVINEILDGYVIKVNGNYYVYLKPGSKRKNIRTKQQIAEQVAKGTKEAKEKGLAQVAHLSKEEVAAVNEAKRQGRYTTDDGYIFSPTDIIDDLGDAYLVPHGNHYHYIPKKDLSXSELAAAQAYWSQKQGRGARPSDYRPTPAPGRRKAPIPDVTPNPGQGHQPDNGGYHPAPPRPNDASQNKHQRDEFKGKTFKELLDQLHRLDLKYRHVEEDGLIFEPTQVIKSNAFGYVVPHGDHYHIIPRSQLSPLEMELADRYLAGQTEDNDSGSEHSKPSDKEVTHTFLGHRIKAYGKGLDGKPYDTSDAYVFSKESIHSVDKSGVTAKHGDHFHYIGFGELEQYELDEVANWVKAKGQADELAAALDQEQGKEKPLFDTKKVSRKVTKDGKVGYMMPKDGKDYFYARDQLDLTQIAFAEQELMLKDKKHYRYDIVDTGIEPRLAVDVSSLPMHAGNATYDTGSSFVIPHIDHIHVVPYSWLTRDQIATVKYVMQHPEVRPDVWSKPGHEESGSVIPNVTPLDKRAGMPNWQIIHSAEEVQKALAEGRFATPDGYIFDPRDVLVKETFVWKDGSFSIPRADGSSLRTINKSDLSQAEWQQAQELLAKKNTGDATDTDKPKEKQQADKSNENQQPSEASKEEKESDDFIDSLPDYGLDRATLEDHINQLAQKANIDPKYLIFQPEGVQFYNKNGELVTYDIKTLQQINP

SEQ ID NO: 20543 - protein, 747 aa, Streptococcus agalactiae
ATGATCCAATCAGGTGCAGGCATTCATTCCTTTGAACCGTCTGTAAATGATGTGGCAGCTATTTATGACGCGGATTTGTTTGTTTACCATTCACATACCTTAGAAGCTTGGGCAAGGGATCTAGACCCTAATTTAAAAAAATCAAAGGTTGATGTGTTTGAAGCGTCAAAACCTTTGACACTAGATAGAGTCAAAGGGCTAGAAGATATGGAAGTCACACAAGGCATTGACCCTGCGACACTTTATGACCCACATACCTGGACGGATCCCGTTTTAGCTGGTGAGGAAGCTGTTAATATCGCTAAAGAGCTAGGACGTTTGGATCCTAAACACAAAGACAGTTACACTAAAAAGGCTAAGGCTTTCAAAAAAGAAGCAGAGCAACTAACTGAAGAATACACTCAAAAATTTAAAAAGGTGCGCTCAAAAACATTCGTGACGCAACACACGGCATTTTCTTATCTGGCTAAACGATTCGGCTTGAAACAACTTGGTATCTCGGGTATTTCTCCAGAGCAAGAGCCCTCTCCTCGCCAATTGAAAGAAATTCAAGACTTTGTCAAAGAATACAACGTCAAGACTATTTTTGCAGAAGACAACGTCAATCCCAAAATTGCTCATGCTATTGCGAAATCAACAGGAGCTAAAGTAAAGACATTAAGTCCACTTGAAGCTGCTCCAAGCGGAAACAAGACATATCTAGAAAATCTTAGAGCAAATTTGGAAGTGCTCTATCAACAGTTGAAG

SEQ ID NO: 20544 - protein, 249 aa, Streptococcus agalactiae
MIQSGAGIHSFEPSVNDVAAIYDADLFVYHSHTLEAWARDLDPNLKKSKVDVFEASKPLTLDRVKGLEDMEVTQGIDPATLYDPHTWTDPVLAGEEAVNIAKELGRLDPKHKDSYTKKAKAFKKEAEQLTEEYTQKFKKVRSKTFVTQHTAFSYLAKRFGLKQLGISGISPEQEPSPRQLKEIQDFVKEYNVKTIFAEDNVNPKIAHAIAKSTGAKVKTLSPLEAAPSGNKTYLENLRANLEVLYQQLK

SEQ ID NO: 20545 - protein, 1479 aa, Streptococcus agalactiae
ATGCTTTCTGATAAATTTGAAGTAACAGTAACAGTTCACAACAAATCTGATAAACCTCAAGAGTTGTATTACCAAGCAACTGTTCAAACAGATAAAGTAGATGGAAAACACTTTGCCTTGGCTCCTAAAGCATTGTATGAGACATCATGGCAAAAAATCACAATTCCAGCCAATAGCAGCAAACAAGTCACCGTTCCAATCGATGCTAGTCGATTTAGCAAGGACTTGCTTGCCCAAATGAAAAATGGCTATTTCTTAGAAGGTTTTGTTCGTTTCAAACAAGATCCTAAAAAAGAAGAGCTTATGAGCATTCCATATATTGGTTTCCGAGGTGATTTTGGCAATCTGTCAGCCTTAGAAAAACCAATCTATGATAGCAAAGACGGTAGCAGCTACTATCATGAAGCAAATAGTGATGCCAAAGACCAATTAGATGGTGATGGATTACAGTTTTACGCTCTGAAAAATAACTTTACAGCACTTACCACAGAGTCTAACCCGTGGACGATTATTAAAGCTGTCAAAGAAGGGGTTGAAAACATAGAGGATATCGAATCTTCAGAGATCACAGAAACCATTTTTGCAGGTACTTTTGCAAAACAAGACGATGATAGCCACTACTATATCCACCGTCACGCTAATGGCAAGCCATATGCTGCGATCTCTCCAAATGGGGACGGTAACAGAGATTATGTCCAATTCCAAGGTACTTTCTTGCGTAATGCTAAAAACCTTGTGGCTGAAGTCTTGGACAAAGAAGGAAATGTTGTTTGGACAAGTGAGGTAACCGAGCAAGTTGTTAAAAACTACAACAATGACTTGGCAAGCACACTTGGTTCAACCCGTTTTGAAAAAACGCGTTGGGACGGTAAAGATAAAGACGGCAAAGTTGTTGCTAACGGAACCTACACCTATCGTGTCCGCTACACTCCGATTAGCTCAGGTGCAAAAGAACAACACACTGATTTTGATGTGATTGTAGACAATACGACACCTGAAGTCGCAACATCGGCAACATTCTCAACAGAAGATCGTCGTTTGACACTTGCATCTAAACCAAAAACCAGCCAACCGGTTTACCGTGAGCGTATTGCTTATACTTACATGGATGAGGATCTGCCAACAACAGAGTATATTTCTCCAAATGAAGATGGTACCTTTACTCTTCCTGAAGAGGCTGAAACAATGGAAGGCGCTACTGTTCCATTGAAAATGTCAGACTTTACTTATGTTGTTGAAGATATGGCTGGTAACATCACTTATACACCAGTGACTAAGCTATTGGAGGGCCACTCTAATAAGCCAGAACAAGACGGTTCAGATCAAGCACCAGACAAAAAACCAGAAGCTAAACCAGAACAAGACGGTTCAGGTCAAACACCAGATAAAAAAACAGAAACTAAACCAGAAAAAGATAGTTCAGGTCAAACACCAGGTAAAACTCGTAAAAAAGGTCAACCTTCTCNNNNNTTAATTAAT

SEQ ID NO: 20546 - protein, 493 aa, Streptococcus agalactiae
  VARIANT 489, 490: Xaa = Any Amino Acid
MLSDKFEVTVTVHNKSDKPQELYYQATVQTDKVDGKHFALAPKALYETSWQKITIPANSSKQVTVPIDASRFSKDLLAQMKNGYFLEGFVRFKQDPKKEELMSIPYIGFRGDFGNLSALEKPIYDSKDGSSYYHEANSDAKDQLDGDGLQFYALKNNFTALTTESNPWTIIKAVKEGVENIEDIESSEITETIFAGTFAKQDDDSHYYIHRHANGKPYAAISPNGDGNRDYVQFQGTFLRNAKNLVAEVLDKEGNVVWTSEVTEQVVKNYNNDLASTLGSTRFEKTRWDGKDKDGKVVANGTYTYRVRYTPISSGAKEQHTDFDVIVDNTTPEVATSATFSTEDRRLTLASKPKTSQPVYRERIAYTYMDEDLPTTEYISPNEDGTFTLPEEAETMEGATVPLKMSDFTYVVEDMAGNITYTPVTKLLEGHSNKPEQDGSDQAPDKKPEAKPEQDGSGQTPDKKTETKPEKDSSGQTPGKTRKKGQPSXXLIN

SEQ ID NO: 20547 - protein, 1808 aa, Streptococcus agalactiae
TTGCGTAAAAAACAGAAACTACCATTTGATAAACTTGCCATTGCGCTTATGTCTACGAGCATCTTGCTCAATGCACAATCAGACATCAAAGCAAATACTGTGACAGAAGACACTCCTGCTACCGAACAAACCGTAGAAACTCCACAACCAACAGCGGTTTCTGAGGAAGCACCATCATCAAAGGAAACTAAAACCCCACAAACTCCTAGTGATGCAGGAGAAACAGTAGCAGATGACGCTAATGATCTAGCCCCTCAAGCTCCTGCTAAAACTGCTGATACACCAGCAACCTCAAAAGCGACTATTAGGGATTTGAACGACCCTTCTCAGGTCAAAACCCTGCAGGAAAAAGCAGGCAAGGGAGCTGGGACTGTTGTTGCAGTGATTGATGCTGGTTTTGATAAAAATCATGAAGCGTGGCGCTTAACAGACAAAGCCAAAGCACGTTACCAATCAAAAGAAGATCTTGAAAAAGCTAAAAAAGAGCACGGTATTACCTATGGCGAGTGGGTCAATGATAAGGTTGCTTACTACCATGACTATAGTAAAGATGGTAAAACCGCTGTCGATCAAGAGCACGGCACACACGTGTCAGGAATCTTGTCAGGAAATGCTCCATCTGAAACGAAAGAACCTTACCGCCTAGAAGGTGCGATGCCTGAGGCTCAATTGCTTTTGATGCGTGTCGAAATTGTAAATGGACTAGCAGACTATGCTCGTAACTACGCTCAAGCTATCAGAGATGCTATCAACTTGGGAGCTAAGGTGATTAATATGAGCTTTGGTAATGCTGCACTAGCTTACGCCAACCTTCCAGACGAAACCAAAAAAGCCTTTGACTATGCCAAATCAAAAGGTGTTAGCATTGTGACCTCAGCTGGTAATGATAGTAGCTTTGGGGGCAAGACCCGTCTACCTCTAGCAGATCATCCTGATTATGGGGTGGTTGGGACACCTGCAGCGGCAGACTCAACATTGACAGTTGCTTCTTACAGCCCAGATAAACAGCTCACTGAAACTGCTACGGTCAAAACAGCCGATCAGCAAGATAAAGAAATGCCTGTTCTTTCAACAAACCGTTTTGAGCCAAACAAGGCTTACGACTATGCTTATGCTAATCGAGGGACGAAAGAGGATGATTTTAAGGATGTCAAAGGTAAGATTGCCCTTATTGAACGTGGCGATATTGATTTCAAAGATAAGATTGCAAAAGCTAAAAAAGCTGGTGCTGTAGGAGTCTTGATCTATGACAATCAGGACAAGGGCTTCCCGATTGAATTGCCAAATGTTGATCAGATGCCTGCGGCCTTTATCAGTCGAAAAGATGGTCTCTTATTAAAAGACAATCCCCAAAAAACCATCACCTTCAATGCGACACCTAAGGTATTGCCAACAGCAAGTGGCACCAAACTAAGCCGCTTCTCAAGCTGGGGTCTGACAGCTGACGGTAATATTAAGCCAGATATTGCAGCACCCGGCCAAGATATTTTGTCATCAGTGGCTAACAACAAGTATGCCAAACTTTCTGGAACTAGTATGTCTGCGCCATTAGTAGCGGGTATCATGGGACTGTTGCAAAAGCAGTATGAGACACAGTATCCTGATATGACACCATCAGAGCGTCTTGATTTAGCTAAAAAAGTATTGATGAGCTCAGCAACTGCCTTATATGATGAAGATGAAAAAGCTTATTTTTCTCCTCGCCAACAAGGAGCAGGAGCAGTCGATGCTAAAAAAGCTTCAGCAGCAACGATGTATGTGACAGATAAGGATATACCTCAAGCAAGGTTTACCTGAACAATGCTTTC

SEQ ID NO: 20548 - protein, 603 aa, Streptococcus agalactiae
MRKKQKLPFDKLAIALMSTSILLNAQSDIKANTVTEDTPATEQTVETPQPTAVSEEAPSSKETKTPQTPSDAGETVADDANDLAPQAPAKTADTPATSKATIRDLNDPSQVKTLQEKAGKGAGTVVAVIDAGFDKNHEAWRLTDKAKARYQSKEDLEKAKKEHGITYGEWVNDKVAYYHDYSKDGKTAVDQEHGTHVSGILSGNAPSETKEPYRLEGAMPEAQLLLMRVEIVNGLADYARNYAQAIRDAINLGAKVINMSFGNAALAYANLPDETKKAFDYAKSKGVSIVTSAGNDSSFGGKTRLPLADHPDYGVVGTPAAADSTLTVASYSPDKQLTETATVKTADQQDKEMPVLSTNRFEPNKAYDYAYANRGTKEDDFKDVKGKIALIERGDIDFKDKIAKAKKAGAVGVLIYDNQDKGFPIELPNVDQMPAAFISRKDGLLLKDNPQKTITFNATPKVLPTASGTKLSRFSSWGLTADGNIKPDIAAPGQDILSSVANNKYAKLSGTSMSAPLVAGIMGLLQKQYETQYPDMTPSERLDLAKKVLMSSATALYDEDEKAYFSPRQQGAGAVDAKKASAATMYVTDKDNTSSKVYLNNAF

SEQ ID NO: 20549 - protein, 1025 aa, Streptococcus agalactiae
ATGATGCCTTATTGTCAAGTTTGCAAAGTAATAGATAGCACTTTGCAAACAATCATAACAAAAGACTGTGTTTTAAAAGCAGTAAAATTTGTAGAAAAATTGTTAAAAGAAAAAGAACGCTATCGTTTTTATTTGGAAGAGCCACCCGAACGTAAAAAAGTGAAAAAACTGTATGTTGAGGGTGATGGAGTCATGATTAAAAGCACAGATTCTAGAGAGGAAAGAAGGTATTTAGATTTAACACATTTTGTTATTCATACAGGCTCAAAAAAAGTTTCTACTAAAAGATATGAATTGCAGGACAAGCACGAAATATTACAGCTTAATTATGATAAAGCTAAATATAATCTTTTAGATTATATTTATAATAACTATGAAGTAGATGACGATACTATTTTAATCACTAACTCTGATATGGGTAAAGGCTATACTAGTAGAGTTTTTAAGGAATTAGGAAAAGCACTTAAGGTAAAGAAACATGAGCATTTTTGGGATATCTATCATGTTAAAGAAAAGTTAAGTTCATACCTTAGAAAATATCCAATTGAATTAACCGATTTTGCTTTAGATGCGGTAAAAAAATATAATTCTGATAAGCTTGAATTAGTTTTTGATACTGTTGAATCACTGATTTGTGATGAACTTGAAGATCAAGAATTTCAGAAGTTTAAGAAAAAAGTATTAAATAATTTCAAATATATAAAACCAGCTCATCTTAGAAATCTTTCAAATCGTGGTATTGGTATCATGGAATCACAACACAGAAAGATAACGTATAGAATGAAGCGACGTGGCATGTATTGGTCAAAGTGGGGAATCTCCACAATGGCAAATATGATTATATTTGAAAGAGCTAACGGTTTACGAGAATTATTTTTCGGTTCTTGGAGAAAGGTATACAGTGAGTATAAAGAAGGTTCATTTAGTGCAGGGCGACTTTTTAAAAAGACAGATGAATTAGATAAATTTTCTAAGCCCCTTCTAAAAATGGCAGAAAATGGAGTATAACAGGAATCAAAACAAAA

SEQ ID NO: 20550 - protein, 342 aa, Streptococcus agalactiae
MMPYCQVCKVIDSTLQTIITKDCVLKAVKFVEKLLKEKERYRFYLEEPPERKKVKKLYVEGDGVMIKSTDSREERRYLDLTHFVIHTGSKKVSTKRYELQDKHEILQLNYDKAKYNLLDYIYNNYEVDDDTILITNSDMGKGYTSRVFKELGKALKVKKHEHFWDIYHVKEKLSSYLRKYPIELTDFALDAVKKYNSDKLELVFDTVESLICDELEDQEFQKFKKKVLNNFKYIKPAHLRNLSNRGIGIMESQHRKITYRMKRRGMYWSKWGISTMANMIIFERANGLRELFFGSWRKVYSEYKEGSFSAGRLFKKTDELDKFSKPLLKNGRKWSITGIKTK

SEQ ID NO: 20551 - protein, 237 aa, Streptococcus agalactiae
ATGTCTAGAAAAGTACGTCGTCACTTCACCGATGATTTTAAGCAACAAATTGTTGACCTTTACAATGTTGGTAGAAAGCGTAGCAGTCTCATCAAGGTATATGAGCTAACCCCTTCCACCTTCGATAAGTGGGTTAGACAAGCCAAAACAACTGGTTCATTCAAGTCTGTTGATAATCTGACAGATGAACAGCGGGAGCTAATTGAACTCAGAAAACACATAAAGAATCGATGCAAT

SEQ ID NO: 20552 - protein, 80 aa, Streptococcus agalactiae
  VARIANT 74: Xaa = Any Amino Acid
MSRKVRRHFTDDFKQQIVDLYNVGRKRSSLIKVYELTPSTFDKWVRQAKTTGSFKSVDNLTDEQRELIELRKHXKELECN

SEQ ID NO: 20553 - protein, 507 aa, Streptococcus agalactiae; identical to SEQ ID NO: 13015

SEQ ID NO: 20554 - protein, 169 aa, Streptococcus agalactiae; identical to SEQ ID NO: 13016

SEQ ID NO: 20555 - protein, 501 aa, Streptococcus agalactiae; identical to SEQ ID NO: 13013

SEQ ID NO: 20556 - protein, 167 aa, Streptococcus agalactiae; identical to SEQ ID NO: 13014

SEQ ID NO: 20557 - protein, 312 aa, Streptococcus agalactiae; identical to SEQ ID NO: 13011

SEQ ID NO: 20558 - protein, 104 aa, Streptococcus agalactiae; identical to SEQ ID NO: 13012

SEQ ID NO: 20559 - protein, 1203 aa, Streptococcus agalactiae; identical to SEQ ID NO: 13009

SEQ ID NO: 20560 - protein, 401 aa, Streptococcus agalactiae; identical to SEQ ID NO: 13010

SEQ ID NO: 20561 - protein, 489 aa, Streptococcus agalactiae; identical to SEQ ID NO: 13007

SEQ ID NO: 20562 - protein, 163 aa, Streptococcus agalactiae; identical to SEQ ID NO: 13008

SEQ ID NO: 20563 - protein, 3609 aa, Streptococcus agalactiae
ATGGCAATAAAGGGAATTACATTAAAAGAGAGTATGAATCGCTCTGTTCAAGCAATTATGCCACTTGATGAAGAAAAAGAGGTATTTAATCAAAAATTGGTTAGTTATTTGACTCATTTAAAAGACAAAGAGGATGAGTCAGAGGAATACCAGAAAAATCTTCTCAAGGTATTTTTAGAAAGTGTATTACCTTACAATTTTATAAATACTTCTAGTAGGATTGACCTTGCTATCTATAATGGTAAAGATGCCAATTCGTCACTAGGTATTCTTTTTGAATGCAAGAGTCTTTTCAATAAATCTGAAATGATGTCAACGGAAAAAATTAATTCTAAAGCATTTCAAGAAATTGTCTATTATTACCTACAAGAACGCCTATTTAATAAAAATTTAGAAATCAAAAAGTGTATTATCACAAACGGTCTATCTTGGTTTGTAATAGAGGCTAAAGAATTTGAAAAGCATTTTTTCAAAAATAAAAAGCTAGTTGACCTCGTGACAAAGTTCAGAAATAATCAACTTTCTAGCAATAAAACAGATTTCCTTTATAGTGAGGTTATTGCACCAGAAATTGACAAAGCATTTGAAAAGGGAATCGTTATTGCTCACTTTGATCTTAGTCAAGCTCTAGTTAAGACCAGTAAGTCTATTGAAATCAAGAAAAATAATCTGACTCAGCTTTATCGATTCTTCACAGCAGAGAATCTCCTCAATAAAGAGATTTTTACTGATTCAAACAAACTCAATAAGAATTTCTATGATGAATTGCTTTATTTGATGGGGCTGGAAGAAACGAAGTCAGGGACTTCAAAAATTATTTCACGCTTAAAACCCATCAAACGTCAGCGATATTCTTTTGTTGAGAATATCATTAATAAATTGGAGATGAAAGATGTTTCAAAAGAAAAGCAGGAAGATATTGCTATTCAACTAACAGTTGTCTGGACAAATAGAATTCTATTTTTGAAACTGTTAGAATCTCAGCTTGTACTCTTTAACAAAGATGAATCTTATAGGTTCTTGACGTATGAAAAACTCCCTAATTTTGAAGAAATTTACGGTCTATTCTTTGCTGTACTTGCTAAGAAAGTATCGGAAAGAAATGATCGAGTGCAAGAAAAGTTCGGTTATGTCCCTTATCTGAACTCATCACTGTTTGAAGAAACAGAAATAGAAATTTCTAGAGATGGGATTGGTATTGATAGATTACCAGAGGGAGATATTGAAATTTTCTCCAAAACAGCCCTTAAAGGCGTAGATAAAAAACGTAAAAAAGGGAACATCAATTTTATTGAATATCTCTTTGAGTTTTTGGATTCTTATGACTTCTCGACCTCCATCAGCCACCATGAAAAATCTAAGAATGACCTTATCAATGCGTCAGTTCTGGGATTAATTTTTGAGAAAATCAACGGCTACCGTGATGGCTCTTTTTATACGCCAGGTAACATTACAATGTATATGTCACGTAAAGCGATTCGTACAGCAGCAGTGGACAAAGTTAATGAATTGCTTGGTTGGAATTGTGAAACTGTTGAAGAGATTAAGTTTGCGATTGGACATAGTGTTGAAAATGCTCGTAAAGTCAGCCAAGCAATTGATGATCTTAAGGTTTGTGACCCAGCGGTTGGATCCGGTCACTTCCTTGTTTCAATCCTGAATGAAATTATTGCTCTTAAAAGTGATTTAAATATTTTGTTTGACGCTGATGGCAACTATATTGGAAACCTGATTCAATGTTATGTTATCAATGATGAGCTAGTCATTCAAGATATGTCTGGAAATAATTTTTTGTATCAGACAGGTAATCAGCAGTCAGAACAAATTCAAAAGGCAATTTTCAACCAGAAAAGGCATATTCTGGAAAATTCGCTCTTTGCAGTGGATATTAACCCAAGCTCGGTCAATATTTGCCGTTTGCGTCTTTGGATTGAACTCTTAAAATCTTCTTATTACTACCAGGATACTGATACCAACCAACCTGTTTTGACGACTTTGCCAAATATTGATATCAATATTAAAGTAGGCGATAGTCTCTTACATAAGTTTGAATTTGACTATGAATTTGATATGAGAAAAACAGATTTCAAGGACTATCTATCTCTAGTTAAAGACTATAAGGAGACGAATAATAAACGAGTTAAAGCAGAAATCTGGGAGAAAATCGAAAGGCTCAAACATTCCTTTGATGACACAGCTTCAAGCCCTGAATTAAAGAAATTATCTCGGCTCATATCTGAACGAAATAAGGCTGGTGCCATTAGCTTATTTGAGGATGAAAATAAAAATTCTAAAGAAGTAGCGGAATTAAATAAGCAACTAGCAAAAGCTGAAAAGGAATTGGAATACAGACTGAAAAATCCATTATTCGCTAAAGGTATGGAATGGCGAATGGAATTTCCTGAGATCTTGGGAGAAGCTGGCGAATTTATCGGCTTTGACCTTGTAATTGGGAATCCGCCTTATATCTTTGCTCGTAATCAGTCCTTTACAGATGAGATGAAATCCTACTATTCAAGGACTTATCAAGTAAGTGAATACCAAGCCAATACCTATACTATATTCATGGAATTGGCTTATCAACTCTTACGTAAAGGTGGGACATTCTCTTATATCATTCCAAATAATTTTCTGACCATTCAGACCAATTCAAGAGTTCGTCAGTTTATCACGGAGCAGACGAGTGATGTTGTTCTGATTAATTCTCTGGATAAGATTTTTGCGGATGCTAGCGTGGATAACTGTATCATTTTCTTCAAGAAGAATGCGCCAAACTGGATTGAAGTAGCAGAATTGTATCACGGCGAGTTCAACACTGTTGGACGAGTTGCGCCAGATTTCTTTGGTGAAATCCCTACCTTTTCAATCTCGATGGTCAAGTATCGTCAGGCGATTGATATCTTCTGGAAAGTAAACCATTTTCCAATACTAGGACGACCAGAAATTTCGACTGTAAAATCTGGAATCAAAGCCTATGAAACTGGAAAAGGGAATCCTAAAATGACCGCTCAAGATAAGAATAATCGAATTTATCATGCAAGAGAAAGGTCAGATGATTCATACCGTCCCTATCTTGATGGCGAGAATGTATCACGCTATAAACTGACTTGGAATGGTGAATATGTCAAGTATGGTGAAAATTTAGCTGCACCAAGAGATAAAGAAATTTTTGAAAAACCACGAATTTTAGTTCGTCAGATTCCAAGTAAATCAACTTATGCTGTTGAAGCTGTTTATACTGATAGTGATGTTATTAACGACTTAAACTCCATGGTCATCACAGATATTCAGGTTAATCCTTTTTATCTTTTGGGTATTTTGAACTCTCGCTTAATCTCTCTTTGGTTTTTCATGAAGTTTGATAAATTCCAACGTCGCCTATTCCCACAGTTCAAAGTTAATGAACTAGGAGATTTTCCAATTCCAGATGCTACTGATTCCCAGCAAGAAGACATAGCACAAGTTGTTGAGCAACTGATGGAGGAGATGAAAAAAGATTCTCCTGACACTGAAAAAGTCAATCAGCTTAATCTGGAAATTGATGAACTTGTCATGGACTTGTTTGACTTGGCTGAAGAAGAAAAACAAACAGTTAGAGATTTTGAAGTA

SEQ ID NO: 20564 - protein, 1203 aa, Streptococcus agalactiae
MAIKGITLKESMNRSVQAIMPLDEEKEVFNQKLVSYLTHLKDKEDESEEYQKNLLKVFLESVLPYNFINTSSRIDLAIYNGKDANSSLGILFECKSLFNKSEMMSTEKINSKAFQEIVYYYLQERLFNKNLEIKKCIITNGLSWFVIEAKEFEKHFFKNKKLVDLVTKFRNNQLSSNKTDFLYSEVIAPEIDKAFEKGIVIAHFDLSQALVKTSKSIEIKKNNLTQLYRFFTAENLLNKEIFTDSNKLNKNFYDELLYLMGLEETKSGTSKIISRLKPIKRQRYSFVENIINKLEMKDVSKEKQEDIAIQLTVVWTNRILFLKLLESQLVLFNKDESYRFLTYEKLPNFEEIYGLFFAVLAKKVSERNDRVQEKFGYVPYLNSSLFEETEIEISRDGIGIDRLPEGDIEIFSKTALKGVDKKRKKGNINFIEYLFEFLDSYDFSTSISHHEKSKNDLINASVLGLIFEKINGYRDGSFYTPGNITMYMSRKAIRTAAVDKVNELLGWNCETVEEIKFAIGHSVENARKVSQAIDDLKVCDPAVGSGHFLVSILNEIIALKSDLNILFDADGNYIGNLIQCYVINDELVIQDMSGNNFLYQTGNQQSEQIQKAIFNQKRHILENSLFAVDINPSSVNICRLRLWIELLKSSYYYQDTDTNQPVLTTLPNIDINIKVGDSLLHKFEFDYEFDMRKTDFKDYLSLVKDYKETNNKRVKAEIWEKIERLKHSFDDTASSPELKKLSRLISERNKAGAISLFEDENKNSKEVAELNKQLAKAEKELEYRLKNPLFAKGMEWRMEFPEILGEAGEFIGFDLVIGNPPYIFARNQSFTDEMKSYYSRTYQVSEYQANTYTIFMELAYQLLRKGGTFSYIIPNNFLTIQTNSRVRQFITEQTSDVVLINSLDKIFADASVDNCIIFFKKNAPNWIEVAELYHGEFNTVGRVAPDFFGEIPTFSISMVKYRQAIDIFWKVNHFPILGRPEISTVKSGIKAYETGKGNPKMTAQDKNNRIYHARERSDDSYRPYLDGENVSRYKLTWNGEYVKYGENLAAPRDKEIFEKPRILVRQIPSKSTYAVEAVYTDSDVINDLNSMVITDIQVNPFYLLGILNSRLISLWFFMKFDKFQRRLFPQFKVNELGDFPIPDATDSQQEDIAQVVEQLMEEMKKDSPDTEKVNQLNLEIDELVMDLFDLAEEEKQTVRDFEV

SEQ ID NO: 20565 - protein, 1197 aa, Streptococcus agalactiae
ATGGCAACAAAAAGTAGTAAAAAATACAAAGGTGTTTATTGTGATAATAAGGGAAAGATATTTTATCAGATTGATCTTGGAATCGACCCAGTAACTGGCAAAAGGGTACAAAAGAAAGCTAGAAAAAATCAATATGGTAAAACCTTTGAAACAATGAAAGAAGCATATGACGAATTAGTTCGTATAAAATATGAATTTGCCAACAAAGTCAGTTTAGAAAATTACAATATGACTTTTGAAAACTATATGAACAAAATTTATTTAAGAGCATATAAGCAAAAGGTTCAGTCTGTGACATATAAGACGGCTCTTCCTCATCATAAACTTTTTATTCAATATTTTGGTTTAAAGCCATTAAAAGCAATAACTCCTAGAGATTGCGAAGCTTTTAGATTGCATATCATAGAGAATTATTCTGAAAACTATGCGAAAAATTTATGGTCAAGGTTTAAAGCTTGTATGGGTTATGCAGAAAGACTTGGCTATATTTCAAATATGCCTTGTAAAGCATTAGATAATCCTAGAGGTAAACATCCAGAAACTCCATTTTGGACCTATGCGGAGTTTCAGACATTTATCAAATCATTTGACTTACATGATTATGAAGAATTGCAACGATTTACTGCCATCTGGTTATATTATATGACAGGTGTACGAGTGAGCGAAGGTTTATCTTTATGTTGGGAGGATATTGATTTTGATAAAAAATTTCTAAAGGTACATACAACCTTAGAGAAAGATGAAAATGGTAATTGGTATCGTAAAGACCAAACAAAGACTCCAGCAGGTGAACGACTTATTGAATTGGATGATATTACTATTGAAGTACTTCAAGTTTGGCGAAAAAATCAGTTTGCAAATCAAGATACAGATTTTATCATTTCAAGATTTGGAGATCCTTTTTGCAAATCAACCATTTGTCGCATCATCAAACGGAAAGCTCAACAGGTAGGAGTTCCAGTAATTACAGGAAAAGGTCTCAGACATAGCCATGCATCCTATCTAATCAATGTCTTGAAAAAAGATATTTTATATGTAGCCAGACGTATGGGACATGCCGATAAATCAACAACTTTGAATACTTACAGTCACTGGTTTAATGCTTTAGATAAAACAGTTTCTGAAGAAATCACACAAAATATCAAAAGTGCAGGATTGGATTCAATTTTATGCCAAAATTCCTGCCAAACTTCAAAT

SEQ ID NO: 20566 - protein, 399 aa, Streptococcus agalactiae; identical to SEQ ID NO: 2338

SEQ ID NO: 20567 - protein, 225 aa, Streptococcus agalactiae
ATGAGAACTGCTACATATAAAGATTTAATGAACTTAGGATTTCCTGAACATACCTCTAGAGACATTATTCGTGAAGCTAAAAAAATTGCTGTAAAAAAGTTTGAAGAAGCTCGCAAAGTTGACCATAATGCGGTACAATTAAGTAAATCGCCCTTTGACAATCGAAGACTAGGTATCGCACCAGCAGAAATTGTGGAACAATTAATAGGGATTCCACTATCTAAA

SEQ ID NO: 20568 - protein, 75 aa, Streptococcus agalactiae; identical to SEQ ID NO: 2340

SEQ ID NO: 20569 - protein, 222 aa, Streptococcus agalactiae
ATGTACCGACGTTTAAGGGATTTGAGAGAAGACAATGATTTCACTCAAAAATACGTTGCCGAAAAGCTTTCGTTTACCCACTCTGCTTATTCAAAAATTGAGAGAGGAGAACGTATTTTATCGGCAGATGTAATAATAAAACTTTCAAATCTATATAACGTTAGTACAGATTATTTGTTGGGGCAAACTGACTTTCCCCACCGAATAAAGAATAATTTAAAA

SEQ ID NO: 20570 - protein, 74 aa, Streptococcus agalactiae
MYRRLRDLREDNDFTQKYVAEKLSFTHSAYSKIERGERILSADVIIKLSNLYNVSTDYLLGQTDFPHRIKNNLK

SEQ ID NO: 20571 - protein, 1863 aa, Streptococcus agalactiae
ATGGTCATCACTAAGCATTATGCTGTTCATGGGAAAAAATACCGCCGTCAATTGATTAAGTATATTCTTGATCCTAAGAAAACCAGGAATTTATCATTGATTTCAGATTTTGGGATGAGTAATTATCTTGATTTTCCTGACTATGTGGAACTGGTGAAGATGTATCAAAATAATTTTCTTTCAAATGACCAACTCTACGACTCACGGTTTGATAGACAAGAGAAAAAGCAACAGAAAATACATGCTCATCATATTATTCAGTCTTTCTCACCTGAAGATAAATTAAGCCCAGAGGAAATCAATCGTATTGGCTATGAAACGATAAAAGAGTTGATAGGTGGTCAATATAAATTCATTGTTGCCACTCATGTTGATCAGGACCATTGTCATAATCACATTATTATCAACTCAATCAATAGCCAATCTCAAAAAAAGTTGAAGTGGGACTACGCTCTTGAAAGAAATTTACAAATGATTTCGGATAGAATTTCTAAAGTAGCGGGTGCTAAAATCATTCCACCTAAACGTTATTCTCATAGAGATTATGAGGTCTATCGACGTTCTAATCACAAATACGAATTGAAGCAGCGGTTATTTTTTCTCATGGAACATTCAATTGATTTCAATGATTTTATGCAAAAAGCTGAGCAACTAAATGTCAAAATAGATTTCTCAAGGAAACATAGCCGATTTTTTATGACAGATAGAAATATGAAGCAAGTCATCCAAGGAGATAAGCTGAATAAGAGAGAACCCTATTCAAAAGAATATTTTCAACGTTACTTTGCCAAGAAAAAGATTGAACTGATTTTAGAATTTTTATTGCTAAGATCCAACTCATTTGATGATTTAGTTGAGAAAGCTCGGTTACTGGGATTAGAATTGAAGAGCAAGAAAAAAACGATAGATTTTGTTCTTTCTGATGGAAAAAGCTGCATTTCCATACCAAATAAGTCATTAAGAAAGAAAAATCTTTATGATACTACGTATTTTGATAGTTATTTCAAGGAACATGATGTGTTTGAAGTGCTTCATAATAATGAAGTAAAAATAGAATTTGAAAAGTTTGAGACACAACAGCTTTCAGAAATATTGACTGTAGAAGAAATAACCGAAGCTTATGAAACGTATAAAACTAAGAGAGATGCTGTACATGAGTTTGAAGTTGAGATCACGGAGGAGCAAATTGAAAAAATTGTGCTAGATGGTCTATTTGTTAAAGTTTGGATGGGTATTGGACAAGAAGGACTAATCTTCATTCCAAATCATCAACTTAATATCTTAGAACAAGAAAATAAGAAGCAGTATCAGGTGTTTATTCGAGAAACATCTTCTTATTTCATTTATCATAAAGAGGACTCAGAAATGAATCGATTTATGAAAGGAAGGGACTTGATTCGCCAACTAACGTTTGACAATAAGTCTTTACCTTATAAGAGACGAATAAGTCTGGTCAGTCTTCAACAAAAAATTGAAGAAATCAATTTATTGATGACATTAAACATTCAAAATAAATCCTTTCTAGAATTAAAAGATGAATTGGTTGGAGACATCGCACAGCTAGATATTGAATTGACAAATCTTCAAGACAAAAACACCACCTTAAACAAGATGGCAGAAGTAGTTGTTAACCTACAAAGTGATAATCAAGATACCAAGCAATTAGCTAAGTATGAATGTTCCAAGATGAATTTATCGCAGAATGTAACAATTGGACAGATTGAATCTGAGATTGAAATGATACAGAATCAGCTAGACAATAAAATCGAAGAATACGAAAATGCGGTTAGAAAGTTGGATGAATATGTAAGAGTTTTAAATATGGATAAATACAAGACAGACGATTTTTCCATTCATATTGAA

SEQ ID NO: 20572 - protein, 621 aa, Streptococcus agalactiae; identical to SEQ ID NO: 2344

SEQ ID NO: 20573 - protein, 363 aa, Streptococcus agalactiae
ATGGAAAATCGTTATCGAACCAATTTGAAAAAGGTGTATTTGAGTGATCAAGAATTAATTATCCTCAATAAAAATCTTGCTCAGAGTCAGTGTCCAAACTTTTCGCATTATGCCAGAAAAACCTTACTCAATCCTCGTATGAATTTTATCACAATCGATACAAGAGGTTTTCAAGACCTGATTTTTGAAATTCGTAGGATTGGAAATAATATAAACCAGATTGCACGTTCGGTAAATCAAAGCCACCTACTTAGTCTTCAACAAGTCAAAGAATTGCAGCTCGGTATAGCAGAGTTAGAAACACAGTTACAACAAGATTTTGACATAAAGTGTCAGCGATTGAGAGAATTTTATGGTCATCAC

SEQ ID NO: 20574 - protein, 121 aa, Streptococcus agalactiae
MENRYRTNLKKVYLSDQELIILNKNLAQSQCPNFSHYARKTLLNPRMNFITIDTRGFQDLIFEIRRIGNNINQIARSVNQSHLLSLQQVKELQLGIAELETQLQQDFDIKCQRLREFYGHH

SEQ ID NO: 20575 - protein, 360 aa, Streptococcus agalactiae
ATGGGAAATCTAGTTAGAGAGATACGTAAGGAAGTCAATTTCTCAATAGAAGAGTATCAACAGATACAAAATTTTATGGAACAGGAGGGATATGAACAATTTTCCCCTTTTGCTAGAGGTAAATTATTGAAAATAGACCACCAACCATCTCAGCAGCTTGAAGAATGGATAAAATATTTACAGCACCAAAAAGTAGAACAGATTTACCGGGATGTACATGAAATACTTGTTCTGGCAAAGTTGTCTCAATCAGTTACTATGGAACATCTTGAAATCATCCTGACTTGTATCAAAGACTTGATGAAGGAAATTGAGGTAACTATTCCATTAAGCTATTCATTCAAAGACAAGTACATGGGG

SEQ ID NO: 20576 - protein, 120 aa, Streptococcus agalactiae
MGNLVREIRKEVNFSIEEYQQIQNFMEQEGYEQFSPFARGKLLKIDHQPSQQLEEWIKYLQHQKVEQIYRDVHEILVLAKLSQSVTMEHLEIILTCIKDLMKEIEVTIPLSYSFKDKYMG

SEQ ID NO: 20577 - protein, 1319 aa, Streptococcus agalactiae
ATGTCAGACTTATTATCCCTACCAGACATTAAAACAATAGAACCGCCACAAGAAAATGAAACCGATATGATGTTTAAAGTTGAAGCAGTCGGACCACCTGAACGTTGTCCTGAATGTGGTTTTGACAAGTTGTACAAACACAGTTCAAGAAATCAACTAATTATGGATTTGCCCATTCGTTTAAAGCGAGTGGGCTTACATTTGAACCGTAGACGATACAAGTGTCGTGAATGCGGATCTACCTTCTGGGAACGCCTAATATCTGTAGATGAAAAGCGTAGTATGACCAAAAGGCTTTTAAAGTCCATTCAAGAGCAATCCATGTCTAAGACCTTTGTAGAAGTCGCAGAAAGCGTTGGTGTTGACGAGAAAACCATTAGGAACGTTTTTAAGGACTATGTGGCACTCAAAGAACGTGAATACCAGTTTGAAACTCCTAAGTGGCTTGGGATAGACGAGATACATATTATCCGTAGACCTCGGCTTGTATTGACTAATATTGAACGCAGGACTATTTATGACATCAAGCCTAACCGTAACAAGGAAACAGTCATCCAACGTCTTTCAGAAATCAGTGACAGGACTTACATTGAGTACGTCACAATGGATATGTGGAAGCCCTACAAAGACGCAGTGAACACTATCCTTCCACAAGCTAAAGTTGTCGTAGATAAGTTTCATGTAGTTAGAATGGCTCATCAAGCCTTAGATAACGTCAGAAAGTCTTTGAAAGCCCATATGAGCCAAAAAGAAAGACGTACCCTTATGCGTGAAAGGTTTATCCTTCTAAAGCGTAAACACGATCTAAATGAACGTGAATCATTCCTCTTAGATACTTGGTTAGGTAATCTTCCTGCTTTAAAAGAAGCCTATGAACTCAAAGAAGAGTTTTACTGGATATGGGATACTCCTGATCCAGATGAAGGTCATCTTCGTTATAGTCAATGGAGACACCGTTGTATGTCCAGCAACTCTAAAGACGCATATAAAGACTCGTGAGAGCCGTAGACAACTGGCATGTTGAAATATTCAACTACTTTGATAAAAGGCTCACTAATGCTTATACGGAGTCAATTAACAGCATTATTAGGCAGGTAGAGCGAATGGGTAGAGGTTACTCGTTTGATGCCTTACGAGCCAAAATCCTTTTCAATGAGAAGCTCCATAAAAAGCGTAAGCCACGATTTAATTCAAGTGCTTTCAATAAAGCTATGTTATACGATACTTTCAATTGGTATGAAGTGAATGATCACGACATTACAGACAACTTAGGTGTCGATTTTTCCACACTTATTAAGAATTTGGAGAAGGGTGATTTA

SEQ ID NO: 20578 - protein, 440 aa, Streptococcus agalactiae
  VARIANT 332: Xaa = Any Amino Acid
MSDLLSLPDIKTIEPPQENETDMMFKVEAVGPPERCPECGFDKLYKHSSRNQLIMDLPIRLKRVGLHLNRRRYKCRECGSTFWERLISVDEKRSMTKRLLKSIQEQSMSKTFVEVAESVGVDEKTIRNVFKDYVALKEREYQFETPKWLGIDEIHIIRRPRLVLTNIERRTIYDIKPNRNKETVIQRLSEISDRTYIEYVTMDMWKPYKDAVNTILPQAKVVVDKFHVVRMAHQALDNVRKSLKAHMSQKERRTLMRERFILLKRKHDLNERESFLLDTWLGNLPALKEAYELKEEFYWIWDTPDPDEGHLRYSQWRHRCMSSNSKDAYKDXVRAVDNWHVEIFNYFDKRLTNAYTESINSIIRQVERMGRGYSFDALRAKILFNEKLHKKRKPRFNSSAFNKAMLYDTFNWYEVNDHDITDNLGVDFSTLIKNLEKGDL

SEQ ID NO: 20579 - protein, 1638 aa, Streptococcus agalactiae
ATGAATAAATTTAAGGTAAACATTTCAGGAATGACTTGTACGGGTTGTGAAAAACACGTAGAATCAGCACTTGAAAAGATAGGTGCTAAAAATATTGAGTCTAGTTATCGTCGTGGTGAAGCAGTATTTGAACTGCCCGATGATATTGAGGTTGAAAGTGCAATAAAGGCGATTGATGAAGCAAATTACCAAGCCGGAGAAATTGAAGAAGTATCATCACTAGAAAACGTGGCGTTAATTAATGAAGACAATTATGACCTTCTTATTATTGGTTCTGGTGCTGCTGCCTTTTCTTCGGCAATTAAAGCTATAGAATACGGTGCAAAAGTTGGAATGATTGAGCGTGGAACGGTTGGGGGAACCTGTGTGAATATTGGCTGTGTTCCGTCAAAAACTCTTCTTAGGGCAGGGGAAATCAATCATTTATCAAAAGACAATCCGTTTATAGGTTTACAAACATCCGCTGGAGAAGTGGATTTAGCTAGTTTAATCACGCAAAAGGATAAATTGGTGAGCGAACTTCGGAATCAAAAATATATGGATTTAATTGATGAATATAATTTTGATTTAATTAAAGGTGAAGCAAAATTCGTTGATGCTAGTACGGTTGAGGTCAATGGGACAAAGTTATCTGCAAAACGCTTTTTAATTGCAACAGGTGCATCGCCTTCGTTGCCCCAAATTTCAGGACTTGAAAAAATGGACTATTTAACTAGTACAACACTTCTTGAGTTAAAGAAAATACCAAAACGATTAACTGTAATTGGTTCAGGATACATTGGAATGGAGCTTGGACAACTATTTCATCATTTAGGTTCAGAAATAACGCTTATGCAAAGAAGTGAGCGACTTTTAAAGGAGTATGATCCTGAGATTTCAGAGTCAGTTGAAAAAGCGTTAATTGAACAGGGTATAAACCTTGTCAAAGGGGCAACTTTTGAGCGTGTTGAACAAAGTGGAGAGATAAAAAGGGTTTACGTAACAGTAAATGGCAGTAGAGAAGTCATTGAATCAGATCAGTTACTTGTTGCCACTGGAAGAAAACCAAATACGGATTCTTTAAATTTAAGTGCAGCAGGTGTTGAAACTGGAAAAAATAATGAAATCCTGATCAATGATTTTGGTCAAACAAGTAATGAAAAGATTTATGCAGCAGGAGATGTGACTTTAGGACCACAATTTGTATATGTAGCAGCCTATGAAGGTGGAATTATTACTGATAATGCTATTGGTGGATTAAACAAAAAAATAGATTTATCGGTAGTTCCTGCTGTTACGTTTACGAATCCGACGGTTGCAACGGTTGGTTTAACAGAAGAACAAGCAAAAGAGAAAGGGTATGATGTGAAGACATCTGTATTACCTTTAGATGCTGTTCCAAGAGCAATTGTAAACCGTGAAACAACCGGTGTATTTAAACTAGTAGCAGATGCAGAAACACTAAAAGTATTAGGGGTTCATATTGTATCTGAAAATGCAGGAGATGTCATCTATGCAGCATCATTAGCTGTTAAATTTGGCTTAACGATAGAAGATTTAACAGAAACCCTAGCACCATATTTAACAATGGCTGAAGGGCTAAAATTAGTTGCACTTACGTTCGATAAAGATATTTCGAAATTATCTTGTTGTGCAGGC

SEQ ID NO: 20580 - protein, 546 aa, Streptococcus agalactiae
MNKFKVNISGMTCTGCEKHVESALEKIGAKNIESSYRRGEAVFELPDDIEVESAIKAIDEANYQAGEIEEVSSLENVALINEDNYDLLIIGSGAAAFSSAIKAIEYGAKVGMIERGTVGGTCVNIGCVPSKTLLRAGEINHLSKDNPFIGLQTSAGEVDLASLITQKDKLVSELRNQKYMDLIDEYNFDLIKGEAKFVDASTVEVNGTKLSAKRFLIATGASPSLPQISGLEKMDYLTSTTLLELKKIPKRLTVIGSGYIGMELGQLFHHLGSEITLMQRSERLLKEYDPEISESVEKALIEQGINLVKGATFERVEQSGEIKRVYVTVNGSREVIESDQLLVATGRKPNTDSLNLSAAGVETGKNNEILINDFGQTSNEKIYAAGDVTLGPQFVYVAAYEGGIITDNAIGGLNKKIDLSVVPAVTFTNPTVATVGLTEEQAKEKGYDVKTSVLPLDAVPRAIVNRETTGVFKLVADAETLKVLGVHIVSENAGDVIYAASLAVKFGLTIEDLTETLAPYLTMAEGLKLVALTFDKDISKLSCCAG

SEQ ID NO: 20581 - protein, 390 aa, Streptococcus agalactiae
ATGATTTATCGCATTAGTGAGTTTGCAGATAAATGTGGAGTTAATAAAGAAACGATCAGATATTACGAGCGAAAAAATTTATTACAAGAACCTCACCGAACGGAAGCTGGTTATCGGATATATTCATATGATGACGTTAAGCGTGTTGGGTTTATTAAACGAATACAGGAATTTGGTTTCTCTTTAAGCGAGATTTATAAATTACTTGGTGTTGTAGATAAAGATGAAGTTCGTTGTCAAGATATGTTCGAATTTGTTTCTAAAAAACAAAAGGAAGTGCAAAAACAAATAGAGGATTTAAAACGAATTGAAACTATGTTAGACGACTTAAAACAACGATGTCCAGATGAAAAGAAATTACATTCGTGTCCAATAATAGAAACATTAACA

SEQ ID NO: 20582 - protein, 130 aa, Streptococcus agalactiae
MIYRISEFADKCGVNKETIRYYERKNLLQEPHRTEAGYRIYSYDDVKRVGFIKRIQEFGFSLSEIYKLLGVVDKDEVRCQDMFEFVSKKQKEVQKQIEDLKRIETMLDDLKQRCPDEKKLHSCPIIETLT

SEQ ID NO: 20583 - protein, 339 aa, Streptococcus agalactiae
ATGCTTGAGAAGGTCTTCCCTGAGGAAACTTACCCAAATACCATTCTCCATAGTGACCAAGGTTGGCAATACCAACATGAAGTCTATCACCGCTTTCTTGCAAGTAAAGGCATACATCCTTCCATGTCTCGCAAAGGGACCAGCACGGATAATGGTATGATGGAATCCTTCTTTGGTGTCTTGAAGAAAGAGATGTTTTATGGCTTTGAGAAGACTTTCAAGTCTCTGGATCAACTGGAGCAAGCTATCACCGAGTATATTTTTTACTACAACAATAAATGCATTAAAGAAAAACTAAAAGGACTTAGTCCTGTTCAGTATAGAATTAAATCCTTTCAA

SEQ ID NO: 20584 - protein, 113 aa, Streptococcus agalactiae
MLEKVFPEETYPNTILHSDQGWQYQHEVYHRFLASKGIHPSMSRKGTSTDNGMMESFFGVLKKEMFYGFEKTFKSLDQLEQAITEYIFYYNNKCIKEKLKGLSPVQYRIKSFQ

SEQ ID NO: 20585 - protein, 2127 aa, Streptococcus agalactiae
ATGTCTAGAGGGAAAGCAAAACAGTCTGAAAAAGAAATGAAAGCCTATCGTGTTCAAGGATTTACTTGTACTAACTGTGCAGCCATTTTTGAAAATAATGTTAAAGAACTTCCCGGTGTTCAGGATGCGAAAGTAAATTTCGGAGCATCTAAAGTTTATGTTAAAGGGACGACAACCATTGAAGAATTAGAAAAAGCAGGAGCATTTGAAAATTTAAAAATTCGAGATGAAAAAGAACAAAGGGTAGGAGGAGAACCTTTTTGGAAGCAGAAAGAAAACATTAAGGTATATATATCAGCTCTTTTACTTGTAGTTAGCTGGTTCTTAGGAGAGCAGTATGGTGAAGAGCATGTTCTACCGACAATTGGTTATGCAGCGTCCATTTTAATCGGTGGATATTCGTTATTTATTAAAGGTCTCAAAAATTTAAGAAGATTAAATTTCGATATGAATACGCTTATGACTATTGCCATTATAGGAGCTGCAATTATTGGTGAATGGGGTGAAGGGGCAACCGTTGTTATCCTATTTGCGATTAGTGAAGCATTAGAGCGTTATTCAATGGATAAAGCACGTCAATCTATTGAATCTTTAATGGATATTGCCCCAAAAGAAGCGTTAATTCGACGAGGCAATGAAGAAATGATGATTCATGTTGATGAGATTCAAGTTGGAGACATCATGATAGTTAAGCCCGGTCAAAAGTTAGCAATGGATGGAATAGTGGTTAAAGGTACATCGACATTAAATCAGGCTGCGATTACAGGTGAAAGTGTTCCAGTAACGAAAATCACAAATGATGAAGTATTTGCAGGAACCTTGAATGAAGAAGGGTTACTTGAGGTTAAAGTAACAAAACGAGTTGAAGATACTACTCTTTCAAAAATCATTCACTTGGTAGAAGAAGCCCAAGCAGAACGGGCCCCCTCTCAAGCGTTTGTCGATAAATTTGCAAAATACTATACACCAGCTATTGTCATACTAGCTCTTTTAATTGCAGTAGTTCCACCATTATTTGGCGGAGACTGGAGCCAATGGATTTATCAAGGATTAGCTGTATTAGTGGTTGGTTGTCCTTGTGCCTTAGTAGTCTCAACTCCAGTTGCTGTGGTTACAGCAATAGGAAATGCAGCGAAAAATGGTGTATTAATTAAAGGTGGTATCCATTTAGAAGCAGCAGGACACTTAAAAGCGATAGCATTTGATAAAACAGGAACATTAACCAAAGGGATTCCAGCTGTAACAGACATTGTGACATATGGTAGAAATGAAAATGAATTAATAACCATAACATCAGCCATTGAAAAAGGATCGCAGCACCCTCTTGCTTCAGCGATTATGCGAAAAGCAGAAGAAAATGGATTAAAATTCAATGAAGTAACAGTAGAGGATTTTCAATCCATTACAGGTAAAGGCGTTAAAGCCAAAATAAATAATGAAATGTATTATGTGGGAAGTCAAAATCTTTTTGAGGAATTACACGGAAGCATTTCAAGCGATAAAAAAGAAAAAATTGCCGATATGCAAACTCAAGGTAAAACGGTGATGGTGTTAGGAACAGAAAAAGAAATTCTTTCGTTTATTGCCGTAGCCGATGAAATGAGGGAATCGTCTAAAGAAGTTATCGGCAAGTTGAACAATATGGGAATCGAAACAGTGATGCTAACAGGCGATAACCAAAGAACGGCAACAGCCATCGGAAAACAAGTTGGTGTTTCGGATATTAAAGCTGACTTACTTCCAGAAGATAAGCTTAATTTTATTAAAGAACTTCGAGAAAAACATCAAAGTGTGGGGATGGTCGGAGATGGCGTGAATGATGCTCCAGCCCTTGCGGCATCTACCGTTGGTGTAGCAATGGGTGGTGCTGGAACTGATACAGCTTTAGAAACGGCTGACATCGCCTTAATGTCTGATGATTTGAGTAAATTGCCATATACAATAAAATTAAGCCGTAAGGCTTTAGCAATCATCAAGCAAAACATTACCTTCTCTTTGGCGATTAAATTAGTGGCATTACTTTTGGTCATGCCCGGTTGGTTAACACTTTGGATAGCGATATTTGCTGATATGGGAGCAACTTTACTTGTAACATTAAACAGTTTACGCTTATTGAAAATCAAAGAA

SEQ ID NO: 20586 - protein, 709 aa, Streptococcus agalactiae
MSRGKAKQSEKEMKAYRVQGFTCTNCAAIFENNVKELPGVQDAKVNFGASKVYVKGTTTIEELEKAGAFENLKIRDEKEQRVGGEPFWKQKENIKVYISALLLVVSWFLGEQYGEEHVLPTIGYAASILIGGYSLFIKGLKNLRRLNFDMNTLMTIAIIGAAIIGEWGEGATVVILFAISEALERYSMDKARQSIESLMDIAPKEALIRRGNEEMMIHVDEIQVGDIMIVKPGQKLAMDGIVVKGTSTLNQAAITGESVPVTKITNDEVFAGTLNEEGLLEVKVTKRVEDTTLSKIIHLVEEAQAERAPSQAFVDKFAKYYTPAIVILALLIAVVPPLFGGDWSQWIYQGLAVLVVGCPCALVVSTPVAVVTAIGNAAKNGVLIKGGIHLEAAGHLKAIAFDKTGTLTKGIPAVTDIVTYGRNENELITITSAIEKGSQHPLASAIMRKAEENGLKFNEVTVEDFQSITGKGVKAKINNEMYYVGSQNLFEELHGSISSDKKEKIADMQTQGKTVMVLGTEKEILSFIAVADEMRESSKEVIGKLNNMGIETVMLTGDNQRTATAIGKQVGVSDIKADLLPEDKLNFIKELREKHQSVGMVGDGVNDAPALAASTVGVAMGGAGTDTALETADIALMSDDLSKLPYTIKLSRKALAIIKQNITFSLAIKLVALLLVMPGWLTLWIAIFADMGATLLVTLNSLRLLKIKE

SEQ ID NO: 20587 - protein, 366 aa, Streptococcus agalactiae
ATGATTAAAAAAAATACTTGTGAAATTTATTGTTATGACGAAGAAAAGGTCAATCGAATACAAGGTAATTTACAGACAGTAGATATTTCTAGTGTTGCCCAAATGTTAAAAGCTATTGCAGATAAAAATAGAGCAAAAATTACCTATGCATTGTGTCAAGATGACGAACTGTGTGTGTGTGATATTGCAAATATTATAGGTGTTACGGTTGCAAATACCTCTCATCACCTGCGAACGCTCCATAAGCAAGGGATTGTTAAGTTTCGAAAAGAGGGAAAACTTGCATTTTATTCCTTAGATGATGAGCATATCAGACAAATTATGATGATTGCATTGGCACATAAGAAAGAGGTGAAGATCAATGTC

SEQ ID NO: 20588 - protein, 122 aa, Streptococcus agalactiae
MIKKNTCEIYCYDEEKVNRIQGNLQTVDISSVAQMLKAIADKNRAKITYALCQDDELCVCDIANIIGVTVANTSHHLRTLHKQGIVKFRKEGKLAFYSLDDEHIRQIMMIALAHKKEVKINV

SEQ ID NO: 20589 - protein, 786 aa, Streptococcus agalactiae
ATGGGGTATTTTAAATCTATTGAACAATTTCTATTTTCCTATATCTCTTTACATACCATAGAAAAGGATTCTGTAAACCGTAAAATATTTGCAGGAGCTAAACCGTTAGATACACTCTCTGACAAACTCCTTAATGATAGTTCAAAAGTTAAAAATATAAATCTTAAATCTATTACAAGTTTTTTTGGAGATTTTAACAGTCAGAAATTCTATCCACGTAATATGGATTTACTTGCTGATGGTATTGATGACGAAACGTATTATTATATTGTTGAGTCATTGTCAACTTTTGTAGGATTAAGAAATGGCTATTTTCATAAGCATAATTTAAATGATTGGACAACAATTGAAGAAACTAGAAACCATGCATTGTTAATTTTTTATCTAGTACTAGGAGGGTATAGAATATCGGAGCAAGATAAACTAGATCTCGGTTTGATTAAAACTGTAGAAAGTGGCTACTTAAATCTATGTGAGTATATTCATAATAGAAAAATTGATAATATGCTTGAGATACCAATCTTTTATTTTGGGAGAGATCGTAACGAGTTTGATTTTTACATTTCGAATAAAGACCCTTTTATCACAAATGACAGTAATCAGGAGCCAATTTATTCTGGAGCATATTTTAAACGACTTGGAAACTCAAAAAGTTTGTTTAAGCTAACAGATAGTAATATCCCTGAGGAAATCTGGGAAGGAAAATTAATAATTGGTCGGCAGGGACCTAGTTTTAAACCATCTGGTCCTTTGGAAAAATATTCGAAGATGGTAAATTTTTCAAAA

SEQ ID NO: 20590 - protein, 262 aa, Streptococcus agalactiae; identical to SEQ ID NO: 2360

SEQ ID NO: 20591 - protein, 594 aa, Streptococcus agalactiae
ATGTTAAATCAATATTTTCTGCATTTTGAAGAGAGTAAAATAGTTACTCCCTTATATGCTTTCGACATTGATTATCTGAATATTCCTAAATATGTCGGTCTATCAAAGGAGCAGATTCTGGAAAACTACCGCATCCTCCTGACCTATTTGAATATCCCATGGTTTCTCGCATTGGATATGCCGGATTTCCCTAGTTCGGCTAGTGGGCTTTTCCACTTTTTCGAGGTCAAGAAGCTTTTTATGCTGGACTACCTGATCTTGATCTTTTCTGGAATGGGCACGCTATGGTTTGTACGACATCTAAATAGGAGACGAGAATCTTGGCGGCTCCTACCCTACTTCCGCCAGGGAACCCTTATTCCCCTTGCTATCCTTTTGGCTCTCCTGGTTAGCTTCGACACGCTGTTTGTGCTTTTCCATAAAGTTTTCTTTAACAATGACGCCTGGCTCTTCAATGCCACTACTGATCCTATTATCTTAGCTTTACCTGCCGAGTTCTTTATGCACAGTTTCCTCTTGGCCTTTGGATTAATCGAAGTCTTCCTAATCCTGGGGTACTTCACTACTAAATATCGAATCTCTGCCCCAAGCCGT

SEQ ID NO: 20592 - protein, 198 aa, Streptococcus agalactiae; identical to SEQ ID NO: 2362

SEQ ID NO: 20593 - protein, 2085 aa, Streptococcus agalactiae
ATGAGAAATAACAAAAAACATTCGTCACATAGTCATCATAATCACGGCGACATTGATCACTCAAAACACGACCATAATGAAATGGAACATAGTCAGATGGATCACAGCAATATGGATCACAGTGAAATGGATCATGGCGCAATGGGAGGGCATGCCCACCACCATCACGGTAGCTTTAAGGAGATTTTCTTGAAGTCACTCCCATTAGGAATTGCAATCTTACTCATTACGCCTATGATGGATATTCAGTTGCCTTTCCAAATTATCTTTCCTTATGCAGACGTTGTAGCAGCTGTATTGGCAACAATTCTATACATTTTTGGCGGAAAACCATTCTACATGGGTGCGAAAGATGAGTTTAATTCAAAAGCTCCAGGCATGATGTCCTTGATTACTTTGGGAATAACGGTTTCTTATGCCTATAGTGTTTACGCAGTGGCCGCTCGTTATGTGACCGGAGAGCATGTCATGGACTTCTTCTTTGAGTTTACAACCTTAATTTTAATCATGTTATTAGGACACTGGATTGAAATGAAGGCATTGGGTGAAGCAGGGGACGCGCAAAAAGCATTGGCTGAGTTGGTGCCGAAAGATGCTCATGTTGTTTTAGAAGACGATTCGATTGAGACTCGCCCTGTGTCTGAACTTCAGATTGGAGATGTTATCCGTGTTCAAGCAGGAGAAAATGTTCCAGCTGATGGTATCATTATCCGCGGAGAATCTCGTGTAAACGAAGCGCTTGTGACTGGGGAATCGAAACCAATTGAAAAAAAAACCGGAGATGAGGTCATCGGTGGATCAACCAATGGTGGCGGAGTCCTCTATGTGGAAATAAAGCAGACGGGCGATCAGTCCTTCATTTCTCAGGTTCAGACATTAATCAGCCAAGCGCAAAGCCAACCTTCTCGAGCAGAGAATGTGGCTCAAAAAGTAGCTAGCTGGTTGTTCTACATTGCGGTTGTAGTAGCTTTAATCGCCCTACTAATCTGGACGATCATTGCGGATCTGCCTACAGCCGTTATCTTTACTGTGACTGCGTTAGTTATTGCCTGCCCACATGCTTTGGGTCTTGCTATTCCCTTGGTAGTATCACGTAGTACTAGTTTGGGTGCAAGCCGAGGATTACTGGTTAAAAATAGAGAAGCTTTGGAATTAACTACTAAAGCGGATGTTATGGTATTGGATAAAACAGGTACTTTAACAACTGGTGAATTTAAAGTGTTGGACGTCACTGTTTTGAGTGATAAATATTCTGAAGAAGAAATTACAGGCTTGTTGGCGGGTATAGAGGCGGGCTCCAGTCACCCGATTGCCCAATCGATTGTGAACCACGCTGAAGCGAAAGGCATTAAGTCAGTTTCCTTTGACTCCATTGAAATCGTTTCGGGAGCAGGAATAGAAGGGGAGGCGAACGACCACCACTATCAATTAATCAGCCAAAAGGCATACGGAAAAGCATTGCGTATGGATATTCCGAAAGGCGCTACTTTAAGTATCCTTGTAGAAAATAATGAAGCAATCGGCGCTGTCGCATTGGGAGATGAACTGAAAGAAACCAGCAGAAACTTGATCGAGGTGCTGAAAAAATACGGAATTGAACCACTCATGGCTACTGGTGATAACGAGGAAGCTGCACAAGGAGTTGCAGAAGTTCTAGGTATTCAATACCAAGCCAATCAATCTCCGGAAGATAAGTACAAGCTGGTCGAGTCCATGAAAAACCAAAACAAGACGGTTATCATGGTAGGAGACGGGGTCAATGACGCACCTTCCCTTGCCTTGGCAGACGTAGGTATTGCAATCGGAGCTGGAACGCAAGTAGCTTTGGATTCTGCGGATATTATCCTTACTCAGTCTGATCCAGGGGATATTGAATCCTTTATCGAGTTAGCAAACAAGACGACACGTAAAATGAAACAAAACTTGGTATGGGGAGCAGGCTACAATTTTATCGCGATTCCAATTGCTGCTGGCCTCCTTGCTCCTATCGGCATTACCTTGGGTCCGGCCTTCGGCGCCGTCCTCATGTCCTTATCGACCGTTATTGTTGCCATCAATGCTATGACATTGAAATTAGAGCCGAAA

SEQ ID NO: 20594 - protein, 695 aa, Streptococcus agalactiae
MRNNKKHSSHSHHNHGDIDHSKHDHNEMEHSQMDHSNMDHSEMDHGAMGGHAHHHHGSFKEIFLKSLPLGIAILLITPMMDIQLPFQIIFPYADVVAAVLATILYIFGGKPFYMGAKDEFNSKAPGMMSLITLGITVSYAYSVYAVAARYVTGEHVMDFFFEFTTLILIMLLGHWIEMKALGEAGDAQKALAELVPKDAHVVLEDDSIETRPVSELQIGDVIRVQAGENVPADGIIIRGESRVNEALVTGESKPIEKKTGDEVIGGSTNGGGVLYVEIKQTGDQSFISQVQTLISQAQSQPSRAENVAQKVASWLFYIAVVVALIALLIWTIIADLPTAVIFTVTALVIACPHALGLAIPLVVSRSTSLGASRGLLVKNREALELTTKADVMVLDKTGTLTTGEFKVLDVTVLSDKYSEEEITGLLAGIEAGSSHPIAQSIVNHAEAKGIKSVSFDSIEIVSGAGIEGEANDHHYQLISQKAYGKALRMDIPKGATLSILVENNEAIGAVALGDELKETSRNLIEVLKKYGIEPLMATGDNEEAAQGVAEVLGIQYQANQSPEDKYKLVESMKNQNKTVIMVGDGVNDAPSLALADVGIAIGAGTQVALDSADIILTQSDPGDIESFIELANKTTRKMKQNLVWGAGYNFIAIPIAAGLLAPIGITLGPAFGAVLMSLSTVIVAINAMTLKLEPK

SEQ ID NO: 20595 - protein, 204 aa, Streptococcus agalactiae
ATGAAACAAGAAATCTTATTAGATGGCGTAAAATGTGCAGGTTGTGCGAACACGGTACAAGAAAGATTTTCAGCTATTGAAGGGGTTGAATCTGTAGAGGTTGATTTAGCGACTAAAAAAGCAGTACTTGAAAGTCAAACAGAGATTGATACCGAAACGCTCAATGCTGCTTTAGCAGAAACTAACTATTCAGTATTAAGTGCA

SEQ ID NO: 20596 - protein, 68 aa, Streptococcus agalactiae; identical to SEQ ID NO: 2368

SEQ ID NO: 20597 - protein, 474 aa, Streptococcus agalactiae
ATGAAGGCTGTTAAAGCACTTAGAAGACGCGGTGTTGAAGTAATCATGATTACTGGAGATAACAAACGAACAGCCAAAGCGATTGCTAAGCAAGTGGGTATAGACAGTGTATTAAGTGAAGTATTACCTGAAGATAAAGCAGAGGAAGTCAAAAAACTACAAGAGGCAGGCAAGAAGGTAGCGATGGTTGGAGACGGCATTAACGATGCACCCGCATTAGCTCAAGCAAATGTCGGAATTGCAGTTGGATCAGGTACAGACGTGGCGATTGAATCGGCTGATATTGTCCTTATGCGTAATGATTTAACCGCTGTATTGACTACGATTGATTTAAGTCATGCAACGCTACGAAACATTAAACAAAACTTGTTCTGGGCTTTTGCTTACAACCTTGTAGGTATTCCAGTTGCGATGGGTCTTTTGTATATTTTTGGCGGACTATTGATGAGTCCAATGTTGGCGGGGCAGTCGCCG

SEQ ID NO: 20598 - protein, 158 aa, Streptococcus agalactiae
MKAVKALRRRGVEVIMITGDNKRTAKAIAKQVGIDSVLSEVLPEDKAEEVKKLQEAGKKVAMVGDGINDAPALAQANVGIAVGSGTDVAIESADIVLMRNDLTAVLTTIDLSHATLRNIKQNLFWAFAYNLVGIPVAMGLLYIFGGLLMSPMLAGQSP

SEQ ID NO: 20599 - protein, 443 aa, Streptococcus agalactiae
ATGAGCACAATAGAACTTAATACTTCTATCACAGATGCTGAATGGGAAGTAATGCGTGTAGTTTGGGCAAATGATTTAGTAACTAGTAAAACAGTCATCTCTGTATTGAAAGAAAAATGGACTGGACAGAATCCACTATCAAAACGATCTTAGGTCGATTAGTTGAAAAAGGCGTACTAAATACAGAGCAAGAAGGTAGAAAGTTTATTTACACTGCCAATATTGTAGAGAAAGAAGCCGTAAGGGATTTTGCAGAAGATATTTTTAACCGTATTTGCAAAAAGAAAGTCGGAAATGTAATAGGAAGCATCATTGAAGATCATGTCTTAAGCTTCGATGATATAGATCGACTAGAGAAAATATTAGAGATAAAAAAATCTTTCGCAGTAGAAGAAGTGGATTGTCAGTGTACAGAAGGGCAATGCGATTGCCATGAAGGCTGT

SEQ ID NO: 20600 - protein, 148 aa, Streptococcus agalactiae; identical to SEQ ID NO: 4178

SEQ ID NO: 20601 - protein, 618 aa, Streptococcus agalactiae
ATGGGACAGACAATCATATCTGCTATTGGTGTTTATATTTCCACCAGTATCGATTATTTAATTGTTTTAATTATTTTATTTGCACAGCTATCACAGAATAAACAGAAATGGCATATTTATGCGGGGCAGTATCTAGGCACTGGCTTACTTGTAGGGGCGAGTTTAGTTGCTGCTTATGTCGTCAATTTCGTGCCTGAAGCATGGATGGTTGGATTGCTTGGTTTAATCCCTATCTATTTAGGGATTCGCTTTGCAATTGTTGGAGAAGGTGAGGAAGAAGAAGAGGAAGAAATTATTGAAAGATTAGAACAAAGCAAGGCAAATCAACTGTTTTGGACAGTAACATTGCTGACAATTGCATCTGGCGGAGATAATTTAGGTATCTATATACCTTATTTTGCTTCGTTAGATTGGTCACAGACCCTCGTGGTGTTGCTTGTGTTTGCAATCGGCATAATTATCTTTTGCGAGCTTAGTTGGGTGCTATCTTCTATTCCGTTAATATCCGAGACAATTGAAAAATACCAGCGAATCATTGTGCCGTTAGTATTCATTCCACTTGGACTATACATCATGTATGAAAGTGGCACGATTGAGACTTTTCTGAACTTTATTTTA

SEQ ID NO: 20602 - protein, 206 aa, Streptococcus agalactiae
MGQTIISAIGVYISTSIDYLIVLIILFAQLSQNKQKWHIYAGQYLGTGLLVGASLVAAYVVNFVPEAWMVGLLGLIPIYLGIRFAIVGEGEEEEEEEIIERLEQSKANQLFWTVTLLTIASGGDNLGIYIPYFASLDWSQTLVVLLVFAIGIIIFCELSWVLSSIPLISETIEKYQRIIVPLVFIPLGLYIMYESGTIETFLNFIL

SEQ ID NO: 20603 - protein, 258 aa, Streptococcus agalactiae
GTGACATATGGTAGAAATGAAAATGAATTAATACCCATACCATCAGCCATTGACAAAGGATCGCAGCCCCCTCTTGCTTCAGCGATTATGCGAAAAGCAGAAGAAAATGGATTAAAATTCAATGAAGTACCAGTAGAGGATCTTCAATCCATTACAGGTAAAGGCGTTAAAGCCAAAATAAATAATGAAATGTATTATGTGGGAAGTCAAAATCTTTTCGAGGAATTACACGGAAGCATTTCAAGCGANNNNNTTAAT

SEQ ID NO: 20604 - protein, 86 aa, Streptococcus agalactiae
  VARIANT 83, 84, 85: Xaa = Any Amino Acid
MTYGRNENELIPIPSAIDKGSQPPLASAIMRKAEENGLKFNEVPVEDLQSITGKGVKAKINNEMYYVGSQNLFEELHGSISSXXXN

SEQ ID NO: 20605 - protein, 147 aa, Streptococcus agalactiae
TTGAACTCAAAAAAGTTGTTAAAGCTAACAGATAGTAATATCCCTGAGGAAATCTGGAAAGGAAAATTAATAATTGGTCGGCAGGGACCTAGTTTTAAACCATCTGGTCCTTTGGAAAAATATTCGAAGATGGTAAATTTTTCAAAA

SEQ ID NO: 20606 - protein, 49 aa, Streptococcus agalactiae
MNSKKLLKLTDSNIPEEIWKGKLIIGRQGPSFKPSGPLEKYSKMVNFSK

SEQ ID NO: 20607 - protein, 456 aa, Streptococcus agalactiae
GTGAACCACTTACTTAACCTCAGTAAAGAAAATATAGCTAAAATAGATTTTGACTTTCTTAATGAGGCACTTAATGCAAATATTCGTTTGAAAGAATTAGTAGATGAACTAAAAATTTCAAAAGAACTGGACAGTAAAGGTTGGTCCAAAAAAGACTCTCGAACGATAAAAATCTTGTACGATGGCCTTATCAATAAACATATAGTTTCCCTAGATCGTGCAGATTATAACATTATCCAAGTCATTCCATTTGCTAATGTACATGTACTACTGTTTTTAATACCAGAAAGGGAGAATTCTAAAAATTATAGAATATACAACTACAGTGATTATGAAATGGAGTTAATCAATGAGGATAGGCAACAATTTTCAAAATATGAAACAGTTGATTTAGACCAATTGATACTTGTTGATATTTTTAATATTGATGACTACATTTCATCATATTTAACAATA

SEQ ID NO: 20608 - protein, 152 aa, Streptococcus agalactiae; identical to SEQ ID NO: 2376

SEQ ID NO: 20609 - protein, 324 aa, Streptococcus agalactiae
TTGATAAACTATGCTGATAATAAAAGCGATAGACATATTTTACAAACCTGTTTAGAATTTGCTCAAAAAATTGTAGAATCAGATAAATCTGAATATAGTATTCTCATTTTACTACAAATAAAAAAACGATTAAACATATTAACACAAATGGATAGCAACTATCTTCATTCTCTAATGAATCAAAGTTCGGTAGAAATTAGGTTTGCTGCAGCCTGTATTCTAGGTAACAAAGAACAAGCCAGATATTTTTTCGATAAAGAATTCGCTGATGAACAAAAAGAACGATTTCTGGAATATCCGATTTATTACCTCCTTAGCCTAGAC

SEQ ID NO: 20610 - protein, 108 aa, Streptococcus agalactiae
MINYADNKSDRHILQTCLEFAQKIVESDKSEYSILILLQIKKRLNILTQMDSNYLHSLMNQSSVEIRFAAACILGNKEQARYFFDKEFADEQKERFLEYPIYYLLSLD

SEQ ID NO: 20611 - protein, 690 aa, Streptococcus agalactiae
ATGTTTTCTGGTAAACGATTAAAGAAAAGACGAATAACACTTGGCTATTCTCAATCTGAACTAGCAGATAAACTTCATATAAACCGCTCTTCTTATTTCAATTGGGAAAATGAAAAGACTAAACCAAACCAAAGCAATCTCAAACAACTAGCTATCCTATTAGATGTTCCTGAAACATATTTCGAGTCAGAATATAAAATAGTCAATACTTATCTTCAGCTTTCTTTACAGAATCAGGAAAAGGTAGAGAAATATGCTGAGGAATTACTTCAAACTCAAAAGGTTCATGAAAAGATTGTTCCACTGTTTGCTGTGGAAGTTCTATCAGAAATTCAACTATCTGCTGGTCCAGGTGAAGGTCTGTACGATGAATTTGAAACTGAGACTGTCTATTCAGAAGATGAATACACAGGATTCGATATAGCAACATGGATTTCTGGTAATTCTATGGAACCTGTTTATAAAGACGGTGAAGTCGCTTTAATTAGATCGACTGGTTTTGATCACGATGGAGCTGTCTATGCCTTGAATTGGAATGGATCGCTCTATATCAAGAAACTCTATCGTGAAGAAGATGGATTCCGAATGGTGTCAATTAACCCAGATGTTGCTGAAAGGTTTATCCCATTTGAAGATGAAATCAGAATTGTTGGTAAAATTGTAGGCCACTTCATGCCTGTGATTGGAGGT

SEQ ID NO: 20612 - protein, 230 aa, Streptococcus agalactiae
MFSGKRLKKRRITLGYSQSELADKLHINRSSYFNWENEKTKPNQSNLKQLAILLDVPETYFESEYKIVNTYLQLSLQNQEKVEKYAEELLQTQKVHEKIVPLFAVEVLSEIQLSAGPGEGLYDEFETETVYSEDEYTGFDIATWISGNSMEPVYKDGEVALIRSTGFDHDGAVYALNWNGSLYIKKLYREEDGFRMVSINPDVAERFIPFEDEIRIVGKIVGHFMPVIGG

SEQ ID NO: 20613 - protein, 132 aa, Streptococcus agalactiae
ATGTCAAGACAGTTTGACGACATTATATTTATTAAAGCAAATAGAATTATTTTATTACTCGACCAAAAAGAATATGATGTAACTAACCATTTAACTGAATTGGTTGATGAATTAGCAAAATTGAAATCTAGG

SEQ ID NO: 20614 - protein, 44 aa, Streptococcus agalactiae; identical to SEQ ID NO: 2380

SEQ ID NO: 20615 - protein, 1413 aa, Streptococcus agalactiae
ATGGGCTATGTCGACTACTCAAAAGAACCTCGTAGCGATATTGCTTTTGTCGATATGAAATCCTTCTATGCATCTATCGAATGTGTAGAGAGAGGACTTCACCCGCTTCATACTTCACTTTGTGTGATGAGTAGGGCAGATAATTCAGCTGGTCTAATTCTAGCTTCTTCTCCAATGTTCAAAAAAGTCTTTGGTAAAGGAAATGTTGGCAGAGCCTACGACCTCCCCTTTGATGTTCATACCAGAAAATTTAACTACTACCGTGCTAAAATTTCAGGATTGCCAACGGATGCAAAATTTGTTTCCTTCATAGAAAATTGGGCCAAGCGTACATTTATTGTGCCACCGAGAATGGACTTGTACATTCAAAAAAATCTTGAAATACAAAAAGTATTTCAAAATTATGCAGATCCGACAGATATTCTGCCCTATTCTATTGATGAAGGATTTATTGACTTAACTTCATCGCTAAATTATTTTGTTGAAGACAAATCTCTGAGTCGCAAAGATAAGTTAGATGTGGTTTCAGCAAAAATTCAACACGATATTTGGGAAAAAACGGGTGTCTATTCAACTGTTGGAATGAGTAATGCCAATCCACTTCTAGCTAAGTTAGCACTTGATAACGAAGCTAAAACCACTGCTACCATGCGTGCCAATTGGTCTTATGAAGATGTTGAAACGAAGGTCTGGAATATTCCCAAAATGACTGACTTTTGGGGAATAGGTTCACGAACAGAAAAACGACTAAACAAATTGGGAATCTACAGCATTAAAGAATTGGCCAACTGTGACCCTACTATCTTGAAAAAAGAATTTGGTGTTATTGGAGTACAACATTGGTTTCATGCTAATGGCATCGATGAAAGTAATGTCCATGAACCTTATCGCCCTAAAGCAGTCGGGATTGGGAATTCGCAAGTGCTCCATAAAGATTACACTCGTCAAAGTGATATAGAGCTTGTCCTGCGTGAGATGGCAGAGCAAGTTGCGATTCGGCTACGCAGAAGACATAAAAAAGCAACTGTAGTCGCCATAAATGTAGGCTATTCAAATTTCGAAAACAAGAAATCAATCAATGTTCAGAGAAAAATTAACCCAAATAATCGTACGCTTGTTTTTCAAGATGAAGTTGTTTCTCTCTTTCGTTCTAAATACGATGGAGGGGCAGTTAGAAGCATTGCTGTAAGGTACGATGGATTGGTGGATGAAAACTTTGCTGTGATTTCTCTTTTTGATGACTTTGAAGAAAGCGAAAAAGAGGAAAAATTGGAGACAACCATTGATTCCATTCGTGATCGTTTTGGATTTCTTGCTGTACAGAAAGCTAGTTCTTTATTAGAAAATTCAAGGGCAATTGCTCGCAGTAGATTAGTCGGCGGACATTCCGCTGGAGGATTGGAGGGTTTAAAA

SEQ ID NO: 20616 - protein, 471 aa, Streptococcus agalactiae; identical to SEQ ID NO: 2382

SEQ ID NO: 20617 - protein, 348 aa, Streptococcus agalactiae
ATGATTGATAGAAGTTATCTCCCATTTAAGGTTGCTAGAGAATACCAAGACCGAAAGATGGCCAAATGGATGGGCTTCTTCTTATCAGAACATACGGCAGGACTTGATAGTGAGCTTAATAAAGTTGACTATACTTCTGAGTTATCAATTTCAGATAAACTACTGCTGCTCAATCAATTATACAGTAATCAGTTGAATGGTATCATTGCAGTTCCTGGACAATATTACAGTGGAAAAGTTGACAATCTGACTTTTAACCATGTTTCATTGAAGACAAAAACGGGCTTTGTCAGCATTCCAATCAAGGATATTCTTTCAATTGATTTGGAGGTGGAATATGAATCAGCT

SEQ ID NO: 20618 - protein, 116 aa, Streptococcus agalactiae
MIDRSYLPFKVAREYQDRKMAKWMGFFLSEHTAGLDSELNKVDYTSELSISDKLLLLNQLYSNQLNGIIAVPGQYYSGKVDNLTFNHVSLKTKTGFVSIPIKDILSIDLEVEYESA

SEQ ID NO: 20619 - protein, 306 aa, Streptococcus agalactiae
ATGAATCAGCTTGAGTTTAATAAAAATCTATTACAAATGGATTATTTTAGTGATAGCTACCGAAAATTTGAAGAGGATTTCTATCGCTACTCAGCCCTAGATACTCCACTTACTTTTTTAACAGATGATATTATGCTTGCCATGGCAAAATCTCAAAAGCCTTATTTTAAGCTAAATAAGGAAAATTCGAAAGACCATCGTGACCATTATTTTATGTTCAATGTGGAACCTTCACGAGATAATAATCTAGTTAGGCTATATTGTTACGATTCAACGAAGACACATATTTCAAAAAACAGGCCAAAA

SEQ ID NO: 20620 - protein, 102 aa, Streptococcus agalactiae
MNQLEFNKNLLQMDYFSDSYRKFEEDFYRYSALDTPLTFLTDDIMLAMAKSQKPYFKLNKENSKDHRDHYFMFNVEPSRDNNLVRLYCYDSTKTHISKNRPK

SEQ ID NO: 20621 - protein, 294 aa, Streptococcus agalactiae
ATGAAATTTTTTCAAAAGAAAAAACAAAACCAGGATCAATTCAAACGACTGATTCATCGACTATCAGAGATGTCAGATAGTGAACTAACCAAAGTAGAACAACTCCTAGATGTGGTTTTTGATACAAATTTTAAGCCTGATACGAGCGTTGAATTATCTCAAAGCGATATAACTGACGAGGATCAAAGTCTTGATAGGTCAATCCAGGAAGCGAAAAATAAACTTCACACGGAACAATTGGAAAAAAACATTGAGAGGTTTAGACAAGGTAGGCGAGAGAGCAATAATAACAAA

SEQ ID NO: 20622 - protein, 98 aa, Streptococcus agalactiae
MKFFQKKKQNQDQFKRLIHRLSEMSDSELTKVEQLLDVVFDTNFKPDTSVELSQSDITDEDQSLDRSIQEAKNKLHTEQLEKNIERFRQGRRESNNNK

SEQ ID NO: 20623 - protein, 387 aa, Streptococcus agalactiae
ATGAGTAAAACATGGAATTTTGATCAGCCACTAGACGATGTGAAACCAACATCGTCCCATGAAGAACGAGCTAAAATCGCAGCACTTTTTCATAAACAGGATGAAAAACCAATTGAAGAAGTAGATTATGTGGCTGCTTTTGAACAGCAACAAAAGGAGTCAGAATCAAAAGATGTACAAACGCTCGCATCAACCGTTAAACAAAATCAGCCGAAGAAGGTAAATATCACAAGTGACTATAAACAACACTTGGCTGATACCATTGCACAAAACAACAAGGATATTTCCGCCTGTCAGAAGCAAATTGAAGAACTTCATCAATTGATTGATGAAAAGAAAATCCAAAATAAAAAGTTGCAGGCTATTTCAGTAGCCATTGATGATTTA

SEQ ID NO: 20624 - protein, 129 aa, Streptococcus agalactiae; identical to SEQ ID NO: 2386

SEQ ID NO: 20625 - protein, 225 aa, Streptococcus agalactiae
ATGAGTGTGATTGAACGTCTGGCTGAAAAAGTAGCTAGGCAAGAAGAAAAGGTCTCACGTGAGACTGAGAAATTGGAACACTATCGAGACCAACTACAAACTGCAATGTATAGCACCTTTATCAAACGACAACAATCAAGTCAGTTGTCATTTCATGAAGCACTAGAGCAAGCCTTTGGTAAAGAAACCACACTACACCCAAATTACAGAAATGAGGATACAGAA

SEQ ID NO: 20626 - protein, 75 aa, Streptococcus agalactiae; identical to SEQ ID NO: 2388

SEQ ID NO: 20627 - protein, 1073 aa, Streptococcus agalactiae
ATGACACGAATTAAAATAGTAAAACAAAAGGCCATTTTAGATGTGGCTGAAAGTTTGGGTTATTCCTTCAGACGTTTATCAGGACAAATTTATGAACACCCAGACCATGATTCCTTTCGGATTTTTGCGGATACCAATACTTTCAAATGGTTTTCAAGAGATATACAAGGGATGTGATAGACTTTGTACAGTTAGTGGCAGGAGTGTCTTTCAAAAAAGCCTTGTCTTACCTTGAAACTGGAGGCTTTGAAGAAGCTAAGGTGATTGAAGAAACTTATCAACCCTTCCAATATTATTTGCGTGAAGAACCCTTTCAGCAAGCACGTACTTACTTGAAAGACATCCGTGGACTAAGTAATCAGACTATTAATTCCTTTGGCAGACAAGGATTGCTTGCTCAAGCTACTTATCAAGCGGAGTCAGTTTTAGTGTTTAAAAGCTTTGACCATAATGGGACCTTACAGGCCGCAAGCCTTCAAGGTCTCGTCAAAAATGAAGAAAAATACGATCGAGGTTATCTCAAAAAAATCATGAAAGGATCTCATGGCCATGTCGGTATTAGTTTCGATATTGGGAATCCTAAGCGACTCATTTTTTGTGAATCAGTTATCGATATGATGAGTTATTATCAACTTCACCAAAAGCAGCTATCAGATGTTCGCCTGATTTCAATGGAAGGCCTAAAACTTTCAGTGATTGCTTATCAGACTTTGCGTCTAGCAGCAGAGGAACAGGGGAAATTGGCATTTCTAGATACAGTAAAACCAATTAGACTTAGCCATTATCTTCAGGCAATACAAGAGACGACAACCTTTTTTCAAACTCATTCAAACGTCATAACTATGGCTGTTGATAACGATGAAGCAGGAAGAGAATTTTATCAGAAACTGTCAGATAAAGGATTTCCGATTTTTCAAGATTTACCACCATTGCAAAGACTTGAAACAAAGTCAGATTGGAATGATATTGTGAAACGACAAAAGGAATTATCTTTAAGAGATCTTATCCAGTCAGCCCAAGCACAAGTCAATAAGAATCATCCTCCACCTAAACGAGAGCACGCTTTGGAATTG

SEQ ID NO: 20628 - protein, 358 aa, Streptococcus agalactiae
MTRIKIVKQKAILDVAESLGYSFRRLSGQIYEHPDHDSFRIFADTNTFKWFSRDIQGDVIDFVQLVAGVSFKKALSYLETGGFEEAKVIEETYQPFQYYLREEPFQQARTYLKDIRGLSNQTINSFGRQGLLAQATYQAESVLVFKSFDHNGTLQAASLQGLVKNEEKYDRGYLKKIMKGSHGHVGISFDIGNPKRLIFCESVIDMMSYYQLHQKQLSDVRLISMEGLKLSVIAYQTLRLAAEEQGKLAFLDTVKPIRLSHYLQAIQETTTFFQTHSNVITMAVDNDEAGREFYQKLSDKGFPIFQDLPPLQRLETKSDWNDIVKRQKELSLRDLIQSAQAQVNKNHPPPKREHALEL

SEQ ID NO: 20629 - protein, 636 aa, Streptococcus agalactiae
ATGTTAAATAAAGTGAAAGCTCGATTTCTGATTGGAGTAGGAGGTTTAATCGCAGTCAGTTTTATGGTCATGATTGGCTACACGATTGGCTCACAAACCATTTCAAAGCAAACAGAGAACCAAATACGAGCAGAAGCCAATAAACTTGTGTCAAAGAAAAAGCAGGAGGAAAGAGCGACAGTCCTATCAGATGAGCTTGTCAATGAATTTCTCACTCAATATTTCACCAAGGTCCAGCTGGGTGAAAATAACGCTCGTATCAAACCCTACATGACGGACTCGGCATTTTCAGAAGAGGAAGCAAATCAGAATAAAGCGATCAATCAAGTTTATAAAGACTATATGCTTGACTACCGATTTGAATCAGCCAGTATCTATGTCAATACAGAAAGCCATGTTGCACTTGCGGAAGTTTCCTATCAAGTAACTTATGTTTCTGATTTGAGTGAGCAACAACAGCGAACAACTCAGACAGAAACCAAGACAGTTATGTTATCCTACTCCAAAGTTTCCGACAAGCTTCTAGTTAATCAGTTGACCATTTGGAATGGGAAACTGGAGGACATGAAAGAAGCAACAGATGGAGCCAATTCCAGCATACCAACGATCCAAGGAACTACAACAAGCGAGAACAAC

SEQ ID NO: 20630 - protein, 212 aa, Streptococcus agalactiae
MLNKVKARFLIGVGGLIAVSFMVMIGYTIGSQTISKQTENQIRAEANKLVSKKKQEERATVLSDELVNEFLTQYFTKVQLGENNARIKPYMTDSAFSEEEANQNKAINQVYKDYMLDYRFESASIYVNTESHVALAEVSYQVTYVSDLSEQQQRTTQTETKTVMLSYSKVSDKLLVNQLTIWNGKLEDMKEATDGANSSIPTIQGTTTSENN

SEQ ID NO: 20631 - protein, 286 aa, Streptococcus agalactiae
ATGTTGGAGCAAATTCTACAAAGTCTTTTGATTTTCGCAGCAATGGACTGATGTTGTTTGTCCTTTATCGGATTGTGAAAGTTTCAGGTGCTTTGTTTCTTATCGGACTCATCAGTGGATTAGTCTTTATTGAAATCTATGGAATTTACCTCTTCTTTACTGAGAGATACCTCTATTCAGAAATTTAGCAACTAATGGAGTTTGGAGTTTTACAGGATTTTTTATTGCTTTGAATCTATTTCTTGTTTTTAGCATTATTATGAAGTGGTGGAGAAATAGAATAGTT

SEQ ID NO: 20632 - protein, 96 aa, Streptococcus agalactiae
  VARIANT 62: Xaa = Any Amino Acid
MLEQILQSLLIFAAIGLMLFVLYRIVKVSGALFLIGLISGLVFIEIYGIYLFFTERYLYSEXLATNGVWSFTGFFIALNLFLVFSIIMKWWRNRIV

SEQ ID NO: 20633 - protein, 515 aa, Streptococcus agalactiae
ATGGAAAAACGGTTGAGTCAATATGATAAAGATATTGCCCAATCTTTGGCAACCAAGTCGCAAGATTTTGTCATGCGATTTGACAATCAAGCAATGGATAATCGTGCTGAAGCTGGGGACTATCTGCGAAAACTCATTACCTATAACCGCTCAGAGACCAAGGAAGTCAGGACACTTGCCAGCTTTAGAGGATTTGATTTAAAAATGACTACACGAGGTGCTAGTGAGCCCTTACCAGAAACCATTTCTTTAATGATTGTAGGTGATAACCAGTATACTGTCGCCCTTGATTTGAAATCAGACGTGGGAACCATTCAACGGATTAGTAATGCCATTGACCATATTATAGATGACCAAGAAAAGACGCAAGAGCTGGTAAAGGATTTAAAAGATAAGCTACGAGTAGCCAAAGTAGAAGTTGATAAAGTCTTTCCAAAGGAAGAGGACTATCAGCTTGTAAAGGCTAAGTATGATGTTTTAGCTCCCTTGTGAAAAAGAAGCAGAGATTGAAGAGA

SEQ ID NO: 20634 - protein, 172 aa, Streptococcus agalactiae
MEKRLSQYDKDIAQSLATKSQDFVMRFDNQAMDNRAEAGDYLRKLITYNRSETKEVRTLASFRGFDLKMTTRGASEPLPETISLMIVGDNQYTVALDLKSDVGTIQRISNAIDHIIDDQEKTQELVKDLKDKLRVAKVEVDKVFPKEEDYQLVKAKYDVLAPLVKKKQRLKR

SEQ ID NO: 20635 - protein, 2304 aa, Streptococcus agalactiae
ATGCCTGTCCTGAGAAGATTTGAATGGAGAATTGACCTATGTTTCTCGCCAAGACTTTCTTTCAGGGGATGTCGTCACTAAGTTAGAAGTGGTAGATCTATTCGTCAAACAAGACAATCAGGACTTTAACTGGTCACATTATGCGGGACTTCTAGAAGCTATCAAACCAGCCCGTATTACTTTGGCAGACATTGATTATCGAATCGGTTCACGCTGGATTCCTCTGGCTGTTTATGGAAAATTTGCCCAAGAAACCTTTATGGGGAAAGCCTATGAACTGTCAGACCAAGAAGTAGCGACAGTCCTAGAAGTCAGTCCCATTGACGGGGTTATCACTTACCAATCTAAGTTTGCCTACACCTATTCCAACGCAACGGATAGGAGTTTAGGTGTCCCTGCTTCACGCTATGATAGTGGTCGAAAAATCTTTGAAAATCTCCTGAATTCCAATCAACCAACCATCACAAAACAAGTTGTCGAAGGGGATAAGAAAAAGAATGTGACGGATGTAGAGAAAACAACGGTCCTGCGTGCCAAGGAAACACACCTACAAGAACTCTTTCAAGGTTTTGTAGCAAAGTATCCAGAAGTCCAACAAATGATTGAAGACACCTATAATAGGCTCTACAATCGTACGGTATCAAAGTCCTATGATGGTAGTCATTTAACCATTGATGGACTTGCTCAGAATATCTCCTTACGTCCTCACCAAAAGAATGCCATTCAACGAATTGTCGAGGAAAAACGTGCTCTACTAGCTCATGAAGTTGGTTCAGGTAAAACACTTACCATGCTTGGGGCAGGATTCAAACTGAAAGAACTCGGAATGGTACATAAACCACTTTATGTGGTGCCGTCTAGTCTGACTGCTCAGTTTGGTCAAGAAATCATGAAATTTTTCCCTACCAAGAAAGTCTATGTGACTACTAAGAAAGACTTTGCCAAAGCCAAACGCAAGCAGTTTGTGTCCCGTATTATTACAGGGGACTATGATGCCATTGTCATTGGGGATTCACAATTTGAGAAGATACCGATGAGTCGTGAAAAACAGGTCACCTATATCAATGACAAACTTGAGCAACTCCGAGAAATCAAGCTAGGAAGTGACAGTGATTACACGGTGAAAGAAGCGGAACGTTCGATTAAGGGATTAGAACACCAGTTGGAAGAACTCCAAAAACTAGAGCGAGATACCTTTATTGAGTTTGAAAACCTTGGAATTGATTTTCTTTTTGTGGATGAGGCTCATCACTTCAAGAATATCCGTCCAATCACTGGACTTGGGAATGTAGCTGGAATCACCAACACAACTTCTAAAAAGAACGTGGATATGGAGATGAAGGTGAGACAAGTACAGGCAGAGCATGGAGATAGAAATGTCGTTTTTGCGACAGGAACACCAGTTTCTAACTCTATTAGTGAACTTTTCACCATGATGGATTACATTCAACCTGATGTCTTGGAACGATACCTGGTATCAAATTTTGACTCCTGGGTTGGGGCTTTTGGGAATATCGAAAACTCCATGGAACTAGCCCCGACAGGAGATAAGTACCAACCCAAGAAACGGTTCAAGAAATTTGTCAACCTTCCTGAACTCATGCGAATCTACAAGGAAACTGCCGATATTCAGACCTCAGACATGCTTGATTTACCAGTACCGGAAGCTAAGATTATTGCGGTGGAAAGCGAGTTAACGCAAGCTCAGAAATACTATTTGGAAGAGCTGGTAAAGCGTTCAGACGCTATCAAGTCAGGTAGTGTTGATCCAAGTAGAGATAACATGCTTAAAATCACAGGAGAAGCCAGAAAACTAGCTATTGATATGCGGTTGATTGACCCTACTTACTCCTTATCGGATAATCAGAAAATCCTTCAAGTAGTCGATAATGTCGAGCGGATTTACCGTGATGGAGCTGGAGACAAAGCCACTCAGATGATTTTCTCAGATATTGGAACCCCTAAAAGTAAGGAAGAAGGGTTTGATGTCTACAATGAACTTAAGGACTTGTTTGTCGATCGAGGGATACCAAAAGAAGAAATTGCCTTTGTCCATGATGCCAATACTGATGAGAAGAAAAACTCTCTGTCACGCAAGGTCAATAGTGGAGAAGTACGGATTCTCATGGCTTCTACGGAAAAAGGGGGAACAGGATTAAACGTCCAATCTCGCATGAAAGCTGTCCACCATTTAGACGTTCCCTGGAGGCCCTCAGACATTGTCCAGCGAAATGGACGACTAATTCGACAAGGAAACATGCACCAGGAGGTAGATATTTATCACTATTTACTAAAGGGGAGCTA

SEQ ID NO: 20636 - protein, 769 aa, Streptococcus agalactiae
  VARIANT 3: Xaa = Any Amino Acid
MPXPEKYLNGELTYVSRQDFLSGDVVTKLEVVDLFVKQDNQDFNWSHYAGLLEAIKPARITLADIDYRIGSRWIPLAVYGKFAQETFMGKAYELSDQEVATVLEVSPIDGVITYQSKFAYTYSNATDRSLGVPASRYDSGRKIFENLLNSNQPTITKQVVEGDKKKNVTDVEKTTVLRAKETHLQELFQGFVAKYPEVQQMIEDTYNRLYNRTVSKSYDGSHLTIDGLAQNISLRPHQKNAIQRIVEEKRALLAHEVGSGKTLTMLGAGFKLKELGMVHKPLYVVPSSLTAQFGQEIMKFFPTKKVYVTTKKDFAKAKRKQFVSRIITGDYDAIVIGDSQFEKIPMSREKQVTYINDKLEQLREIKLGSDSDYTVKEAERSIKGLEHQLEELQKLERDTFIEFENLGIDFLFVDEAHHFKNIRPITGLGNVAGITNTTSKKNVDMEMKVRQVQAEHGDRNVVFATGTPVSNSISELFTMMDYIQPDVLERYLVSNFDSWVGAFGNIENSMELAPTGDKYQPKKRFKKFVNLPELMRIYKETADIQTSDMLDLPVPEAKIIAVESELTQAQKYYLEELVKRSDAIKSGSVDPSRDNMLKITGEARKLAIDMRLIDPTYSLSDNQKILQVVDNVERIYRDGAGDKATQMIFSDIGTPKSKEEGFDVYNELKDLFVDRGIPKEEIAFVHDANTDEKKNSLSRKVNSGEVRILMASTEKGGTGLNVQSRMKAVHHLDVPWRPSDIVQRNGRLIRQGNMHQEVDIYHYITKGEL

SEQ ID NO: 20637 - protein, 4063 aa, Streptococcus agalactiae
ATGAATCAAGAAGTCTTACTACAAATGATGAGAGCCACTATTCCTCGTGATAGAGCCTTGCTTGAGGCATTTTTATATTACCAAGCAGAGCATTTTGATGAGGAGTGGGATAGTCTTATTCATCAGTTTATGACCAATAGGCAAGAAATAAATAAGTCTGTTCAAGTACTTCACTTTGAGACAGATGTTTCAGCTTTTGTCCAGGCTAGTCCTTATGATACTGCTCATGATCTATTGACCTATACACAAGTTTTCGGCCAAAGTGGTCTTCAAAAACTAGATAAACTATCGCCGTCTGAAAAAAACTTGGTGATAGAAGTGGCCTTGTTCAATCTGGCCACTCGTTTTCAATTATTGGATTCCAATGGACACTACCAAACCATATCGCCGGATTCACTCTTACAAAAGAGTAGGGGAGCTAATTTGGTCAATGTGTATCGTGTGGCTAATAATTTAGCGGATCGTATTAGTCGAGATATTGAACAGTTTCTCTTAACTTACGAGCCTGAGCTTGAAACTAGAGCTGATGAAACTGTTCTAGAAAATGAAGAAACTGTTGATGAGCACAAAACAAGTGTTCATCAAGCAATATCTTTTCGAGAAGAGGGCTCTCTGGTTATTGCTAGTTTGGATGTAGATTTGTCTCAACTAGATGTTCAAATAGGAAAAACCAGTCATCTGCCAGCTTATGAAGAGTTATCCTTACGACGTAAATTTGAGATTCTAACATATTTTGACCAAATTCGAAATGAACGTTCCAAAGTCCCAAGTTTTAGACGAGGTGATTTTGACACAGAGATGGAAATGACACCAGTCTTTGATGGCGAGGAATTACTTACTTATCTCGAAGCTGATGGCAGTCCCTATGAGCTGAAACGAACGCTGACTACAGTCGAAGAAAAGGAATTAGAAAAAATTGGACAAGCCATTAGGATAGAAAATCAAGAAAAATTGACTCAGCTAGGGATTGATTTATCTCAGTTTGACCCAGACCGAGTCGGTATTTTATTGGATGCAGCAGGTCGTTTTCGTTTAAAAAATGCAGACCTTGCTTTACTAGGTGGTTATCCCAAAGCCTCGGTAACTCAACTAGCCCTTGCGACAGAACTACTCCAAATGGGACTAAGTCATGAAAAGGTTGAATTTTTCTTTGGTAGCCAGCTTTCCATTGAAGAGCTGCGACAAGTTGCCTACGCCTTTTTACACCAAGAACTCAGCAGAGAAGATGCGGAGCAATTTGAAAAAGATAAAGGTAATCAGCCAGATTTAACTCTCAGAGATTGGAAAAGCAAGCTAGAGAAAGCTGAGGGAAAAGAAGTAGTTGATGAAGAATTCGCGGAAAATCCACTGGTTCAGAGAGTATTGGACACTTATCCTCTGGGGTCATTGGTTTCCTATAAGGGACAGGACTTTGAGGTCATGTCGGTCAGCGATGCTCGATTGAACGGTTTGATTCGGATTGAGTTAGTCAATGACTTTTCGGATATCATTGAACAAAATCCAGTTCTTTATGTGAGGACCTGGGAAGAAGTCAGTCAGGCACTTCATCAGCCAAAGGCAGAACCACAAACAGAGTTAGAAGAAGCGGACCAAGAATTAAACCTATTCTCATTTCTGGAAGAGGAGCTAGTTCAGAGTATTGGACTATTGGAACCAGATGATTCAGAAAATGGTCATAACGATACTGATCTTGAAGAAACAGATAATCAAATTCCTGAAGAGGAAGTCGTCGAAACAATTCCAGAGATTCCAGTAACGGACTTTTATTTTCCAGAAGATTTGACGGACTTTTATCCTAAGACTGCTAGAGATAAGGTTGAGACAAACATTGTGGCCATTCGTTTGGTAAAAAATCTAGAAGTAGAGCACCGCAATGCTTCACCAAGTGAACAAGAACTCCTTGCCAAGTATGTAGGCTGGGGTGGACTAGCCAATGAATTTTTTGATGACTATAATCCAAAATTTTCTAAGGAACGAGAAGAACTGAAGAGCCTAGTCACAGATAAAGAGTATTCGGATATGAAACAGTCCTCCCTGACAGCCTATTACACAGACCCATCCCTGATCCGTCAGATGTGGGATAAGTTGGAAAGAGATGGCTTTACAGGTGGCAAAATCCTAGATCCTTCCATGGGAACAGGGAATTTCTTTGCGGCTATGCCAAAACACTTAAGAGAAAAGAGTGAGTTGTATGGCGTAGAGTTAGATACTATTACAGGAGCTATTGCCAAACACCTTCATCCCAATAGTCATATTGAAATTAAGGGATTTGAGACGGTGGCTTTTAACGACAATAGTTTTGATTTGGTGATTTCAAATGTGCCCTTTGCCAATATACGAATTGCGGATAATAGGTACGATAGGCCTTACATGATTCATGACTACTTTGTCAAAAAGTCACTTGATTTGCTTCATGATGGTGGACAAGTAGCGATTATCTCTTCCACAGGAACTATGGATAAGCGAACAGAAAACATCTTACAAGATATTCGTGAGACAACTGAATTTCTTGGTGGGGTTCGACTGCCTGACTCTGCCTTTAAGGCCATTGCAGGAACGAGTGTCACAACGGATATGTTATTCTTCCAGAAACACTTAGACAAGGGATATGTGGCAGACGATTTAGCCTTTTCAGGTTCCATTCGCTATGACAAGGATAGTCGCATTTGGCTCAATCCTTATTTTGATGGAGAATACAATAGCCAGGTGCTAGGAACCTACGAGGTCAGGAATTTTAACGGAGGAACACTTTCTGTTAAGGGGACTAGTGATGACTTGATTGCAAGTGTTGAAACAGCTCTAAATCACGTTAAGGCCCCAAGAGAGATTGATAGAAATGAGGTCATCATTAACCCAGATGTGTTGACCAAACAAGTCAATGATACCTCCATTCCAGCTGAAATGAGGGAAAATCTAGGTCAGTACAGTTTTGGTTATCAGGGGTCTACAGTTTACTATCGAGATAACAAAGGCATTCGAGTCGGAACCAAGACGGAAGAAATCAGTTACTATGTCGATGAAGAGGGCAACTTCAAAGCATGGGACACCAAACATTCTCAAAAGCAGATTGATCGCTTTAATGCCTTAGAAGTGACTGATAACACTGCTCTGGATGTCTATGTGACCGATGATGCAGCCAAACGTGGTCAGTTTAAGGGGTATTATAAAAAGACAGTTTTCTATGAAGCTCCATTGTCTTATAAAGAAGTGGCACGTATCAAAGGAATGGTCGATATTCGCAATGCCTACCAAGAAGTTATTGCCATTCAACGCTATTATGACTATGATAAGGAGACCTTTAACCACTTGTTAGGCAAACTCAATCGTACCTATGATAGCTTTGTCAAACACTATGGGTATTTGAATAGTGCTGTGAACCGCAATCTTTTTGATAGTGATGATAAGTATTCGCTTCTTGCTAGTTTGGAAGATGAAAGTCTGGATCCAAGTGGAAAGTCTGTTATCTATACTAAATCCCTTGCCTTTGAGAAGGCTCTAGTGCGTCCTGAAAAAGAGGTTAAAAAGGTGCATACTGCCCTTGATGCCTTAAATTCGAGCTTGGCTGACGGACGAGGTGTGATTTCGCTATATGATGTCTATCTATCAGGTTGAATCGCAGATGACCTTGATTGAGGAGTTAGGCGACCTCATTATGCCTGATCCTGAGAAGTATTTGAATGGAGAATTGACCTATGTTTCTCGCCAAGACTTTCTTTCAGGGGATGTCGTCACTAAGTTAGAAGTGGTAGATCTATTCGTCAAACAAGACAATCAGGACTTTAACTGGTCACATTATGCGGGACTTCTAGAAGCTATCAAACCAGCCCGTATTACTTTGGCAGACATTGATTATCGAATCGGTTCACGCTGGATTCCTCTGGCTGTTTATGGAAAATTTGCCCAAGAAACCTTTATGGGGAAAGCCTATGAACTGTCAGACCAAGAAGTAGCGACAGTCCTAGAAGTCAGTCCCATTGACGGGGTTATCACTTACCAATCTAAGTTTGCCTACACCTATTCCAACGCAACGGATAGGAAGTTTAGGTGTCCCTGCTTCACGCTA

SEQ ID NO: 20638 - protein, 1355 aa, Streptococcus agalactiae
MNQEVLLQMMRATIPRDRALLEAFLYYQAEHFDEEWDSLIHQFMTNRQEINKSVQVLHFETDVSAFVQASPYDTAHDLLTYTQVFGQSGLQKLDKLSPSEKNLVIEVALFNLATRFQLLDSNGHYQTISPDSLLQKSRGANLVNVYRVANNLADRISRDIEQFLLTYEPELETRADETVLENEETVDEHKTSVHQAISFREEGSLVIASLDVDLSQLDVQIGKTSHLPAYEELSLRRKFEILTYFDQIRNERSKVPSFRRGDFDTEMEMTPVFDGEELLTYLEADGSPYELKRTLTTVEEKELEKIGQAIRIENQEKLTQLGIDLSQFDPDRVGILLDAAGRFRLKNADLALLGGYPKASVTQLALATELLQMGLSHEKVEFFFGSQLSIEELRQVAYAFLHQELSREDAEQFEKDKGNQPDLTLRDWKSKLEKAEGKEVVDEEFAENPLVQRVLDTYPLGSLVSYKGQDFEVMSVSDARLNGLIRIELVNDFSDIIEQNPVLYVRTWEEVSQALHQPKAEPQTELEEADQELNLFSFLEEELVQSIGLLEPDDSENGHNDTDLEETDNQIPEEEVVETIPEIPVTDFYFPEDLTDFYPKTARDKVETNIVAIRLVKNLEVEHRNASPSEQELLAKYVGWGGLANEFFDDYNPKFSKEREELKSLVTDKEYSDMKQSSLTAYYTDPSLIRQMWDKLERDGFTGGKILDPSMGTGNFFAAMPKHLREKSELYGVELDTITGAIAKHLHPNSHIEIKGFETVAFNDNSFDLVISNVPFANIRIADNRYDRPYMIHDYFVKKSLDLLHDGGQVAIISSTGTMDKRTENILQDIRETTEFLGGVRLPDSAFKAIAGTSVTTDMLFFQKHLDKGYVADDLAFSGSIRYDKDSRIWLNPYFDGEYNSQVLGTYEVRNFNGGTLSVKGTSDDLIASVETALNHVKAPREIDRNEVIINPDVLTKQVNDTSIPAEMRENLGQYSFGYQGSTVYYRDNKGIRVGTKTEEISYYVDEEGNFKAWDTKHSQKQIDRFNALEVTDNTALDVYVTDDAAKRGQFKGYYKKTVFYEAPLSYKEVARIKGMVDIRNAYQEVIAIQRYYDYDKETFNHLLGKLNRTYDSFVKHYGYLNSAVNRNLFDSDDKYSLLASLEDESLDPSGKSVIYTKSLAFEKALVRPEKEVKKVHTALDALNSSLADGRGVDFAYMMSIYQVESQMTLIEELGDLIMPDPEKYLNGELTYVSRQDFLSGDVVTKLEVVDLFVKQDNQDFNWSHYAGLLEAIKPARITLADIDYRIGSRWIPLAVYGKFAQETFMGKAYELSDQEVATVLEVSPIDGVITYQSKFAYTYSNATDRKFRCPCFTL

SEQ ID NO: 20639 - protein, 549 aa, Streptococcus agalactiae
ATGACTTGGAACTTTGACACCATGAAAGAGGCTTTGTCTGAAATGGAGAAGGTCGATTACCAAGAGTTTATCAAGGCTTTTCTCTCTTTGGAATTAAGTATTTCTAATAGAACAATCCTCAATCAGGTTTATCAAGATTATATGGATGAGGATGACCTATCCTTGATAAGTGATGAGCTACGAGTTAAAGTTGATAGTTATCAGGATGAAGTACAGGCAGATATGACTGACATTCTGGAAAAGCTGTACCGAACAGGTGAAGGCTCTAATTTTATTATGGATTTAATGTCCTCAAATAGTCTCTCAGAAACCTTGGAACAGTATGAGGTTTTGGATAGTGACGATTATTCACCACTTAGCCTTGAAACCTTACAGGCCATGATCCAACAGGACTTGGCTATTTCCAGTCAGGATTATTTTGGAGATTTGGTTCACCTTGCCTTGCAAAAAGATTTACTAGACCAGAAAAGTCATTTCTTACAACACTATGTGGCAATTGTAATGGAAGGTATTCCACAAGAAAGAGACCAACGAACCTTGGTCCTAGAT

SEQ ID NO: 20640 - protein, 183 aa, Streptococcus agalactiae; identical to SEQ ID NO: 2394

SEQ ID NO: 20641 - protein, 189 aa, Streptococcus agalactiae
ATGAATCCAAAAACTATTTATGAAAAGGATTCAGACCAGGATGGTCTGACAGATGCTCAGGAACTAGCTTTGGGAACCGATCCGCAGTCTGTTGACACAGATGGTGATGGTCAAGCTGATTTAGAGGAGCTACAATCTGGACATTCACCATTAGTCCCACAAAAGGAGTTGTACAATGACTTGGAACTT

SEQ ID NO: 20642 - protein, 63 aa, Streptococcus agalactiae; identical to SEQ ID NO: 2396

SEQ ID NO: 20643 - protein, 4893 aa, Streptococcus agalactiae
ATGACCAAAACATGTAATCATCACTTTCTTGTCAATCAGGAAAAAGGCGAGAAACACGTCTTTCGCAAGAGTAAAAAATATCGCACTCTATGTTCCGTTGCCCTTGGAACCATGGTGACGGCTGTTGTTGCTTGGGGAGGAACGGTTGCACATGCCGATGAAGTTACAACTTCAGTTGACACCACCATTCAACGAACGGAGAATCCAGCCACAAATTTACCAGAAGCACAACCAAACCCTGTATCTGAACAAACTGAAAGTATGGCATCAACTGGACAATCTAACGGTGCGATTGCTGTTACCGTACCACATGATACGGTAACACAAGCAGTTGAAGAAGCAAAGGCTGAAGGTGTTTCTACGGTTGAAGATAGTCCAATGGATTTAGGAAATACAAGATCTGCGGTAGAAACCAACCAACAAATTTCAAAAGCAGATGCAGATACCCAAAAACAGGTTGAGACTATTAATGAAGTCACTAAAACCTACAAAGCTGATAAAGCGACATACGAATCGAATAAAGCTCGCATCGAACAGGAAAATAAGGAGCTGTCACAGGCCTACGAGGGGGCCAACCAAACTGGTAAAGAGACAAATGCTTGGGTTGATACTAAAGTCAATGACCTAAAAACTCGGTATGCAGATGCTGATGTGACAGTAAAAGAACAAGTAGTTTCATCAGGAAATGGGACATCTGTCCTTGACTATACAAACTATGGCAAGGCTGTTGAAACCATTCAATCAACTAACGAACAAGCTGTAGCGGATTATCTAACAAAGAAAACAAAGGCAGATGATATTGTTGCGAAAAATCAGGCCATTCAAAAAGAAAATGAAGCTGGACTTGCTAATGCAAAGGCAGATAATGAAGCCATTGAAAGGCGTAATCAGGCTGGTCAAGCAGCTGTTGATGCTGAAAACCGTGCAGGTCAAGCCGCAGTAGATCAAGCTAATCAGGAGAAACAACAATTAGTTTCAGATCGTGCAGCCGAGATTGAAGCTATTACAAAACGTAATAAAGAAAAAGAAGCCGCAGCCAGAAAAGAGAATGAAGCGATTGATGCCTATAATACCAAAGAAATGGAACGCTATCAACGTGACTTGGCCGAGATTTCAAAAGGTGAAGAAGGTTATATTTCTGAAGCCCTTGCTCAAGCCCTCAATCTCAACAACGGTGAACCCCAAGCACAACATGGGGCCATTACCCGAAATCCTGATCAGATCATTTCAACTGGCGATGCTTTGCTGGGAGGCTACTCAAGAATATTGGATTCAACAGGATTCTTTGTCTATGACATGTTCAAAACAGGTGAGACTCTTAGTTTTAACTATCAAAATCTTCAACATGCACGATTTGATGGTAAAAAGATTAGTCGTGTGACTTACGATATTACCAACCTTGTATCACCAGCTGGAACCAATGCCGTGAAATTGGTTGTGCCAAATGATCCAACCGAGGGTTTTATTGCCTATCGAAATGACGGAAACGGTGACTGGCGAACAGACAAGATGGAGTTTCGTGTAGTTGCCAAGTATTACTTGGAAGACGGTTCACAAGTTACCTTCTCCAAAGAAAAGCCAGGAGTCTTCACACACTCTTCCCTCAATCATAATGACATTGGTTTAGAATATGTCAAAGATTCATCTGGGAAATTTGTGCCGATTAATGGTTCAACTGTTCAAGTGACTAATGAAGGTCTAGCACGTTCTTTGGGTTCCAACCGTGCAAGTGATTTGAATTTACCTGAGGAATGGGATACCACATCAAGTCGTTATGCTTATAAAGGAGCTATTGTCTCAACAGTTACATCAGGTAATACCTACACAGTAACCTTTGGCCAAGGCGATATGCCACAGAATGTTGGCTTGTCATACTGGTTCGCCTTAAATACCCTACCAGTGGCACGTACAGTAACACCATATAGTCCCAAACCTCATGTAACGGTGGAACTTGAACCCATTCCAGAACCTATTACGGTAACACCAGATATCTATACACCAAAAACATTTACACCAGAAAAGCCTGTAACTTTCACACCAAAGCCTTTGGATGAAGTAGTGCAGCCTAGTCTAACTTTGACCAAGGTAACCTTGCCTGTCAAACCTATTCCAAAAGAACTTCCAACGCCACCACAAGTACCAACTGTCCATTATCATGCGTACCGTTTGACGACAACTTCAGAGATTATGAAAGAAGTGGTCAATAGTGACCAAGCTAATCTTCATGAGAAAACTGTCGCAAAAGATTCAACGGTGATTTATCCCTTAACAGTTGATGCCTTATCGCCCAATCGTGCCCAAACGACTAGTCTCATTTTTGAGGACTACTTGCCTGCTGGTTACCTATTTGATAAGGAAACAACACAAAAAGAGAATGGAAACTATGTCCTTAGCTTTGATGAGACTAAGAATTTTGTGACCTTAACCGCAAAGGAAAACTTGTTGCAGGAGGTAAATAAAGATTTAACTCAGGTTTATCAATTGACCGCCCCAAAACTCTATGGTTCTGTTCAAAATGATGGGGCAACCTATTCCAATAGTTACAAACTCCTTTTGAACAAGGGTACAACCAATGCTTACACAGTCACTTCAAATGTTGTAACGGTTCGTACACCAGGTGATGGGGAGACAACCACGCTCATTACACCAGATAAAAACAATGAAAATGCGGATGGTGTCCTCATTAATGACACGGTCGTAGCCCTTGGTACAACCAACCACTATCGTTTGACTTGGGATTTGGACCAGTATAAGGGAGATCGTTCTGCTAAAGAGACAATTGCACGAGGCTTCTTCTTTGTGGACGATTACCCAGAGGAAGTGCTTGATGTGGTGGAAAATGGCACGGCTATCACAACCCTTGACGGTCAGAAGGTATCAGGAATTACAGTTAAAAACTATGCTTCCCTAAATGAAGCCCCTAAAGACCTTCAAGATAAATTGGCTCGTGCTAAGATTACACCGACAGGTGCCTTTCAAGTCTTTATGCCGGATGACAACCAAGCCTTTTATGACCAGTATGTTCAAACAGGAACTTCTTTAGCTCTTTTGACCAAAATGACGGTTAAAGATAGTCTCTATGGTCAGACAAAGACCTATACAAACAAGGCTTATCAAGTTGATTTCGGCAATGGCTATGAAACCAAGGAAGTGACCAACACCCTTGTTTCACCAGAACCCAAGAAACAAAACCTAAACAAGGATAAAGTGGATATCAACGGGAAGCCCATGCTAGTGGGAACTCAAAATCACTATACTCTTTCATGGGACTTGGACCAATACCGAGGGATTAAAGCAGACAACTCTCAGATTGCACAAGGTTTTTACTTTGTGGATGATTATCCAGAAGAAGCTTTATTGCCAGATGAAGCAGCTATTCAGTTTGTCACATCTGATGGCAAAACAGTTTCAGGAATCACGGTGAAGTCTTATTCTCAATTATTAGAAGCTCCTAAAACGCTACAAGCAGCCTTTTCCAAACAAAAAATTCAGCCTAAAGGAGCTTTTCAAGTTTTCATGCCTGAGGACCCACAAGCCTTTTTTGAATCTTATGTGACCAAGGGGGAGAATATTACCATTGTCACTCCAATGACGGTTTTGGAAACCATGCTTAATTCAGGGAAGTCTTATGAAAACGTGGCTTATCAGGTGGACTTTGGGCAAGCCTATGAAACCAATACGGTGACCAATTTTGTCCCTAAAGTAACTCCACATAAGTCTAATACCAATCAAGAAGGTATTTCAATTGATGGAAAGACTGTTCTTCCGAATACGGTCAATTATTACAAAATTGTCTTGGATTACAGTCAATACAAGGATATGGTCGTGACGGATGATGTTCTTGCCAAGGGATTTTACATGGTAGACGATTACCCAGAAGAAGCCCTTACCCTAAATCCTGATGGCATTCAAGTTTTGGATAAGGATGGCAATCGTGTATCTGGTATCTCTGTCAGCACCTACGCTAGTTTGTCAGAAGCTCCGAAAGTTGTTCAAGATGCCATGGCTAAACGTCAGTTTACACCTAAAGGAGCCATTCAAGTTCTTAGTAGCGATGATCCAAAAGTCTTTTATGATACCTATGTGAAGACTGGTCAAACCTTAGTTGTCACGCTTCCGATGACGGTAAAAAATGAGTTGACCAAAACAGGTGGTCAGTATGAAAATACAGCCTATCAAATTGATTTTGGCTTGGCCTATGTCACGGAAACAGTGGTTAATAATGTTCCAAAATTAGACCCACAAAAAGATGTGGTGATCGACTTGTCTCATAAAGATGCCAGCCTTGACGGGAAAGAAGTGGCCTTGCATCAAACCTTTAACTATCGCTTGGTTGGAGCGATGATTCCAAGCAATCGTGCGACTGATTTATTTGAATATGGTTTTGAAGATAACTATGATGAAAAGCATGATGAGTATAATGGTGTTTATCGCAGCTATCTGATGACGGATGTCATCCTCAAAGACGGTTCTGTCTTAAAAGAGGGGACAGAAGTCACGAAATACACCTTGCAACAGGTAGATACAGAAAATGGCCTCGTGTCAATTTCATTTGATAAATCCTTCTTAGAGACTGTCTCTGATGATTCAGCCTTTCAGGCAGATGTTTACCTTCAAATGAAACGGATTGCGGCTGGTCAGGTGGAGAATACCTATCTCCATACAGTGAATGGCTATGTCATTAGCTCAAATACAGTTGTAACACATACACCTCAACCTGAAGAACCAAGTCCAAATCAACCCACTCCACCTCAACCACCAATTGAGACTATTGAACCGCCTGTTCCAGCAAGTATTTTGCCAAATACAGGGGAACAGGAATCCCTTTTGGGCTTGATTGGAGCTGGTATTCTACTTGGTACGGCTTATGGACTGAAGAAAAAGGAGGAGAAG

SEQ ID NO: 20644 - protein, 1631 aa, Streptococcus agalactiae
MTKTCNHHFLVNQEKGEKHVFRKSKKYRTLCSVALGTMVTAVVAWGGTVAHADEVTTSVDTTIQRTENPATNLPEAQPNPVSEQTESMASTGQSNGAIAVTVPHDTVTQAVEEAKAEGVSTVEDSPMDLGNTRSAVETNQQISKADADTQKQVETINEVTKTYKADKATYESNKARIEQENKELSQAYEGANQTGKETNAWVDTKVNDLKTRYADADVTVKEQVVSSGNGTSVLDYTNYGKAVETIQSTNEQAVADYLTKKTKADDIVAKNQAIQKENEAGLANAKADNEAIERRNQAGQAAVDAENRAGQAAVDQANQEKQQLVSDRAAEIEAITKRNKEKEAAARKENEAIDAYNTKEMERYQRDLAEISKGEEGYISEALAQALNLNNGEPQAQHGAITRNPDQIISTGDALLGGYSRILDSTGFFVYDMFKTGETLSFNYQNLQHARFDGKKISRVTYDITNLVSPAGTNAVKLVVPNDPTEGFIAYRNDGNGDWRTDKMEFRVVAKYYLEDGSQVTFSKEKPGVFTHSSLNHNDIGLEYVKDSSGKFVPINGSTVQVTNEGLARSLGSNRASDLNLPEEWDTTSSRYAYKGAIVSTVTSGNTYTVTFGQGDMPQNVGLSYWFALNTLPVARTVTPYSPKPHVTVELEPIPEPITVTPDIYTPKTFTPEKPVTFTPKPLDEVVQPSLTLTKVTLPVKPIPKELPTPPQVPTVHYHAYRLTTTSEIMKEVVNSDQANLHEKTVAKDSTVIYPLTVDALSPNRAQTTSLIFEDYLPAGYLFDKETTQKENGNYVLSFDETKNFVTLTAKENLLQEVNKDLTQVYQLTAPKLYGSVQNDGATYSNSYKLLLNKGTTNAYTVTSNVVTVRTPGDGETTTLITPDKNNENADGVLINDTVVALGTTNHYRLTWDLDQYKGDRSAKETIARGFFFVDDYPEEVLDVVENGTAITTLDGQKVSGITVKNYASLNEAPKDLQDKLARAKITPTGAFQVFMPDDNQAFYDQYVQTGTSLALLTKMTVKDSLYGQTKTYTNKAYQVDFGNGYETKEVTNTLVSPEPKKQNLNKDKVDINGKPMLVGTQNHYTLSWDLDQYRGIKADNSQIAQGFYFVDDYPEEALLPDEAAIQFVTSDGKTVSGITVKSYSQLLEAPKTLQAAFSKQKIQPKGAFQVFMPEDPQAFFESYVTKGENITIVTPMTVLETMLNSGKSYENVAYQVDFGQAYETNTVTNFVPKVTPHKSNTNQEGISIDGKTVLPNTVNYYKIVLDYSQYKDMVVTDDVLAKGFYMVDDYPEEALTLNPDGIQVLDKDGNRVSGISVSTYASLSEAPKVVQDAMAKRQFTPKGAIQVLSSDDPKVFYDTYVKTGQTLVVTLPMTVKNELTKTGGQYENTAYQIDFGLAYVTETVVNNVPKLDPQKDVVIDLSHKDASLDGKEVALHQTFNYRLVGAMIPSNRATDLFEYGFEDNYDEKHDEYNGVYRSYLMTDVILKDGSVLKEGTEVTKYTLQQVDTENGLVSISFDKSFLETVSDDSAFQADVYLQMKRIAAGQVENTYLHTVNGYVISSNTVVTHTPQPEEPSPNQPTPPQPPIETIEPPVPASILPNTGEQESLLGLIGAGILLGTAYGLKKKEEK

SEQ ID NO: 20645 - protein, 588 aa, Streptococcus agalactiae
ATGTCAAAAAAAGAGATTCTACTCGATTTTATAGAAAAGAACAATGGCATTGTCACAAACAAAGATTGTAAAGCACTAGGTATTCCAACAATATATCTGACAAGACTAGAGAAAGAAGGCATTATCTTCCGAGTTGAAAAAGGTATTTTCCTAACCCAAAACGGAGACTATGATGAATACTACTTCTTTCAATATCGTTTTCCTAAGGCTATTTTCTCTTATATTTCGGCACTGTATCTACAACAGTTTACAGATGAAATTCCACAATATTTTGATGTGACAGTTCCTAGAGGCTACCGCTTTAATACTCCTCCAGCTAATCTAAACATTCACTTTGTCTCTAAAGAATACAGCGAGCTGGGAATGACTACTGTACGTACTCCTATGGGAAACAACGTAAGGGTATATGATTTTGAACGTATTATTTGTGATTTTGTAATACATCGAGAAAAGATTGATTCCGAACTCTTTGTCAAGACACTTCAATCTTATGGGAACTATCCTAAAAAAAATCTAGCAAAACTCTATGAATATGCGACAAAAATGAATACTTTAGAAAAAGTTAAACAAACTCTGGAGGTTCTAATA

SEQ ID NO: 20646 - protein, 196 aa, Streptococcus agalactiae
MSKKEILLDFIEKNNGIVTNKDCKALGIPTIYLTRLEKEGIIFRVEKGIFLTQNGDYDEYYFFQYRFPKAIFSYISALYLQQFTDEIPQYFDVTVPRGYRFNTPPANLNIHFVSKEYSELGMTTVRTPMGNNVRVYDFERIICDFVIHREKIDSELFVKTLQSYGNYPKKNLAKLYEYATKMNTLEKVKQTLEVLI

SEQ ID NO: 20647 - protein, 867 aa, Streptococcus agalactiae
ATGAACAAAGCTAAATTAACAGCACTCTGTCATAAAATATCAAAGAATACTGGTTTAACCTTTAATTCCGTGATGACCTATTACTTCCTAGAAGTCATTTTGAAAAAATTAAGTCAAAGTTCTTATTCAAATCACTATATCTTCAAAGGAGGATTCCTACTGTCGAATGTCATCGGAGTTGAATCTCGTAGCACTGTTGATATTGACTTTTTATTCCATCAAATAACACTCTCAGAAGAAACTGTTAAACAGCAACTCAAGGAAATTTTAGCAGATTCCGAAGAAGGTATATCTTTTGTGATTCAATCAATCACAACTATTAAAGAAAGTGATGACTATGGTGGCTATCGAGCAACAATTTCGTGCCAACTTGAGAATATTAAACAAGTTATCCATTTGGATATTGCGACAGGTGATGTTGTAACTCCTCAGCCGATAACATACGACTATAAAGCTATTTTTGATGAAGACAATTTTCCAATCATTGCTTATACAATTGAAACAATTCTAGCTGAAAAACTCCAAACCATCTATTCACGAAACTTCTTGAACAGCAGAAGCAAAGACTTTTACGATGTTTATATTCTTTCAAAATTGAAGAAAAAAGATATTGATTTCAATCAGTTAAAAAATGCTTGCCAAAGAACTTTTTCCTATCGCGAAACTGAGCTCGATTTCGAAAAAATTATTGAACTACTCGAGAGATTCAAATCTGATCCTACTCAGAATCAACAATGGCAAAATTATTCAAAAAAATATAGTTATACAAAAGGAATTTCACTTGCAAATGTGCTTGATGAGATGATTAGTCTTATTACATTATTATTTCTACTGACTCTGATTAAAACTTTTAACTGCCCCACTAGG

SEQ ID NO: 20648 - protein, 289 aa, Streptococcus agalactiae
MNKAKLTALCHKISKNTGLTFNSVMTYYFLEVILKKLSQSSYSNHYIFKGGFLLSNVIGVESRSTVDIDFLFHQITLSEETVKQQLKEILADSEEGISFVIQSITTIKESDDYGGYRATISCQLENIKQVIHLDIATGDVVTPQPITYDYKAIFDEDNFPIIAYTIETILAEKLQTIYSRNFLNSRSKDFYDVYILSKLKKKDIDFNQLKNACQRTFSYRETELDFEKIIELLERFKSDPTQNQQWQNYSKKYSYTKGISLANVLDEMISLITLLFLLTLIKTFNCPTR

SEQ ID NO: 20649 - protein, 2799 aa, Streptococcus agalactiae
ATGAAAGAGGATAAAAAGCTAGTCAAACAGGCTAGGCAAAACTTTCGAAGCAACTTAAAATCAGCTCGTATGCATTATCGGAAAGAAGTTAGGACCTTAAAACAGACTGTTCCTAAAAAAGGAAGATTTCGAAAATCAGCCAAAAATTCTCTGTTTCAGGAAAAGAAAACAGAGTTAAAAGGAAATCTACTCAGTAGCCAAAAGGAAGCAGAAGAGAAGTTCATAAAGGAAATTACCTATGTTTCTCCTAGACTGTTGAAGGCAAAGGAAATCAAGAACTATCGACTTCCGCAAGCTCAAGAACGTTTGCGGACGGCAAGAAAACATCTGTCAGAAGTGAAACTAAGTGAGAAACAGCAGGTAGTTAATCCCAAGTTTACTTTCCAAAAAGAAAATCCTTCCCTGAAGTCTCGCTTTCAGTTTCACCAAGAAAAATCATTTGATCGGCTAAGTGCAGAAAAAGACGTAAGTTCTGCCAAGCGTGAGGTTAAACAACTCAAGAAAGTCCAAAAGACTAAGAAAAACTCTACCAAAGTCAAAGCTGGATTAGGCTTGGCTGCATCTGAATCCCTTGACCTGATAGCACAGGAGGATGATTTAGATGGTCTAAGAACCATGAAGGATACTAGTTTGAAAGCCAGACGCTATGGCAGGTTTACTTATCAAGCAGGTAAGGTGGCAGTAAAAAGTGGACAGACTGGTGTGCGGTTTACCAAAACAAAATTTTCTCATGGAAAGGAACGATTCCAGAACTTCAAAAAGGGAAAAGGATTCACACGCCAGAAACCTCTTAAACCAAGAAGACGCTACCAAACCTTTTTAAATCATGTCAGAAAACAAAGTGTCGCAGGTTTTAAAGGAATCGTCCAAGCCATTAAGGGAAGTATGACTTTCTTTTCTGTCCTTGCGGGAAATCCTTTGACTTGGATTGTCTCAGGCATTCTCTTGATACTCCTTTTGATGATGAGCTTTTTCATGAGTGTTTCAGGTAGTAGTGTCATACAACAAGATGAAATAGAATTGAGTAAGAGTTATACCCACATGACGTGGGAAGATGCGGAACATACAAGAACCAACGATAAGGGAATTACCTTTTACACTAAGATTGATGAGGTCATGGTTTACATGAATCATCAATACCAAGACTACAAGTTAGATGATTTCATAGAGACAAGCGGAACAACCTACAAAGAATTTCTCAGTCAACTGTGGTCGGACTTAAACGGTGGAGATTCTATTAAATCCATGTCTGACTTATATAAAGAACCTGCTTACAAGCTGTCTGATGAGGACCAAGAAGAACTAAACGAATTGACCGAAGAAGGCAACTATTTAGCCCTTCAAGAATTGGACAATCCCTTTCAGGGACAGACCGATGAGGATAGTTTAAGCATGACCTACCGATATGGTTATGAGGTCATTGATGAGAAACCAACGCTTCATCATCATATCATCTTAGAAGCAAAAGAAGGTCAAGTCATTGTAGCTCCGATGGATGGCAAGGTATCTCTTGATGGAGAGAACGTTGTTTTGACATCTGGTAAGGGAGTGAATAAGACTAAACTAACCTTGTTTGGCATTCATTCAGGCCGAGTGAGTGAAAATCAACAAGTCTTGGCAGGAGATATTATTGGTCAGACCAAAGACGGAACGGGTCTAAAAGTCACCTATCAAAAGGTTGATGATGACACGGATAAGTTGGTCTATGTCAATCCAGCATTCTACTTTCCAAAAGTGATTCAGGTTCAGACCACCATTCTTCCAACTATCGGTCAGTTTGGCGGCGATGAGTTCGAGAGAGCCAAGGCAATTTATGACTATCTTAAAAGCAAAGGTGCGACCAATCAAGCTATCGCAGCCATTCTAGGTAACTGGTCGGTAGAATCCTCCATTAATCCAAAACGAGCTGAAGGCGACTATTTATCTCCACCTGTTGGTGCGACAGATAGTTCGTGGGATGATGAGGGCTGGCTCACACTTAATGGTCCAACTATATACAATGGACGTTACCCAAATATTCTCAAACGTGGTTTAGGCTTAGGCCAATGGACAGATACCGCGGATGGTTCACGCAGACATACTTTATTGTTGGAATATGCCAAAGGAAAACATCAAAAATGGTATGACTTAGGCTTACAACTGGATTTCATGTTGTATGGGGATAGTCCTTATTACACCAACTGGTTAAAGGACTTCTTCAAAAATTCAGGCAGTCCAGCTAGTCTTGCCCAGCTCTTTCTCATTTACTGGGAAGGAAATAGTGGTGATAAGCTACTTGAACGTCAAACACGAGCCAGTGAGTGGTATTACCAAATTGAAAAAGGCTTTAGTCAACCTAACGGTGGGACAGCACAAAGCGATCCAAAAGCACTTGAAGCTGTACGAGAAGACCTTTTTGAAAACTCTATTCCAGGAGGTGGTGACGGTATGGGTTACGCTTACGGCCAATGTACTTGGGGAGTCGCAGCCCGTATCAATCAACTGGGTCTAAAACTCAAAGGTAAAAACGGTGAGAAGATTCCAATTATCAGTACCATGGGCAATGGCCAAGATTGGGTACGAACAGCCGCAAGTCTCGGTGGAGAGACAGGGACAAGTCCACAAGAAGGAGCTATCCTTTCCTTTGCGGGAGGAGGACATGGCACCCCAACAGAATACGGACATGTGGCTTTTGTGGAGAAAGTCTACCCAGACGGTTCATTCCTTATCTCAGAAACCAACTACAATGGCAATCCAAACTATACCTTCCGTAAATTATCTGGAGTGGATAGTAGCTTGAGTTTTGCTTATACGACGAAA

SEQ ID NO: 20650 - protein, 933 aa, Streptococcus agalactiae; identical to SEQ ID NO: 2404

SEQ ID NO: 20651 - protein, 2328 aa, Streptococcus agalactiae
ATGAAATCAAAGACCTCTTCTAATGACAAAAAGCAAAAGACGAAAACACAGAAACAGGAAATCAGCCCTTCTACCGTAAATACGTTAGCCTATCAAGGACTTTTTCAGAATGGCCTTATGCAGGTCAGTCCAAGCTATTTCTCACAAACCTATCTCTTAGGAGATGTTAATTACCAAACAGTTGGCTTAGATGATAAGGGAGCTATCGTGGAGAAATATTCCGATTTAATCAATTCACTGGATGATAAGACCAATTTCCAACTGACTATTTTCAATCAAAAAGTTAATTTGGAAAAATTTCGTAAGAGTATTCTCTATCCCTTGCAGGAAGATGGGTTTGATACTTATCGTGATGAATTGAATCGCATGATGGATGCCAACTTAGAGGCGGGTGAGAACAACTTTTCAGCTGTCAAGTTTCTTTCATTTGGCAAGAGCGACCAAACACCAAAACTAGCTTTTCGTTCTCTGTCACAGATTGGGGAATATTTCAAGAGTGGCTTTTCAGAGATTGATGTATCTCTTGGTTTACTTGGTGGAGAGGAGCGAGTGAATGTCCTTGCGGATATGTTACGAGGTGAAAATCATTTACCGTTTTCTTATAAGGATTTGACTCTCTCAGGTCAATCCACCAAACACTTTATTGCCCCAACCTACCTTTCCTTTAAACACAAGAATCATATTGAATTGGACGATCGATTATTACAGATTGTTTATGTTCGCGACTATGGCATGGAGTTAGGGGATAAATTTATTCGAGACCTCATGCAGTCAGATTTGGAAGTGATGATTAGCCTACATGCCAAAGGCTCTACTAAGTCTGAAACCATGACCAAGCTACGAACCAAGAAGACCTTGATGGAATCACAAAAGATTGGTGAACAACAAAAAATGGCTCGGACTGGAATCTATTTGGAGAAGGTCGGCCATGTTCTTGAGAACAACATCGATGAAGCTGAAGCTCTTCTTCAAACCATGACCCAAACAGGAGATAAACTGTTTGACACCGTATTTCTAATTGGCGTGCTAGCGGATACTGAAGACCAACTCAAACAATCTCTTGATATTATCAAGCAAGTGGCAGGGTCTAATGATATGATTATTGATAACTTGACCTATATGCAAGAAGCTGCCTTTAATAGTCTCTTGCCATTTGGGAAGAACTATCTCGAAGGTGTTTCTCGGTCTCTATTGACTTCAAATATTGCCGTGAATGCACCTTGGACTTCCGTAGATATTCATGACAAGGGTGGGAAATTTTATGGCATCAATCAAATCTCAAGTAATATCATCAGTATTGACCGTGGCAAGTTAAATACTCCATCAGGTTTGATTTTAGGGACTTCTGGAGCTGGCAAAGGGATGGCGACAAAACACGAAATCATCTCAACTAAGCTCAAGGAAGCAGATAGTGATACTGAAATTATTATTGTTGACCCAGAAAATGAGTACAGTATTATCGGTCAAGCCTTTGGTGGGGAGAGTATTGATATTGCCCCAGACTCTACCACCTTCTTAAATGTCTTAGAACTATCTGATGAGAATATGGATGAGGACCCAGTTAAGGTCAAATCCGAATTTCTCTTGTCTTGGATTGGAAAGCTCTTGGACCGCAAAATGGATGGTCGTGAAAAATCCTTGATAGATCGTGTGACACGCTTGACATATAAGCATTTTGACACACCGTCCTTGGTCGAATGGGTCTTTGTCTTATCTCAACAACCTGAACAGGAAGCTAAGGACTTGGCACTGGATATGGAACTCTATGTGGAAGGGTCGCTGGACATATTTTCACATCGGACCAATATTAAAACAGACAGTCATTTCCTGATTTACAATGTCAAAAAGCTAGGCGATGAGTTAAAACAAATTGCCCTCATGGTTATCTTTGACCAAATTTGGAATCGGGTGGTCAAAAACCAAAAGCTAGGGAAGAAGACCTGGATTTACTTTGATGAAATGCAGCTACTCTTATTGGACAAGTATGCCTCTGATTTCTTTTTCAAACTTTGGAGTCGTGTCCGTAAGTATGGGGCGATACCGACAGGTATTACTCAGAATGTAGAAACGCTTCTTTTGGATGCCAATGGCAGACGCATTATTGCCAATAGCGAGTTCATGATTCTTTTAAAACAGGCTAAGAGCGATCGCGAAGAATTGGTGCATATGCTTGGGCTTTCTAAAGAGCTGGAGAAGTACTTGGTCAATCCTGAAAAAGGGGCAGGCTTAATTAAGGCCGGTTCCACCGTTGTTCCGTTCAAGAATAAGATTCCGCAACACACCAAGCTCTTTGACATCATGAGTACGGACCCTGAAAAAATGAGGACA

SEQ ID NO: 20652 - protein, 776 aa, Streptococcus agalactiae; identical to SEQ ID NO: 2406

SEQ ID NO: 20653 - protein, 453 aa, Streptococcus agalactiae
TTGGCAGTCAACGAACCGCCCGAAGTATTTTGGGGATGTAGGAGGAAGGGAGTCACTATCTCGCCTCCTCTTTTTATAGCTTATTTAGATTGGAGAACATTTATGAACACACGTGTCTTTAAGGACATCTCAAAGGTTCAACACAGGGCATGGCTGGGATTTACAACTAGACAGGTTATTTTTGTATTTCCAGCTGTCGCCCTAACCATTTTGGTTTTGGGCTTGAACCTATTTTATTGGCAATTTGGGGATTGGTTTGTCTATGGTTTTGTTTTTAGCTTTACCATTCCACTCATGTTATTTGGGGTCTATCGCCCCAACGATTTACCATTTGAAATATACCTCAAGTACCGTTTTCATTATGAACTAACGGTGCCAGACCGCACATTTACTGGAAGAAAAGGAGACCAACGTGAAAAAATTAAAACACTCAATGAAATCAAAGACCTCTTC

SEQ ID NO: 20654 - protein, 151 aa, Streptococcus agalactiae
MAVNEPPEVFWGCRRKGVTISPPLFIAYLDWRTFMNTRVFKDISKVQHRAWLGFTTRQVIFVFPAVALTILVLGLNLFYWQFGDWFVYGFVFSFTIPLMLFGVYRPNDLPFEIYLKYRFHYELTVPDRTFTGRKGDQREKIKTLNEIKDLF

SEQ ID NO: 20655 - protein, 852 aa, Streptococcus agalactiae
ATGATGATGAATTTTACGTCACCTTTTGTATTTCTAGCCTCTGAAAAAGTGTCAAGCGATAGCCTTTTTGAAGGGTTTCAGGTCGATTTAGAATCAACTGCTAACTTGGTTAAGTCACTGGCGGACTTTAATCCGACGGTTTGGTCTTACATGACAGCCATTACCAAGGGTATTATGCAGCCCTTGGGAGTAGCTATTCTTGCGGTAGTTCTTGTACTCGAATTTTCAAAAATGGCCAAGAAAATCGCAAACTCAGGCGGTGCAATGACCTTTGAAGCCATAGCACCTATGATTGTCAGCTACATCATGGTCGCGGTCGTGATTACCAATACGACGGTTATTGTGGAAGCCATTATTGCCATTGCCTCATATGTTATTGAACAAGTGGCAAGTCTTGTCACGAATGGTGGTGCTAATTATGATACCATCTCAGGCATTAAGGGATCTGGAATTGTAGGAAAAATGATTATTGGCTTTTTTGCGATTCTCATTTGGTTGGTACGAATGGCCAGTATTATGGTTGTCAATATCTTGATTACCATTCGCTTTATCCAACTCTATCTGATGATTCCTTTTGCCCCTGTTACCATTCCGACCTTCCTTAGTGATGACTGGAGAAGTGTTGGGATTGGTTACCTTAAAAACATCATGGTCTATGCCGTTCAAGGTATTTTGATTTTTCTAATTGTATCTCTTGTTCCCTTGTTTGAATCGGCTGGAAAGATTGCCGTATCAAATGGAGCTGGAGTGATGGAATCACTCGCCATTATGTTTGGTGGCTTGGTACAGGCCATATTGTTAATCATTGCCTTGGTTGGCAGTCAACGAACCGCCCGAAGTATTTTGGGGATG

SEQ ID NO: 20656 - protein, 284 aa, Streptococcus agalactiae; identical to SEQ ID NO: 2408

SEQ ID NO: 20657 - protein, 240 aa, Streptococcus agalactiae
ATGAATCAAAAACTAACAGGCTTTGTTTACGGAGTGGACGCCAGCTCCATGTTCTCCCAGGCCATGTCTCTATTACAAAAAGGCTTGATTGCAGTAGGAGCCTTTCTTGTAGTCATGGGCATTATCAACCTTTCAACCAACATTAAAGATGGTGGGCCAGGCGTCCGAAATGCCATTTTAGAAATTGTTGGTGGTGTCATGGTGGGAGCCGCAGGTGCTTTTGTGACACAGATTACCATT

SEQ ID NO: 20658 - protein, 80 aa, Streptococcus agalactiae; identical to SEQ ID NO: 2410

SEQ ID NO: 20659 - protein, 1815 aa, Streptococcus agalactiae
ATGTATTCCAGGCAAAAAGCATTTGTCTTTGGACTCTTGGGTCTCGCCTTTGGCTATTTCTGCCATCGTCTAACCCTACTCTATGATAGTTTAACTAATGCCCCACCTATGGAACGTATTGCCTACCTCTTAGGAGAGGGGTTAAATCAGGTTTTCAATCCTTTATGGCTATTTTCCTTTACTCAAAAATCTTTTCTTGCCTTTATCCTTGGGGTTCTAATGATGACGCTAGTCTATCTTTATGTATCGACAGGACAGAAAGTCTATCGGGAAGGGGAAGAATATGGTTCTGCACGATTTGGAACCAATAAGGAAAAGCGGAACTTTTACAGTAAGAATCCTTTCAATGACACGATTTTGGCTCGTGATGTTCGTCTAACCTTGTTGGAAAAGAAGAAACCCCAGTTTGACCGAAATAAAAATTTGATTGTCATTGGGGGTTCTGGGGCAGGTAAGACCTTTCGCTTTGTGAAACCCAACCTTATCCAACTTAACTGTTCCAATATTGTCGTAGATCCGAAAGACCATTTGGCTGAGAAGACAGGTAAACTCTTTTTAGAAAACGGTTATCAGGTTAAGGTTTTAGACTTGGTTAATATGACCAATTCAGACGGTTTTAATCCCTTTCGTTATGTAGAAACAGAGAATGATTTGAACCGTATGTTAACGGTCTATTTTAATAATACCAAAGGAAATGGTTCTCGCAGTGATCCGTTTTGGGATGAGGCTTCCATGACATTGGTGAGAGCTATTGCCTCTTACTTGGTGGATTTTTACAATCCTCCAGGAAGTTCTAAGCAAGAGCAGGAAGCAAGACGTAAGCGTGGCCGTTATCCAGCCTTTTCTGAGATTGGGAAACTCATCAAACTCTTATCAAAGGGAGACAATCAGGACAAAAGTATACTTGAAGTCCTGTTTGAAGACTATGCTAAGAAATATGGTCATGAGAACTTTACCATGAGAAACTGGGCAGATTTTCAAAACTATAAGGATAAGACCTTGGATTCGGTGATTGCGGTCACAACAGCTAAATTTGCCCTCTTTAATATTCAATCGGTGATTGATTTGACGCAAAGAGACACTATGGATTTGAAAACGTGGGGCACTCAAAAGACCATGGTCTATCTTGTTATTCCAGACAATGATACGACCTTTCGTTTCCTATCTGCTTTATTTTTCTCTACGGTTTTCTCCACTTTGACCAGACAGGCTGATGTTGACTTTAAAGGGCAACTGCCTATTCATGTTAGAAGCTATCTGGATGAGTTTGCGAATGTCGGAGAAATCCCAGACTTCGCTGAACAAACCTCAACAGTCCGCTCTAGGAATATGAGTCTTGTGCCTATTCTCCAAAATATCGCTCAACTCCAAGGACTTTATAAGGAAAAAGAAGCTTGGAAAACTATACTGGGGAACTGTGACAGTCTCCTCTATTTGGGTGGGAATGACGAGGAAACTTTCAAATTCATGAGTGGACTTTTAGGCAAACAAACCGTTGATGTCAGAAGCACCAGTCGTTCTTTTGGGCAGACGGGTTCAAGTTCTACCTCTCATCAGAAAATTGCTCGTGACTTGATGACGGCTGATGAAGTTGGAACTATGAAACGAGATGAGTGCCTCGTACGCATTGCAGGGGTTCCTGTTTTTCGAACCAAGAAATATTTTCCTCTCAAACATAAACATTGGAAGTTGCTCGCTGATAAGGAAACCGATGACCGTTGGTGGAACTATCACATCAATCCCTTGGCTAAAGAGGAAGAATTGGACTTGTCAGACTATCAAATAAGGGATTTAAGCACAGAAACGTCACTACAT

SEQ ID NO: 20660 - protein, 605 aa, Streptococcus agalactiae
MYSRQKAFVFGLLGLAFGYFCHRLTLLYDSLTNAPPMERIAYLLGEGLNQVFNPLWLFSFTQKSFLAFILGVLMMTLVYLYVSTGQKVYREGEEYGSARFGTNKEKRNFYSKNPFNDTILARDVRLTLLEKKKPQFDRNKNLIVIGGSGAGKTFRFVKPNLIQLNCSNIVVDPKDHLAEKTGKLFLENGYQVKVLDLVNMTNSDGFNPFRYVETENDLNRMLTVYFNNTKGNGSRSDPFWDEASMTLVRAIASYLVDFYNPPGSSKQEQEARRKRGRYPAFSEIGKLIKLLSKGDNQDKSILEVLFEDYAKKYGHENFTMRNWADFQNYKDKTLDSVIAVTTAKFALFNIQSVIDLTQRDTMDLKTWGTQKTMVYLVIPDNDTTFRFLSALFFSTVFSTLTRQADVDFKGQLPIHVRSYLDEFANVGEIPDFAEQTSTVRSRNMSLVPILQNIAQLQGLYKEKEAWKTILGNCDSLLYLGGNDEETFKFMSGLLGKQTVDVRSTSRSFGQTGSSSTSHQKIARDLMTADEVGTMKRDECLVRIAGVPVFRTKKYFPLKHKHWKLLADKETDDRWWNYHINPLAKEEELDLSDYQIRDLSTETSLH

SEQ ID NO: 20661 - protein, 486 aa, Streptococcus agalactiae
ATGTCATCTGAACAACAAGAACGTCAAGCGATGCAATACGTAGAAAGAAGTAGTTTATTGACAGTCAGAACCCTCTTAAAACTCTTAGAATGGTCGGCTAGGCAAGCCTTAGCTCAAGATTCAGCTTATAAGATTGGGGTTCAAAAAATGGAAGAACTCCTTCAAAGTCCTTACGCCATTGAAGCGATTGATGTTAGTAAAGACATACTGGATAAGCCAATCGATGTGGAGAAATTTAAGGAGTTGATGGAGTCAGAAAAACTGCCAATCGCAATTAGTTGGCAAAAAGACTATCTCTACTTTTATGCCAAGGATAAGACCTTGCTCGATCATCACTTGGATGAATTGTTGAAGAAACTGATGTCTAATCCAGAGAAGCTAGAAGGTTTAACCTTTGATAAAACCTTGGACCAAGAGATAGAACTGGCCAAAGAGAAAATTAGAGTGACAGAACTTTCGGCAGTAAAAACCAAGGAGGTGACCTTG

SEQ ID NO: 20662 - protein, 162 aa, Streptococcus agalactiae; identical to SEQ ID NO: 2414

SEQ ID NO: 20663 - protein, 582 aa, Streptococcus agalactiae
ATGATAAGGATAGTGTTGTTTTATCTAGCCATACAGCTTAACGGTCTTCTGGTGAGTTTATTCCTGAAAGAGTATCTGACAATAGAGGGTATAGTCTTGCTACAATTGGTCCTATTAAGTGTGACTTGCTTAGAGATTGCCCGTCATAAAACTGTTCCATTAAAAATTGTGGGCGTACAAAATCGCCTAAGTTGGTTGCTGCTTGGCTTTGTGGCTATGGTTGCTTTTGCAGTCTTCATCAGTTTCCTATTTCCAGTTCAGACTAGGAATCAAGCAGTATTGGTACAAGTAGGAAAACAGGTTCCTCCTATTATCTTTTTATTGTTTCTGGTCAATGCAAGTATTCTTGAAGAGATTGTTTACAGGCAATTGCTGTGGGAAAAATTGACATTCCCTTTTGAACAAATAGGCGTGACCAGTTTTCTCTTTGTTCTATCCCATGGACCTAATCAGTTAGGGAGTTGGCTCATCTATAGCTGTCTTGGCTTGACCTTGGCTGTTGTTCGATTGAAAACTGATTGTATGACGGCAATCGCCTTACATTTACTTTGGAATAGTTTGGCTTATGTCGTAACTTTCTTG

SEQ ID NO: 20664 - protein, 194 aa, Streptococcus agalactiae; identical to SEQ ID NO: 2416

SEQ ID NO: 20665 - protein, 231 aa, Streptococcus agalactiae
ATGAATGAACGATTTTGGGACAATTTAGAAATCATTCTGGCTGAAAAAGACCTCACTTGGGCAGAACTAGCTCGCAAAGTATTCAACGGTCAATATGTTTATCCAAGTGAATTTAATCGCCTCTATCAAAAATTACGGCATTACAAATCTAATCGTCTGATGCCACAAATAAGATGGGTTGAGCGTATTGTTCTAGTCTTAGATATTGATTATGAAGATTTATTTAAGAGG

SEQ ID NO: 20666 - protein, 77 aa, Streptococcus agalactiae; identical to SEQ ID NO: 2418

SEQ ID NO: 20667 - protein, 426 aa, Streptococcus agalactiae
ATGAACTTACTACATAAGAAAAGTATCCTAGATTGTACTGAATTAGAAGAACGTATTCACCAAGCTGAAACCAATCAGCTATTACAAAAGATACTGTCGCTCCCCAATTTTGATTGTGACTTTGAGGTAACTTTTGAAGATGATTACCACAAAGAGATGAATGATCCCCTATTCTACGAATCCAATCTTCATCAGATTTCGGATTTTATGGAAACTAGGGATATTAAAAATGGTGTAGATACACTATTGACGAAAGACAATCACCTGGCCTTTCGTGCCTTTGGTGAAAATTATTCTGCTAGGGGAAAGGAGGGCATTTTAACGACTCTAGTGACGGTCAAGTGCTTTGGTGAAGGACGGATGCCCATTGATATGAGTCGCTATTTCTCAACTCCTGAACCAACAGTTGAAAATAGCCTAACCCTA

SEQ ID NO: 20668 - protein, 142 aa, Streptococcus agalactiae
MNLLHKKSILDCTELEERIHQAETNQLLQKILSLPNFDCDFEVTFEDDYHKEMNDPLFYESNLHQISDFMETRDIKNGVDTLLTKDNHLAFRAFGENYSARGKEGILTTLVTVKCFGEGRMPIDMSRYFSTPEPTVENSLTL

SEQ ID NO: 20669 - protein, 1353 aa, Streptococcus agalactiae
ATGAAATTTTTAGATTTATTTGCTGGGATAGGCGGTTTTAGGCTAGGGATGGAATCACAGGGTCATAAATGCCTGGGCTTTTGTGAAATTGATAAATTCGCTAGAACATCTTATAAAGCCATGTTTAACACAGAAGGGGAAATAGAATACCATGACATTAAAGAGGTCACAGACCATGACTTTAGACAATTTAGAGGGCAAGTGGACATCATCTGCGGGGGATTTCCTTGCCAAGCATTTTCACTCGCAGGCAGACGATTGGGATTTGAAGATACTCGAGGGACTCTCTTTTTTGAGATTGCTCGAGCGGCCAAACAAATCCAACCACGTTTTCTATTTTTGGAAAACGTCAAAGGCCTACTCAATCACGACGAGGGACGGACGTTCGCCACAATCCTCTCCACGCTGGATGAATTGGGGTATGATGTCGAATGGCAGGTGCTTAACAGCAAGGACTTCCAAGTCCCGCAAAACAGAGAACGGGTCTTTATTATCGGACATTCTAGAAGATACCGTTCCAGATTCATATTTCCTCTCAGAAGAGAAGACAGCCCAGCTCATCTTGAAAGGCTAGGAAATATCAATCCCTCTAAACATGGTTTGAATGGTGAAGTCTATCTGACGAGTGGACTTGCTCCTACACTAACAAGAGGTAAAGGAGAGGGTGCAAAAATCGCCATTCCAGTCTTAACACCAGATAGACTAGAAAAACGCCAACATGGTCGTCGATTTAAGGACAATCAAGACCCTATGTTTACTTTGACCAGTCAAGACAAACACGGAGTTGTTGTCGCAGGAAATCTGCCGACTAGCTTTGACCAGACCGGTAGAGTATTTGACATTTCTGGCTTGTCACCGACCTTGACCACCATGCAAGGTGGAGACAAGGTGCCAAAGATTTTGCTGAGGGAGGAGCTGCCATTTCTGAAAATCAAGGAAGCCACTAAAACAGGGTACGCAAAGGCAACTCTTGGAGACTCTGTCAATCTGGCTTATCCAGACTCAACCAAACGTAGGGGACGTGTGGGAAAGGGAATATCCAATACTCTGACGACTTCAGACAATATGGGAGTAGTAGTTGCTGCTCTGGAATATCGACAGGATAAGTGGTATGAAGTCACAGGCATTGTCTTAGAGGGGAAACTTTATCGCCTGAGAATAAGACGACTGACACCAAGAGAGTGCTTCAGACTTCAAGGCTTTCCTGATTGGGCTTATGAAAGAGCAGAGAGTGTTTCTAGTAAGAGCCAACTATACAAACAGGCCGGCAATAGCGTGACTGTCACAGTTATTGAAGCCATTGCCAGAGAATTTAGAAGAACGGAAGAGGAAGAAAAACATGAACTTACTACA

SEQ ID NO: 20670 - protein, 451 aa, Streptococcus agalactiae; identical to SEQ ID NO: 2420

SEQ ID NO: 20671 - protein, 93 aa, Streptococcus agalactiae
ATGATTTGGTGGATACTAGGTGGAATCTATCTGATTTCTATCATCATTTTGATTGTTGAAATCATCCGTGCACCAGAAATGGATGATCATATA

SEQ ID NO: 20672 - protein, 31 aa, Streptococcus agalactiae; identical to SEQ ID NO: 2422

SEQ ID NO: 20673 - protein, 276 aa, Streptococcus agalactiae
ATGAGAAAAAGAAGAAAACTTACTTCAAAAGTCGATGGCGTGACCAAGTACGATCGAGACTATATTGGGGGTTTGGTTCATGACCAGTTAAGACAGACAGGTCTATCTCAGTCTGCTAGTGACTATGCCATGATTTATTTTAGTGACCGGTATCAGTATGCATTGGAACAAATGCGATTTGCTCGGTCAGCCGAAGTAATAGCTGAATACGTATTTAATGGTGTGCTGTCGGAGTGGACCAAGCAACTGAGACGACAAGAAGTAAAAGGAGGTGAA

SEQ ID NO: 20674 - protein, 92 aa, Streptococcus agalactiae
MRKRRKLTSKVDGVTKYDRDYIGGLVHDQLRQTGLSQSASDYAMIYFSDRYQYALEQMRFARSAEVIAEYVFNGVLSEWTKQLRRQEVKGGE

SEQ ID NO: 20675 - protein, 279 aa, Streptococcus agalactiae
ATGAATCAAGAAGTCTTACTACAAATGATGAGAGCCACTATTCCTCGTGATAGAGCCTTGCTTGAGGCATTTTTATATTACCAAGCAGAGCATTTTGATGAGGAGTGGGATAGTCTTATTCATCAGTTTATGACCAATAGGCAAGAAATAAATAAGTCTGTTCAAGTACTTCACTTTGAGACAGATGTTTCAGCTTTTGTCCAGGCTAGTCCTTATGATACTGCTCATGATCTATTGACCTATACCACAAGTTTTCGGCCAAAGGTGGTCTTCAAAAAC

SEQ ID NO: 20676 - protein, 93 aa, Streptococcus agalactiae
MNQEVLLQMMRATIPRDRALLEAFLYYQAEHFDEEWDSLIHQFMTNRQEINKSVQVLHFETDVSAFVQASPYDTAHDLLTYTTSFRPKVVFKN

SEQ ID NO: 20677 - protein, 167 aa, Streptococcus agalactiae
ATGCAAAAGGAAGAACAGTCATCACGTCATATCGTGAAGAGCCATATCATGACCATCATGGGAGTTGATAATCTAAAAGCAACTCAACTGGTAAATGAAATGGAACAAACAGTTTAATCCGATTTGATGAATTCGGGAATTTTGGATTTAGTCTTGGAGGGACATCA

SEQ ID NO: 20678 - protein, 57 aa, Streptococcus agalactiae
  VARIANT 56: Xaa = Any Amino Acid
MQKEEQSSRHIVKSHIMTIMGVDNLKATQLVNEMEQTGLIRFDEFGNFGLLVLEGXS

SEQ ID NO: 20679 - protein, 363 aa, Streptococcus agalactiae
ATGGCATTAAACATTGAAAATATTATTGCTGAAATTAAAGAAGCTACAATTCTTGAACTTAACGATCTTGTAAAAGCTATCGAAGAAGAATTTGGTGTAACTGCTGCTGCTCCTGTAGCTGCTGCCGCTGCTAGTGGTGAAGCTGCTGCTGCTAAAGACTCATTTGACGTTGAATTAACAGCTGCTGGAGACAAAAAAGTTGGCGTTATCAAAGTTGTTCGTGAAATCACAGGCGAAGGTCTTAAAGAAGCTAAAGCTATTGTTGACAACGCACCATCAGTTATTAAAGAAGGTGCTTCAGAAGCAGAAGCTAACGAAATCAAAGAAAAACTTGAAGCTGCAGGTGCTTCAGTTACTCTTAAA

SEQ ID NO: 20680 - protein, 121 aa, Streptococcus agalactiae; identical to SEQ ID NO: 6982

SEQ ID NO: 20681 - protein, 537 aa, Streptococcus agalactiae
TTGTGCCTATCCCAAAAAATAAAAACGGAGGTAAAACTAATGAGTGAAGCAATTATTGCAAAAAAAGCTGAACAAGTTGAACTTATTGCTGAGAAAATGAAAGCAGCAGCAAGTATCGTTGTTGTTGATTCACGTGGTCTTACTGTTGAGCAAGATACTAATTTACGTCGTTCACTTCGTGAAAGCGATGTTGAGTTTAAAGTTATCAAAAACTCAATTTTAATTCGTGCAGCTGAAAAAGCAGGTCTTGAAGACCTTAAAGAACTTTTTGTTGGTCCATCAGCAGTTGCGTTTTCTAACGAAGATGTTATTGCACCAGCTAAAGTTATTAGCGATTTCGCTAAAGATGCAGAAGCTCTTGAAATCAAAGGTGGTTCAGTAGACGGTAAATTCACTTCAGTTGAAGAAATTAACGCTCTTGCTAAATTACCAAACAAAGAAGGTATGCTTTCAATGCTCCTTTCAGTACTTCAAGCGCCAGTACGCAACGTTGCATATGCTGTCAAAGCAGTTGCAGAAAAAGACGAAGAAGTGGCA

SEQ ID NO: 20682 - protein, 179 aa, Streptococcus agalactiae
MCLSQKIKTEVKLMSEAIIAKKAEQVELIAEKMKAAASIVVVDSRGLTVEQDTNLRRSLRESDVEFKVIKNSILIRAAEKAGLEDLKELFVGPSAVAFSNEDVIAPAKVISDFAKDAEALEIKGGSVDGKFTSVEEINALAKLPNKEGMLSMLLSVLQAPVRNVAYAVKAVAEKDEEVA

SEQ ID NO: 20683 - protein, 2106 aa, Streptococcus agalactiae
ATGGCAAATAATAATTTTTATAATCGTGACCCTTTTGGAAATATGGATGATATTTTTAATTCTCTAATGGGAAATATGGGGGGCTATAATAGTGAGAATAAACGATACTTAATCAATGGACGGGAAGTTACTCCTGAAGAATTCAGTCAATATCGTCAAACTGGAAAACTCCCCGGTCAAGAGCTAAATAACCAAAATACTCCTACAAACCAAGTCTCTGCAGATAGTGTTTTGACTAAATTAGGAACTAATTTAACCGATCAAGCACGTCAGCATTTGCTAGATCCAGTTATTGGACGAAACAAAGAAATTCAGGAAACTGCAGAAATTCTAGCTCGTCGTACTAAAAATAATCCTGTTCTAGTTGGTGATGCAGGTGTTGGTAAAACAGCTGTTATTGAAGGTTTGGCACAAGCAATTATAAATGGTGATGTCCCTGCTGCTATCAAAAATAAAGAAATCATTTCGATAGATATCTCTAGCCTTGAAGCTGGCACCCAATATAGGGGTAGTTTTGAAGAAAATATTCAAAATATCATAAAAGAAGTTAAGGAAACAGGAAATATTATTCTCTTCTTTGATGAAATACACCAAATATTAGGAGCCGGTTCAACTGGTGGTGATAGTGGCTCTAAGGGGCTCGCAGATATACTTAAGCCTGCACTTTCACGTGGTGAATTAACGGTTATAGGTGCAACTACTCAAGATGAATATCGTAACACCATTCTCAAGAATGCTGCCTTAGCACGCCGCTTTAACGAAGTTAAAGTCAATGCACCTTCTGCACAAGATACTTTCAATATCCTTATGGGGATAAGAAACCTCTATGAGCAACATCATAATGTTGTTTTACCTGACTCTGTTTTGAAAGCAGCTGTAGATTTATCTATTCAATACATACCACAAAGAAGTCTCCCTGATAAAGCAATTGACCTTATTGATATGACTGCTGCACACCTAGCTGCGCAACATCCCGTAACTGACCTTAAATCCTTAGAAAAAGAAATCGCTGCGCAAAGAGACAAGCAAGAAAAAGCTGTCAATACTGAAGATTTTGAAGAAGCTCTTAAGGTCAAGACACGCATTGAAGAGTTACAAAACCAGATTGATAATCATACCGAAGGACAAAAAGTCACTGCAACTATCAATGATATCGCTATGTCAATTGAGCGTCTAACTGGAGTTCCTGTATCAAATATGGGTGCTAGTGATATTGAACGCTTAAAAGAACTTGGCAATCGTCTAAAAGGTAAAGTCATTGGTCAAAATGATGCTGTTGAGGCAGTTGCAAGAGCTATTCGCCGAAATCGTGCTGGTTTCGATGATGGTAATCGTCCGATTGGTAGCTTTCTATTTGTTGGACCAACTGGAGTTGGTAAAACTGAGCTAGCAAAGCAATTAGCTTTTGATATGTTCGGATCAAAGGATGCTATCGTTAGACTTGATATGTCTGAATATAATGATCGTACTGCAGTTTCTAAGCTAATTGGAGCGACTGCTGGTTACGTTGGTTATGACGACAATAGTAATACACTAACAGAACGTATCCGTCGAAATCCTTATTCTATTGTTCTTCTTGATGAAATCGAAAAAGCTGACCCGCAAGTTATCACGCTTCTCCTTCAAGTTCTAGATGATGGTCGTTTAACTGATGGTCAAGGAAACACTATTAACTTTAAAAATACTGTTATCATTGCAACCTCAAATGCAGGTTTTGGAAACGAAGCATTTACAGGTGACAGCGATAAAGACTTGAAAATTATGGAACGAATTTCTCCATATTTCCGTCCAGAATTTCTAAATCGTTTCAATGGTGTTATTGAATTCTCTCACCTAAGCAAAGATGACTTAAACGAAATTGTAGATTTGATGCTTGATGAAGTTAACCAAACAATTGGCAAAAAAGGAATTGACCTTGTGGTAGATGAAAATGTTAAATCACACTTAATTGACCTGGGTTATGACGAAGCAATGGGAGTACGTCCATTGCGCCGTGTCATCGAGCAAGAAATTCGAGATCGCATCACAGACTACTATCTCGATCATACAGATGTTAAACACCTAAAAGCTAATTTGCAAGATGGCCAAATCGTCATTTCTGAAAGA

SEQ ID NO: 20684 - protein, 702 aa, Streptococcus agalactiae
MANNNFYNRDPFGNMDDIFNSLMGNMGGYNSENKRYLINGREVTPEEFSQYRQTGKLPGQELNNQNTPTNQVSADSVLTKLGTNLTDQARQHLLDPVIGRNKEIQETAEILARRTKNNPVLVGDAGVGKTAVIEGLAQAIINGDVPAAIKNKEIISIDISSLEAGTQYRGSFEENIQNIIKEVKETGNIILFFDEIHQILGAGSTGGDSGSKGLADILKPALSRGELTVIGATTQDEYRNTILKNAALARRFNEVKVNAPSAQDTFNILMGIRNLYEQHHNVVLPDSVLKAAVDLSIQYIPQRSLPDKAIDLIDMTAAHLAAQHPVTDLKSLEKEIAAQRDKQEKAVNTEDFEEALKVKTRIEELQNQIDNHTEGQKVTATINDIAMSIERLTGVPVSNMGASDIERLKELGNRLKGKVIGQNDAVEAVARAIRRNRAGFDDGNRPIGSFLFVGPTGVGKTELAKQLAFDMFGSKDAIVRLDMSEYNDRTAVSKLIGATAGYVGYDDNSNTLTERIRRNPYSIVLLDEIEKADPQVITLLLQVLDDGRLTDGQGNTINFKNTVIIATSNAGFGNEAFTGDSDKDLKIMERISPYFRPEFLNRFNGVIEFSHLSKDDLNEIVDLMLDEVNQTIGKKGIDLVVDENVKSHLIDLGYDEAMGVRPLRRVIEQEIRDRITDYYLDHTDVKHLKANLQDGQIVISER

SEQ ID NO: 20685 - protein, 1053 aa, Streptococcus agalactiae; identical to SEQ ID NO: 6995

SEQ ID NO: 20686 - protein, 351 aa, Streptococcus agalactiae; identical to SEQ ID NO: 6996

SEQ ID NO: 20687 - protein, 1374 aa, Streptococcus agalactiae; identical to SEQ ID NO: 6997

SEQ ID NO: 20688 - protein, 458 aa, Streptococcus agalactiae; identical to SEQ ID NO: 6998

SEQ ID NO: 20689 - protein, 648 aa, Streptococcus agalactiae; identical to SEQ ID NO: 6999

SEQ ID NO: 20690 - protein, 216 aa, Streptococcus agalactiae; identical to SEQ ID NO: 7000

SEQ ID NO: 20691 - protein, 321 aa, Streptococcus agalactiae; identical to SEQ ID NO: 7001

SEQ ID NO: 20692 - protein, 107 aa, Streptococcus agalactiae; identical to SEQ ID NO: 7002

SEQ ID NO: 20693 - protein, 162 aa, Streptococcus agalactiae; identical to SEQ ID NO: 7003

SEQ ID NO: 20694 - protein, 54 aa, Streptococcus agalactiae; identical to SEQ ID NO: 7004

SEQ ID NO: 20695 - protein, 90 aa, Streptococcus agalactiae
GTGCATAAAACCTCCAAAGGTATTGATATTATAGGTTCACTTGATTATACTATATGGTATCAAATGTTACAAATCTTGGAGGTCATCTTA

SEQ ID NO: 20696 - protein, 30 aa, Streptococcus agalactiae
MHKTSKGIDIIGSLDYTIWYQMLQILEVIL

SEQ ID NO: 20697 - protein, 627 aa, Streptococcus agalactiae; identical to SEQ ID NO: 7005

SEQ ID NO: 20698 - protein, 209 aa, Streptococcus agalactiae; identical to SEQ ID NO: 7006

SEQ ID NO: 20699 - protein, 593 aa, Streptococcus agalactiae
ATGGCAGAAGAATTTTTAAATACTCATAATGCGTCTATTTTATTGAGTGCAGCTAACAAGTCACATTATCCTCAGGATGATCTCCCAGAAGTTGCTCTCGCTGGTCGTTCAAATGTTGGTAAATCAAGCTTTATCAACACGCTTCTTGGTCGTAAAACCTAGCGCGTACGTCGAGTAAGCCAGGTAAGACACAACTACTCAACTTTTATAACATTGATGACAAACTGCGTTTTGTCGATGTCCCTGGATATGGCTACGCTAAGGTGTCTAAAACTGAGCGTGCTAAGTGGGGCAAGATGATTGAAGAGTACCTTGTAACACGTGATAACCTTCGTGTTGTTGTTAGTTTAGTTGATTTTCGTCATGATCCAAGTGCGGACGATATTCAAATGTATGAATTTCTTAAGTACTATGAAATTCCAGTAATTATTGTAGCGACAAAGGCAGATAAAATACCTCGTGGCAAGTGGAATAAACATGAGTCGTCTATTAAGAAGAAATTAAACTTTGATAAAAAGGACCATTTCATCGTCTTTTCATCTGTTGACCGCACAGGTCTTGATGAATCATGGGATACTATTTTATCTGAGTTA

SEQ ID NO: 20700 - protein, 198 aa, Streptococcus agalactiae; identical to SEQ ID NO: 2448

SEQ ID NO: 20701 - protein, 1224 aa, Streptococcus agalactiae; identical to SEQ ID NO: 7009

SEQ ID NO: 20702 - protein, 408 aa, Streptococcus agalactiae; identical to SEQ ID NO: 7010

SEQ ID NO: 20703 - protein, 168 aa, Streptococcus agalactiae; identical to SEQ ID NO: 7011

SEQ ID NO: 20704 - protein, 56 aa, Streptococcus agalactiae; identical to SEQ ID NO: 7012

SEQ ID NO: 20705 - protein, 492 aa, Streptococcus agalactiae; identical to SEQ ID NO: 7013

SEQ ID NO: 20706 - protein, 164 aa, Streptococcus agalactiae; identical to SEQ ID NO: 2452

SEQ ID NO: 20707 - protein, 398 aa, Streptococcus agalactiae
ATGACAAAAGCCGATTTATTATTTAAAGACAATATCACGAAAATTATGTCTGAAGGTGTATTTAGCGAGCAAGCCAGACCTAGATATAAAAATGGGGAAATGGCTAATTCTAAGTATATTACAGGTGCCTTTGCAGAGTATGATTTATCAAAGGGTGAATTTCCTATTACAACTCTACGTCCAATTCCAATAAAATCTGCTATTAAAGAAATTTTCTGGATTTATCAAGATCAGACAAATGATTTAGTAGTTTTGAATGATAAATATGGTGTGACATACTGGAATGATTGGGAAGTTGGCCATACTGGCACGATAGGTCAGCGCTACGGTGCAGTTGTTAAAAAACATAATATTATATCAAAACTCTTAAAACAGCTTGAAGATAACCTGAATCGTCG

SEQ ID NO: 20708 - protein, 134 aa, Streptococcus agalactiae
  VARIANT 131: Xaa = Any Amino Acid
MTKADLLFKDNITKIMSEGVFSEQARPRYKNGEMANSKYITGAFAEYDLSKGEFPITTLRPIPIKSAIKEIFWIYQDQTNDLVVLNDKYGVTYWNDWEVGHTGTIGQRYGAVVKKHNIISKLLKQLEDNPXESS

SEQ ID NO: 20709 - protein, 1275 aa, Streptococcus agalactiae; identical to SEQ ID NO: 7017

SEQ ID NO: 20710 - protein, 425 aa, Streptococcus agalactiae; identical to SEQ ID NO: 7018

SEQ ID NO: 20711 - protein, 593 aa, Streptococcus agalactiae
ATGACAAAAATTTCCTGGACAGGATTTTCAAAAAAATCCCCTGAAGAACGTATTCATTACCTTGAAGAACAAGATTTTTTAGCTGATTCTTCCCTAGAAATAGTGACGAATCAGGACTTACTCTCTTTATCACTAGCCAATCAAATGGCTGAAAATGTCATCGGTCGAATAGCCTTACCATTTTCACTTGTCCCAGATGTTTTGGTTAACGGTAAAGTCTATCAAGTCCCATATGTCACTGAAGAACCGTCAGTTGTTGCTGCTGCAAGTTTTGCTGCTAAAATATAAAACGATCTGGTGGTTTTCTGACAACTGTCCATAATCGTAAAATGATGGACAGTAGCCATTTATGATGTACAGATAGTCAACACACTAAAGAATCTATATTAAATCAAAAACAGCAATTATTAGAAATAGCCAACGCTGCTCATCCATCAATAGTCAAGCGTGGAGGCGGTGCTTGCGACCTAACTATTGAGATTAAAGAAGACTTTTTGATTGTTTACCTTATGGTTGATACAAAAGAAGCCATGGGTGCTAATATGGTTAACACCATGATGGAAGCATTATCTTCGCCATTAGANNNNNTTAAT

SEQ ID NO: 20712 - protein, 199 aa, Streptococcus agalactiae
  VARIANT 112, 121, 196, 197, 198: Xaa = Any Amino Acid
MTKISWTGFSKKSPEERIHYLEEQDFLADSSLEIVTNQDLLSLSLANQMAENVIGRIALPFSLVPDVLVNGKVYQVPYVTEEPSVVAAASFAAKIIKRSGGFLTTVHNRKMXGQVAIYDVXDSQHTKESILNQKQQLLEIANAAHPSIVKRGGGACDLTIEIKEDFLIVYLMVDTKEAMGANMVNTMMEALSSPLXXXN

SEQ ID NO: 20713 - protein, 669 aa, Streptococcus agalactiae
ATGTCAATTTTATCTAACTATGCTACCGAATCTTTAGTGACTGCTACATGCCGAGTTGATTTAAGATTTCTAAGTCGCCAAAAAGAGGAGGCCATCAAGTTAGCTCAAAAAATGACGATGGCAAGTCAATTAGCTCAAGTAGACCCTTATCGTGCTAGCACACATAATAAAGGTATTTTTAATGGCATTGATGCTATCGTCTTAGCTACTGGAAATGATTGGCGAGCTATTGAAGCTGGAGCGCATACCTATGCTGTCAAAGATGGACAATATCGAGGATTATCTAAATGGTCTTATAAGGTTGATGATAATTTTCTAGAAGGTACTCTGACGCTACCGATGCCTGTTGCAACAAAAGGTGGATCCATCGGTATTAACCCTAGTGTCCAACTAGCTCACGATCTACTAGGTCGTCCTAATGCTAAAGAGTTGGCAAGTATTGTTCTTTCGATTGGACTAGCTCAAAATTTTGCGGCTCTTAAGGCATTGGTTAGCACAGGAATTCAAGCTGGTCACATGAAACTTCAAGCAAAGTCGTTGGCACTACTTGCTGGAGCTAAAGAAGAACAAATTTCAGAAGTCGTTAAACAGCTTCTAGACTCTAAACACATGAATCTAGAGACAGCACAGAAAATTGTCAATAAACTTACTAAAAGTAAAAAAAGAATT

SEQ ID NO: 20714 - protein, 223 aa, Streptococcus agalactiae
MSILSNYATESLVTATCRVDLRFLSRQKEEAIKLAQKMTMASQLAQVDPYRASTHNKGIFNGIDAIVLATGNDWRAIEAGAHTYAVKDGQYRGLSKWSYKVDDNFLEGTLTLPMPVATKGGSIGINPSVQLAHDLLGRPNAKELASIVLSIGLAQNFAALKALVSTGIQAGHMKLQAKSLALLAGAKEEQISEVVKQLLDSKHMNLETAQKIVNKLTKSKKRI

SEQ ID NO: 20715 - protein, 447 aa, Streptococcus agalactiae; identical to SEQ ID NO: 7021

SEQ ID NO: 20716 - protein, 149 aa, Streptococcus agalactiae; identical to SEQ ID NO: 7022

SEQ ID NO: 20717 - protein, 561 aa, Streptococcus agalactiae; identical to SEQ ID NO: 7023

SEQ ID NO: 20718 - protein, 187 aa, Streptococcus agalactiae; identical to SEQ ID NO: 7024

SEQ ID NO: 20719 - protein, 912 aa, Streptococcus agalactiae; identical to SEQ ID NO: 7025

SEQ ID NO: 20720 - protein, 304 aa, Streptococcus agalactiae; identical to SEQ ID NO: 7026

SEQ ID NO: 20721 - protein, 852 aa, Streptococcus agalactiae
ATGACAACATTTACTGCTAAATTTATTGACCAAGAGTGGGAAGTCCCAGTAGAATCAGGTCGCTACCATATGATTGTTGGGGAATTTTGTCCTTATGCACAACGTCCGCAGATTGCACGCCAACTGCTTGGTTTGGATAAACATATTTCTATCAGTTTTGTGGATGATGTTCCAAGTGATATAGGACTTATTTTTAGCCAACCAGAACAGGTTACTGGTGCTAAGTCGCTTCGTGATATTTATCATTTGACTGACCCGACCTACAAAGGTCCTTATACTATCCCAATTTTAATTGACAAGACTGATAATCGTATTGTCTGTAAGGAATCTGCAGATATGCTTCGACTTTTTACTACAGATTTCTCTGATTTGCATCAAGAGGATGCTCCTGTCCTTTTCAGCCAAGAAACTGCTTCACTTATTGATAATGATATTAAAGACATTAATAATAACTTCCAAAGCTTAATGTATAAGTTAGCTTTTCTTGATAAACAAACAGATTATGATACTTATAGTAAGGAATTCTTCACTTTTCTAGATCAAAAAGAACACTTACTAGGACAACGTCCTTTCTTGCTCGGAGATAATCTAAGTGAGGTTGATATTCATTTCTTTACATCATTAGTCCGCTGGGATATTGCTGGGCGTGATCTTCTACTACTTAATCAGAAAGCGCTAGAAGACTACCCAAATATTTTTTCTTGGGCTAAAACTTTATACAATGACTTTAATTTAAAAACATTAACCAATCCACAATCCATAAAAAATAACTATTACTTAGGCAAATTTGGAAGAGCTGTTCGTCATCATACCATCGTACCAACAGGTCCAAATATGGTAAAATGGGAAAAA

SEQ ID NO: 20722 - protein, 284 aa, Streptococcus agalactiae
MTTFTAKFIDQEWEVPVESGRYHMIVGEFCPYAQRPQIARQLLGLDKHISISFVDDVPSDIGLIFSQPEQVTGAKSLRDIYHLTDPTYKGPYTIPILIDKTDNRIVCKESADMLRLFTTDFSDLHQEDAPVLFSQETASLIDNDIKDINNNFQSLMYKLAFLDKQTDYDTYSKEFFTFLDQKEHLLGQRPFLLGDNLSEVDIHFFTSLVRWDIAGRDLLLLNQKALEDYPNIFSWAKTLYNDFNLKTLTNPQSIKNNYYLGKFGRAVRHHTIVPTGPNMVKWEK

SEQ ID NO: 20723 - protein, 216 aa, Streptococcus agalactiae; identical to SEQ ID NO: 7029

SEQ ID NO: 20724 - protein, 72 aa, Streptococcus agalactiae; identical to SEQ ID NO: 7030

SEQ ID NO: 20725 - protein, 993 aa, Streptococcus agalactiae; identical to SEQ ID NO: 7031

SEQ ID NO: 20726 - protein, 331 aa, Streptococcus agalactiae; identical to SEQ ID NO: 7032

SEQ ID NO: 20727 - protein, 990 aa, Streptococcus agalactiae; identical to SEQ ID NO: 7033

SEQ ID NO: 20728 - protein, 330 aa, Streptococcus agalactiae; identical to SEQ ID NO: 7034

SEQ ID NO: 20729 - protein, 942 aa, Streptococcus agalactiae; identical to SEQ ID NO: 7035

SEQ ID NO: 20730 - protein, 314 aa, Streptococcus agalactiae; identical to SEQ ID NO: 7036

SEQ ID NO: 20731 - protein, 876 aa, Streptococcus agalactiae; identical to SEQ ID NO: 7037

SEQ ID NO: 20732 - protein, 292 aa, Streptococcus agalactiae; identical to SEQ ID NO: 7038

SEQ ID NO: 20733 - protein, 1101 aa, Streptococcus agalactiae
GTGTTAACTATCCTTGCAGACAACAATGGACGTATACCGAATAAACTTGAATTTAGTAAAGAATTAGGTGATGACCTATCAACGGACGCTATTTTCCAATTCCGTTATTTCAGTGCGCGAACAGATGCAAAAGGTAACGTGACTAGTTTTGATTCTAGAAATATCTTTGAAGTAAGCGATAGGCAAATAAAAAATTATGCCAAGCGTATCGTATCACAAAATAGTGATTCAGGTCATATTACCTATAATTTTAGTACTTATTCTTATCTACTAAAAAAGGTTGGTAAAAATGATTATTTAGTGGTATTTTTAGATACAACCAACCAATATCTTGATAATCAAAGATTATTGCAACTTTCAATATGGATGTCCTTGGCAAGTTTTATCGTCTTCATGGTAATTGTTTCAGTTTTATCAGGGAGAGTTATCTTACCATTTGTTGCTAACTATGAAAAGCAAAGGCGTTTTATTACCAATGCAGGACATGAACTAAAAACTCCACTTGCTATCATCTCCGCTAATAATGAATTGGTGGAAATGATGAGTGGTGAATCAGAGTGGACTAAATCTACAAATGATCAAATCCAACGTTTAACGGGTCTAATTAATGGCATGGTCAGTCTTGCCCGCTTTGAAGAACAGCCTGATATAAGTATGGTTGACTTAGACTTTTCACATATTACAAAAGATGCTGCAGAAGATTTTAAAGGTCCAATCATTAAAGATGGTAAAGATTTTATAATGAGTATCCAACCAGGTATTCATGTCAAAGCTGAAGAAAAATCATTATTTGAATTGGTTACATTATTGGTTGATAATGCTAATAAGTATTGTGATCCGATGGGGACTGTGACAGTTAAGTTATCACGTTCAAGTCGTTTGAGACGAGCTAAGCTTGAAGTTTCAAATACTTATAAGAATGGTAAAGACATAGACTATAGCAAGTTTTTTGAACGATTTTATCGAGAGGATGAGTCACATAATAACAAAAAATCGGGATATGGTATTGGTCTTTCTATCGTAACTAGTTTGGTGCATCTATTTAAAGGAAGTATCGATGTGAATTATAAACATGATACCATTACCTTTGTCATTTACATT

SEQ ID NO: 20734 - protein, 367 aa, Streptococcus agalactiae
MLTILADNNGRIPNKLEFSKELGDDLSTDAIFQFRYFSARTDAKGNVTSFDSRNIFEVSDRQIKNYAKRIVSQNSDSGHITYNFSTYSYLLKKVGKNDYLVVFLDTTNQYLDNQRLLQLSIWMSLASFIVFMVIVSVLSGRVILPFVANYEKQRRFITNAGHELKTPLAIISANNELVEMMSGESEWTKSTNDQIQRLTGLINGMVSLARFEEQPDISMVDLDFSHITKDAAEDFKGPIIKDGKDFIMSIQPGIHVKAEEKSLFELVTLLVDNANKYCDPMGTVTVKLSRSSRLRRAKLEVSNTYKNGKDIDYSKFFERFYREDESHNNKKSGYGIGLSIVTSLVHLFKGSIDVNYKHDTITFVIYI

SEQ ID NO: 20735 - protein, 682 aa, Streptococcus agalactiae
ATGAGAGTATTAATTGCAGAAGATGAAGAACAGATGTCACGTGTCCTTAGTACGGCAATTAGTCACCAAGGTTATGTTGTTGATGTCGCCTACGATGGTCAGACTGCTATTGATTTAGCTAATCAAAATGCATATGATGTCATGGTTATGGATGTCATGATGCCTGTTAAAACAGGTGTTGAGGCTGTCAAAGAAATTAGACAATCAGGAAATAAATCTCACATTATTATGCTAACAGCCATGGCAGAAATTGATGATAGAGTAACAGGTCTAGATGCTGGTGCAGATGATTATTTAACAAAACCCTTCTCTCTAAAAGAATTATTAGCAAGGCTTCGCTCTATGTCCCGAAGATTGGAAGATTTCACACCTAATGTATTGTCATTGGGAAGAGTAACCTTATCAGTCGGTGAACAAGAGTTGCAATGTGAAAACACTATTCGTCTAGCGGGTAAAGAAGCTAAAATGTTAGCATTTTTCATGTTGAACCATGATAAAGAATTATCTACACAACAACTTTTCGAACATGTCTGGGGAGCAGATAAGGACCAAGAAGATGTAGATGAGGGATACGCTTTATCTATGTTTCTTATTTGAGACAAAAATTGCAGGCAATTAGTGCTAACTTGGAGATTATTGGTCAAGAAGGTAGTAGCTATAAATTAAGTGAAATAATGGTGGC

SEQ ID NO: 20736 - protein, 228 aa, Streptococcus agalactiae
  VARIANT 192: Xaa = Any Amino Acid
MRVLIAEDEEQMSRVLSTAISHQGYVVDVAYDGQTAIDLANQNAYDVMVMDVMMPVKTGVEAVKEIRQSGNKSHIIMLTAMAEIDDRVTGLDAGADDYLTKPFSLKELLARLRSMSRRLEDFTPNVLSLGRVTLSVGEQELQCENTIRLAGKEAKMLAFFMLNHDKELSTQQLFEHVWGADKDQEDVDEGYXFIYVSYLRQKLQAISANLEIIGQEGSSYKLSEIBGG

SEQ ID NO: 20737 - protein, 624 aa, Streptococcus agalactiae; identical to SEQ ID NO: 11301

SEQ ID NO: 20738 - protein, 208 aa, Streptococcus agalactiae; identical to SEQ ID NO: 8662

SEQ ID NO: 20739 - protein, 1752 aa, Streptococcus agalactiae
ATGAAAACTAAATCACAAAAAACGTCTTTTTTCTCTAATTTGTCTCCGTACCTCAAAGGTTACAAACTTCTTTTTGCGTTAGCAATTGTGTTAGCAACTTTATCAAGCTTGACAACAGTTATAGGACCAGACCGTCTTAAAGAGATGACGGATCTTATGGTAAAAGGCTTGGCTGGTAATATTGACTTAGCCAAAATCGGTCATATTGCAGGGCAATTGGCAGTATTATATGTTTTAGGTGCATTAGTATCCTATCTAGCAAGTTTTATTGTAACGACTATTATTCAAAAATTTGCTCAAGGCATGCGCAATGCTATTGCTGATAAAATCAATAAAATACCTTTGAGTTATTTTGATAGCCATACTCAAGGTGATACTTTATCTCGTGTTACAAATGATGTGGATTTGATGACACAGTCTTTTAACCAAAGTTTAGTTACTATGGTTGCATCTACAGTATTATTGATTGGTTCATTAATTATGATGTTCAAAACAGATTGGCATTTAGCAACAACGGCGATTATATCGGTATTTTCAGGATTCGCTCTTTCTTCAATCATTATGGTGAAGAGTCAGCCTTTATTTAAAAAGCAACAGATGAATTTGGCTAATATATCTGGATATGTAGAAGAAATTTACTCAGGACATAACATTGTTACTAGTCATAACGCAAGACAGCAGGCTAAGTCAGATTTTCAACTATTAAATGATAAACTTCACAGTTCCATGTGGAAATCACAATTTTTCTCTGGAATTATGATGCCTCTGATGCAGTTTATTGGTAATTTTGGTTATGTGATGGTGTGTGTGGTTGGTGCCATGTTAGCTATCAAAGGAACAATTACTATGGGTACAATTGTTGCTTTTATGACCTATGTTCGTATTTTTACACAGCCTATTGGTCAGATTGCTCAAGGAATTACACAATTACAGTCTGCTAGTGCAGCCATGGGACGTGTTTTTGAATTTTTAAATGAAACAAATATGCAAGAGGATAAGCACAAAGTGTTAAATCTTCCTAAGTTTAAGGGGTATGTGTCCTTTGAACATGTCAAGTTTGGTTATAGTGATAACAAGACTATTATTCATGACTTTACTTCGGAGGCACAGCCTGGTCAGAAAGTTGCTATTGTAGGACCAACTGGCGCAGGTAAAACGACAATTGTTAATTTATTGATGCGTTTTTATGATGTTAATTCAGGTAGTATTTCCATAGATGACATCAATATCCAAGACATGAAACGTAGTCAAGTTCATGATGCTTTCTCGATGGTTCTTCAAGATATATGGTTGTTTGAGGGAACTATTAAAGAAAATTTGATTTTTAATCAGACGACAATCAGTGACGATGAGGTTCAAGAAGCTGCTAAGGCAGTCGGTGTACATCATTTTATAATGACACTACCTAAAGGGTATGATACTGTCCTTGATGACGCTGTGACATTGTCAGTTGGACAAAAGCAATTATTAACCATTGCTCGAGCTCTTTTGAAAAATTCTCCCTTACTTATCTTAGATGAAGCAACTTCATCTGTTGATACACGTACAGAAGAGTTAATTCAAAAAGCTATGGACAAACTTATGGAAGGAAGAACATCATTTGTTATCGCACATCGTTTATCAACGATTAAAAACGCAGATTTGATTTTGGTCATGAAAGATGGGAATATCATTGAGCAAGGCAGTCATGATGTTTTGATGTCTCAAAGTGGTTTTTATGCTGATCTGTATAATTCTCAATTCGAATCAGCT

SEQ ID NO: 20740 - protein, 584 aa, Streptococcus agalactiae
MKTKSQKTSFFSNLSPYLKGYKLLFALAIVLATLSSLTTVIGPDRLKEMTDLMVKGLAGNIDLAKIGHIAGQLAVLYVLGALVSYLASFIVTTIIQKFAQGMRNAIADKINKIPLSYFDSHTQGDTLSRVTNDVDLMTQSFNQSLVTMVASTVLLIGSLIMMFKTDWHLATTAIISVFSGFALSSIIMVKSQPLFKKQQMNLANISGYVEEIYSGHNIVTSHNARQQAKSDFQLLNDKLHSSMWKSQFFSGIMMPLMQFIGNFGYVMVCVVGAMLAIKGTITMGTIVAFMTYVRIFTQPIGQIAQGITQLQSASAAMGRVFEFLNETNMQEDKHKVLNLPKFKGYVSFEHVKFGYSDNKTIIHDFTSEAQPGQKVAIVGPTGAGKTTIVNLLMRFYDVNSGSISIDDINIQDMKRSQVHDAFSMVLQDIWLFEGTIKENLIFNQTTISDDEVQEAAKAVGVHHFIMTLPKGYDTVLDDAVTLSVGQKQLLTIARALLKNSPLLILDEATSSVDTRTEELIQKAMDKLMEGRTSFVIAHRLSTIKNADLILVMKDGNIIEQGSHDVLMSQSGFYADLYNSQFESA

SEQ ID NO: 20741 - protein, 1815 aa, Streptococcus agalactiae
ATGTTTAATATTTTCAAGCGACTCAATGGTAAAGAATGGTTGATGATTGTGGCGAGTACTATATTAGTGTGTCTAGCGGTTTGGATGGACCTAAAGACTCCAGAATATATGTCTGATATCACACGTATGTTGCAAACTAAAGGTACAAAGTTAGAGGCTCTTTGGGATCCTGGACTAAAAATGCTTGCCTTTTCATTTGGTAGTTTTTTAGTAGCAGTAATGGTAGGTTTTTTAGGTGCTAGGACAGCAGCTAGTTTTACTAGTCGATTACGTTCAGATATTTTTAACCATGTGATGGATTATTCTGATGCAGAAATTAAGCGATTTTCTATCCCCTCTCTATTAACGCGCACAACTAACGACTTGACTCAGCTACAGATCCTTATTGTAATGGGAATGCAGGTTGTTACCCGTGGACCAATTATGGCAATATGGGCTTTGACTAAAATTTGGGGTAAAAGCGATCAATGGACTGGGGCAGTTGGAGTAGCGGTTATTATCGTTATGATATTACTTAGCGTTCTACTCTTACTCGCTTTTCCGAGACAACGTCAAATCCAAGGTTTTACAGATGCGCTTAATGCAACTACTAGAGAGGCACTCTCTGGTGTTAGAGTTATTCGTGCCTACAATGCTGAAAAGTATCAAACAGATAAGTTCAAACGTGAAAATGACGATTTAACAAAATTGAACCTTTTTGTTTATAGATTGATGTCGCTTATGAATCCTGTGATGACAGTGGTTTCATCTGGATTGACTTTAGCTATTTATTGGATTGGCTCTTATTTGATTAATGATATCTCTGTGCCTAAAGTTACAGGAACAAGTGTATCTGTATTGGCTGCTAAATCAGCTATCACTGATCGAGTGGATCTTTTTTCAAACATGGTTGTTTTTTCATCTTATGCTATGCAAGTTGTTATGGGATTTATGATGATGGTAGCTATTTTTATCATCATGCCTCGTGCTTTAGTATCGGCTAGACGTATTAATGAGGTACTAACTTTAGCCCCAACAGTAACTTTTAAAGAAAATAGTCATATTCAAAGTGCACAAAAAGGTCAAATTGAGTTTCAAGATGTGTCATTTCATTATAGTAAAGATTCTGAAGCGGTTATTGAACATGTATCTTTCAAAGCAGATACTGGTCAGACAGTGGCATTTATTGGGTCTACAGGTTCTGGAAAATCCACTTTAGTCAATTTAGTTCCACGTTTTTATGACGCCACAGAGGGGGCAATTAAACTTGATGGCATTGATATAAAGGAATACTCTCACAATGATTTGAATAATAAAATTGGCTATATTCCACAGAAAGCTGTTCTCTTTAGTGGGACAGTACGTTCTAATATGATTTTGGGAGAGAGTGGCAGGGAGGAACTTAGTGATGAAGAAATTTGGCAAGCACTCGAATTAGCGCAAGCTAAAGAATTTATCGAGGCTAAAGAAAAAGGATTAGATACAGAAGTCGCTCAAGGTGGTAGTAACTTTTCAGGAGGACAAAAACAACGCTTGGCAATTGCACGTGCTTTAGCACGTCACCCTGAAATTCTCATTTTTGATGACTCATTTTCAGCGTTAGATTATAAAACAGATCATATTTTACGCCATGAGGTGAAAGAAAAAACAGCTGCTATGACGAAATTAATTGTCGCTCAACGCATTTCAACTATCATGGATGCTGATCTCATTTTAGTGCTAGATCAAGGTAAAGTTGTTGGGCAAGGAACACATAAGGAATTGTTATCAAATAATGAAGTGTATCAAGAGATAGCCTATTCTCAATTGTCTAAGGAGGAATTGGAAAATGAAAAC

SEQ ID NO: 20742 - protein, 605 aa, Streptococcus agalactiae; identical to SEQ ID NO: 8658

SEQ ID NO: 20743 - protein, 438 aa, Streptococcus agalactiae; identical to SEQ ID NO: 8655

SEQ ID NO: 20744 - protein, 146 aa, Streptococcus agalactiae; identical to SEQ ID NO: 8656

SEQ ID NO: 20745 - protein, 2049 aa, Streptococcus agalactiae
TTGAAAAGTAGTGTCCTTGGTTTCGCTGGGACTTCTATTATGTTCTCAAGCGTATTCGCTGACCAAGTCGGCGTCCAAGTTATAGGCGTCAATGACTTTCATGGTGCACTTGACAATACTGGAACAGCAAATATGCCTGACGGAAAAGTTACTAATGCTGGCACTGCTGCTCAATTAGATGCTTATATGGATGATGCTCAAAAAGATTTCAAACAAACTAACCCTAATGGTGAAAGCATTAGAGTTCAAGCTGGTGATATGGTTGGAGCAAGTCCAGCTAACTCAGGGCTTCTTCAAGATGAACCAACCGTTAAAACATTTAATGCAATGAATGTTGAGTATGGCACATTAGGTAACCATGAATTTGATGAAGGTTTGGCAGAATACAATCGTATCGTTACTGGAAAGGCCCCTGCTCCAGATTCTAATATAAATAATATTACGAAATCATACCCACACGAAGCTGCAAAACAAGAAATTGTAGTGGCAAACGTTATTGATAAAGTTAACAAACAAATCCCTTACAATTGGAAACCTTACACTATTAAAAATATTCCTGTAAATAACAAAAGTGTGAACGTTGGCTTTATCGGAATCGTTACCAAAGACATCCCAAACCTTGTCTTACGTAAAAATTATGAACAATATGAATTTTTAGATGAAGCTGAAACAATCGTTAAATACGCCAAAGAATTACAAGCTAAAAATGTCAAGGCTATTGTAGTCCTTGCTCATGTACCTGCAACAAGCAAGGATGATATTGCTGAAGGTGAAGCAGCAGAAATGATGAAAAAAGTCAATCAACTCTTCCCTGAAAATAGCGTAGATATTGTCTTTGCTGGACACAATCATCAATATACAAATGGTCTTGTTGGTAAAACTCGTATTGTACAAGCGCTCTCTCAAGGAAAAGCCTATGCTGATGTACGTGGTGTCCTAGATACTGATACACAAGATTTCATTGAAACCCCTTCAGCTAAAGTAATTGCAGTTGCTCCTGGTAAAAAAACAGGTAGTGCCGATATTCAAGCCATTGTTGACCAAGCTAATACTATCGTTAAACAAGTAACAGAAGCTAAAATTGGTACTGCCGAGGTAAGTGGCATGATTACGCGTTCTGTTGATCAAGATAATGTTAGTCCGGTAGGCAGCCTCATCACAGAGGCTCAACTAGCAATTGCTCGAAAAAGCTGGCCAGATATCGATTTTGCCATGACAAATAATGGTGGCATTCGTGCTGACTTACTCATCAAACCAGATGGAACAATCACCTGGGGAGCTGCACAAGCAGTTCAACCTTTTGGTAATATCTTACAAGTCGTCGAAATTACTGGTAGAGATCTTTATAAAGCACTCAACGAACAATACGACCAAAAACAAAATTTCTTCCTTCAAATAGCTGGTCTGCGATACACTTACACAGATAATAAAGAGGGCGGGGAAGAAACACCATTTAAAGTTGTAAAAGCTTATAAATCAAATGGTGAGGAAATCAATCCTGATGCAAAATACAAATTAGTTATCAATGACTTTTTATTCGGTGGTGGTGATGGCTTTGCAAGCTTCAGAAATGCCAAACTTCTAGGAGCCATTAATCCCGATACAGAGGTATTTATGGCCTATATCACTGATTTAGAAAAAGCTGGTAAAAAAGTGAGCGTTCCAAATAATAAACCTAAAATCTATGTCACTATGAAGATGGTTAATGAAACTATTACACAAAATGATGGTACATATAGCATTATTAAGAAACTTTATTTAGATCGACAAGGAAATATTGTAGCACAAGAGATTGTATCAGACACTTTAAACCAAACAAAATCAAAATCTACAAAAATCAACCCTGTAACTACAATTCACAAAAAACAATTACACCAATTTACAGCTATTAACCCTATGAGAAATTATGGCAAACCATCAAACTCCACTACTGTAAAATCAAAACAATTACCAAAAACAAACTCTGAATATGGACAATCATTCCTTATGTCTGTCTTTGGTGTTGGACTTATAGGAATTGCTTTAAATACAAAGAAAAAACATATGAAA

SEQ ID NO: 20746 - protein, 684 aa, Streptococcus agalactiae
  VARIANT 9: Xaa = Any Amino Acid
MKSSVLGLXAGTSIMFSSVFADQVGVQVIGVNDFHGALDNTGTANMPDGKVTNAGTAAQLDAYMDDAQKDFKQTNPNGESIRVQAGDMVGASPANSGLLQDEPTVKTFNAMNVEYGTLGNHEFDEGLAEYNRIVTGKAPAPDSNINNITKSYPHEAAKQEIVVANVIDKVNKQIPYNWKPYTIKNIPVNNKSVNVGFIGIVTKDIPNLVLRKNYEQYEFLDEAETIVKYAKELQAKNVKAIVVLAHVPATSKDDIAEGEAAEMMKKVNQLFPENSVDIVFAGHNHQYTNGLVGKTRIVQALSQGKAYADVRGVLDTDTQDFIETPSAKVIAVAPGKKTGSADIQAIVDQANTIVKQVTEAKIGTAEVSGMITRSVDQDNVSPVGSLITEAQLAIARKSWPDIDFAMTNNGGIRADLLIKPDGTITWGAAQAVQPFGNILQVVEITGRDLYKALNEQYDQKQNFFLQIAGLRYTYTDNKEGGEETPFKVVKAYKSNGEEINPDAKYKLVINDFLFGGGDGFASFRNAKLLGAINPDTEVFMAYITDLEKAGKKVSVPNNKPKIYVTMKMVNETITQNDGTYSIIKKLYLDRQGNIVAQEIVSDTLNQTKSKSTKINPVTTIHKKQLHQFTAINPMRNYGKPSNSTTVKSKQLPKTNSEYGQSFLMSVFGVGLIGIALNTKKKHMK

SEQ ID NO: 20747 - protein, 406 aa, Streptococcus agalactiae
ATGATAAAACCAATTGTTAGAGATACTTTCTTTTTACAACAAAAATCACAAATGGCTAGTAGAGCAGATGTGAGCTTAGCAAAAGATTTACAGGATACTTTGCATGCTAATCAAAATTATTGTGTAGGTATGGCAGCCAATATGATTGGTAGTCGAAGCGTGTCATTATCATCAATGTGGGTATTACAAATTTAGTAATGTTAACCCTGTATTAGTTGCAAAATCGGATCCATATGAGACAGAAGAATCTTGCCTTTCTCTCGTAGGTTGCAGAAGTACACAACGATATCATCACATTACGATTTCTTATCGTGATATCAATTGGAAAGAACAGCAAATCAAGTTGACAGATTTTCCAGCTCAAATTTGTCAACACGAGTTAGATCATTTGGAAGGCATATTGATA

SEQ ID NO: 20748 - protein, 136 aa, Streptococcus agalactiae
  VARIANT 52, 68: Xaa = Any Amino Acid
MIKPIVRDTFFLQQKSQMASRADVSLAKDLQDTLHANQNYCVGMAANMIGSXKRVIIINVGITNLVMXNPVLVAKSDPYETEESCLSLVGCRSTQRYHHITISYRDINWKEQQIKLTDFPAQICQHELDHLEGILI

SEQ ID NO: 20749 - protein, 1347 aa, Streptococcus agalactiae
ATGACAAGCGGAAAGACATATGTAGCAAGTGTTTTAGAGAAAGTGAAGAAGCAAAATGAGCATGAGGAAGAATTTCTACAAGCGGTTGAAGAGGTTTTTGAGTCACTAGTACCAGTTTTTGATAAATACCCTCAGTACATTGAAGAAAATCTTTTAGAACGTTTGGTTGAGCCTGAGCGCGTGATTTCTTTTAGAGTTCCATGGGTAGATGATAAAGGCCAAGTTCAAGTTAACCGAGGATATCGTGTACAATTTTCATCAGCTATTGGTCCTTATAAAGGTGGTTTACGTTTTCACCCTACAGTAACACAATCTATTGTCAAATTTTTAGGATTTGAACAAATTTTTAAGAATTCACTGACAGGTCTACCAATTGGTGGTGGCAAAGGAGGGTCGAACTTTGATCCAAAAGGGAAATCAGATAATGAAGTGATGCGTTTCACACAAAGTTTTATGACCGAACTTCAAAAATACATTGGACCAGATTTAGATGTGCCAGCTGGCGATATTGGAGTAGGTGGACGTGAAATTGGTTATCTTTATGGTCAATATAAGCGTTTAAATGGTTATCAAAATGGGGTTTTAACCGGAAAAGGACTGACTTATGGTGGCTCTTTGGCTCGTACAGAAGCAACTGGTTATGGGGCAGTCTATTTTGCTAAAGAAATGCTGGCAGCGTGTGGTCAAGATTTAACTGGCAAAGTTGCACTGGTTTCGGGATCTGGTAACGTGGCTATTTATGCTACTGAAAAATTACAAGAGTTGGGTGCAACTGTTGTAGCTGTGTCAGATTCTTCAGGTTATGTTTATGATCCAGACGGTATTGACCTTGAAACATTGAAACAGATAAAAGAGGTTGAAAGAGCACGTATTGTTAAATATACGGAGAAACATCCAAAAGCTAATTTCACACCAGCAGATCAAGGTAGTATCTGGTCTATTAAAGCAGATTTAGCTTTCCCGTGTGCTACTCAAAACGAATTAGACGAAGAAGACGCTAAGTTATTAGTTGAAAATGGTGTCTTGGCAGTAACAGAAGGAGCAAATATGCCATCTACCTTGGGTGCTATTAAAGTTTTCCAAAAGGCAGGGGTTGCTTTTGGTCCTGCTAAAGCTGCCAATGCAGGAGGAGTAGCTGTTTCAGCGCTTGAAATGGCACAAAATTCTAGTCGTAGGGCATGGACTTTTGAAGAAGTTGATCAAGAATTGCAACGTATTATGAAAACTATTTTTGTGAATGCTTCCAAAGCGGCTGATGAATTTGGCGATAGTGGTAACCTGGTTCTAGGTGCTAACATTGCAGGCTTTTTAAAAGTTGCTCAAGCTATGTCTGCACAAGGTATTGTT

SEQ ID NO: 20750 - protein, 449 aa, Streptococcus agalactiae; identical to SEQ ID NO: 2490

SEQ ID NO: 20751 - protein, 564 aa, Streptococcus agalactiae; identical to SEQ ID NO: 7047

SEQ ID NO: 20752 - protein, 188 aa, Streptococcus agalactiae; identical to SEQ ID NO: 2492

SEQ ID NO: 20753 - protein, 1767 aa, Streptococcus agalactiae; identical to SEQ ID NO: 7049

SEQ ID NO: 20754 - protein, 589 aa, Streptococcus agalactiae; identical to SEQ ID NO: 7050

SEQ ID NO: 20755 - protein, 1737 aa, Streptococcus agalactiae; identical to SEQ ID NO: 7051

SEQ ID NO: 20756 - protein, 579 aa, Streptococcus agalactiae; identical to SEQ ID NO: 7052

SEQ ID NO: 20757 - protein, 471 aa, Streptococcus agalactiae; identical to SEQ ID NO: 7053

SEQ ID NO: 20758 - protein, 157 aa, Streptococcus agalactiae; identical to SEQ ID NO: 2500

SEQ ID NO: 20759 - protein, 1866 aa, Streptococcus agalactiae
ATGAGCGATTTTTTAGTAGATGGATTGACTAAGTCGGTTGGTGATAAGACGGTCTTTAGTAATGTTTCATTTATCATCCATAGTTTAGACCGTATTGGGATTATTGGTGTCAATGGAACTGGAAAGACAACACTATTAGATGTTATTTCGGGTGAATTAGGTTTTGATGGTGATCGTTCCCCTTTTTCATCAGCTAATGATTATAAGATTGCTTATTTAAAACAAGAACCAGACTTTGATGATTCTCAGACAATTTTGGACACCGTACTTTCTTCTGACTTAAGAGAGATGGCTTTAATTAAAGAATATGAATTATTGCTTAATCACTACGAAGAAAGTAAGCAATCACGTCTAGAGAAAGTAATGGCAGAAATGGATTCTTTAGATGCTTGGTCTATTGAGAGCGAAGTCAAAACAGTATTATCCAAATTAGGTATTACTGATTTGCAGTTGTCGGTTGGTGAATTATCAGGAGGATTACGAAGACGTGTTCAATTAGCGCAAGTATTATTAAATGATGCAGATTTATTGCTCTTAGACGAACCTACTAACCACTTAGATATTGACACTATTGCATGGTTAACGAATTTTTTGAAAAATAGTAAAAAGACAGTGCTTTTTATAACTCATGATCGTTATTTTCTAGACAATGTTGCAACACGTATTTTTGAATTAGATAAGGCACAGATTACAGAATATCAAGGCAATTATCAGGATTATGTCCGACTTCGTGCAGAACAAGACGAGCGTGATGCTGCTAGTTTACATAAAAAGAAACAGCTTTATAAACAGGAACTAGCTTGGATGCGTACTCAGCCACAAGCTCGTGCAACGAAACAACAGGCTCGTATTAATCGTTTTCAAAATCTAAAAAACGATTTACACCAAACAAGCGATACAAGCGATTTGGAAATGACATTTGAAACAAGTCGAATTGGGAAAAAGGTTATTAATTTTGAAAATGTCTCTTTTTCTTACCCAGATAAATCTATCTTGAAAGACTTTAATTTGTTAATTCAAAATAAAGACCGTATTGGCATCGTTGGAGATAATGGTGTTGGAAAGTCAACCTTACTTAATTTAATTGTTCAAGATTTACAGCCGGATTCGGGTAATGTCTCTATTGGTGAAACGATACGTGTAGGTTACTTTTCACAACAACTTCATAATATGGATGGCTCAAAACGTGTTATTAATTATTTGCAAGAGGTTGCAGATGAGGTTAAAACTAGTGTCGGTACAACAAGTGTGACAGAACTATTGGAACAATTTCTCTTTCCACGTTCGACACATGGAACACAAATTGCAAAATTATCAGGTGGTGAGAAAAAAAGACTTTACCTTTTAAAAATCCTGATTGAAAAGCCTAATGTGTTACTACTTGATGAGCCGACAAATGACTTAGATATTGCTACATTAACTGTTCTTGAAAATTTTTTACAAGGCTTTGGTGGTCCTGTGATTACAGTTAGTCACGATCGTTACTTTTTAGATAAAGTGGCTAATAAAATTATTGCGTTTGAAGATAACGATATCCGTGAATTTTTTGGTAATTATACTGATTATTTAGATGAAAAAGCATTTAATGAGCAAAATAATGAAGTTATCAGTAAAAAAGAGAGTACCAAGACAAGTCGTGAAAAGCAAAGTCGTAAAAGAATGTCTTACTTTGAAAAACAAGAATGGGCGACAATTGAAGACGATATTATGATATTGGAAAATACTATCACTCGTATAGAAAATGATATGCAAACATGTGGTAGTGATTTTACAAGGTTATCTGATTTACAAAAGGAATTAGATGCAAAAAATGAAGCACTTCTAGAAAAGTATGACCGTTATGAGTACCTTAGTGAGTTAGACACA

SEQ ID NO: 20760 - protein, 622 aa, Streptococcus agalactiae; identical to SEQ ID NO: 11324

SEQ ID NO: 20761 - protein, 1206 aa, Streptococcus agalactiae; identical to SEQ ID NO: 11325

SEQ ID NO: 20762 - protein, 402 aa, Streptococcus agalactiae; identical to SEQ ID NO: 11326

SEQ ID NO: 20763 - protein, 846 aa, Streptococcus agalactiae; identical to SEQ ID NO: 7061

SEQ ID NO: 20764 - protein, 282 aa, Streptococcus agalactiae; identical to SEQ ID NO: 2506

SEQ ID NO: 20765 - protein, 219 aa, Streptococcus agalactiae
GTGTTACAATTTGTTATTGTACGTGATGAGTTTGTTATTTCTGGTGTCATTTCACAAATGGCTCATATCCAAGGGCGCCTTATCAATGAGCCTAGTGAGTTTAGTCAAGATGAAGTTGAGAATCTAGCAGCTCCTCTTTTAGAAATCGTTAAACGTCTGACTTATGAAGTTACAGAAATTGCTTTAGATAGACCAGGAGTAACATTGGAGTTTAATAGT

SEQ ID NO: 20766 - protein, 73 aa, Streptococcus agalactiae
MLQFVIVRDEFVISGVISQMAHIQGRLINEPSEFSQDEVENLAAPLLEIVKRLTYEVTEIALDRPGVTLEFNS

SEQ ID NO: 20767 - protein, 606 aa, Streptococcus agalactiae
ATGGTACTTTATCTAAATGTACCATTAGCCATGATTATCATTGCTTGTATTCCTGTAACTTATTTTAGTGCACAAGCGATACTAAAAAGATCCCAACCTTACTTTAAAGAACAGGCAAAGATTCTGGGAGAACTGAATGGTTTTGTACAAGAGAAATTAACTGGTTTCAATATCATAAAATTATATGGTAGAGAAGAGGCGTCTAGTCAAGAATTTCGTGATATAACGGATAATCTACGTCATGTAGGTTTCAAAGCTAGCTTCATTTCAGGAATTATGATGCCAGTATTGAATGGTATCTCTGATTTTATTTACCTTATCATTGCATTTGTTGGCGGTTTACAAGTTATTGCTGGTACCTTAACAATTGGTAACATGCAGGCATTTGTGCAGTATGTTTGGCAAATTAGTCAACCCGTTCAAACCATTACACAAATTAGCAGGTGTTTTGCAAAAGGTGCAAAATCTTCCTTAGAAACGGTATTTTTTGGAAAGTTCTTAAGGAATGAAAGGAAAAGAAGGGAAAAGGCCCAAATTCAAAAGTTCCAACTGAAAAAAAAAATTTGGAAGGCCCCATGGAACTTTAAAACCCNNNNNTTAATTAAT

SEQ ID NO: 20768 - protein, 202 aa, Streptococcus agalactiae
  VARIANT 198, 199: Xaa = Any Amino Acid
MVLYLNVPLAMIIIACIPVTYFSAQAILKRSQPYFKEQAKILGELNGFVQEKLTGFNIIKLYGREEASSQEFRDITDNLRHVGFKASFISGIMMPVLNGISDFIYLIIAFVGGLQVIAGTLTIGNMQAFVQYVWQISQPVQTITQISRCFAKGAKSSLETVFFGKFLRNERKRREKAQIQKFQLKKKIWKAPWNFKTXXLIN

SEQ ID NO: 20769 - protein, 487 aa, Streptococcus agalactiae
ATGACTATGAAACTATTGAAGAAATTTACAAAAATTATCCTAATATCCCCTATATCTCACCTGAAAGAGACTTGGCTGAAATTAATTTTAGTAAAGTTGTTCCTAGGAAAAATATGGAAGAAACTAGTGAAGGACTCTTGCCTGGAGATATTATCTTATTATGGCGTATACAGTTTGGAACTTTCACAACTGAAACAAGTTTTTCAAAATATTTTGAATACATTTATGGTATAAATGGAAAAGAACACCTAGAATTTTTAATAAAAAATGGATTTGTAAGAATGGAGTCACCGCTTGATTCTTTAGATCACTTATCTGCTCCACTTTTAAAACTATTCTTAAAAGAAAAAAACGTAAAAGGCTTGTCAAAGATGAAACGCTTGATTTAGATCAGGCAATAGCTATTGCTTTTACAGAAGAGGAATTAGGGAAGTTGTTTGTTGTCAGAGAGTTGGCACTTACAGAAAAAGGTTNNNNNTTAATTAAT

SEQ ID NO: 20770 - protein, 163 aa, Streptococcus agalactiae
  VARIANT 5, 128, 159, 160: Xaa = Any Amino Acid
MTMKXIEEIYKNYPNIPYISPERDLAEINFSKVVPRKNMEETSEGLLPGDIILLWRIQFGTFTTETSFSKYFEYIYGINGKEHLEFLIKNGFVRMESPLDSLDHLSAPLLKLFLKEKNVKGLSKMKRXDLDQAIAIAFTEEELGKLFVVRELALTEKGXXLIN

SEQ ID NO: 20771 - protein, 492 aa, Streptococcus agalactiae; identical to SEQ ID NO: 7071

SEQ ID NO: 20772 - protein, 164 aa, Streptococcus agalactiae; identical to SEQ ID NO: 2512

SEQ ID NO: 20773 - protein, 1245 aa, Streptococcus agalactiae
ATGGATCGTTTTGATCAACCTTTATCGTCCGGTAGCTGATGGTATAAAAAAAGTGAAGACTTAATTAACATTATTCTCGATAATAAGGCACAAACCTATCATGCAAAAAATCAAAATGATAAACAATCAGGTGAATCTGATGGAAAATCAGGCTTAGGCTCTGCTTTTTATAAACACCTTATGGGTGGTGTATCACAAATGTTACCATTCGTTATTGGTGGTGGTATTATGATTGCGATTGCTTTCCTTTTTGATAACATACTTGGTGTACCAAAAGACCAATTAAGTAATTTAGGTTCATACCATGAAATTGCAGCCTTATTCAAAAATATCGGTGGCGCAGCATTTGCATTTATGTTACCAGTATTGGCAGGTTATATCGCTTATTCAATAGCTGAAAAACCAGGACTAGTAGCTGGCTTCGTAGCTGGTTCAATTGCATCAAGTGGACTGGCATTCGGTAAAGTACCTTTTGCAGAAGGTGGGAAAGCAACCTTAGCATTAGCAGGTGTGCCATCAGGTTTCTTAGGGGCTTTAGTAGGTGGTTTCTTAGCTGGTGGAGTTATCCTACTACTTAGAAAATTACTTTCAGGTCTCCCAAAATCGCTTGAAGGTATTAAATCAATTCTTCTATACCCATTGTTAGGTGTTTTGATTACAGGTTTCTTGATGTTGCTCGTAAACATTCCAATGGCAGCTATCAACACAGCTCTTAACACTTTCTTACAAGGTTTATCTGGTAGTTCAGCAGTCTTGATGGGCTTACTAGTTGGTGGTATGATGGCTGTAGATATGGGTGGGCCTGTTAATAAAGCAGCTTATGTTTTTGGTACAGGTACTCTTGCAGCAACTGTTGCAAATGGCGGCTCTGTTGTTATGGCAGCTGTAATGGCTGGAGGAATGGTTCCACCGTTAGCAGTATTTGTGGCAACTTTATTATTTAAAGATAAATTTAATAATGAAGAACGTCAATCTGGTCTAACAAATATCGTTATGGGGTTATCTTTTATCACTGAAGGTGCTATTCCGTTTGGTGCTGCTGACCCAGCTCGTGCAATCCCTAGCTTTATTGTAGGTTCAGCCTTAACTGGAGCACTTGTTGGTTTAGCTGGTATCAAGTTGATGGCTCCTCATGGAGGGATTTTTGTCATCGCATTAACAAGTAATCCTTTACTTTATATTCTATTTATTCTAATTGGAGCGGTAGTCTCAGGTGTACTCTTTGGCTTGTTCCGTAAAACAAAA

SEQ ID NO: 20774 - protein, 417 aa, Streptococcus agalactiae
  VARIANT 9: Xaa = Any Amino Acid
MDRFDANLXIRPVADGIKKSEDLINIILDNKAQTYHAKNQNDKQSGESDGKSGLGSAFYKHLMGGVSQMLPFVIGGGIMIAIAFLFDNILGVPKDQLSNLGSYHEIAALFKNIGGAAFAFMLPVLAGYIAYSIAEKPGLVAGFVAGSIASSGLAFGKVPFAEGGKATLALAGVPSGFLGALVGGFLAGGVILLLRKLLSGLPKSLEGIKSILLYPLLGVLITGFLMLLVNIPMAAINTALNTFLQGLSGSSAVLMGLLVGGMMAVDMGGPVNKAAYVFGTGTLAATVANGGSVVMAAVMAGGMVPPLAVFVATLLFKDKFNNEERQSGLTNIVMGLSFITEGAIPFGAADPARAIPSFIVGSALTGALVGLAGIKLMAPHGGIFVIALTSNPLLYILFILIGAVVSGVLFGLFRKTK

SEQ ID NO: 20775 - protein, 1206 aa, Streptococcus agalactiae
ATGGATTTAAAAGCAACCAGTAAAGAGGCTGCAATTGATGAAATGATTACAAAATTAGTTGACACAGGTGTTGTGACAAACTTTGCTATTTTTAAAGATGGTATCATGAAGCGTGAGGCACAAACATCAACTGGATTAGGTGATGGTATCGCTATGCCACATAGTAAAAATGCTGCCGTTAAAGAAGCTACTGTCCTTTTTGCAAAATCTGCATCAGGTGTTGATTACGAAGCACTTGATGGACAGCCAACTGATTTATTCTTTATGATTGCTGCGCCAGATGGTGCTAATGATACGCATTTAGCTGCCTTGGCAGAACTATCTAAATATCTTTTAAAAGAAGGGTTCGCTGATCAATTACGTCAAGCAAAAACGCCAGATGACATTATTGCTACTTTTGATAGTAATAGCATTTCTCAAGAAACAGTAGCTCCACAAACAGTACAATCAACAAGTAAAGGTTCAGATTATATTGTTGCAGTAACAGCTTGCACTACGGGAATTGCCCACACGTATATGGCAGAAGAAGCTTTAAAGAAAAAAGCAGCTGAAATGGGTGTAGGTATTAAAGTTGAAACAAATGGCGCTTCTGGTGTAGGAAATAAGTTGACTTCAAGTGATATTGCAAGGGCTAAGGGTGTTATTATTGCAGCAGATAAGGCTGTAGAGATGGATCGTTTTGATGGCAAACCTTTGGTATCACGTCCGGTAGCTGATGGTATTAAAAAAAGTGAAGACTTAATTAACATTATTCTCGATAATAAGGCACAAACCTATCATGCAAAAAATCAAAATGATAAACAATCAGGTGAATCTGATGGAAAATCAGGCTTAGGCTCTGCTTTTTATAAACACCTTATGGGTGGTGTATCACAAATGTTACCATTCGTTATTGGTGGTGGTATTATGATTGCGATTGCTTTCCTTTTTGATAACATACTTGGTGTACCAAAAGACCAATTAAGTAATTTAGGTTCATACCATGAAATTGCAGCCTTATTCAAAAATATCGGTGGCGCAGCATTTGCATTTATGTTACCAGTATTGGCAGGTTATATCGCTTATTCAATAGCTGAAAAACCAGGACTAGTAGCTGGCTTCGTAGCTGGTTCAATTGCATCAAGTGGACTGGCATTCGGTAAAGTACCTTTTGCAGAAGGTGGGAAAGCAACCTTAGCATTAGCAGGTGTGCCATCCAGGTTTTCT

SEQ ID NO: 20776 - protein, 402 aa, Streptococcus agalactiae
MDLKATSKEAAIDEMITKLVDTGVVTNFAIFKDGIMKREAQTSTGLGDGIAMPHSKNAAVKEATVLFAKSASGVDYEALDGQPTDLFFMIAAPDGANDTHLAALAELSKYLLKEGFADQLRQAKTPDDIIATFDSNSISQETVAPQTVQSTSKGSDYIVAVTACTTGIAHTYMAEEALKKKAAEMGVGIKVETNGASGVGNKLTSSDIARAKGVIIAADKAVEMDRFDGKPLVSRPVADGIKKSEDLINIILDNKAQTYHAKNQNDKQSGESDGKSGLGSAFYKHLMGGVSQMLPFVIGGGIMIAIAFLFDNILGVPKDQLSNLGSYHEIAALFKNIGGAAFAFMLPVLAGYIAYSIAEKPGLVAGFVAGSIASSGLAFGKVPFAEGGKATLALAGVPSRFS

SEQ ID NO: 20777 - protein, 909 aa, Streptococcus agalactiae; identical to SEQ ID NO: 7077

SEQ ID NO: 20778 - protein, 303 aa, Streptococcus agalactiae; identical to SEQ ID NO: 7078

SEQ ID NO: 20779 - protein, 741 aa, Streptococcus agalactiae; identical to SEQ ID NO: 7079

SEQ ID NO: 20780 - protein, 247 aa, Streptococcus agalactiae; identical to SEQ ID NO: 7080

SEQ ID NO: 20781 - protein, 1233 aa, Streptococcus agalactiae; identical to SEQ ID NO: 11341

SEQ ID NO: 20782 - protein, 411 aa, Streptococcus agalactiae; identical to SEQ ID NO: 11342

SEQ ID NO: 20783 - protein, 1631 aa, Streptococcus agalactiae
ATGATGAAAAAAGGACAAGTAAATGATACTAAGCAATCTTACTCTCTACGTAAATATAAATTTGGTTTAGCATCAGTAATTTTAGGGTCATTCATAATGGTCACAAGTCCTGTTTTTGCGGATCAAACTACATCGGTTCAAGTTAATAATCAGACAGGCACTAGTGTGGATGCTAATAATTCTTCCAATGAGACAAGTGCGTCAAGTGTGATTACTTCCAATAATGATAGTGTTCAAGCGTCTGATAAAGTTGTAAATAGTCAAAATACGGCAACAAAGGACATTACTACTCCTTTAGTAGAGACAAAGCCAATGGTGGAAAAAACATTACCTGAACAAGGGAATTATGTTTATAGCAAAGAAACCGAGGTGAAAAATACACCTTCAAAATCAGCCCCAGTAGCTTTCTATGCAAAGAAAGGTGATAAAGTTTTCTATGACCAAGTATTTAATAAAGATAATGTGAAATGGATTTCATATAAGTCTTTTTGTGGCGTACGTCGATACGCAGCTATTGAGTCACTAGATCCATCAGGAGGTTCAGAGACTAAAGCACCTACTCCTGTAACAAATTCAGGAAGCAATAATCAAGAGAAAATAGCAACGCAGGAAATTATACATTTTCACATAAAGTAGAAGTAAAAAATGAAGCTAAGGTAGCGAGTCCAACTCAATTTACATTGGACAAAGGAGACAGAATTTTTTACGACCAAATACTAACTATTGAAGGAAATCAGTGGTTATCTTATAAATCATTCAATGGTGTTCGTCGTTTTGTTTTGCTAGGTAAAGCATCTTCAGTAGAAAAAACTGAAGATAAAGAAAAAGTGTCTCCTCAACCACAAGCCCGTATTACTAAAACTGGTAGACTGACTATTTCTAACGAAACAACTACAGGTTTTGATATTTTAATTACGAATATTAAAGATGATAACGGTATCGCTGCTGTTAAGGTACCGGTTTGGACTGAACAAGGAGGGCAAGATGATATTAAATGGTATACAGCTGTAACTACTGGGGATGGCAACTACAAAGTAGCTGTATCATTTGCTGACCATAAGAATGAGAAGGGTCTTTATAATATTCATTTATACTACCAAGAAGCTAGTGGGACACTTGTAGGTGTAACAGGAACTAAAGTGACAGTAGCTGGAACTAATTCTTCTCAAGAACCTATTGAAAATGGTTTAGCAAAGACTGGTGTTTATAATATTATCGGAAGTACTGAAGTAAAAAATGAAGCTAAAATATCAAGTCAGACCCAATTTACTTTAGAAAAAGGTGACAAAATAAATTATGATCAAGTATTGACAGCAGATGGTTACCAGTGGATTTCTTACAAATCTTATAGTGGTGTTCGTCGCTATATTCCTGTGAAAAAGCTAACTACAAGTAGTGAAAAAGCGAAAGATGAGGCGACTAAACCGACTAGTTATCCCAACTTACCTAAAACAGGTACCTATACATTTACTAAAACTGTAGATGTGAAGAGTCAACCTAAAGTATCAAGTCCAGTGGAATTTAATTTTCAAAAGGGTGAAAAAATACATTATGATCAAGTGTTAGTAGTAGATGGTCATCAGTGGATTTCATACAAGAGTTATTCCGGTATTCGTCGCTATATTGAAATT

SEQ ID NO: 20784 - protein, 544 aa, Streptococcus agalactiae; identical to SEQ ID NO: 7084

SEQ ID NO: 20785 - protein, 921 aa, Streptococcus agalactiae; identical to SEQ ID NO: 7085

SEQ ID NO: 20786 - protein, 307 aa, Streptococcus agalactiae; identical to SEQ ID NO: 2520

SEQ ID NO: 20787 - protein, 1068 aa, Streptococcus agalactiae; identical to SEQ ID NO: 7087

SEQ ID NO: 20788 - protein, 356 aa, Streptococcus agalactiae; identical to SEQ ID NO: 2522

SEQ ID NO: 20789 - protein, 990 aa, Streptococcus agalactiae; identical to SEQ ID NO: 7089

SEQ ID NO: 20790 - protein, 330 aa, Streptococcus agalactiae; identical to SEQ ID NO: 2524

SEQ ID NO: 20791 - protein, 199 aa, Streptococcus agalactiae
ATGACAGTTCCTGATGTTCTCATGAGTGGTCATCATGAAAATATCCGAAAATGGCGTTTAGAACAAAGTTTGCGAAAAACACTAGAACGTCGACCAGACTTGTTAGAAAATTATGCAATGACGGATGAAGAGAGACTTATCTTAGAGAAAATTAAAACAGAAATAGAAAGACGATACAGTAAATGAACAAAACAATTTA

SEQ ID NO: 20792 - protein, 67 aa, Streptococcus agalactiae
  VARIANT 58: Xaa = Any Amino Acid
MTVPDVLMSGHHENIRKWRLEQSLRKTLERRPDLLENYAMTDEERLILEKIKTEIERXDTVNEQNNL

SEQ ID NO: 20793 - protein, 732 aa, Streptococcus agalactiae
ATGATGAAGATTGATATTTTAACTTTATTTCCTGAAATGTTTGCCCCTCTGGAACATTCTATAGTTGGTAAGGCAAAAGAAAGAGGACTTCTTGAAATTAATTATCACAATTTCAGAGAAAATGCTGAGAAGTCTCGACATGTTGATGATGAGCCTTACGGTGGGGGGCAAGGGATGCTTTTACGTGCTCAACCTATTTTTGATACAATTGATAAAATAGATGCTCAAAAAGCACGTGTTATTTTGCTAGACCCAGCGGGCAGAACATTTGATCAGGATTTTGCAGAAGAACTATCCAAAGAAGATGAATTAATTTTTATTTGTGGTCACTATGAAGGTTATGATGAACGTATAAAATCATTAGTAACAGACGAAGTATCTTTGGGAGATTTTGTTCTTACGGGAGGAGAATTGGCGGCTATGACAATGGTCGATGCTACCGTTCGTCTGATTCCAGAAGTTATAGGTAAAGAAACAAGTCATCAGGATGATTCATTTTCATCGGGCCTATTAGAATATCCTCAGTATACGCGCCCATATGATTATTTAGGCATGACAGTTCCTGATGTTCTCATGAGTGGTCATCATGAAAATATCCGAAAATGGCGTTTAGAACAAAGTTTGCGAAAAACACTAGAACGTCGACCAGACTTGTTAGAAAATTATGCAATGACGGATGAAGAGAGACTTATCTTGAGAAATAACCGAAATAGAAAGAACCGATACCGTAAA

SEQ ID NO: 20794 - protein, 245 aa, Streptococcus agalactiae
MMKIDILTLFPEMFAPLEHSIVGKAKERGLLEINYHNFRENAEKSRHVDDEPYGGGQGMLLRAQPIFDTIDKIDAQKARVILLDPAGRTFDQDFAEELSKEDELIFICGHYEGYDERIKSLVTDEVSLGDFVLTGGELAAMTMVDATVRLIPEVIGKETSHQDDSFSSGLLEYPQYTRPYDYLGMTVPDVLMSGHHENIRKWRLEQSLRKTLERRPDLLENYAMTDEERLILEKLNRNRKNRYRK

SEQ ID NO: 20795 - protein, 514 aa, Streptococcus agalactiae
ATGGAATACTTTAACGTGAAAAATTGTCAATACACAAGGATTACAAGGCGAAATGCGTGTATTAAGCGTGACTGACTTTGTAGAAGAACGCTTTAAAAAAGGTCAAGTGTTAGCTTTATTCGATGAAAAGAATCAGTTTGTTATGGATATTGAAATTGCTAGTCATCGTAAGCAGAAGAATTTTGACATTATAAAATTCAAAGGAATGTATCATATTAATGATATTGAAAAATATAAAGGTTTCACACTGAAGGTGGCAGAGGATCAACTGAGCGACCTTAAAGATGGTGAATTTTATTATCATGAAATTATTGGCTTAGATGTCTATGAAGGGGAAGAGCTGATTGGAAAAATCAAAGAAATTTTACAACCAGGAGCAAATGACGTTTGGGTTGTGGAACGTCATGGAAAACGTGATCTTTTATTACCCTATATCCCGCCAGTAGTATTAGAAGTGGACCTTTCTAATCAGCGTGTTCAAGTTGAATTGATGGAAGGTTTAGATGATGAAGAT

SEQ ID NO: 20796 - protein, 172 aa, Streptococcus agalactiae
MEYFNVGKIVNTQGLQGEMRVLSVTDFVEERFKKGQVLALFDEKNQFVMDIEIASHRKQKNFDIIKFKGMYHINDIEKYKGFTLKVAEDQLSDLKDGEFYYHEIIGLDVYEGEELIGKIKEILQPGANDVWVVERHGKRDLLLPYIPPVVLEVDLSNQRVQVELMEGLDDED

SEQ ID NO: 20797 - protein, 601 aa, Streptococcus agalactiae
TTGGGTAGAGAATTTATTGACTCGCAGCATTTTAAAGATATTAATGCCTATTTTTTGAGACATTTTATTTGTTATTGTTATTATTTTATTCCTGATTTTTATTTTTTAAATACATCAAGACTGAGCTATTCTAAGGATTTATATCACCTATTAGATAAAGGTCTGGCTGATATTTTTAACCTTAAGGGAGGGAATTTAACTTTTTCAAAACATGAGACAGTGCTACTAACAATGCAATTATCTAACTTAATAGAGACTTTCTTAGCTCCTCTTTCTGTATATGTAATTTCATCTAGTAATATTAGATTACAAACCTATCAAGTAATGTTAAACCAATATTTTACATCTAAGATAGCGGAATTCTTTTTTGTAAACTATCAAACAACTCAGATAGATGAAAAATTACTAAAAAAAGCAGATATCATTATTGCTGAGAGACGCTATATATCTTCTTTTAAAAATGACTCAGGTGTGGCTATACAAGATATATTAGAAATTGGGATGAATAATAAGCAGTACCATGAACTACTTTTACAAGCTATTATCGAAAAAAGGGACCAAAAAGTTTTTGAATATATTTCAAAAGAAACATAAAATACTT

SEQ ID NO: 20798 - protein, 201 aa, Streptococcus agalactiae
MGREFIDSQHFKDINAYFLRHFICYCYYFIPDFYFLNTSRLSYSKDLYHLLDKGLADIFNLKGGNLTFSKHETVLLTMQLSNLIETFLAPLSVYVISSSNIRLQTYQVMLNQYFTSKIAEFFFVNYQTTQIDEKLLKKADIIIAERRYISSFKNDSGVAIQDILEIGMNNKQYHELLLQAIIEKRDQKVFEYISKMKHKIL

SEQ ID NO: 20799 - protein, 702 aa, Streptococcus agalactiae
TTGCTATTTGATTTTCTCGAAGAAAAAATAAAACTGAAAGCATACCTGATGACCGCCTTACTTGATGATGGAGAAATTAACCTTGATCACTTTAAAACAGAATATGCTTTGAGTGAAAAGATTTTACAAGGTCTTATTTCGGAACTACAAATACTTTATTCTGATTTCTACCTTGTTGTCAAAAGTAGAACAATGATATTGTTCCATTACGAAACACTTTCTAAGCTAGAGACTTTGCATACCATTTATCGAGAGTCTAATATGTTACAGTTTTTGGCATATTTTATTGCTCCTCAAAATGTCAGTTTTTCTGAATTCACGGCTAAGAAATTCATATCCGTCGCAAGTGCCTACCGAATAAAGAAAAACTGTAAACTTTATTTGGAGAGTGTTAAGTTATCAATACAAAAAAATAAAGTGACAGGTCCAGAATATCAGATTAGACTGCTGATTGCTTTGTTACAGTATCATTTTGGTTTTATTATTTATCCTTTTGATGCTACAAGTGAGGTAATGATAAGGGATTTTATTGAATACTCGAATTTTAAAGGGTGTGACTACGACCTTAAAGACTTATCTGAAGAATATTACTATTTTTATATTTTGGTGAATTTAGTTTGGAAAAGAAAAGAATATAAAGTAGAAATTCCTCAAACAGAATCCTTTAATCGAATAAAAAAATCGATCTCTACNNNNNTTAAT

SEQ ID NO: 20800 - protein, 234 aa, Streptococcus agalactiae
  VARIANT 232, 233: Xaa = Any Amino Acid
MLFDFLEEKIKLKAYLMTALLDDGEINLDHFKTEYALSEKILQGLISELQILYSDFYLVVKSRTMILFHYETLSKLETLHTIYRESNMLQFLAYFIAPQNVSFSEFTAKKFISVASAYRIKKNCKLYLESVKLSIQKNKVTGPEYQIRLLIALLQYHFGFIIYPFDATSEVMIRDFIEYSNFKGCDYDLKDLSEEYYYFYILVNLVWKRKEYKVEIPQTESFNRIKKSISTXXN

SEQ ID NO: 20801 - protein, 270 aa, Streptococcus agalactiae; identical to SEQ ID NO: 11365

SEQ ID NO: 20802 - protein, 90 aa, Streptococcus agalactiae; identical to SEQ ID NO: 2534

SEQ ID NO: 20803 - protein, 1245 aa, Streptococcus agalactiae
ATGGAAAATTGGAAATTTGCCCTATCATCGATTCTAGGGCACAAGATGCGTGCTTTTCTGACCATGTTAGGGATTATCATTGGGGTTGCATCAGTTGTGTTAATTATGGCCTTAGGTAAGGGCATGAAAGATTCGGTTACAAATGAGATTACAAAGTCTCAGAAGAATCTTCAGATTTATTATAAAACAAAAGAAGACCAAAAAAATGAGGATAACTTTGGAGCTCAAGGGGCTTTCATGCAAGGTAGTGATACCAACCGTAAGGAACCAATTATTCAAGAATCATGGTTAAAAAAGATTGCTAAGGAAGTAGATGGTGTTAGTGGCTACTATGTAACCAATCAAACAAATGCTCCAGTAGCTTACCTTGAAAAAAAGGCAAAGACGGTTAATATAACAGGAATTAACCGCACTTACCTTGGTATCAAAAAGTTCAAAATTAAAAGTGGTCGTCAATTCCAAGAGGAGGATTATAACCAATTCTCGAGAGTTATTTTACTAGAAGAAAAATTAGCTCAGAGATTATTTCAGACAAATGAAGCAGCGTTAAATAAAGTGGTGACTGTAAAAAATAAATCTTACTTAGTAGTGGGGGTTTATTCGGATCCAGAAGCTGGTTCAGGTTTATATGGAAGTAATTCTGATGGGAATGCTATTTTAACCAATACACAGTTAGCTTCGGAGTTTGGTGCTAAAGAAGCAGAAAACATATATTTTCATCTTAATGATGTGTCGCAATCCAATCGCATTGGTAAAGAAATAGGCAAACGTTTAACAGACATTAGCCATGCTAAGGATGGGTACTATGATAATTTTGATATGACATCTATAGTTAAATCTATCAATACCCAAGTTGGTATTATGACAGGTGTTATTGGAGCGATTGCAGCAATTTCTCTCCTAGTTGGTGGTATCGGAGTGATGAATATTATGTTAGTCTCTGTAACTGAGCGCACGAGAGAAATTGGCCTTCGTAAAGCCCTTGGGGCAACTCGACGTAAAATTTTAGCTCAATTTTTAATTGAATCAATGGTCTTAACGATTTTGGGTGGGTTAATTGGGTTATTACTAGCCTATGGAGGTACGATGTTAATTGCTAATGCGCAAGATAAGATTACTCCTTCTGTGTCACTTAACGTGGCTATAGGCAGTTTAATTTTCTCGGCATTTATTGGAATTATATTTGGTTTATTACCTGCTAATAAAGCTAGCAAATTAAACCCAATTGATGCTTTACGATATGAA

SEQ ID NO: 20804 - protein, 415 aa, Streptococcus agalactiae; identical to SEQ ID NO: 2536

SEQ ID NO: 20805 - protein, 708 aa, Streptococcus agalactiae
GTGACAACTAATCGAAAAGAACTGATTAGATTGCATCAGATTGTTAAAAGTTATCAAAATGGGGATCAAAAACTTCAAGTCTTAAAGAACATTGATTTGACGGTTTATGAAGGTGAATTTCTTGCAATCATGGGGCCATCTGGTTCAGGGAAATCCACACTAATGAATATTATTGGCTTGTTGGATTCTCCAACTTCAGGAGATTATAGTTTAAATGGTAAACGTGTCGAAGAACTAAGTCAAACGAAATTAGCTCAAGTTCGAAATAAGGAAATCGGTTTTGTCTTTCAACAATTTTTCTTGTTATCTAAACTAACGGCTTTGCAAAATGTTGAATTACCCTTAATTTATGCGGGTGTAGCTCCTAAAAAGCGTAAAAATTTAGCAAAACAATTTTTAGATAAAGTTGAATTAAGAGAGCGTATGAACCATCTGCCAACAGAATTATCTGGGGGACAGAAGCAACGTGTAGCAATCGCGCGTGCTTTGGTGAATAGCCCATCTATTATTCTAGCAGATGAGCCGACTGGTGCCTTGGATACAAAGACGGGTGAGCAAATTATGCAGTTCCTAACGGAATTAAATCAAGAAGGTAAAACCATTATCATGGTAACTCATGAACCAGAAATCGCCGATTATGCGACACGTAAAATTGTTATTCGTGATGGCGAAATTACAGCAGATACTACTGATAGTATTAGAATTGAT

SEQ ID NO: 20806 - protein, 236 aa, Streptococcus agalactiae; identical to SEQ ID NO: 11370

SEQ ID NO: 20807 - protein, 1240 aa, Streptococcus agalactiae
ATGAGTAAACGACAAAATTTAGGATTAGTAAAAAAGGAGCAATTATATCAGGGCTCTCAGTGGCACTAATTGTAGCAGTAGGTGGCTTTTTATGGGTACAATCTCAACCTAATAAGAGTGCAGTAAAAACTAATTACAAAGTTTTTAATGTTAGAGAAGGAAGTGTTTCGTCCTCAACTCTTTTGACAGGAAAAGCTAAGGCTAATCAAGAACAGTATGTGTATTTTGATGCTAATAAGGGTAATCGAGCAACTGTTACAGTTAAAGTGGGTGATAAAATCACAGCTGGTCAGCAGTTAGTTCAATATGATACAACAACTGCACAAGCAGCCTACGACACTGCTAATCGTCAATTAAATAAAGTAGCGCGTCAGATTAATAATCTAAAGACAACAGGAAGTCTTCCAGCTATGGAATCAAGTGATCAATCTTCATCATCATCACAAGGACAAGGGACTCAATCGACTAGTGGTGCGACGAATCGTCTACAGCAAAATTATCAAAGTCAAGCTAATGCTTCATACAACCAACAACTTCAAGATTTGAATGATGCTTATGCAGATGCACAGGCAGAAGTAAATAAAGCACAAAAAGCATTGAATGATACTGTTATTACAAGTGACGTATCAGGGACAGTTGTTGAAGTTAATAGTGATATTGATCCAGCTTCAAAAACTAGTCAAGTACTTGTCCATGTAGCAACTGAAGGTAAACTCCAAGTACAAGGAACGATGAGTGAGTATGATTTGGCTAATGTAAAAAAAGACCAGGCTGTTAAAATAAAATCTAAGGTCTATCCTGACAAGGAATGGGAAGGTAAAATTTCATATATCTCAAATTATCCAGAAGCAGAAGCAAACAACAATGACTCTAATAACGGCTCTAGTGCTGTAAATTATAAATATAAAGTAGATATTACTAGCCCTCTCGATGCATTAAAACAAGGTTTTACTGTATCAGTTGAAGTAGTTAATGGAGATAAGCACCTTATTGTTCCTACAAGTTCTGTGACAAACAAAGATAATAAACACTTTGTTTGGGTATACAATGATTCTAATCGTAAAATTTCCAAAGTGAAGTCAAAATTGGTAAAGCTGATGCTAAGACACAAGAAATTTTATCAGGTTTGAAAGCAGGACAAATCGTAGTTACTAATCCAAGTAAAGCTTTCAAGGATGGGCAAAAAATTGATAATATTGAATCAATCGATCTTAAGTCTAATAAGAAATCAGAGGTGAAA

SEQ ID NO: 20808 - protein, 414 aa, Streptococcus agalactiae
  VARIANT 8: Xaa = Any Amino Acid
MSKRQNLXISKKGAIISGLSVALIVAVGGFLWVQSQPNKSAVKTNYKVFNVREGSVSSSTLLTGKAKANQEQYVYFDANKGNRATVTVKVGDKITAGQQLVQYDTTTAQAAYDTANRQLNKVARQINNLKTTGSLPAMESSDQSSSSSQGQGTQSTSGATNRLQQNYQSQANASYNQQLQDLNDAYADAQAEVNKAQKALNDTVITSDVSGTVVEVNSDIDPASKTSQVLVHVATEGKLQVQGTMSEYDLANVKKDQAVKIKSKVYPDKEWEGKISYISNYPEAEANNNDSNNGSSAVNYKYKVDITSPLDALKQGFTVSVEVVNGDKHLIVPTSSVTNKDNKHFVWVYNDSNRKISKVEVKIGKADAKTQEILSGLKAGQIVVTNPSKAFKDGQKIDNIESIDLKSNKKSEVK

SEQ ID NO: 20809 - protein, 603 aa, Streptococcus agalactiae
TTGTATGATTTATCCTCAGTTACTAAAATCAACCCTTTTTACTTAGATAAATGTTTACATATTGTAGAGTTGTATGAAAACCTGAATAAAAGCCAATATAATGTAGATATTTACAAGGAAGCTAAAAGGTATGGTTTTTCGGATGACTATATTGCTAGTAGTTGGCAAATCTCTTTGATAGACATGTTAGAATATCGAAAAAAACATAGTGTCGCACCTGTTCTGAAGCAAGCCGAACAAAGTTCTGGTGTTCTAACTGGCCATCAAATTCAGTATTTTCGAAGCTATGATTGGCATTCAGACTACAGTTCTAGCGGTTGTCAAAAGGCTTTGATAATGGTAGACAAGGGTTATTCCCTAGTAAAATTAAATGAGTTAATTAAGCAAATCAAACAAACTCGTTTAGAATTATTAATTGTTACCAATCAACCTCTCCTCATAGAACAATTAAATGATACATCTATAATTTTTGACACTATAGGTATTGAGACCATATTAACAATTATGGGTATAGAAGAGGTGGAAGAAGTGTATTTATTGGGAGAAAGTCAAGCAGACATGTTTTCAAAAATGAAAAATTTTTCTATCTCTTGTCAGTCTATT

SEQ ID NO: 20810 - protein, 201 aa, Streptococcus agalactiae
MYDLSSVTKINPFYLDKCLHIVELYENLNKSQYNVDIYKEAKRYGFSDDYIASSWQISLIDMLEYRKKHSVAPVLKQAEQSSGVLTGHQIQYFRSYDWHSDYSSSGCQKALIMVDKGYSLVKLNELIKQIKQTRLELLIVTNQPLLIEQLNDTSIIFDTIGIETILTIMGIEEVEEVYLLGESQADMFSKMKNFSISCQSI

SEQ ID NO: 20811 - protein, 953 aa, Streptococcus agalactiae
ATGCTAAATACAAAGGATAAACAGCCTATTTTGCTTATTATTTTCGGACAGAAAATGAAAGAATATGACGATTTAATTAGATCAACTGTTGAGAGGCTATCTAAAAGGGATAGACCTGTTAGTATTCTTATCTCGAAGGAGCTAAACCATGTGATTCACCATTATGATGCACAATTTGAAAATCTTGAGACGCTTGTGGGGTATATAAATACACATGAAGATAGTTTGATTTACCCCCTTTGCTTAGATAAAAATCATGAGCTATTTCAAGAGTTTTTAGCGTGGCAGAGTCATTATTCAAGGCAGTATATCAGCGATAATTTATCAGAAAAAAGTGTTCTGGCAATAGACAATAATCAAGACTTTGTGCAAGTAGATTGTTTAATAATGAGAGACTCTTTGAATAATTGTTTATATGTTTCTGATTTAGAATATATTGAATCTAATAAAACAACTGGTAAGTCCCTAGCGATTGTACCAAGTCAAACTTTATCCGATGCTGCTAGGCAAACAATTCGAGATGTTGCATTTGATGTGTGTCGAAAGGCAAACATTATTGGAGTGTGTTATTTTAGTTTCTTAATAGATTTGAACAGTTTGGATTATCATATAATTAGCTTATCATCTGGTTTGTCTCATCAAAGCATTTTATTTGAGACTATTACGACCTATCCTGTTTTAGAGATAGCAACTAAATTGACAGTGGGATATACTTTTAGTCAACTGAAGCATTCTTATTACCCAAATACCTCTGCCTTTTTAGAGCCACAATTAGATTATGTAGCTGCCGTATCTTTTAGTTTTGAAAAAGTTGACTATATCTTTTTTGCTCGTAATATAGAGCAATTATTTTTAAATTTACTCGAAGCTAGCAGTCATGATCATTTTCCATTTCTGAGTGATATTAGCGAGGAAGATTTGATGTTTGCTTTGATTCAGAAAAAAGAATCGTC

SEQ ID NO: 20812 - protein, 318 aa, Streptococcus agalactiae
MLNTKDKQPILLIIFGQKMKEYDDLIRSTVERLSKRDRPVSILISKELNHVIHHYDAQFENLETLVGYINTHEDSLIYPLCLDKNHELFQEFLAWQSHYSRQYISDNLSEKSVLAIDNNQDFVQVDCLIMRDSLNNCLYVSDLEYIESNKTTGKSLAIVPSQTLSDAARQTIRDVAFDVCRKANIIGVCYFSFLIDLNSLDYHIISLSSGLSHQSILFETITTYPVLEIATKLTVGYTFSQLKHSYYPNTSAFLEPQLDYVAAVSFSFEKVDYIFFARNIEQLFLNLLEASSHDHFPFLSDISEEDLMFALIQKKEIV

SEQ ID NO: 20813 - protein, 1068 aa, Streptococcus agalactiae
ATGGCAAAAAAATTGTTAATTCTAGAGGATGGTACGGTTTTTGAAGGACTATCCTTTGGTTCATCTCTTGATGTAACTGGCGAATTAGTTTTTTGTACGGGGAATACCGGCTATCAGGAAATAATAACGAATCCTTCACATAATGGAAAAATTTTAGTTTTTACCTCACCGCTAATAGGAAATTATGGTATTCATCGCAGTTACTCTGAAGCCATTATTCCCACTTGTTTAGGAGTTGTTGTTGCAGAGTATTCCAGATGTGTAAGTAGCGATACTAGCAAGATGAATTTAGATGAATTTTTGAAAATGAAAAAGGTTCCTGCAATGTCGGGGGTCGATACAAGGTATTTGATGCAAGTTATTAAAGAAAAAGGATTTGTAAAAGCTACTTTAGCAGAAGCAGGTGATGTTTTATCACATTTACAAGATCAATTAATAGCGACAGTATTACCGACAAATAATGTGGAACAAGTTTCGACAAAAACAGCTTATCCGTCGCCTGCTAGCGGTCGAAATATTGTTGTACTTGATTTTGGCCTTAAACATTCTATTTTGAGAGAATTGTCTAAACGTCAGTGTGACGTGACTGTCATTCCCTACAATACGTCTTTAGAAGGTATTAAAAATCTATACCCAGAAGGTATCATATTATCTAATGGTCCGGGGAATCCAGAAAAGCTTCAGGAAATCTTAAACACTATTAAAGAATTACAAAAATCTGTTCCTATGTTAGGTATTGGTTTGGGGCACCAATTAATTGCCATGGCAAATGGTGCAGAAATTATGAGACTCCCAGTTGCTAAGAAGGGGACAAATTATCCCATGAGAGATATTGCTACGGGTCGTTTAGAAACAGTTAGTCAGTTTAATCATTTTACCGTTAACCGGCTAAATCTTCCGCATGATTTACTGGTAACACACGAAGGTTTGAATGATCAAGAGATTGTTGCTCTAAGGCACCGCTCATTTCCAGTGATGTCCGTGCAATTTTACCCAGAGGCTGCTCCAGGCCCTCATGATGTGACCTATTTTTTTGATGAATTTTTAGAAATGATTGGATCACGCGCT

SEQ ID NO: 20814 - protein, 356 aa, Streptococcus agalactiae
MAKKLLILEDGTVFEGLSFGSSLDVTGELVFCTGNTGYQEIITNPSHNGKILVFTSPLIGNYGIHRSYSEAIIPTCLGVVVAEYSRCVSSDTSKMNLDEFLKMKKVPAMSGVDTRYLMQVIKEKGFVKATLAEAGDVLSHLQDQLIATVLPTNNVEQVSTKTAYPSPASGRNIVVLDFGLKHSILRELSKRQCDVTVIPYNTSLEGIKNLYPEGIILSNGPGNPEKLQEILNTIKELQKSVPMLGIGLGHQLIAMANGAEIMRLPVAKKGTNYPMRDIATGRLETVSQFNHFTVNRLNLPHDLLVTHEGLNDQEIVALRHRSFPVMSVQFYPEAAPGPHDVTYFFDEFLEMIGSRA

SEQ ID NO: 20815 - protein, 363 aa, Streptococcus agalactiae
TTGAAGCAATTAGAAAATTTAGATATTCCCGTTGGAGAATTGGATACTAAACCTTTCCGTGATGATATGAAAGTTGAAGTTGACACCACAACTATGCCAGTTGACATCACTGATAAAGATATTATATTAATTGATGATGTTCTCTATACAGGTCGCACTATTCGAGCTGCTATTGATAATCTTGTTAGTTTGGGGCGTCCGAGTCGTGTTAGTTTAGCTGTATTAATTGACCGTGGGCATCGTGAACTACCCATTCGTGCAGATTATGTGGGGAAAAATATTCCAACAAGTCAATTTGAAGAAATTCTAGTTGAAGTGATGGAACATGATGGTTACGATCGTGTGAGTATTATTGATCCGAGT

SEQ ID NO: 20816 - protein, 121 aa, Streptococcus agalactiae
MKQLENLDIPVGELDTKPFRDDMKVEVDTTTMPVDITDKDIILIDDVLYTGRTIRAAIDNLVSLGRPSRVSLAVLIDRGHRELPIRADYVGKNIPTSQFEEILVEVMEHDGYDRVSIIDPS

SEQ ID NO: 20817 - protein, 167 aa, Streptococcus agalactiae
TTGAAGGGGCTCTTTTATCTTAGAGAGGATACTGCAATGAAAAGAAAAGAAATTATTGATGATGTGACCATGAAACGTGCTATTACACGTATTACCTACGAAATTATAGAACGTAACAAAAATTTAGATAATATTGTCTTAGCAGGCTAAAACAAGAGGTGTTTTTT

SEQ ID NO: 20818 - protein, 56 aa, Streptococcus agalactiae
MKGLFYLREDTAMKRKEIIDDVTMKRAITRITYEIIERNKNLDNIVLAGIKQEVFF

SEQ ID NO: 20819 - protein, 888 aa, Streptococcus agalactiae
ATGGAAATCACAATTAAAGTAGCAGGAGTTAGGCTAGATAAAGCTTTAGCTGATAATTCTGAACTGTCGCGTAGTCAAGCTAATGAAGAAATTAAAAAAGGGATTGTGTTAGTAAATGGACAAGTAAAAAAAGCGAAATATACTGTTCAAGAAGGAGATCGGATTACTTTTGATATTCCTAAAAAGGAAGTACTAGATTATCAAGCTGAAAATATCCCTTTAGATATTATCTATCAAGATGATGACGTTGCTGTGGTTAATAAGCCGCAAGGAATGGTTGTTCACCCTTCTGCAGGCCACAGTTCGGGCACCTTAGTTAACGCCTTGATGTATCATATTAAGGATTTATCATCAATTAATGGCGTTGTTCGCCCAGGAATCGTTCATCGTATTGATAAAGATACTTCTGGTTTATTGATGGTTGCAAAAAATGATAGAGCTCACCAAGTGTTGGCTGAAGAGTTAAAAGATAAAAAATCGCTTCGTAAATATTTAGCAATTGTGCATGGTAATTTACCAAATGATCAAGGTGTGATTGAGGCTCCGATTGGTAGAAGCGATAAAGATCGTAAGAAGCAAGCCGTGACTGCTAAAGGTAAGCCAGCAGTAACTCGTTTTCATGTTTTAGAACGTTTTGGTGATTATACCTTAGTTGAATTGTCATTGGAGACAGGTCGAACGCACCAAATTCGGGTTCATATGGCTTATATTGGCCATCCTCTAGCCGGTGATCCTGTCTACGGTCCCCGCAAGACTTTAGGGGGTAAAGGACAGTTTTTGCATGCACAAACACTAGGTTTTACGCACCCTAGTAACGGAGAGAATTTGATTTTTTCAGTAGAGGTTCCGGAAATTTTTCAGACAACCTTAGACAAGTTGAGAAAAAAT

SEQ ID NO: 20820 - protein, 296 aa, Streptococcus agalactiae
MEITIKVAGVRLDKALADNSELSRSQANEEIKKGIVLVNGQVKKAKYTVQEGDRITFDIPKKEVLDYQAENIPLDIIYQDDDVAVVNKPQGMVVHPSAGHSSGTLVNALMYHIKDLSSINGVVRPGIVHRIDKDTSGLLMVAKNDRAHQVLAEELKDKKSLRKYLAIVHGNLPNDQGVIEAPIGRSDKDRKKQAVTAKGKPAVTRFHVLERFGDYTLVELSLETGRTHQIRVHMAYIGHPLAGDPVYGPRKTLGGKGQFLHAQTLGFTHPSNGENLIFSVEVPEIFQTTLDKLRKN

SEQ ID NO: 20821 - protein, 462 aa, Streptococcus agalactiae
ATGAGAAAGATTATTATACCAATAATAACTATTTTGTTGATTGCTTTAGATCAACTATCTAAGTTATGGATTGTTAAACATATTGAACTAAACCAAATTAAGGAATTCATTCCAAATATCGTTAGTCTAACTTATCTGAGAAATTATGGTGCTGCATTTTCTATTTTGCAAAATCAACAATGGCTTTTTACCTTAATTACAATCTTTGTTGTTGGTGTTGCTATTATTTATTTGATGAAACATATTAATGGAAGTTATTGGTTATTAATTTCTCTAACCTTAATCATCTCTGGTGGATTAGGAAACTTTATAGATCGCTTAAGATTAGGTTATGTCGTTGATATGGTGCATTTAGATTTTATTAATTTTGCTATCTTTAATGTAGCAGACTCATATCTGACAATTGGTATTATTTGCTTAATGATTGCACTTTGGAAAGAGGAAAGTAATGGAAATCACAAT

SEQ ID NO: 20822 - protein, 154 aa, Streptococcus agalactiae; identical to SEQ ID NO: 2550

SEQ ID NO: 20823 - protein, 903 aa, Streptococcus agalactiae
ATGAATATTCAACAACTGCGTTATGTTGTTGCTATCGCAAATAGTGGTACTTTTCGTGAAGCAGCTGCAAAACTATTTGTTAGTCAGCCAAGTTTATCTGTTGCCGTTCGTGATTTGGAAACAGAATTAGGGTTTCAGATTTTTACGCGTACAACTACTGGTGCAGTGTTGACCAATCAAGGCATGACTTTTTATGAGAATGCTTTAGAAGTTGTGAAAAGCTTTGATTCATTCGAAAAACAGTTTTCGCAATCTGAAGCTACAGAGCAAGAATTCTCAATAGCAAGTCAACATTATGATTTTCTACCTCCTTTAATCACAGCGTTTTCAAAATGTAATGATAATTTTAGCTATTTCCGTATTTTCGAATCAACAACAATACGTATCTTAGATGAAGTTGCTCAAGGGAATAGCGAAATAGGTATCATTTATATCAATAGTCAAAATAAAAAAGGTCTACTTCAGCGGTTGGACAAATTGGGGTTAGAGTTTGTAGAGCTTATTCCTTTTAAAACTCATATTTATCTTGGGAAAGACCATCCCTTGGCTAGTAAAACATCTCTGATAATGACAGATTTAGAAGGATTACCAACCGTACGTTTTACACAGGATAGAGATGATTATCGGTATTACTCGGAGAATTTTGTGGAAGTACTTGATAGTTCTGTTACCTATAATGTTACTGATAGAGCAACATTAAATGGTATTTTAGAAAGAACCCAAGCTTATGCGACGGGCTCAGGATTCTTGGATAGCCGCAGTGTGAATGGTATCACTGTTATTCCATTAGAAGATCATCTAGATAACCAAATGATTTATATCAAACGAAAAGATCGTAATTTATCTCAGATGGCTTTAAAATTTGTTGCTGTTATGGAAGAGTATTTTAAGGGATTTAATTCA

SEQ ID NO: 20824 - protein, 301 aa, Streptococcus agalactiae; identical to SEQ ID NO: 2552

SEQ ID NO: 20825 - protein, 291 aa, Streptococcus agalactiae; identical to SEQ ID NO: 7127

SEQ ID NO: 20826 - protein, 97 aa, Streptococcus agalactiae; identical to SEQ ID NO: 2554

SEQ ID NO: 20827 - protein, 336 aa, Streptococcus agalactiae; identical to SEQ ID NO: 11389

SEQ ID NO: 20828 - protein, 112 aa, Streptococcus agalactiae; identical to SEQ ID NO: 11390

SEQ ID NO: 20829 - protein, 312 aa, Streptococcus agalactiae
ATGAGCACATACGCAATCATCAAAACTGGTGGTAAACAAGTTAAAGTTGAAGTAGGACAAGCTATCTACGTTGAAAAACTTGACGTTGAAGCAGGAGCAGAAGTTACATTTAACGAAGTTGTTCTTGTTGGTGGTGAAACAACTAAAGTTGGTACTCCAGTTGTTGAAGGAGCTACTGTTGTTGGTACTGTTGAAAAACAAGGCAAACAAAAGAAAGTTGTTTCTTACAAATATAAACCTAAAAAAGGTAGCCACCGTAAACAAGGTCACCGTCAACCTTATACAAAAGTTGTTATCAACGCAATCAACGCT

SEQ ID NO: 20830 - protein, 104 aa, Streptococcus agalactiae; identical to SEQ ID NO: 2558

SEQ ID NO: 20831 - protein, 1176 aa, Streptococcus agalactiae
ATGGCAAGAATCCCTTATCAGAAAACACTTATTTTTTGTGTAGCCGTTATTATTGCTATTTTTATTTTGGGATTATCTAAGGATTTAGCACAATCTAAAGGACAAAAGGTTGCAAATAATAATACTGTAAAAACAGCACGTGTGGTTGCAAACGGAGATATTTTGCTGCACGATGTACTATATGCCAGTGCGCGCCAACCCGACGGCACTTATAATTTTACTCCTTATTTTAAAGAGGTAAAATCTTGGATTGAGAGCGCTGATTTAGCGATTGGTGATTATGAAGGGACGATTAGTTCAGAATATCCTTTAGCGGGCTATCCTTTATTTAATGCTCCTAATGAGATTGCAACTACTATGAAAGAAACTGGATATGATGTCGTTGACTTAGCACATAATCATATTCTGGATTCACAACTGGCAGGTGCTATCAATACTGTCAAGACTTTTAATCGTCTGGGATTGGATACTATTGGGGTTTATTTAAAGGATAGAAATAAAGAAGATATCTTAATTAAGCGTGTAAATGGTATTAAAATTGCTATTTTAGGTTATTCGTATGGCTACAATGGTATGGAAGCTAATGTTTCAAAGAGTGACTATGAAAAACATATGTCTGATTTAGATACTAAAAAGATTAAGCAAGATATTAAAAAGGCTGAAAAAGAAGCAGATATCACCATTGTCATGCCACAGATGGGGATAGAATGTCAAAAAAAACCTACTACAGAACAAGTAATGCTTTATCATAGTATGATTAAATGGGGGGCAGATATTATATTCGGAGGACACCCTCACGTTGTTGAACCGTCTGAAGTGATAAAAAAAGATGGCCAGAAAAAATTTATTATTTACTCTATGGGAAATTTTATTTCAAATCAGCGTTTAGAAACGGTTGATGATATCTGGACAGAAAGAGGATTATTAATGGATGTAACCATAGAGAAAAAAGGTCAAAAAACAGTAATTAAAAAAGTTAAGGCGCATCCAACACTAGTAGAAGCAAAAGCAAATGGCCGTTATGTTGAAGAAGGCTTTCCAGCTTATGATTATAGGACGCTAGTTTTAGAGGATTATATTGAAGGTGGTAAGAAACGTTCTACGATTGATCAGACTATGAAAGATAAAGTTGATAAAGCATATAAGGAGATGAATGAGTTAGTTAATTTAAAGTGG

SEQ ID NO: 20832 - protein, 392 aa, Streptococcus agalactiae
MARIPYQKTLIFCVAVIIAIFILGLSKDLAQSKGQKVANNNTVKTARVVANGDILLHDVLYASARQPDGTYNFTPYFKEVKSWIESADLAIGDYEGTISSEYPLAGYPLFNAPNEIATTMKETGYDVVDLAHNHILDSQLAGAINTVKTFNRLGLDTIGVYLKDRNKEDILIKRVNGIKIAILGYSYGYNGMEANVSKSDYEKHMSDLDTKKIKQDIKKAEKEADITIVMPQMGIECQKKPTTEQVMLYHSMIKWGADIIFGGHPHVVEPSEVIKKDGQKKFIIYSMGNFISNQRLETVDDIWTERGLLMDVTIEKKGQKTVIKKVKAHPTLVEAKANGRYVEEGFPAYDYRTLVLEDYIEGGKKRSTIDQTMKDKVDKAYKEMNELVNLKW

SEQ ID NO: 20833 - protein, 387 aa, Streptococcus agalactiae; identical to SEQ ID NO: 6711

SEQ ID NO: 20834 - protein, 129 aa, Streptococcus agalactiae; identical to SEQ ID NO: 882

SEQ ID NO: 20835 - protein, 381 aa, Streptococcus agalactiae; identical to SEQ ID NO: 6713

SEQ ID NO: 20836 - protein, 127 aa, Streptococcus agalactiae; identical to SEQ ID NO: 880

SEQ ID NO: 20837 - protein, 1152 aa, Streptococcus agalactiae
ATGCGCTTCATCAATAAGTTAAAAAATAATATGGAGCATGTACTTTCCATTTATCCAGATGTTTCAGTAAAAACAGATCGTGATAGAGGACATGTATATCTCAATGGTACAGATTATCATGAAGTTGCAGAGTCCTTAAAAGAGATTTTTGGTATCCAAGCCTTTTCTCCATCTTTTAAAGTAGAAAAAAATGTTGATACATTGGTAAAAGCTGTCCAGGAAATTATGACTTCCATTTATAAAGATGGGATGACTTTTAAAATTACCGCAAAACGTAGTGACCACTCATTTGAATTGGATAGCCGTGCTCTAAATCATACTTTAGGAGACGCTGTTTTTTCAGTCTTGCCAAATATTAAGGCTCAGATGAAGCAACCAGATATCAATCTTAAAGTCGAGATACGAGATGAGGCTGCTTATATTTCATATGAGGATATTAGGGGTGCAGGAGGATTACCGGTAGGAACATCTGGAAAAGGGATGCTGATGTTGTCTGGTGGGATTGATTCTCCCGTGGCAGGTTACCTAGCGTTAAAACGTGGTGTAGATATAGAAGCAGTCCATTTTGCAAGTCCTCCTTATACTAGCCCAGGTGCATTGAAAAAAGCACATGATTTAACACGTAAATTGACAAAATTTGGTGGTAATATTCAATTTATTGAAGTTCCATTTACAGAAATTCAAGAGGAAATTAAGGAAAAAGCTCCTGAAGCCTACTTGATGACGTTAACACGTAGGTTTATGATGCGTATTACAGATCGTATTCGTGAGAACCGAAATGGTCTTGTTATTATTAACGGTGAAAGTTTAGGGCAGGTGGCAAGCCAAACGCTAGAAAGTATGCAAGCTATTAATGCTGTCACTGCAACACCAATTATTCGTCCTGTGGTCACGATGGATAAGCTAGAAATTATTGATATTGCTCAAAAAATAGATACTTTTGATATTTCAATTCAACCATTTGAGGATTGCTGTACAATTTTTGCACCAGATCGCCCAAAAACTAACCCTAAAATTAAGAATACAGAACAGTATGAGAAACGTATGGATGTAGAAGGTCTGGTAGAGAGGGCAGTTGCAGGGATTATGGTAACTACTATTCAACCTCAAGCAGATAGTGATGATGTTGATGACTTGATTGACGATTTATTA

SEQ ID NO: 20838 - protein, 384 aa, Streptococcus agalactiae
MRFINKLKNNMEHVLSIYPDVSVKTDRDRGHVYLNGTDYHEVAESLKEIFGIQAFSPSFKVEKNVDTLVKAVQEIMTSIYKDGMTFKITAKRSDHSFELDSRALNHTLGDAVFSVLPNIKAQMKQPDINLKVEIRDEAAYISYEDIRGAGGLPVGTSGKGMLMLSGGIDSPVAGYLALKRGVDIEAVHFASPPYTSPGALKKAHDLTRKLTKFGGNIQFIEVPFTEIQEEIKEKAPEAYLMTLTRRFMMRITDRIRENRNGLVIINGESLGQVASQTLESMQAINAVTATPIIRPVVTMDKLEIIDIAQKIDTFDISIQPFEDCCTIFAPDRPKTNPKIKNTEQYEKRMDVEGLVERAVAGIMVTTIQPQADSDDVDDLIDDLL

SEQ ID NO: 20839 - protein, 1143 aa, Streptococcus agalactiae
ATGATTTATTTTGATAATTCGGCAACTACTATTCCCTATCCAGAAGTTTTAAGGACTTATCAAGAAGTAGCTAGTAAAATCTATGGAAACCCCTCAAGTTTACATGAGCTAGGAACAACATCTTCTCGGATTTTAGAGGCTAGCCGTAAACAAATTGCTAGTTTACTTGAGCTTAAAGCAAATGAAATTTTCTTTACATCTGGTGGTACAGAGGCCGATAATTGGGTTATTAAGGGCCTTGCGTTTGAGAAACAACATTTTGGAAATCATATTATTGTTTCTGATATCGAACATCCAGCTATTAAAGAGTCTGCTAAATGGCTTGGAGAGTATGGATTTGAGATTGATTATGCGCCAGTAGATGATAAAGGATTTGTAGACGTAGAAGCACTGGTCAAATTGATTAAACCAGAAACGATTCTTATTTCAATTATGGCAATAAACAATGAAATTGGTTCTATTCAGCCAATAAAAGCTATTTCAGACTTGTTGTCAGATAAACCTACTATATCGTTTCATGTTGATGCTGTTCAAGCAATAGGTAAGATACCGACTAAAGATTATTTGACTGAGCGAGTTGATTTTGCATCTTTTTCTAGTCATAAATTTCACGGCGTTCGTGGGGTTGGCTTTCTATATATTAAAGAAGGAAAACGTATTTCACCATTACTAACAGGTGGTGGACAAGAATCTGATTTACGTTCAACTACTGAGAATGTGGCAGGGATTGCAGCTACTGCTAAAGCTTTACGAATGGTTATGGACAAGGAAGTAGTAGCTATTCCTAAAATAAGTAAAATGAAAACCATTATTCATGATGAATTAGCCAAATATGAGGATATTACGTTATTTTCGGGTAAGGAAGGTTTTTCACCTAACATTATCACGTTTGGTATCAAGGGTGTCCGAGGAGAAGTTCTTGTCCATGCCTTTGAGGGACATGATATTTTTATCTCGACAACTAGCGCTTGCTCTTCTAAAGCAGGTAAACCAGCAGGAACTCTTATAGCAATGGGAATTTCAACTAAGTTAGCCCAAACTGCTGTACGTATCAGCTTAGATGATGACAATGATATGGGACAAGTAGAGCAATTTTTAACTATTTTTAAACAGGTTTATGAAAAAACCAAGAAAGTTAGAGGA

SEQ ID NO: 20840 - protein, 381 aa, Streptococcus agalactiae
MIYFDNSATTIPYPEVLRTYQEVASKIYGNPSSLHELGTTSSRILEASRKQIASLLELKANEIFFTSGGTEADNWVIKGLAFEKQHFGNHIIVSDIEHPAIKESAKWLGEYGFEIDYAPVDDKGFVDVEALVKLIKPETILISIMAINNEIGSIQPIKAISDLLSDKPTISFHVDAVQAIGKIPTKDYLTERVDFASFSSHKFHGVRGVGFLYIKEGKRISPLLTGGGQESDLRSTTENVAGIAATAKALRMVMDKEVVAIPKISKMKTIIHDELAKYEDITLFSGKEGFSPNIITFGIKGVRGEVLVHAFEGHDIFISTTSACSSKAGKPAGTLIAMGISTKLAQTAVRISLDDDNDMGQVEQFLTIFKQVYEKTKKVRG

SEQ ID NO: 20841 - protein, 450 aa, Streptococcus agalactiae
ATGTCAAAAGGATATTCAAGACAACAGAAAAAGTCTACTAAGACTAATACTGATTCAACTCAATCACCCGCTAAGCATATAAAAACAGGTTTTTCTGCACTTCAAAAAACAATTGCATTAGTCGGTAGTGTTTTAAGTATTATCGTTGCCTCTATTACTATTACTAATGCGATTAATAATCACAAAGATTCTAGTAAGACTGATTCTTCTACTTCAAAAACCGTCATTATAAGAGAGAGTGGACAAAATTCTAGTAACCAAGTTTCTACTGAAAAAGATGAGACAAGGGCATCATCCAACCAAACACTAGAAAATTCCTCTGCTAGTAGTACTCCGAGTAGCAGTTCAAATTCTGCTGCCAATAACGATCAAACATCATCTAGTACTAACAATGATCAAACAAATAATACTACTACCGATACCTCAACTATTGAAAATACAACAACACCT

SEQ ID NO: 20842 - protein, 150 aa, Streptococcus agalactiae
MSKGYSRQQKKSTKTNTDSTQSPAKHIKTGFSALQKTIALVGSVLSIIVASITITNAINNHKDSSKTDSSTSKTVIIRESGQNSSNQVSTEKDETRASSNQTLENSSASSTPSSSSNSAANNDQTSSSTNNDQTNNTTTDTSTIENTTTP

SEQ ID NO: 20843 - protein, 836 aa, Streptococcus agalactiae
TTGATTGTTGGGGCGGGCTATATCGCGGCGGAATTGCTGGAGTGGTTAATGAATTAGGCGTTGAAACCCATCTTGCATTTAGAAAAGACCATATTCTACGCGGATTTGATGACATGGTAACAAGTGAGGTTATGGCTGAAATGGAGAAATCAGGTATCTCTTTACATGCTAACCATGTACCTAAATCTCTTAAACGCGATGAAGGTGGCAAGTTGATTTTTGAAGCTGAAAATGGGAAAACGCTTGTCGTTGATCGTGTAATATGGGCTATCGGCCGTGGACCAAATGTAGACATGGGACTTGAAAATACCGATATTGTTTTAAATGATAAAGGTTATATCAAAACAGATGAATTTGAGAATACTTCTGTAGATGGCGTGTATGCTATTGGAGATGTTAATGGGAAAATTGCCTTGACACCGGTAGCAATTGCAGCAGGTCGTCGCTTATCAGAAAGACTTTTTAATCATAAAGATAACGAAAAATTAGATTACCATAATGTACCTTCAGTTATTTTTACTCACCCTGTAATTGGGACGGTAGGACTTTCAGAAGCAGCAGCTATCGAGCAATTTGGAAAAGATAATATCAAAGTCTATACATCAACTTTTACCTCTATGTATACGGCTGTTACCACTAATCGCCAAGCAGTTAAGATGAAGCTCGTAACCCTAGGAAAAGAGGAAAAAGTTATTGGGCTTCATGGTGTTGGTTATGGTATTGATGAAATGATTCAAGGTTTTTCAGTTGCTATCAAAATGGGGGCTACTAAAGCAGACTTTGATGATACTGTTGCTATTCACCCAACTGGATCTGAGGAATTTGTTACAATGCGC

SEQ ID NO: 20844 - protein, 279 aa, Streptococcus agalactiae
MIVGAGYIAAELAGVVNELGVETHLAFRKDHILRGFDDMVTSEVMAEMEKSGISLHANHVPKSLKRDEGGKLIFEAENGKTLVVDRVIWAIGRGPNVDMGLENTDIVLNDKGYIKTDEFENTSVDGVYAIGDVNGKIALTPVAIAAGRRLSERLFNHKDNEKLDYHNVPSVIFTHPVIGTVGLSEAAAIEQFGKDNIKVYTSTFTSMYTAVTTNRQAVKMKLVTLGKEEKVIGLHGVGYGIDEMIQGFSVAIKMGATKADFDDTVAIHPTGSEEFVTMR

SEQ ID NO: 20845 - protein, 326 aa, Streptococcus agalactiae
ATGTCAAAGCAATATGATTATATCGTTATTGGTGGAGGTAGTGCAGGCAGTGGTACCGCTAATAGGGCAGCTATGTATGGAGCAAAAGTTCTGTTAATTGAAGGTGGACAAGTAGGTGGAACTTGTGTTAACTTAGGTTGTGTACCGAAGAAAATCATGTGGTATGGTGCACAAGTTTCTGAGACACTCCATAAGTATAGTTCAGGTTATGGTTTTGAAGTCAATAATCTTAATTTTGATTTACTACTCTAAAAGCTAATCGCGATGCTTACGTGCAGCGGTCTAGACAGTCGTATGCCACTAATTTTGAGCGTAATGGGNNNNNT

SEQ ID NO: 20846 - protein, 109 aa, Streptococcus agalactiae
  VARIANT 81, 108, 109: Xaa = Any Amino Acid
MSKQYDYIVIGGGSAGSGTANRAAMYGAKVLLIEGGQVGGTCVNLGCVPKKIMWYGAQVSETLHKYSSGYGFEVNNLNFDXTTLKANRDAYVQRSRQSYATNFERNGXX

SEQ ID NO: 20847 - protein, 333 aa, Streptococcus agalactiae
ATGGCTAATGTATATGATTTAGCAAATGAATTAGAACGTGCTGTTCGTGCTTTACCAGAATACCAAGCAGTTTTAACTGCAAAAGCAGCTATTGAAAATGATGCAGATGCACAAGTGCTTTGGCAAGACTTTTTGGCTACCCAATCAAAAGTTCAAGAAATGATGCAATCTGGCCAAATGCCAAGTCAAGAAGAACAAGATGAAATGTCTAAACTTGGGGAAAAAATTGAATCCAATGACCTTTTAAAAGTTTATTTTGACCAACAACAACGGTTGTCTGTCTATATGTCTGATATCGAAAAAATTGTCTTTGCACCCATGCAGGACTTAATG

SEQ ID NO: 20848 - protein, 111 aa, Streptococcus agalactiae; identical to SEQ ID NO: 16028

SEQ ID NO: 20849 - protein, 348 aa, Streptococcus agalactiae
ATGGACTCCATATCATGGACAAAGGACCAAGGTTATATACGTCAGTCAAATAATTTAGGCGGTTTTGAAGGCGGTATGACTAATGGAGAGCCTATTGTCGTTAGGGGAGTAATGAAGCCAATTCCTACGCTTTACAAGCCACTAATGTCAGTTGATATTGATACTCACGAGCCTTATAGAGCTACAGTGGAACGTTCTGATCCCACGGCACTTCCGGCTGCAGGTGTCGTTATGGAAGCTGTAGTAGCCACCGTCCTGGTGACAGAAGTGCTAGAAAAATTTTCTTCAGACAACATGTATGAACTAAAAGAAGCTGTAAAACTATATCGCAATTATGTTAATCATTTT

SEQ ID NO: 20850 - protein, 116 aa, Streptococcus agalactiae
MDSISWTKDQGYIRQSNNLGGFEGGMTNGEPIVVRGVMKPIPTLYKPLMSVDIDTHEPYRATVERSDPTALPAAGVVMEAVVATVLVTEVLEKFSSDNMYELKEAVKLYRNYVNHF

SEQ ID NO: 20851 - protein, 775 aa, Streptococcus agalactiae
ATGAGATATTTAACTGCTGGTGAGTCACATGGACCGAGTTTAACAGCTATTATCGAAGGGATTCCTGCGGGACTGAAATTATCTGCTAAAGATATTAATGAAGATTTAAAACGCCGCCAAGGTGGTTATGGTCGTGGGAATCGAATGAAAATTGAAACTGATCAAGTGATCATTAGTTCTGGTGTGCGCCATGGAAAAACCTTGGGTTCACCTATTACACTGACAGTAACTAATAAGGATCATAGCAAATGGCTGGACATCATGTCAGTCGAAGACATTGAAGAGCGTCTAAAGCAAAAACGTCGTATTAAGCATCCTAGACCTGGGCACGCAGATTTAGTAGGTGGAATCAAATACCGATTTGATGATTTGAGAAATGCTTTAGAGCGTTCTTCGGCTCGTGAGACCACAATGCGAGTAGCTATTGGTGCGATTGCTAAACGTATTTTGAAAGAAATTGGTATCGAAATTGCCAACCATATTGTAGTGTTCGGTGGCAAGGAGATTACTGTCCCTGATAAGCTAACAGTTCAACAAATCAAAGTGTTATCTAGTCAATCGCAAGTAGCTATCGTCAATCCATCATTTGAACAAGAAATTAAGGATTATATTGACAGTGTGAAAAAGGCTGGAGATACTATCGGAGGAGTGATTGAAACTATCGTTGGAGAGTTCCCGTTGGTTTAGGCTCTTATGTACACTGGGATAGAAAGTTAGATGCTAAGATAGCGCAAGCAGTTGTATCTATCAATGCTTAAAGGTGTTGAATTTGGTC

SEQ ID NO: 20852 - protein, 259 aa, Streptococcus agalactiae
  VARIANT 224: Xaa = Any Amino Acid
MRYLTAGESHGPSLTAIIEGIPAGLKLSAKDINEDLKRRQGGYGRGNRMKIETDQVIISSGVRHGKTLGSPITLTVTNKDHSKWLDIMSVEDIEERLKQKRRIKHPRPGHADLVGGIKYRFDDLRNALERSSARETTMRVAIGAIAKRILKEIGIEIANHIVVFGGKEITVPDKLTVQQIKVLSSQSQVAIVNPSFEQEIKDYIDSVKKAGDTIGGVIETIVGXVPVGLGSYVHWDRKLDAKIAQAVVSINALKVLNLV

SEQ ID NO: 20853 - protein, 1065 aa, Streptococcus agalactiae
ATGCAGGTTGAAGTTGACTTACCGAATCACCCTTATCATATTAAAATTGAAGAAGGATGTTTTTCTGAGGCTGGTGACTGGGTATCACATTTATGGCAGAAACAAATGATAACTATTATCACAGACAGTAACGTAGAAATATTATACGGGGAGTCGCTTGTCAACCAGTTAAAAAAACAAGGTTTTACAGTACATGTTTTTAGTTTTGCTGCGGGTGAAGCTAGTAAAACTTTGGAAGTTGCTAATCGTATTTATGCTTTTTTAGCAAAGCATCATATGACCAGAAGCGATGGGATCATTGCACTTGGTGGAGGCGTCGTCGGAGATTTAGCAGCGTTTGTGGCTTCTACTTATATGCGGGGAATACATTTTCTTCAAATTCCAACTAGTTTAACAGCACAGGTTGATTCTTCCATTGGCGGAAAAACAGGAGTCAACACTTCATTCGCTAAAAATATGGTAGGTACTTTTGCACAACCTGATGGTGTACTGATAGATCCTGTTACTCTAAAAACATTGGGCAATCGTGAATTAGTTGAAGGTATGGGAGAAGTCATCAAATATGGCTTGATTGATGATATAAAACTCTGGCATATTTTAGAAGAGATGGATGGGACTATTGATAGTATCCTTGATAATGCATTAGCTATTATTTATCACTCTTGTCAAGTTAAACGAAAGCATGTTTTAGCTGATCAATATGATAAAGGGTTAAGGATGCATTTGAATTTTGGCCACACTATCGGTCATGCTATCGAAGTACATGCTGGCTATGGAGAAATAATGCATGGAGAAGCTGTTGCAATTGGAATGATCCAGCTTTCTCGTGTGGCTGAGCGTAAAAATCTTATGCCAAGAGGTATCAGTCAAGATATTTATAATATGTGTTTAAAATTTGGCCTTCCGGTCCACTATGCGGAATGGGATAAGGACGTCTTATTTGACATATTGAGTCATGATAAAAAAACAAGTGGACAATTTATTAAAATTGTTATACTGCCTCAATTAGGTAGTGCAACAGTCCACCAAATACCTTTAGAAGAAATGAGAGATTATTTGGAGAAA

SEQ ID NO: 20854 - protein, 355 aa, Streptococcus agalactiae
MQVEVDLPNHPYHIKIEEGCFSEAGDWVSHLWQKQMITIITDSNVEILYGESLVNQLKKQGFTVHVFSFAAGEASKTLEVANRIYAFLAKHHMTRSDGIIALGGGVVGDLAAFVASTYMRGIHFLQIPTSLTAQVDSSIGGKTGVNTSFAKNMVGTFAQPDGVLIDPVTLKTLGNRELVEGMGEVIKYGLIDDIKLWHILEEMDGTIDSILDNALAIIYHSCQVKRKHVLADQYDKGLRMHLNFGHTIGHAIEVHAGYGEIMHGEAVAIGMIQLSRVAERKNLMPRGISQDIYNMCLKFGLPVHYAEWDKDVLFDILSHDKKTSGQFIKIVILPQLGSATVHQIPLEEMRDYLEK

SEQ ID NO: 20855 - protein, 654 aa, Streptococcus agalactiae; identical to SEQ ID NO: 16033

SEQ ID NO: 20856 - protein, 218 aa, Streptococcus agalactiae; identical to SEQ ID NO: 2578

SEQ ID NO: 20857 - protein, 1155 aa, Streptococcus agalactiae
ATGAATAAACTTAAAGTGAATTCTGTCGTTGAAAGAAAAATCAAATCAGGTGCTCAGTTACTGGAAAAAAAAGATTTTGATACCAGTTTAGTTAACCAGTTGGTTCAACTTTTTTCACAGTCAAATCAATTCTTAGGGATGGCCTATCTTTCACCACAAAATAAAGGTATTGGTTGGTTACTATCAAGACAAGTTTTTGATTTTAACCATGATTACTTTGTATCGCTATTCGAAAAATCTAGAAAGAAGCGTCAAAAATTTGAAAAATCTAGCCAAACAACAGCCTACCGCTTGTTTAATCAGGATGGAGATAACTTTGGTGGCCTAACTATAGATTTTTATAGTGACTATGCTCTTTTTTCGTGGTACAATGAATTTGTTTATACTAATCGACAAATGATTGTTGCAGCCTTTAAGCAGGTCTATCCTAATATTAAAGGGGCATATGAAAAAATTCGTTTCAAAGGTTTAGACTTTGAAAGTGCTCATTTGTACGGTCAAGAGGCTCCTGAATCATTTTTGATTTTAGAAAATAATATCAAATATAGTGTCTTTTTGAATGATGGATTAATGACAGGTATTTTCCTTGACCAACATGATGTCAGAAAAGCCTTAGCAACTAATCTATCAGAAGGTAAAAAAGTTCTAAATATGTTTTCATACACTGCGGCTTTTTCTGTAGCTGCAGCTGTTGGAGGAGCATTAGAGACAACTTCTGTTGATTTAGCAAAACGCTCGCGTGAACTTTCAAAAGCACACTTTGATGCTAATCAGATTGTCACAGATAACCATCGATTTATCGTTATGGATGTTTTTGAATATTATAAGTATGCCAAAAGAAAACATCTATCATATGATGTGATTGTTATTGATCCACCAAGTTTTGCTCGAAATAAAAAACAAACTTTTTCGGTTACTAAAGATTACTATAAATTAATTGAACAAGCTTTAGATATTTTAACCCCTGGTGGAACTATCATTGCATCAACTAACGCAGCTAATCTAACCGTATCACAATTTAAGAAACAATTGGAAAAGGGGTTTGGTAAAGCTTCACATAATTACATTAGCTTACAGCAGTTGCCTGAAGATTTCACTGTAAATGATAAGGACCAACAAAGTAATTATTTAAAAGTATTTACAATAAAGGTAAAA

SEQ ID NO: 20858 - protein, 385 aa, Streptococcus agalactiae
MNKLKVNSVVERKIKSGAQLLEKKDFDTSLVNQLVQLFSQSNQFLGMAYLSPQNKGIGWLLSRQVFDFNHDYFVSLFEKSRKKRQKFEKSSQTTAYRLFNQDGDNFGGLTIDFYSDYALFSWYNEFVYTNRQMIVAAFKQVYPNIKGAYEKIRFKGLDFESAHLYGQEAPESFLILENNIKYSVFLNDGLMTGIFLDQHDVRKALATNLSEGKKVLNMFSYTAAFSVAAAVGGALETTSVDLAKRSRELSKAHFDANQIVTDNHRFIVMDVFEYYKYAKRKHLSYDVIVIDPPSFARNKKQTFSVTKDYYKLIEQALDILTPGGTIIASTNAANLTVSQFKKQLEKGFGKASHNYISLQQLPEDFTVNDKDQQSNYLKVFTIKVK

SEQ ID NO: 20859 - protein, 800 aa, Streptococcus agalactiae
GTGAAAAAAATTAAAGATTTTGCTAGCCGTGCGATCAATACACGACTCGGCTTTATTTTATTGTTAGTAGTTATATATTGGTTAAAGACAATTTGGGCTTACCATACTGATTTTAATTTAGGTTTAGAAAATTCCTATCAGTTGTTTTTGACCATTATAAACCCCATCCCCTTAGGACTCTTAATCATAGGTTTGGCCTTATATGTTAGGCGAACCAAAGCTTTTTATATTACCGCTTTTATCACCTATGCTATCGTAAATATCCTTCTAATTGCAAACGCAATCTACTATAGAGAGTTTTCCGATTTCATTACAGTTAGCGCCGTCTTGGCTAGTAGTAAAACTTCGGCTGGCCTTGGAGACTCTGCTCTTAATCTATTGAGAATTTGGGATCTTGTCTACGTTTTCGATTTCATTATCCTTATTTTCTTGTTTGCAACCAAGAAAATCCACTTAGATGATCGTCCATTTAATAAACGTGCTAGTTTTTCTATCACAGCTTTGTCTGGTTTACTCTTTTCAATTAACTTATTCTTAGCTGAAATTGATCGTCCAGAACTACTAAGTCGTGGTTTTTCAAACACCTATATTGTTAAAGCTCTTGGCTTGCCATCATTTTCGATTTATAGTGGTAATCAAACTTATCAAGCACAGAAAGAAAGAAATGGTGCCACTGCACAAGAATTGGCGACTGCCAAAAAATATGTAGCAGAGCATTATGCCAAACCCAATCCAGAATATTATGGTATCGGAAAAGGGCGAAACGTTATCATGATTCACTTGGAGAGTTTTTCAATTCT

SEQ ID NO: 20860 - protein, 267 aa, Streptococcus agalactiae
MKKIKDFASRAINTRLGFILLLVVIYWLKTIWAYHTDFNLGLENSYQLFLTIINPIPLGLLIIGLALYVRRTKAFYITAFITYAIVNILLIANAIYYREFSDFITVSAVLASSKTSAGLGDSALNLLRIWDLVYVFDFIILIFLFATKKIHLDDRPFNKRASFSITALSGLLFSINLFLAEIDRPELLSRGFSNTYIVKALGLPSFSIYSGNQTYQAQKERNGATAQELATAKKYVAEHYAKPNPEYYGIGKGRNVIMIHLESFSHS

SEQ ID NO: 20861 - protein, 1490 aa, Streptococcus agalactiae
TTGTCTGGTTTACTCTTTTCAATTAACTTATTCTTAGCTGAAATTGATCGTCCAGAACTACTAAGTCGTGGTTTTTCAAACACCTATATTGTTAAAGCTCTTGGCTTGCCATCATTTTCGATTTATAGTGGTAATCAAACTTATCAAGCACAGAAAGAAAGAAATGGTGCCACTGCACAAGAATTGGCGACTGCCAAAAAATATGTAGCAGAGCATTATGCCAAACCCAATCCAGAATATTATGGTATCGGAAAAGGGCGAAACGTTATCATGATTCACTTGGAGAGTTTTCAACAATTCTTGATTGACTATAAATTAAATGTTGATGGTAAAGAACATGTGGTTACTCCATTTATTAACAGCCTTTATCATTCGAAAGAGACTATCTCCTTCTCTAACTTCTTCCATCAAGTCAAAGCTGGTAAGACATCCGATGCTGAGACACTCATGGAAAACTCACTTTTTGGTCTAAGTAGTGGTTCATTCATGGTTAATTATGGTGGTGAAAATACACAATTTGCTGCTCCACATATCTTAGCTCAAAATGGAGGTTACAGTAGTGCGGTCTTCCACGGAAACGTCGGAACATTTTGGAATAGAAATAATGCTTACAAACAGTGGGGTTATGACTACTTCTTTGACTCTAGCTACTTCTCAAAACAAACCAAAGATAATTCATTCCAATACGGTTTGAATGATAAATATATGTTTGCTGACTCTATCAAATATCTAGAGCACATGCAACAACCGTTTTATACTAAATTTATTACAGTAAGTAACCATTACCCTTACACAAGTTTGAAGGGAGAGTCTGACGAAGAGGGATTCCCACTTGCAAAGACTAACGATGAAACGATTAACGGTTATTTCGCCACAGCAAACTACCTTGATACAGCTCTTAAATCATTTTTTGAATATCTAAAAGCTGCTGGTGTGTATGATAATTCTATTATTGTAATGTATGGGGATCACTACGGTATTTCTAATACACGCAATCCTAGCTTAGCTGAATTATTAGGTAAAGACCCTGAAACATGGTCTGAATACGACAACGCTATGTTACAACGTGTTCCATATATGATCCACATTCCTGGCTATTCAAAAGGTTTTATCAGTAATACATACGGTGGTGAGGTAGATAATTTACCAACCTTACTTCATATTCTAGGGATAGATACGTCTAAATATACTCAGTTAGGACAAGACTTATTATCTAAAGATAATAAACAAATGGTCGCTATGAGAACAACTGGTCAGTATATTACTCCTAAATACACTAACTATAGTGACATCTCTATTACACTGATTCAGGACAAGAAATCACAAATCCTGATGAAACAACTAAAGCTGAAATAAAAGCTATTCGAGATGCTACTAATAAACAATTATCTACAAGTGATTCGATTCAAACTGGAGAAAAACTACGATTTGATGAAAACAATGGTTTGAAAACTGTAGAAGTTGAAAAATTCGTATCCACNNNNNTTAAT

SEQ ID NO: 20862 - protein, 497 aa, Streptococcus agalactiae
  VARIANT 495, 496: Xaa = Any Amino Acid
MSGLLFSINLFLAEIDRPELLSRGFSNTYIVKALGLPSFSIYSGNQTYQAQKERNGATAQELATAKKYVAEHYAKPNPEYYGIGKGRNVIMIHLESFQQFLIDYKLNVDGKEHVVTPFINSLYHSKETISFSNFFHQVKAGKTSDAETLMENSLFGLSSGSFMVNYGGENTQFAAPHILAQNGGYSSAVFHGNVGTFWNRNNAYKQWGYDYFFDSSYFSKQTKDNSFQYGLNDKYMFADSIKYLEHMQQPFYTKFITVSNHYPYTSLKGESDEEGFPLAKTNDETINGYFATANYLDTALKSFFEYLKAAGVYDNSIIVMYGDHYGISNTRNPSLAELLGKDPETWSEYDNAMLQRVPYMIHIPGYSKGFISNTYGGEVDNLPTLLHILGIDTSKYTQLGQDLLSKDNKQMVAMRTTGQYITPKYTNYSGHLYYTDSGQEITNPDETTKAEIKAIRDATNKQLSTSDSIQTGEKLRFDENNGLKTVEVEKFVSTXXN

SEQ ID NO: 20863 - protein, 192 aa, Streptococcus agalactiae
ATGAAAGTTGCACTAATTCCAGAAAAATGTATTGCCTGCGGGCTTTGCCAAACATATTCAAATATTTTTGATTATCAAGATGATGGTATCGTTAAATTTTCCAATACAGATAACCTAGAAAAAGAGGTTCCAAATTCTGATCAAGATACTGTTTCAGTTAAATCATGTCCCACCAAAGCTCTTACGATTTTG

SEQ ID NO: 20864 - protein, 65 aa, Streptococcus agalactiae
  VARIANT 52, 53: Xaa = Any Amino Acid
MKVALIPEKCIACGLCQTYSNIFDYQDDGIVKFSNTDNLEKEVPNSDQDTVXXVKSCPTKALTIL

SEQ ID NO: 20865 - protein, 488 aa, Streptococcus agalactiae
ATGATAAAATTATTTGGGAAGATACGTTATCACTGGCACCTGAACTTTCTTGGGCTATTATTTATTGGTCAATAGCCATTGCACCAATTTTTATTGGTTTATCTCTGCTATATGAAAGAACTGAGATTCCGAGTCAGGTATTTGTTCTATTTGCCATCTTTATTGTTTTAGTGGGCATTGGATTTCATCGCTATTTTGTTATTGAAGAAGACGGATATCTTAGGATTGTATCTTTTAACTTTTTAAGACGATCTAAGTTTCCAATTGAAGATATTGCTAAAATTGAGGTCACTAAATCAAGTGTTACTATCAAATTTAATAATAACCATGAGCGTATTTTTTACATGCGAAAATGGCCTAAAAAATATTTTTTAGATGCACTAGCTATTGAACCTACATTTAAGGGAGAAGTGGAGCTTCTCGATAATTTGATTAAAATGGATTATTTTGAATGTTATCGCTACGATAAAAAAGCTCTTACAAAATCG

SEQ ID NO: 20866 - protein, 163 aa, Streptococcus agalactiae
  VARIANT 13: Xaa = Any Amino Acid
MIKLFGKIRYHWXPELSWAIIYWSIAIAPIFIGLSLLYERTEIPSQVFVLFAIFIVLVGIGFHRYFVIEEDGYLRIVSFNFLRRSKFPIEDIAKIEVTKSSVTIKFNNNHERIFYMRKWPKKYFLDALAIEPTFKGEVELLDNLIKMDYFECYRYDKKALTKS

SEQ ID NO: 20867 - protein, 1216 aa, Streptococcus agalactiae
ATGTCTTACGAAAAGCTTTTAGAACGATTTTTAACATACGTCAAAATAAATACAAGAAGTAATCCTAATAGTACACAAACGCCAACAACTCAAAGTCAAGTTGACTTTGCTTTAACAGTTTTAAAACCAGAAATGGAAGCAATTGGTTTAAAAGATGTTCATTATTTACCTTCTAATGGGTATTTGGTTGGAACCTTACCTGCTACAAGCGACCGCTTACGCCATAAAATAGGTTTTATATCCCATATGGATACAGCTGATTTCAATGCTGAAAATATTACTCCACAAATTGTTGACTATAAAGGTGGAGATATTGAACTTGGAGACTCAGGTTACATTTTAAGTCCAAAAGATTTTCCAAATTTAAATAATTACCATGGGCAAACATTGATTACAACAGATGGTAAAACCTTACTGGGAGCAGACGATAAGTCTGGTATAGCAGAAATCATGACAGCTATGGAATATTTGGCTTCGCATCCAGAAATTGAGCATTGTGAAATTAGAGTTGGCTTTGGACCAGACGAAGAAATTGGTATAGGTGCAGATAAATTTGATGTTAAAGATTTTGATGTTGATTTTGCCTATACAGTGGATGGTGGACCACTAGGAGAATTACAGTATGAAACCTTTAGTGCAGCTGGTTTGGAGCTTACATTTGAAGGACGAAACGTTCACCCTGGAACTGCAAAAAATCAAATGATTAATGCTTTACAGCTTGCTATGGATTTTCATAGTCAATTACCAGAAAATGAACGTCCTGAACAAACAGATGGCTATCAAGGATTTTATCACTTATATGATTTAAGTGGAACAGTTGATCAAGCTAAAAGTTCATATATCATTCGAGATTTTGAGGAAGTTGATTTCTTAAAACGTAAGCAATTGGCTCAAGATATCGCTGATAATATGAATGAAGCATTACAATCTGAACGTGTAAAGGTTAAACTATACGATCAATATTACAACATGAAGAAAGTTATTGAAAAAGATATGACACCTATCAACATTGCTAAAGAAGTAATGGAAGAGTTAGACATTAAGCCAATCATAGAACCGATTCGTGGTGGTACAGATGGCTCTAAAATTTCCTTTATGGGAATCCCTACTCCTAATCTTTTTGCAGGGTGAAAACATGCATGGACGCTTTGAATTCGTTAGTCTACAAACAATGGAAAAAGCAGTTGATGTTATTTTAGGCATCGTTGCTAAGGAT

SEQ ID NO: 20868 - protein, 406 aa, Streptococcus agalactiae
  VARIANT 377: Xaa = Any Amino Acid
MSYEKLLERFLTYVKINTRSNPNSTQTPTTQSQVDFALTVLKPEMEAIGLKDVHYLPSNGYLVGTLPATSDRLRHKIGFISHMDTADFNAENITPQIVDYKGGDIELGDSGYILSPKDFPNLNNYHGQTLITTDGKTLLGADDKSGIAEIMTAMEYLASHPEIEHCEIRVGFGPDEEIGIGADKFDVKDFDVDFAYTVDGGPLGELQYETFSAAGLELTFEGRNVHPGTAKNQMINALQLAMDFHSQLPENERPEQTDGYQGFYHLYDLSGTVDQAKSSYIIRDFEEVDFLKRKQLAQDIADNMNEALQSERVKVKLYDQYYNMKKVIEKDMTPINIAKEVMEELDIKPIIEPIRGGTDGSKISFMGIPTPNLFAGXENMHGRFEFVSLQTMEKAVDVILGIVAKD

SEQ ID NO: 20869 - protein, 1665 aa, Streptococcus agalactiae
ATGCTAAATAATATTGAAAATAGAAAGTTTACCATGTCACAAAAAACAACAAAAGTTAGTCAGCAAGAACAAATGGTCAAAGGGACGGCTTGGTTAACAGCAGGGAATTTCATTAGTCGCTTGCTGGGAGCCATCTATATTATCCCTTGGTATGCTTGGATGGGAAAGCATGCTGCCGAAGCAAATGCTTTATTTGGGATGGGATATGAAATCTATGCTTTATTTCTTTTGATATCAACTGTTGGAATTCCAGTAGCAGTTGCAAAACAGGTATCTAAGTATAACACTTTAGGTAAAGAAGAGGTGAGCATTTATCTGGTTCGGAAAATCTTGCAGTTTATGCTGATTTTAGGTGGAATTTTTGCATTAATTATGTATATTGGTTCACCTCTATTTGCTTCGCTTAGTAAAGGAGGGCAAGAACTCGTTCCAATATTGCGTAGTCTAACTCTAGCTGTTTTAGTTTTTCCTTCAATGAGTGTTTTACGTGGTTTTTTTCAAGGTTTTAATAATTTAAAACCGTATGCCATTAGTCAAGTCGCTGAGCAGATTATACGTGTCATATGGATGTTATTAACTGCTTTCTATATTATGCGTCTAGGATCAGGAGATTATATTGCCGCTGTGACACAGTCAACATTCGCCGCCTTTGTCGGTATGTTTGCTAGTATAGCTGTGCTGCTTTATTTCTTATGGCGTTATAATATGCTATCTGCCTTGATTGGTAAAACTCCAGAGCACATTAAATTAGATACTAAAGAAATTCTAATTGAGACTGTTAAGGAAGCGATCCCTTTTATTATTACTGGTGCAGCAATTCAAATTTTCAAATTGATTGATCAGTTTTCATTTGGGAATACGATGGCGCTCTTTACGAATTATTCAAGTGAAGAATTACGGGTTATGTTTGCTTACTTTTCAAGCAATCCTGGTAAAGTTACGATGATTCTAATTGCTGTTGCTACCGCAATTGCTGGAGTTGGTATTCCATTGTTAACAGAGAATTTTGTTAAGAATGATAAAAAAGCCGCCGCTCGTTTGGTTGTTAATAATTTACAAATGTTACTAATGTTTTTACTGCCAGCTGTTGCAGGATCCGTTATTTTAGCAAAACCTTTGTATACAGTCTTTTATGGGTTACCGCAGGAACAAGCTTTAGGGCTTTTTGTCATATCTCTTATTCAAACAATTATTTTATCTATTTATACTGTTTTAGCACCAATGCTACAAGCATTGTTTGAAAATCGTAAAGCTATTATTTACTTCCTATATGGTCTGGTGGCAAAAGTTATTTTACAAGTTCCCTCCATTTTCCTTTTCCATGCCTATGGACCACTTTTCTCAACGACAGTAGCTCTTTGTATCCCAGTAATTCTTATGTATTTGAAAATACATGAAATTACAGGATTTAAACGCCAAGCTATTCGTCGTACAAGTGCTTTAGTCCTTATTCTAACGCTATTAATGAGCTTTATTATTTCTATGATAATATGGTTAATGAACCTGGTTATTGTACCCGATAGTAGACTGGTAAGTCTAGTTTACATTATCGTTATCGGTGCAATAGGTTTAGGGGTATATGTCTTTATGGCACTGGCCACCCATCTACTTGATAAGATGATTGGTAGCCGTGCTCAAGACTTACGCCGAAAGTTGCACCTTAAC

SEQ ID NO: 20870 - protein, 555 aa, Streptococcus agalactiae
MLNNIENRKFTMSQKTTKVSQQEQMVKGTAWLTAGNFISRLLGAIYIIPWYAWMGKHAAEANALFGMGYEIYALFLLISTVGIPVAVAKQVSKYNTLGKEEVSIYLVRKILQFMLILGGIFALIMYIGSPLFASLSKGGQELVPILRSLTLAVLVFPSMSVLRGFFQGFNNLKPYAISQVAEQIIRVIWMLLTAFYIMRLGSGDYIAAVTQSTFAAFVGMFASIAVLLYFLWRYNMLSALIGKTPEHIKLDTKEILIETVKEAIPFIITGAAIQIFKLIDQFSFGNTMALFTNYSSEELRVMFAYFSSNPGKVTMILIAVATAIAGVGIPLLTENFVKNDKKAAARLVVNNLQMLLMFLLPAVAGSVILAKPLYTVFYGLPQEQALGLFVISLIQTIILSIYTVLAPMLQALFENRKAIIYFLYGLVAKVILQVPSIFLFHAYGPLFSTTVALCIPVILMYLKIHEITGFKRQAIRRTSALVLILTLLMSFIISMIIWLMNLVIVPDSRLVSLVYIIVIGAIGLGVYVFMALATHLLDKMIGSRAQDLRRKLHLN

SEQ ID NO: 20871 - protein, 1452 aa, Streptococcus agalactiae
ATGATTACAATAGATAAAATTTTAGAAATTTTAAAAAATGACCATAATTTCAGAGAGATTTTGTTTCATGAGCATTATTATTATAACTGGACACAAAATGTAACTTTTAATGCCTTATCATATGATAGTCGTCAAATTTCATCTGATACTTTATTTTTCGCTAAGGGTGCTACTTTTAAAAAAGAATATCTAGATTCTGCAATCACAGCAGGCCTTTCTTTTTACGTTTCTGAGATAGATTACGGCGTCGATATTCCAGTGATATTAGTCAATGATATCAAAAAAGCCATGAGTTTGATATCTATGTCTTTCTATAATAACCCACAAAACAAACTTAAACTTCTAGCTTTTACCGGAACAAAAGGAAAAACAACTGCGGCTTACTTTGCTTATCATATGTTAAAAGTAAACCATCGTCCTGCTATGCTCTCAACTATGAACACAACATTAGATGGTAAATCTTTCTTTAAATCACATCTCACAACCCCCGAGAGTCTTGATTTATTTCGGATGATGGCTACAGCCGTTGAGAATCAAATGACACACTTAGTTATGGAAGTATCAAGCCAAGCATACCTAACCAAACGTGTTTATGGTTTAACCTTTGACGTTGGCGTTTTCTTAAATATTAGTCCCGATCATATTGGTCCTATCGAACACCCTACATTCGAAGATTATTTTTTCCACAAACGGCTCTTGATGGAGAATAGCAAGGCTGTTGTTGTAAATAGTCAGATGGATCATTTTAATATTGTCAAAGAACAGGTAGAATATATTCCTCATGATTTCTATGGAGATTATTCTGAAAATGTTATCACAGAATCACAGGCCTTTTCTTTCCATGTCAAAGGAAAGTTGGAGAACACCTACGATATCAAGCTGATTGGAAAATTCAATCAAGAAAATGCTATCGCAGCTGGACTTGCTTGTCTCCGACTTGGTGTTTCAATTGAAGATATAAAAAACGGAATTGCACAAACTACCGTCCCTGGCCGCATGGAAGTCCTAACACAAACCAACGGCGCAAAGATTTTCGTTGACTATGCCCACAACGGAGACAGTTTGAAGAAATTATTAGCTGTTGTTGAGGAACACCAAAAAGGGGATATTATCTTAGTGCTCGGAGCTCCTGGTAATAAAGGTCAAAGCCGTCGTAAAGACTTTGGAGATGTCATTAATCAACATCCTAATCTACAAGTGATACTCACTGCAGATGATCCTAATTTTGAAGATCCCTTAGTTATCTCACAAGAAATAGCAAGCCATATTAATCGTCCGGTTACTATCATCATTGATCGAGAAGAAGCAATTGCTAATGCCAGTACTCTTACTAATTGCAAACTAGATGCAATTATTATCGCTGGTAAAGGAGCAGATGCTTATCAAATTATCAAAGGAAATCGTGACAATTACTCTGGAGATTTAGAAGTTGCGAAAAAATACCTTAAACGA

SEQ ID NO: 20872 - protein, 484 aa, Streptococcus agalactiae
MITIDKILEILKNDHNFREILFHEHYYYNWTQNVTFNALSYDSRQISSDTLFFAKGATFKKEYLDSAITAGLSFYVSEIDYGVDIPVILVNDIKKAMSLISMSFYNNPQNKLKLLAFTGTKGKTTAAYFAYHMLKVNHRPAMLSTMNTTLDGKSFFKSHLTTPESLDLFRMMATAVENQMTHLVMEVSSQAYLTKRVYGLTFDVGVFLNISPDHIGPIEHPTFEDYFFHKRLLMENSKAVVVNSQMDHFNIVKEQVEYIPHDFYGDYSENVITESQAFSFHVKGKLENTYDIKLIGKFNQENAIAAGLACLRLGVSIEDIKNGIAQTTVPGRMEVLTQTNGAKIFVDYAHNGDSLKKLLAVVEEHQKGDIILVLGAPGNKGQSRRKDFGDVINQHPNLQVILTADDPNFEDPLVISQEIASHINRPVTIIIDREEAIANASTLTNCKLDAIIIAGKGADAYQIIKGNRDNYSGDLEVAKKYLKR

SEQ ID NO: 20873 - protein, 792 aa, Streptococcus agalactiae
ATGTCTCACATAAAAGCAGAAAACATTATTGTATCTTACGATCAGAAAGAAATCATCAATAATCTTTCCCTCAGTATACTTAACCAAAAAATAACAACGATTATTGGTGCCAATGGATGTGGAAAGTCTACTCTTTTGAAGGCTCTCACACGCATCCATAAAATAAAAGATGGTACTATCACTATTGATGGTCATGATATTGCACATTTACCCACAAAGGAAATTGCTAAGAAGATTGCACTTCTCCCACAGGTGTTAGAAGCAACTGAAGGGATAACAGTTTATGAACTGATATCTTATGGACGGTTCCCACACCAAAAATACCTTGGCAATTTGACAAATGACGATCGTAGTAAAATCCATTGGGCGATGGAAATGACTAACGTAGCGCAATTTGCTAATAGAGATGTTGATGACCTTTCAGGAGGTCAGAGGCAAAAAGTATGGATTGCTATGGCTTTAGCACAAGATACAGATACTATCTTTTTAGACGAACCTACAACTTATCTTGACATGAATCATCAATTAGAAGTCTTAGAATTGCTCAAAAAACTTAATAACGAAACGCAAAAAACAATTATTATGGTCCTACACGACCTAAACCTGTCTGCGCGCTATTCTGATTATCTAGTTGCAATGAAAACCGGTAAAATTATCTATGAAGGTAGTCCTAGTCAGATCATGACTAAAGATATTATCAAAGATATTTTTAAGATTGATGCTCATATCATTCAGGACCCTATTAGTAAACAACCTGTTTTGTTATCTTATCAATTATCAACTGATCAAAAT

SEQ ID NO: 20874 - protein, 264 aa, Streptococcus agalactiae; identical to SEQ ID NO: 7178

SEQ ID NO: 20875 - protein, 930 aa, Streptococcus agalactiae
ATGAAAAAAATTGGAATTATTGTCCTCACACTACTGACCTTCTTTTTGGTATCTTGCGGACAACAAACTAAACAAGAAAGCACTAAAACAACTATTTCTAAAATGCCTAAAATTGAAGGCTTCACCTATTATGGAAAAATTCCTGAAAATCCGAAAAAAGTAATTAATTTTACATATTCTTACACTGGATATTTATTAAAACTAGGAGTTAATGTTTCAAGTTACAGTTTAGACTTAGAAAAAGATAGCCCCGTTTTTGGTAAGCAACTGAAAGGAGCTAAAAAATTAACTGCTGATGATACAGAAGCTATTGCCGCACAAAAACCTGATTTAATCATGGTTTTTGATCAAGATCCAAACATCAATACTCTGAAAAAAATTGCACCAACTTTAGTTATTAAATATGGTGCACAAAATTATTTAGATATGATGCCAGCTTTGGGGAAAGTATTCGGTAAAGAAAAAGAAGCTAATCAGTGGGTTAGCCAATGGAAAACTAAAACTCTCGCTGCCAAAAAAGATTTACACCATATCTTAAGGCCTAACACTACTTTTACTATTATAGATTTTTATGATAAAAATATCTATTTATATGGTAATAATTTTGGACGCGGTGGAGAACTAATCTATGATTCACTAGGTTATGCTGCCCCAGAAAAAGTCAAAAAAGATGTCTTTAAAAAAGGGTGGTTTACCGTTTCGCAAGAAGCAATCGGTGATTACGTTGGAGATTATGCCCTTGTTAATATAAACAAAACGACTAAAAAAGCAGCTTCATCACTTAAAGAAAGTGATGTTTGGAAGAATTTACCAGCTGTCAAAAAAGGGCACATCATAGAAAGTAACTACGACGTGTTTTATTTCTCTGACCCTCTATCTTTAGAAGCTCAATTAAAATCATTTACAAAGGCTATCAAAGAAAATACAAAT

SEQ ID NO: 20876 - protein, 310 aa, Streptococcus agalactiae
MKKIGIIVLTLLTFFLVSCGQQTKQESTKTTISKMPKIEGFTYYGKIPENPKKVINFTYSYTGYLLKLGVNVSSYSLDLEKDSPVFGKQLKGAKKLTADDTEAIAAQKPDLIMVFDQDPNINTLKKIAPTLVIKYGAQNYLDMMPALGKVFGKEKEANQWVSQWKTKTLAAKKDLHHILRPNTTFTIIDFYDKNIYLYGNNFGRGGELIYDSLGYAAPEKVKKDVFKKGWFTVSQEAIGDYVGDYALVNINKTTKKAASSLKESDVWKNLPAVKKGHIIESNYDVFYFSDPLSLEAQLKSFTKAIKENTN

SEQ ID NO: 20877 - protein, 1023 aa, Streptococcus agalactiae
ATGTTTAAAGCTTCAAAAAAACTCGTTCAAAAAAATAAGTCAAATCATTTTTGGCTTGTTTTTTTCATAACACTTATACTATTTCTTATTGGTTGTTACGTTAGCTTACGATTTGGTGCTATCAATTTCAAGACTAGTGATTTAATAACTGTTTTAAAAAATCCCTTAAAAAACTCTAATGCTCAGGATGTTATTTTTGACATTAGACTACCACGCATAATTGCAGCTATCTTAGTAGGTGCAGCTATGTCACAAGCAGGTGCTATTATGCAGGGAGTCACTCGAAACGCCATTGCTGATCCTGGACTACTAGGTATTAACGCCGGAGCTGGGTTAGCCCTTGTTGTTGCATATGCTTTTTTAGGAAGCATGCACTATAGTACGATTCTCATCGTCTGCTTACTAGGGTCTGTCATTTCTTGTCTTTTAGTCTTCACACTCTCTTATACAAAGCAAAAGGGTTACCACCAACTACGACTCATTTTAGCCGGAGCGATGATCTCCACACTTTTTACGTCTGTTGGACAAGTGGTTACATTATACTTTAAACTCAATCGAACTGTTATCGGTTGGCAAGCAGGTGGTTTATCCCAAATTAACTGGAAAATGCTAATCATAATAGCACCTATCATTATTTTAGGTTTACTTATTTCACAACTCCTAGCACATCAATTAACTATCTTGAGCCTTAATGAATCTGTGGCCAAAGCATTGGGACAAAAAACTCAATTAATGACTGCGTTTCTATTACTTATTGTTTTGTTTTTATCAGCTTCATCAGTCGCTTTGATAGGAACCGTTTCTTTCATTGGATTGATTATTCCACATTTTATTAAGCTTTTTATTCCCAAAGATTATCGTCTATTATTACCTTTAATAGGATTTTCAGGGGCTACTTTCATGATCTGGGTAGACTTATCATCTCGTATTATAAATCCCCCTTCAGAGACACCAATTAGTTCTATAATCAGTATCGTAGGACTTCCATGTTTCCTATGGTTAATTAGAAAAGGGAAAAATCTA

SEQ ID NO: 20878 - protein, 341 aa, Streptococcus agalactiae
MFKASKKLVQKNKSNHFWLVFFITLILFLIGCYVSLRFGAINFKTSDLITVLKNPLKNSNAQDVIFDIRLPRIIAAILVGAAMSQAGAIMQGVTRNAIADPGLLGINAGAGLALVVAYAFLGSMHYSTILIVCLLGSVISCLLVFTLSYTKQKGYHQLRLILAGAMISTLFTSVGQVVTLYFKLNRTVIGWQAGGLSQINWKMLIIIAPIIILGLLISQLLAHQLTILSLNESVAKALGQKTQLMTAFLLLIVLFLSASSVALIGTVSFIGLIIPHFIKLFIPKDYRLLLPLIGFSGATFMIWVDLSSRIINPPSETPISSIISIVGLPCFLWLIRKGKNL

SEQ ID NO: 20879 - protein, 999 aa, Streptococcus agalactiae
ATGATTCAAAAAAATAAAGCTCCTTTTGTTTTAATATCATCTGTCATTATCCTACTATTATTAATACTAGTATCAATTTCACTTGGCTATGCTAATACTTCCGTTATTGACGTTTTAAAACTAATAAGTAGAAAATCTGATGATGCCTTCCTTTTTATCATTACTAACATTCGTTTACCTCGTATTATTGTCTGTATCTTTGGGGGAGCTTCTTTAGGAATTGCTGGGTTGCTATTACAGACGTTAACCAAAAATCCACTAGCTGATTCCGGTATTCTTGGTATCAATGCTGGAGCTGGATTAGTAATCGCTCTAACCATAGGAACATTTAATGTTAGCAATCCAACTATATTATACTTTTTACCCCTATTTGCTATGTTTGGAGGGTTGGTAACTATTTTTCTTGTCTATCTTATGTCATACAGAAGAAATCACAATATTAGCCCTACACGATTAATCGTCACTGGTATCGGAATATCTACAATGATTTCAGGCGTTATGATTTCTATTATTAGTCAGTCTAATAATCAAAAAATGGATATGATCGTTGAATGGCTTAGTGGAAAAATTACAATTAGTTCCTGGACTACCATTATCACTTTTATCCCGATTCTCATTTTGTTATGGGGATTAGCATATAGTCGCAGTCGCCACCTTAATATTATGAACCTAAACGAGCAGACTGCTCTCGCTCTAGGACTTCATTTAAAAAAGGAAAGAATATATACTTTGATGCTGGCAAGTAGCCTTGCTGCTATTAGCGTCGTCTTAATTGGTAATATTACTTTTATAGGCTTACTCGCTGGGCACTTAAGTAGACGACTATTAGGAAATAACCATAAAATTATACTACCTAGCTGTCTTCTTATTGGTGCTATTATCCTATTGGTATCAGATACTATAGGTCGTCTCCTCTTAGTTGGTACAGGTATTCCCACTGGATTGGTTGTATCAATAATTGGCGCCCCCTATTTTCTCTGGTTGATGACAAAAGTTGAC

SEQ ID NO: 20880 - protein, 333 aa, Streptococcus agalactiae
MIQKNKAPFVLISSVIILLLLILVSISLGYANTSVIDVLKLISRKSDDAFLFIITNIRLPRIIVCIFGGASLGIAGLLLQTLTKNPLADSGILGINAGAGLVIALTIGTFNVSNPTILYFLPLFAMFGGLVTIFLVYLMSYRRNHNISPTRLIVTGIGISTMISGVMISIISQSNNQKMDMIVEWLSGKITISSWTTIITFIPILILLWGLAYSRSRHLNIMNLNEQTALALGLHLKKERIYTLMLASSLAAISVVLIGNITFIGLLAGHLSRRLLGNNHKIILPSCLLIGAIILLVSDTIGRLLLVGTGIPTGLVVSIIGAPYFLWLMTKVD

SEQ ID NO: 20881 - protein, 651 aa, Streptococcus agalactiae
ATGATATTAACGTTTAATCCAGGAAAGTTAGAAAGACAAGAGTTTTTTAAGGAGCTTATTAACTATCTTTGGATACATGATGATGTAACACTAAGACAAATAAAGTCCCACTTTACAGACTATTCTAAAATTGACCGTTTGTTAGAAGAATATATTAACCATGGATATATCCTTCGCCAAAATAAACGCTACAGCCTTAATCTTCCTTTTCTGAGTTCGCTAGATGGATTAGTATTAGATGATTTGGTTTTCATAGATTCTGATAGTCAAATCTATCAGTTATTACAGAAGCGAAAATTTGTGACAAATTTAGATAACCAAACCAATCACTTGGTATTTGTAGAAGAGACAGATTTTGAAAGAAACACTTTGACTCTTTCTAATTATTTCTATAAACTAACCAACGGTTATCCACTTTCAAGAGAACAAAAAAAGCTTTATCAACTTTTAGGAGATGTTAATTCGGAATATGCTTTAAAATATATGTCAAGCTTTATATTGAAATTTCTTCGCAAGGATAGTGTTAAGCAAAAACGTACAGATATTTTTATCCAAGCTTTAGAATTACTTGGATATATTAGCTTAAACCAAGATACTACCTATCGTTTAAATGCTAAACTTGATGTTGAAGCTTTAAAGATTTACTTAACA

SEQ ID NO: 20882 - protein, 217 aa, Streptococcus agalactiae; identical to SEQ ID NO: 7186

SEQ ID NO: 20883 - protein, 933 aa, Streptococcus agalactiae
ATGTCTAAAATTTTAGTCTTTGGTCACCAAAATCCAGATTCAGATGCTATTGGATCATCAGTTGCTTTTGCATATCTAGCTAAAGAAGCTTGGGGGCTTGACACAGAGGCCGTTGCTTTAGGAACTCCAAATGAAGAAACAGCATATGTTTTAGATTATTTTGGTGTTCAAGCACCTCGAGTAGTAGAATCTGCAAAAGCAGAGGGTGTAGAGACAGTCATTTTAACTGACCATAACGAATTCCAACAATCTATTTCTGATATTAAAGATGTGACAGTTTATGGTGTTGTTGATCATCATCGTGTTGCTAACTTTGAGACTGCCAATCCGTTATATATGCGTTTGGAACCAGTTGGCTCAGCATCATCGATTGTTTACCGTATGTTTAAGGAAAATGGAGTATCAGTACCCAAAGAGTTGGCTGGTTTATTATTATCAGGTTTGATTTCAGATACTCTTCTTTTGAAATCACCAACAACTCATGCTTCAGATATTCCAGTTGCAAAAGAACTAGCAGAGCTTGCAGGTGTAAACTTAGAAGAATATGGTTTAGAAATGCTTAAAGCAGGTACTAACCTCTCAAGTAAGACTGCAGCGGAGTTGATTGATATTGATGCTAAAACATTTGAATTAAATGGAGAAGCTGTTCGTGTTGCACAAGTTAATACTGTGGACATTAACGATATTTTAGCACGTCAAGAAGAGATTGAAGTTGCTATTCAAGAAGCAATTGTCACAGAAGGTTATTCTGATTTTGTATTGATGATTACTGACATTGTTAATTCAAATTCAGAGATTTTAGCTCTCGGTTCAAATATGGCTAAAGTTGAAGCAGCTTTTGAATTTACACTTGAAAATAACCACGCTTTTCTTGCTGGGGCAGTATCACGTAAAAAACAAGTTGTTCCTCAATTGACAGAAAGCTACAATGCT

SEQ ID NO: 20884 - protein, 311 aa, Streptococcus agalactiae; identical to SEQ ID NO: 2608

SEQ ID NO: 20885 - protein, 785 aa, Streptococcus agalactiae
ATGGCAGAAATAGACTATAAAAAAGTAACAGGAATGATCCATTCTACAGAAAGTTTCGGCTCTGTGGATGGGCCAGGTATTCGTTTTATCATTTTTATGCAAGGATGTAAAATGCGTTGTCAATACTGTCATAATCCTGATACTTGGGAAATGGAAACTAACAATTCAAAGGAACGTACCGTTGAGGATGTTCTAAAGGAAGCTCTCCGTTATAAACATTTTTGGGGAAAAGATGGAGGTATCACAGTTTCAGGTGGTGAAGCAATGCTGCAAATTGACTTTATTACAGCCCTCTTTATTGAGGCTAAGAAACTAGGTATTCATACGACGCTAGATACTTGTGGTTTTGCTTATCGAGCAACACCAGAATACCATGCTATCCTTGAAAAATTGTTAGATGTTACTGATTTGGTACTCCTTGACTTAAAAGAAATTGATCCAGAACAACATAAAATTGTAACTCGTCAGTCTAACAAAAATATTTTACAGTTTGCTAGATATTTATCTGATAGAGGTACTCCGGTATGGATTCGTCATGTTTTAGTTCCTGGATTGACTGATATTGATGACCATTTAAAACGTTTGGGTGAATTTGTCCAAACACTTGATAATGTCGATAAATTTGAAGTATTGCCTTATCATACTATGGGAGAGTTCAAATGGCGTGAATTAGGAATTCCGTATCCATTAGCTGTGTGAAACCACCAACTCCAGAACGTGTTAAAAACGCTAAAGATATCATGAAAACAGAATCCTATACAGAATATCTAAAAAGGATTCAAAAT

SEQ ID NO: 20886 - protein, 262 aa, Streptococcus agalactiae
  VARIANT 232: Xaa = Any Amino Acid
MAEIDYKKVTGMIHSTESFGSVDGPGIRFIIFMQGCKMRCQYCHNPDTWEMETNNSKERTVEDVLKEALRYKHFWGKDGGITVSGGEAMLQIDFITALFIEAKKLGIHTTLDTCGFAYRATPEYHAILEKLLDVTDLVLLDLKEIDPEQHKIVTRQSNKNILQFARYLSDRGTPVWIRHVLVPGLTDIDDHLKRLGEFVQTLDNVDKFEVLPYHTMGEFKWRELGIPYPLAXVKPPTPERVKNAKDIMKTESYTEYLKRIQN

SEQ ID NO: 20887 - protein, 1331 aa, Streptococcus agalactiae
ATGGAAGACCCTGGCAGTCAGAGTTTGTTACTACAATTTGTTATTTTATTAATATTAACCCTATTTAACGCCTTCTTTTCAGCATCTGAAATGGCTTTAGTATCGCTAAACCGCTCTAAAGTAGAACAGAAAGCTGAAGAAGGGGACAAAAGGTATCGACGTCTTTTGGATGTTCTTGAAAATCCAATAATTTTTTATCAACAATTCAAGTTGGTATTACTTTTATTAGCCTTTTGCAAGGGGCTAGTTTATCTGCCTCACTAGGACATGTGATTTCAGGATGGCTAGGAAATTCAGCAACAGCCCGTACAGCAGGGAGTATTATTGCGCTAATCTTTTTAACATATGTCTCTATTGTTCTAGGAGAATTATATCCTAAGCGTATTGCTATGAATTTGAAAGATCGTCTAGCAATTGTTTCAGCTCCCATTATTATCTTTCTAGGGAAAATAGTAAGCCCCTTTGTATGGTTGCTTTCAGCTTCAACTAACTTATTGAGTAGAATCACTCCGATGACTTTTGATGATGCTGACGAGAAGATGACACGTGATGAAATTGAATATATGTTGACGAATAGTGAAGAAACTTTGGATGCTGAAGAAATTGAAATGCTGCAAGGGATTTTCTCGCTAGATGAAATGATGGCGCGTGAAGTTATGGTTCCGCGCACTGATGCTTTCATGATTGACATCAACAATGATGCACAATCAAATATTGAAGGAATTTTATCACAAAACTTTTCTCGTGTCCCTGTTTATGATGACGATAAGGATAGAGTTGTTGGTGTTTTACATACCAAGCGCTTATTGGAAGCGGGCTTTAAAACTGGTTTTGATACTATCGACTTGCGAAAAATACTTCAGGAACCTCTTTTTGTTCCAGAAACGATTTTTGTAGATGATCTTTTAAAAGCATTACGCAACACTCAAAATCAAATGGCCATTTTACTAGATGAATATGGTGGCGTTGCTGGTTTAGTAACTTTAGAGGATTTATTGGAAGAAATTGTCGGCGAAATAGATGATGAAACAGATACAGCTGAACAATTTGTCAGGGAAATCGATGAGAATATCTATATTGTTCTAGGAACTATGACGCTTAATGAATTTAATGATTATTTTGAGACAGAGTTAGAAAGTGATGATGTTGATACAATTGCGGGTTATTATTTAACTGGTGTGGGTAGTATTCCAAACCAAGAGGAAAAAGTAGCTTACGAAGTAGACAGCAAAGATAAACACATCACTTTGATTAATGATAAAGTTAAAGATGGTCGTATAACAAAATTGAAAGTGCTATTGTCTGATATAGAACAGAATATTGAAAAAGAC

SEQ ID NO: 20888 - protein, 444 aa, Streptococcus agalactiae; identical to SEQ ID NO: 11446

SEQ ID NO: 20889 - protein, 564 aa, Streptococcus agalactiae
ATGATTAAAAGACCAATTCATCTTTCTCATGATTTTTTAGCAGAAGTTATTGATAAAGAAGCAATAACGCTTGATGCAACTATGGGAAATGGGAATGATACTGTTTTTTTAGCGAAAAGTTCTAAAAAAGTTTATGCATTTGATATTCAAGAAGAAGCAATAGCAAAAACGAAAGCAAAGCTCACGGAGCAAGGGATCTCTAACGCTGAACTTATCTTGGATGGGCATGAGAATTTGGAACAGTATGTTCATACACCTTTAAGAGAGGCTATATTTAATCTGGGATACTTACCCTCAGCGGATAAAACAGTTATTACAAAACCACACACAACTATCAAGGCAATCAAAAACGTTTTAGACATTTTAGAAGTAGGTGGACGTCTATCACTTATGGTTTATTATGGTCATGATGGTGGAAAAAGTGAGAAAGATGCGGTGATAGCATTCGTGGAACAATTACCACAGAATAATTTCGCTACAATGCTTTATCAACCACTCAATCAAGTTAATACGCCTCCCTTTTTAATTATGGTAGAAAAGTTACAATCATATGAAAATGAGGTG

SEQ ID NO: 20890 - protein, 188 aa, Streptococcus agalactiae
MIKRPIHLSHDFLAEVIDKEAITLDATMGNGNDTVFLAKSSKKVYAFDIQEEAIAKTKAKLTEQGISNAELILDGHENLEQYVHTPLREAIFNLGYLPSADKTVITKPHTTIKAIKNVLDILEVGGRLSLMVYYGHDGGKSEKDAVIAFVEQLPQNNFATMLYQPLNQVNTPPFLIMVEKLQSYENEV

SEQ ID NO: 20891 - protein, 933 aa, Streptococcus agalactiae
ATGAAAAAACGTTATCGTGCGATTAATGATTATTATCGAGAACTCTTTGGAGAAAAAATATTTAAATTACCTATAGATGCTGGTTTTGACTGTCCTAACAGAGACGGAACAGTTGCTAGAGGAGGGTGCACTTTTTGCACAGTTTCTGGTTCAGGGGATGCTATAGTTGCTCCAGAAGCTCCTATTCGTGAACAATTCTATAAAGAAATTGATTTCATGCATAGAAAGTGGCCTGAGGTTAATAAATACTTAGTCTATTTTCAAAATTTTACCAATACCCATGCTAAGTTAGAGATAATTAAAGAGCGTTACGAACAGGCTATTAATGAGCCAGGAGTTATCGGGATCAACATCGGAACAAGGCCGGATTGCTTACCTGATGAAACTATATACTATCTCGCTGAACTTTCTGAAAGAATGCATGTGACTTTAGAATTAGGTCTTCAGACAACTTATGAAGCAACTTCTGCATTAATAAATAGAGCACATTCATATGACCTTTACAAAAAAACTGTTAAGAGAATACGAGAATTAGCTCCTAAAGTAGAAATCGTTTCTCACCTAATAAATGGTCTCCCAGGGGAGACACATGATATGATGGTGGAAAATGTTCGTCGATGTGTTACGGATAATGATATTCAGGGTATAAAATTACACCTTCTGCATCTTATGACTAATACAAGAATGCAGAGAGATTACCATGAAGGTCGTTTACGTTTGTTAAGTCAAGAAGACTATATTTCGATTATTTGTGACCAACTGGAGATTATTCCAAAACATATTGTTATTCACCGAATTACTGGTGATGCGCCACGTCATATGTTAATTGGACCGATGTGGAGCCTTAATAAATGGGAAGTGCTTAATGCCATTGACAAAGAAATGGAGAAAAGACAGTCATATCAAGGATGTAAAGTTGAGGTAAAACATGAT

SEQ ID NO: 20892 - protein, 311 aa, Streptococcus agalactiae
MKKRYRAINDYYRELFGEKIFKLPIDAGFDCPNRDGTVARGGCTFCTVSGSGDAIVAPEAPIREQFYKEIDFMHRKWPEVNKYLVYFQNFTNTHAKLEIIKERYEQAINEPGVIGINIGTRPDCLPDETIYYLAELSERMHVTLELGLQTTYEATSALINRAHSYDLYKKTVKRIRELAPKVEIVSHLINGLPGETHDMMVENVRRCVTDNDIQGIKLHLLHLMTNTRMQRDYHEGRLRLLSQEDYISIICDQLEIIPKHIVIHRITGDAPRHMLIGPMWSLNKWEVLNAIDKEMEKRQSYQGCKVEVKHD

SEQ ID NO: 20893 - protein, 639 aa, Streptococcus agalactiae
ATGTTATCTCGTCAAAATAGTAAACTTATTCAAGCATTTATTGCTATTATCTTATTTTTCAGTTTAGGATTGGTCATCAAATATTGGCCCGACACTGTAATTTCATTTGACCAAACTATTCAAGAAAGTGTTAGAGGACAGTTGCCAAATCTTTCTACAAGATTTTTCAAGTTAATCACTGTGATTGGTAATACTGTAAGCCAGATAGCTATTGCGATTATGAGCGTCACTTTCTGTTACCTTAAGAAGTGGTATCCTCAAGCTAGATTTATCGCAGTAAATGCTATTATCTCTGGTATATGTATACTTTCTTTAAAACTTATTTTTCAAAGAGTAAGACCAACTTTAACCCATTTAGTATTTGCAGGTGGCTATTCGTTTCCCAGTGGGCACTCGATGGGAACATTTATGATATTTGGGAGTATTATTATTTTATTGCAGTACTATATGCCTAAGAGTATATGGAAACTGTTGTGCCAAGGTACTTTGGGTTTGCTCATTTTTTTAATTGGGTTATCTCGTATTTACCTAGGGGTTCATTTTCCGACAGATGTTTTAGCTGGTTTTATACTTGCTTATGGTATTTTGAATCTAACTGCGTATATCTTTTTAGCCAAGGATTGGTTAAAGAAAGTGAAG

SEQ ID NO: 20894 - protein, 213 aa, Streptococcus agalactiae; identical to SEQ ID NO: 2618

SEQ ID NO: 20895 - protein, 582 aa, Streptococcus agalactiae; identical to SEQ ID NO: 11453

SEQ ID NO: 20896 - protein, 194 aa, Streptococcus agalactiae; identical to SEQ ID NO: 2620

SEQ ID NO: 20897 - protein, 922 aa, Streptococcus agalactiae
ATGAAAAAGATTAGAAAAAGTTTAGGACTTCTACTATGTTGCTTTTTAGGATTGGTACAATTAGCGTTTTTTTCGGTAGCCAGTGTAAATGCTGATACCCCTAATCAACTAACAATCACACAGATAGGACTTCAGCCAAATACTACAGAGGAGGGGATTTCTTATCGTTTATGGACTGTGACTGACAACTTAAAAGTTGATTTATTGAGCCAAATGACAGATAGCGAATTGAACCAGAAGTATAAGAGTATCTTGACTTCTCCTACTGATACTAATGGTCAGACAAAGATAGCACTCCCAAATGGTTCGTACTTTGGTCGTGCTTATAAAGCTGATCAAAGCGTTTCAACAATAGTACCTTTTTATATTGAATTACCAGATGATAAGTTATCAAATCAATTACAGATAAATCCTAAGCGAAAAGTTGAAACAGGCCGATTAAAACTTATTAAATATCAAAAGAAGGAAAGATAAAGAAAGGCTATCCGGAGTAATATTTGTATTATACGATAACCAGAATCAGCCAGTTCGCTTTAAAAATGGACGATTTACGACCGATCAAGATGGGATTACTTCATTAGTAACTGATGATAAGGGAGAAATTGAGGTTGAAGGTTTATTACCTGGTAAGTATATTTTTCGAGAAGCAAAAGCACTAACTGGTTACCGTATATCTATGAAGGATGCTGTAGTTGCTGTAGTTGCTAATAAAACACAGGAAGTAGAGGTAGAAAACGAAAAAGAAACTCCTCCACCAACAAATCCTAAACCATCACAACCGCTTTTTCCACAATCATTTCTTCCTAAAACAGGAATGATTATTGGCGGAGGACTGACAATTCTTGGTTGTATTATTTTGGGAATTTTGTTTATCTTTTTAAGAAAAACTAAAAATAGCAAATCTGAAAGAAACGATACAGTA

SEQ ID NO: 20898 - protein, 308 aa, Streptococcus agalactiae
  VARIANT 153, 161: Xaa = Any Amino Acid
MKKIRKSLGLLLCCFLGLVQLAFFSVASVNADTPNQLTITQIGLQPNTTEEGISYRLWTVTDNLKVDLLSQMTDSELNQKYKSILTSPTDTNGQTKIALPNGSYFGRAYKADQSVSTIVPFYIELPDDKLSNQLQINPKRKVETGRLKLIKYXKEGKIKKXLSGVIFVLYDNQNQPVRFKNGRFTTDQDGITSLVTDDKGEIEVEGLLPGKYIFREAKALTGYRISMKDAVVAVVANKTQEVEVENEKETPPPTNPKPSQPLFPQSFLPKTGMIIGGGLTILGCIILGILFIFLRKTKNSKSERNDTV

SEQ ID NO: 20899 - protein, 882 aa, Streptococcus agalactiae
ATGGGAGGAAGATTTCAGAAAAACCTTAAGAAATCGGTCGTTTTAAATCGATGGATGAATGTAGGCTTGATACTATTGTTCTTAGTTGGTCTTTTGATAACCTCATATCCTTTTATTTCAAATTGGTACTATAATATTAAAGCTAATAATCAAGTAACTAACTTTGATAATCAAACCCAAAAATTAAATGCTAAAGAGATTAATAGACGATTTGAGTTAGCAAAAGCTTATAATAGAACACTGGACCCAAGCCGCCTATCAGATCCCTATACTGAAAAAGAAAAAAAAGGTATTGCTGAATACGCCCACATGCTTGAGATTGCTGAAATGATTGGATATATTGATATACCGTCTATCAAGCAAAAATTACCTATCTATGCGGGGACTACCAGTAGTGTTCTTGAAAAAGGAGCAGGACACCTTGAAGGAACTTCTTTGCCAATTGGTGGAAAAAGTTCACATACTGTTATCACAGCTCATCGCGGCTTACCTAAAGCTAAGTTATTTACAGATTTAGATAAACTTAAAAAAGGAAAAATTTTTTATATTCATAATATCAAAGAAGTTTTAGCCTATAAGGTTGATCAAATAAGTGTTGTAAAGCCAGATAATTTTTCTAAATTATTGGTTGTTAAAGGTAAGGATTATGCGACTTTGCTAACATGTACACCTTATTCGATTAATTCACATCGTTTACTAGTTAGAGGGCATCGAATCAAGTATGTACCTCCTGTTAAAGAAAAGAACTATTTAATGAAAGAATTGCAAACACACTATAAACTTTATTTCCTCTTATCAATCCTAGTTATTCTTATATTAGTCGCTTTACTATTATATTTAAAACGAAAATTTAAAGAGAGAAAAAGAAAGGGAAATCAAAAA

SEQ ID NO: 20900 - protein, 294 aa, Streptococcus agalactiae
MGGRFQKNLKKSVVLNRWMNVGLILLFLVGLLITSYPFISNWYYNIKANNQVTNFDNQTQKLNAKEINRRFELAKAYNRTLDPSRLSDPYTEKEKKGIAEYAHMLEIAEMIGYIDIPSIKQKLPIYAGTTSSVLEKGAGHLEGTSLPIGGKSSHTVITAHRGLPKAKLFTDLDKLKKGKIFYIHNIKEVLAYKVDQISVVKPDNFSKLLVVKGKDYATLLTCTPYSINSHRLLVRGHRIKYVPPVKEKNYLMKELQTHYKLYFLLSILVILILVALLLYLKRKFKERKRKGNQK

SEQ ID NO: 20901 - protein, 876 aa, Streptococcus agalactiae
GTGAAGACTAAAAATATCATCAAAAAAACTAAAAAGAAGAAGTCAAATCTTCCTTTTATCATTCTTTTTCTAATAGGTCTATCTATTTTATTGTATCCAGTGGTATCACGTTTTTACTATACGATAGAATCCAATAATCAAACACAGGATTTTGAGAGAGCTGCTAAAAAACTTAGTCAGAAAGAAATCAATCGACGTATGGCTCTAGCACAAGCTTATAATGATTCTTTAAATAATGTCCATTTTGAAGATCCTTATGAGAAAAAACGAATTCAAAAAGGGGTAGCAGAGTACGCCCGTATGTTAGAGGTAAGTGAAAAAATCGGCACAATTTCAGTTCCTAAGATAGGTCAAAAACTCCCTATATTTGCAGGTTCAAGTCAAGAAGTTCTATCTAAAGGAGCAGGGCATTTAGAAGGCACCTCTCTTCCAATTGGAGGCAATAGTACACATACTGTTATAACAGCACATTCAGGAATTCCAGATAAAGAACTCTTTTCTAACCTTAAAAAGTTAAAAAAAGGAGATAAGTTTTATATTCAAAACATAAAAGAAACGATAGCATATCAAGTAGATCAGATAAAAGTCGTTACACCCGATAACTTTTCAGATTTATTGGTTGTTCCTGGACATGATTATGCAACCTTATTGACTTGCACCCCGATTATGGTCAATACACACAGACTTTTAGTAAGGGGACATCGTATTCCTTATAAAGGTCCTATTGATGAAAAATTAATGAAAGAAGGTCATTTAAACACGATTTATAGATATCTTTTCTATATATCTTTAGTTATTATTGCTTGGTTACTTTGGTTAATAAAACGTCAACGTCAAAAAAATCGTTTAGCAAGTGTTAGAAAAGGAATTGAATCA

SEQ ID NO: 20902 - protein, 292 aa, Streptococcus agalactiae
MKTKNIIKKTKKKKSNLPFIILFLIGLSILLYPVVSRFYYTIESNNQTQDFERAAKKLSQKEINRRMALAQAYNDSLNNVHFEDPYEKKRIQKGVAEYARMLEVSEKIGTISVPKIGQKLPIFAGSSQEVLSKGAGHLEGTSLPIGGNSTHTVITAHSGIPDKELFSNLKKLKKGDKFYIQNIKETIAYQVDQIKVVTPDNFSDLLVVPGHDYATLLTCTPIMVNTHRLLVRGHRIPYKGPIDEKLMKEGHLNTIYRYLFYISLVIIAWLLWLIKRQRQKNRLASVRKGIES

SEQ ID NO: 20903 - protein, 2079 aa, Streptococcus agalactiae
ATGAAAAGAATCAACAAATATTTTGCAATGTTCTCGGCATTGTTATTAATTTTAACATCGTTGTTATCGGTAGCTCCGGTATTTGCTGCTGAGATGGGAAATATCACTAAAACAGTAACCTTACACAAAATTGTTCAAACATCCGATAATTTGGCTAAGCCAAATTTCCCAGGAATAAATGGATTGAATGGAACGAAGTATATGGGTCAAAAACTTACTGACATTTCAGGATATTTTGGGCAAGGTTCTAAAGAAATCGCCGGTGCTTTCTTTGCGGTTATGAATGAAAGTCAGACAAAATATATCACAGAAAGTGGTACTGAAGTAGAAAGTATCGATGCAGCAGGTGTCCTTAAAGGTTTGACAACTGAAAACGGCATTACATTTAATACTGCAAACTTAAAAGGAACATACCAAATCGTTGAGTTGCTTGACAAATCTAATTATAAAAATGGTGACAAAGTTCTTGCTGACTCAAAAGCTGTCCCAGTGAAAATCACTCTTCCTTTGTATAACGAAGAAGGAATTGTCGTGGACGCTGAAGTGTATCCAAAGAATACAGAAGAAGCACCACAAATCGACAAAAACTTTGCTAAAGCAAATAAATTGTTGAATGACAGTGATAATTCAGCTATTGCAGGTGGGGCAGACTACGACAAATATCAGGCAGAAAAAGCAAAAGCTACTGCTGAAATCGGTCAAGAAATCCCTTACGAAGTTAAAACAAAAATCCAAAAAGGGTCTAAATACAAAAACCTTGCTTGGGTCGATACCATGTCAAATGGTTTGACAATGGGTAACACTGTTAACTTAGAAGCATCGTCAGGCTCTTTTGTAGAAGGTACAGATTACAATGTTGAACGTGATGACCGTGGTTTCACTTTGAAATTCACAGATACAGGTTTGACTAAGCTACAAAAAGAAGCGGAAACACAAGCTGTTGAATTCACATTGACATATAGCGCAACAGTTAACGGTGCGGCTATTGATGACAAGCCAGAAAGCAATGATATCAAACTTCAATACGGTAACAAACCAGGTAAAAAAGTAAAAGAAATCCCAGTAACACCGTCAAATGGCGAAATCACTGTTAGCAAAACTTGGGACAAAGGTTCAGATTTAGAGAATGCGAATGTTGTTTATACCCTTAAAGATGGTGGAACAGCTGTTGCCTCAGTTTCATTGACAAAAACAACACCAAATGGCGAAATCAACTTAGGTAATGGTATTAAATTTACAGTTACTGGAGCGTTTGCTGGTAAATTCAGTGGTCTGACTGATAGTAAAACATACATGATCTCAGAACGTATCGCTGGTTATGGTAATACAATCACTACTGGTGCTGGTAGTGCAGCTATCACCAATACTCCAGATTCAGACAACCCAACACCACTTAATCCAACTGAACCAAAAGTTGTGACACACGGTAAAAAATTCGTCAAAACAAGTTCGACTGAAACAGAACGCTTGCAAGGTGCACAGTTCGTTGTTAAAGATTCAGCTGGTAAATACCTTGCATTGAAATCATCTGCGACAATATCAGCTCAAACAACAGCTTACACAAATGCTAAAACTGCTCTTGACGCTAAAATCGCAGCTTACAACAAACTTTCAGCAGACGATCAAAAAGGTACTAAAGGTGAAACAGCTAAAGCAGAAATCAAAACTGCTCAAGACGCTTACAATGCAGCCTTCATCGTAGCTCGTACAGCTTACGAGTGGGTAACTAATAAAGAAGATGCTAACGTTGTTAAAGTGACTTCAAACGCTGACGGTCAATTTGAAGTTAGCGGTCTTGCAACTGGTGATTATAAACTTGAAGAAACACAAGCTCCAGCTGGTTACGCTAAATTAGCAGGTGATGTTGATTTCAAAGTTGGAAACAGCTCAAAAGCAGACGACTCAGGTAACATTGATTACACTGCTAGCAGCAATAAAAAAGACGCTCAACGCATAGAAAACAAAAAAGTGACTATTCCACAAACAGGTGGTATTGGTACAATTCTTTTCACAATTATTGGTTTAAGCATTATGCTTGGAGCGGTAATTATCATGAAAAGACGTCAATCAGAGGAAGCT

SEQ ID NO: 20904 - protein, 693 aa, Streptococcus agalactiae
MKRINKYFAMFSALLLILTSLLSVAPVFAAEMGNITKTVTLHKIVQTSDNLAKPNFPGINGLNGTKYMGQKLTDISGYFGQGSKEIAGAFFAVMNESQTKYITESGTEVESIDAAGVLKGLTTENGITFNTANLKGTYQIVELLDKSNYKNGDKVLADSKAVPVKITLPLYNEEGIVVDAEVYPKNTEEAPQIDKNFAKANKLLNDSDNSAIAGGADYDKYQAEKAKATAEIGQEIPYEVKTKIQKGSKYKNLAWVDTMSNGLTMGNTVNLEASSGSFVEGTDYNVERDDRGFTLKFTDTGLTKLQKEAETQAVEFTLTYSATVNGAAIDDKPESNDIKLQYGNKPGKKVKEIPVTPSNGEITVSKTWDKGSDLENANVVYTLKDGGTAVASVSLTKTTPNGEINLGNGIKFTVTGAFAGKFSGLTDSKTYMISERIAGYGNTITTGAGSAAITNTPDSDNPTPLNPTEPKVVTHGKKFVKTSSTETERLQGAQFVVKDSAGKYLALKSSATISAQTTAYTNAKTALDAKIAAYNKLSADDQKGTKGETAKAEIKTAQDAYNAAFIVARTAYEWVTNKEDANVVKVTSNADGQFEVSGLATGDYKLEETQAPAGYAKLAGDVDFKVGNSSKADDSGNIDYTASSNKKDAQRIENKKVTIPQTGGIGTILFTIIGLSIMLGAVIIMKRRQSEEA

SEQ ID NO: 20905 - protein, 2688 aa, Streptococcus agalactiae
ATGAGAAAATACCAAAAATTTTCTAAAATATTGACGTTAAGTCTTTTTTGTTTGTCGCAAATACCGCTTAATACCAATGTTTTAGGGGAAAGTACCGTACCGGAAAATGGTGCTAAAGGAAAGTTAGTTGTTAAAAAGACAGATGACCAGAACAAACCACTTTCAAAAGCTACCTTTGTTTTAAAACCTACTTCACACTCAGAAAGCAAAGTAGAAAAAGTAACTACTGAGGTAACAGGTGAAGCTACTTTTGATAATCTCACACCTGGAGATTACACTTTATCAGAAGAAACGGCACCCGAAGGATACAAAAAGACTACCCAGACTTGGCAAGTTAAGGTTGAGAGTAATGGAAAAACTACGATACAAAATAGTGATGATAAAAAATCTATAATTGAACAAAGGCAAGAGGAACTAGATAAGCAGTATCCCCTTACAGGAGCTTATGAAGATACAAAAGAATCTTATAATCTTGAGCATGTTAAAAATTCAATTCCAAATGGGAAATTAGAGGCAAAAGCAGTTAATCCATATTCAAGTGAAGGTGAGCACATAAGAGAAATTCAAGAGGGAACATTATCTAAACGTATTTCAGAAGTAAATGATTTGGATCATAATAAATATAAAATTGAGTTAACTGTTAGCGGTAAATCCATAATAAAAACTATAAATAAAGATGAACCTCTGGATGTTGTTTTTGTTCTTGATAATTCAAATTCTATGAAGAATAATGGAAAAAATAACAAGGCAAAAAAGGCAGGTGAAGCAGTAGAAACAATTATAAAAGATGTTTTAGGAGCAAATGTTGAAAACCGAGCAGCTTTAGTTACTTATGGTTCAGATATTTTTGATGGAAGGACAGTTAAAGTTATAAAAGGTTTTAAAGAGGATCCTTATTATGGACTTGAAACTAGTTTCACAGTTCAGACAAATGATTATAGCTATAAAAAGTTCACTAATATTGCTGCTGATATTATAAAAAAGATCCCTAAAGAAGCTCCAGAAGCTAAGTGGGGGGGGACAAGTCTAGGATTAACTCCAGAAAAAAAGAGGGAATATGATTTAAGTAAAGTAGGTGAGACCTTTACAATGAAAGCTTTTATGGAGGCAGATACCTTGTTAAGTAGTATACAGCGTAAGAGTAGAAAGATTATTGTTCATCTAACTGACGGTGTTCCAACAAGATCATATGCCATTAATAGTTTTGTAAAAGGTTCAACATACGCAAATCAATTTGAGAGAATAAAAGAAAAAGGTTATTTAGACAAAAATAATTATTTTATAACTGATGATCCAGAAAAGATCAAAGGCAATGGGGAGAGTTACTTTTTGTTTCCCTTAGATAGTTATCAAACACAGATAATTTCTGGAAACTTACAAAAACTTCATTATTTAGATTTAAATCTTAATTACCCTAAAGGTACAATTTATAGAAATGGACCAGTAAGAGAACATGGAACACCAACCAAACTTTATATAAATAGTTTAAAACAGAAAAATTATGACATCTTTAATTTTGGTATAGATATATCTGGTTTTAGACAAGTTTATAATGAGGATTATAAGAAAAATCAAGATGGTACTTTTCAAAAATTGAAGGAGGAAGCTTTTGAACTTTCAGATGGGGAAATAACAGAACTAATGAATTCATTCTCTTCTAAACCTGAGTATTATACCCCGATAGTAACTTCAGCTGATGTATCTAATAATGAAATTTTATCTAAAATTCAGCAACAATTTGAAAAGATTTTAACAAAGGAAAACTCAATTGTTAATGGAACTATAGAAGATCCTATGGGTGATAAAATCAATTTACATCTTGGCAACGGACAAACATTGCAACCAAGTGATTATACTTTACAGGGAAATGATGGAAGTATAATGAAAGATAGCATTGCAACTGGAGGGCCTAATAATGATGGTGGGATACTTAAAGGGGTTAAATTAGAATACATCAAAAATAAACTCTACGTTAGAGGTTTGAACTTAGGGGAGGGGCAAAAAGTAACACTCACATATGATGTGAAACTAGATGACAGTTTTATTAGTAACAAATTCTATGACACTAATGGTAGAACAACATTGAATCCTAAATCAGAGGAACCCGATACACTTAGAGATTTTCCAATCCCTAAAATTCGTGATGTGAGAGAATATCCTACAATAACGATTAAAAACGAGAAGAAGTTAGGTGAAATTGAATTTACAAAAGTTGATAAAGATAATAATAAGTTGCTTCTCAAAGGAGCTACATTTGAACTTCAAGAATTTAATGAAGATTATAAACTTTATTTACCAATAAAAAATAATAATTCAAAAGTAGTGACGGGAGAAAACGGCAAAATTTCTTACAAAGATTTGAAAGATGGCAAATATCAGTTAATAGAAGCAGTTTCGCCGAAGGATTATCAAAAAATTACTAATAAACCAATTTTAACTTTTGAAGTTGTTAAAGGATCGATACAAAATATAATAGCTGTTAATAAACAGATTTCTGAATATCATGAGGAAGGTGACAAGCATTTAATTACCAACACGCATATTCCACCAAAAGGAATTATTCCGATGACAGGTGGGAAAGGAATTCTATCTTTCATTTTAATAGGTGGAGCTATGATGTCTATTGCAGGTGGAATTTATATTTGGAAAAGACATAAGAAATCTAGTGATGCATCAATCGAGAAAGAT

SEQ ID NO: 20906 - protein, 896 aa, Streptococcus agalactiae
MRKYQKFSKILTLSLFCLSQIPLNTNVLGESTVPENGAKGKLVVKKTDDQNKPLSKATFVLKPTSHSESKVEKVTTEVTGEATFDNLTPGDYTLSEETAPEGYKKTTQTWQVKVESNGKTTIQNSDDKKSIIEQRQEELDKQYPLTGAYEDTKESYNLEHVKNSIPNGKLEAKAVNPYSSEGEHIREIQEGTLSKRISEVNDLDHNKYKIELTVSGKSIIKTINKDEPLDVVFVLDNSNSMKNNGKNNKAKKAGEAVETIIKDVLGANVENRAALVTYGSDIFDGRTVKVIKGFKEDPYYGLETSFTVQTNDYSYKKFTNIAADIIKKIPKEAPEAKWGGTSLGLTPEKKREYDLSKVGETFTMKAFMEADTLLSSIQRKSRKIIVHLTDGVPTRSYAINSFVKGSTYANQFERIKEKGYLDKNNYFITDDPEKIKGNGESYFLFPLDSYQTQIISGNLQKLHYLDLNLNYPKGTIYRNGPVREHGTPTKLYINSLKQKNYDIFNFGIDISGFRQVYNEDYKKNQDGTFQKLKEEAFELSDGEITELMNSFSSKPEYYTPIVTSADVSNNEILSKIQQQFEKILTKENSIVNGTIEDPMGDKINLHLGNGQTLQPSDYTLQGNDGSIMKDSIATGGPNNDGGILKGVKLEYIKNKLYVRGLNLGEGQKVTLTYDVKLDDSFISNKFYDTNGRTTLNPKSEEPDTLRDFPIPKIRDVREYPTITIKNEKKLGEIEFTKVDKDNNKLLLKGATFELQEFNEDYKLYLPIKNNNSKVVTGENGKISYKDLKDGKYQLIEAVSPKDYQKITNKPILTFEVVKGSIQNIIAVNKQISEYHEEGDKHLITNTHIPPKGIIPMTGGKGILSFILIGGAMMSIAGGIYIWKRHKKSSDASIEKD

SEQ ID NO: 20907 - protein, 1543 aa, Streptococcus agalactiae
ATGTTTGAGAGAGAGTTTACTGAATTGATTGAAAATTATTTAGAAAAAGACATCCTTAATCAAATAAAACTTCTAACTTTATGCTATGATTACTACCCTTCCATTACTCTAGACAAATCATGTCATCAACTTGGTTTATCTGAACTACTTATTAGGAAATATTGTCATGATTTAACAACTTTATTTAACAGTCAACTCTCTCTGAATATCGAAAAGAGTACAATAGTCTACCAATCTAATGGTGTAACTAGAGAACAAGCTTTCAAATATATTTATCATCAATCACACGTTTTACAACTTTTAAAATTTTTGATCACGAATGATTCAGGCAGGTTACCTTTAACTTACTTTAGTGAAAAATTTGGACTATCTTGTGCAACTGCTTATCGCATACGAAAACATATTAGTCCGTTACTAGAAAAACTTGGATTTCAGATTGTCAAAAATACTATTACCGGTGACGAGTATCGAATTCGCTATTTAATCGCACATTTAAATGCTCGATTTGGTATAGAAGTTTATCCCTTATCTAAGATGGATAAATTGCTATCAACGATTTATTAGATACTCACTACTTTTACTGCTTCTCATTACTTCCCAATACATTTATTTTCTTTGATACATTATTGTCTCTATCATGGAAACGTATTAATTATAATGTAGTTGTCCCTTACTCACCCCTTTTCATTGAACTACAAAATATATTTATCTATGATACATTACAATATTGTGTCAAAAATGTTATTATAGATTCCTTTAAAATTAATTTAAAAAAAGACGATATAGACTATATTTTTCTTGCTACCTTACTTCCCATAACTCTTTTTCTAATCCAAATTGGACTGAGAAGCGTATCGATAATGTAATAGCTATTTTCGAAAATTATCCCAAATTCCAAAAATTATTACAGCCACTCAAAGATGCTCTTCCCTTATCTGGCTCCTATCATGATGAGTTGGTAAAAGTTGCTATCTTTTTTTTCCGAACATTTATTTTAGGATTAAATCAATTAATCCCTGAAACAATTTCATTTCCTTCATGGAACTATCATAGACATGATAAATTAACTACTATTCTCCGACCGATAATTACAAACTGGTTAAGTGAAATTGGAGAATACACATTTAAAGAACAACATTTTCTTCTCCTTTGTACTCATCTAGAAAGAATCATCAAAAATCATATTCCTCCGATACAGATAGCCGTACTAACTACAGACTTTATTAATAACCAAATTTTAACAGAATGCTTATTACAGAGATTTTCTTCTAAAAAGATTCATTTCCACCCTTACTATTTATTAACTGATGATCTTTCCAATATTACTAATCTTAATCCAGACATTATTATTACCAATAAAAAGCTTTCTCCCTTTATCAAACATGAGATTTCTTCAGAGAGTTTAATTACATATATTGATCTGATTAATACTTCAGACCAAATCAATCAAATCCAAAAAATTATTTCATCAATACAGGAAGAAAAATATTGCAAACTTTTTGCAAAAACTAATGAAATAACTAATCGTAGCTCCTATAACTCT

SEQ ID NO: 20908 - protein, 517 aa, Streptococcus agalactiae
MFEREFTELIENYLEKDILNQIKLLTLCYDYYPSITLDKSCHQLGLSELLIRKYCHDLTTLFNSQLSLNIEKSTIVYQSNGVTREQAFKYIYHQSHVLQLLKFLITNDSGRLPLTYFSEKFGLSCATAYRIRKHISPLLEKLGFQIVKNTITGDEYRIRYLIAHLNARFGIEVYPLSKMDKLLIKRLLLEYSTTFTASHYFPNTFIFFDTLLSLSWKRINYNVVVPYSPLFIELQNIFIYDTLQYCVKNVIIDSFKINLKKDDIDYIFLAYLTSHNSFSNPNWTEKRIDNVIAIFENYPKFQKLLQPLKDALPLSGSYHDELVKVAIFFFRTFILGLNQLIPETISFPSWNYHRHDKLTTILRPIITNWLSEIGEYTFKEQHFLLLCTHLERIIKNHIPPIQIAVLTTDFINNQILTECLLQRFSSKKIHFHPYYLLTDDLSNITNLNPDIIITNKKLSPFIKHEISSESLITYIDLINTSDQINQIQKIISSIQEEKYCKLFAKTNEITNRSSYNS

SEQ ID NO: 20909 - protein, 1137 aa, Streptococcus agalactiae
ATGGAAAATAAGGTAAAAACAGTTGCTGTTTTCTCAGGATATTATCTACCCTTCCTCGGAGGTATTGAACGTTATACAGATAAAATGACAGCAGATTTGGTTAAGCGTGGCTACCGTGTTGTTATTGTAACAACTAATCATGGTGATTTACCGATTATAGATGAAGACAAGGGTAGAAAAATTTACCGTTTACCGACCAAAAATATTGTCAAGCAGCGCTATCCTATTATTAACAAAAATCGAGAATACAACACGCTGATGAAATATGTTTCAGATGAAAATATTGATTTTGTGATTTGTAATACACGTTTTCAGTTAACAACGCTAGAAGGGCTATCTTTTGCAAAGAAGCACCATTTACCTAGTATTGTTTTAGACCATGGGTCAAGTCATTTTTCTGTCAATAATCGTTTTTTAGATTTCTTTGGAGCTATCTATGAACATCTTCTCACAGCGCGTGTTAAGCATTATCGTCCAGATTTTTATGCGGTATCCAAGAGAAGCGTTGAATGGTTAAAACATTTTAATATAGAAGCTAAAGGAGTTATTTATAATTCGGTATCTGAAAGTCTAGGCTCTGATTTTGCTAGTACGGCTTACCTTGAAAAATCTGCTGATGATATTTTCATCACTTATGCTGGTAGAATTATTAAAGAAAAAGGCATTGAATTGCTCTTAGAAGCATTTTCGATGTCACAGTACTCTGAAAATGTTTATTTACAGATTGCAGGAGACGGACCTGAATTAGCACATTTGAAAGAGAAATATCAGTCCAAACAGATTAACTTTTTGGGGAAATTAAACTTTGAACAGACTATGTCTTTAATGGCACAGACTGATATCTTTGTTTACCCTTCAATGTATCCAGAGGGATTACCAACCTCTATTTTAGAAGCTGGTCTACTTTCAAGTGCTATTATTGCAACAGATCGCGGTGGAACAGTTGAAGTTATTGATAGCCCTGAGTTAGGAATCATCATGGAAGAAAATACTCAGTCACTCCATGAATCTCTTGATTTATTAGTAAAAGATAAGGCATTAAGAGAGAAACTACAACAGAATATTGCTAAAAGAATTAAAGAACATTTCACATGGGAAAAAACAGTTGAAAAGTTGGATTATATTATTCAAAAAAAT

SEQ ID NO: 20910 - protein, 379 aa, Streptococcus agalactiae
MENKVKTVAVFSGYYLPFLGGIERYTDKMTADLVKRGYRVVIVTTNHGDLPIIDEDKGRKIYRLPTKNIVKQRYPIINKNREYNTLMKYVSDENIDFVICNTRFQLTTLEGLSFAKKHHLPSIVLDHGSSHFSVNNRFLDFFGAIYEHLLTARVKHYRPDFYAVSKRSVEWLKHFNIEAKGVIYNSVSESLGSDFASTAYLEKSADDIFITYAGRIIKEKGIELLLEAFSMSQYSENVYLQIAGDGPELAHLKEKYQSKQINFLGKLNFEQTMSLMAQTDIFVYPSMYPEGLPTSILEAGLLSSAIIATDRGGTVEVIDSPELGIIMEENTQSLHESLDLLVKDKALREKLQQNIAKRIKEHFTWEKTVEKLDYIIQKN

SEQ ID NO: 20911 - protein, 846 aa, Streptococcus agalactiae
ATGAAATATTTAGCGGGTATTGTCACCTTTAACCCCAATATTGAACGCTTAGATCAGAACATTCGAGCAATTTATCCTCAAGTAAGCCATATCTACATCGTAGATAATGGCTCGAAAAATAAGGAAGAAATTTCTCAATTAGTGGCCGATTATAATGAAGAGGGGCACCTAACTGTTGATTATTTAACAGAAAATAAAGGAATTGCATATGCTTTGAACTGTATCGGTCAATTTGCAGTAGCACAAGAATTTGATTGGTTCTTGACTTTAGATCAAGATTCGGTTGTCCTAGGTGATTTGATAGATAATTATGAAAATTACCTTCTTTTACCTAAGGTCGGTATGTTATCTTGTTTGTATCAAGATATGAACCGTGAAGATTTAGTTATGCAAGAATTTGACTATAAAGAAATTGAAGAGTGTATTACTTCGGCTGCTTTAATGAAAACGAGCGTTTTTGAAGAAACATCTGGCTTTGCAGAAGAGATGTTTATTGATTTTGTTGACTCTGAAATGAATTATCGTCTGTCAGAGATGGGATATAAGACTTATCAGGTTAATTTTATTGGTCTTTTACACGAAATTGGACACTCTTCACGAGTTAAAAAATTTGGCCATGTTTTTCATGTATTGAATCATTCACCATTTCGAAAATATTACATGATACGCAATGCGATCTATATTATAAAAAAATATGGTAAGAAGAAGCGATACAAATATTTAGTATTTATGCGAAATGAATTTGTTCGAGTGTTGGTAGCAGAAGAGCAAAAGAGCAAAAAAATAGTTGCTATGATTAAAGGCTTAAAAGATGGCTTATTGATGAAAGTGGATAAATATGGAAAA

SEQ ID NO: 20912 - protein, 282 aa, Streptococcus agalactiae
MKYLAGIVTFNPNIERLDQNIRAIYPQVSHIYIVDNGSKNKEEISQLVADYNEEGHLTVDYLTENKGIAYALNCIGQFAVAQEFDWFLTLDQDSVVLGDLIDNYENYLLLPKVGMLSCLYQDMNREDLVMQEFDYKEIEECITSAALMKTSVFEETSGFAEEMFIDFVDSEMNYRLSEMGYKTYQVNFIGLLHEIGHSSRVKKFGHVFHVLNHSPFRKYYMIRNAIYIIKKYGKKKRYKYLVFMRNEFVRVLVAEEQKSKKIVAMIKGLKDGLLMKVDKYGK

SEQ ID NO: 20913 - protein, 1422 aa, Streptococcus agalactiae
ATGAAACTTTTGAAAAATATGTTTTATAATACCTCATACCAGTTATTGACTTTGTTGTTACCTTTAGTAACAGTTCCTTATGTTTCCCGTGTACTATCTCCTCAAGGCATCGGTATTAATGCCTATACGAGCTCCATTGTCATGTACTTTACTTTATTTGGTGCTTTAGGGATATCTTTGTACGGTAATCGTGAGATAGCTTTTGTGCAGTCAAATAAGTATAAGAGAAGTAAGATATTTTGGGAATTAGTTGTATTAAAACTTGCCTCTGTATCTATAGCAACGTTATTATTCTTTGGATTTGTCTTACTTACAAACGAATGGCAATTATTCTATTTAATTCAAGGTATTAATTTATTAGCGACTGCAACTGATATTTCGTGGTATTTTATTGGAGTTGAAGACTTTAAGATAATTGTCATTCGTAATACCATTGTTAAGCTTATTACAGTTGTTTTGACCTTCTTAGTTGTGAAGACGCCAGATGACCTAGCACTTTATATGTTTTTAATTGCATTTGCATCATTACTCGGAAATTTAACAGTCTGGCATCATTTAAAGCATGAAATCATCAAGATACCATTTAGTAGATTAGATATCTTAATACATCTAAGACCAACTTTAATGTTATTTTTACCCCAAATCACCATGCAGATTTATCTCTCTCTTAACAAGAGTATGCTGGGAGCAATGGATAGTGTGGTCAGTGCTGGATATTTTGATCAATCTGATAAAATTATTCGTATTTTATTTACCATTGTTTCAGCAATCGGAGGAGTTTTCTTACCAAGGCTCTCCAGTCTATTTTCTTCAGGAAAAGAAAAGCAAGCTAAGGCTTTACTTTTGAAACTTGTTGATTTAAGCAATGCTATCTCAATGTTAATGATTGCGGGAGTGGTAGGAGTTTCGTCGACATTTGCCGTCTTCTTTTTTGGGAAAGGGTATGAAGCTGTCGGTCCGCTAATGGCTGTTGAGTCTTTGATGATCATTTGCATTTCTTATGGTAACGCTTTAGGGACACAGTATCTACTGGCTTCAAGACGTACAAAAGCTTACACAATGTCTGCAGTTATTGGACTTGTGGCAAATGTTGTGCTTAATATACTTTTAATACCAATTTTAGGTGCTATGGGAGCTATTATCTCTACAGTTATTACTGAATTTATTGTCTCCCTCTATCAAGCTATCTCTTTAAGAGATGTATTTACTTTTAAAGAATTAACAAGAGGAATGCTGCGCTATTTAATTGCTGCTACTCTTAGTGGAGCTGTACTTTATTATATCAATACTCAAATGTCAGTATCATTGGTAAATTATGTCATTCAAAGTTTAGTAGCAGTAACTATCTATGTCGGTATCGTTTTTATAACCAAAGCACCAGTCATTCAGTTATTTAGAGATTTTAGAAAAGAGCACAGAACA

SEQ ID NO: 20914 - protein, 474 aa, Streptococcus agalactiae; identical to SEQ ID NO: 2638

SEQ ID NO: 20915 - protein, 1243 aa, Streptococcus agalactiae
ATGAACCTCAAAAAAGTTCGTCTATTTGAAAAGTTTTTTCTAGACAAGAACTTGCATAAAACATATTTTATATTAGGCTTAACGATTACTATTGTATGAGCCATTAATGCCATTTTCATGAACCTGATGGACAATACCATTTAGCTGTGTCTGGTCGTATTTCAAATAACATTATTGATACTTCTTACTATGGAGAATATAATATTGATTCAGGTATGAGACGACAATCGACCTCCTATAGAGATGGTACTAGATTTGAAAAATACTATTTAAATAAAGCCAATTTTGTTGATGGTAATCATTTGCCTCGTGAGATAAACTATTCTAAACATAACTTTGTTTTTTGGGGTCATCTTGTGCCAGCAGTTGGCTTATTTTTAGGCAAATTTGTGTATCCTTCTATGGGGGTAATGATTACAGTAGCAAGGTTATTTAGTCCTTTGTCTCAATCACCTTGGTTGCCCTCATTATCCGGTATGTGAAAAAAGGAAAGTTAATCTACTTTGCTATTTTCCTCAGTCCCGTAGTTCTAAATTCATTTGCTAGTCTATCTTATGACTCGACTGGATATATTGTATTTGGAGCATTTTTATCGCTTTTGATAAATCTTTTAGTTGATAAATCGTTGACTAAAAATCGTAGTATTGCTCTTATAGGATTGATTCTTTTAGTCATTGTTGCATGTAAGCAGAATTACTGGCTGTTTTTATTGCTAGTAATACCGGTATTATTGCAGGTTAACAATCCTAAATTAATGGGCTATAATCAGAAGCTATCACATTTATTTCAAGGTCTTAAATCTAAAAAGCTATTTTGGCTATGTCTAACCTTTTTGTCACTTGCTATAGTTTATGTTCTGACCGCAAGACATGGTGGTGTCCTTGCTGTTTTAAGACGTTATGTAATGACATTTGGCTATAATTATGCTGGTATCAATATTTTAAGTAATGACATTACTTCCTGGCTTGCCTCTCCATATCCAAGTCAGATTTTATTCCCACTTGGGTATCATCAGTATGGTATCTCATGGTCTTTCTAGTATGGTTTTCTGAAGAAAAATTTGTTAAGTCAAAAAATATGGGATTTCTTTTCTTAGCTAGTTTCTTTGTGGGAATTCTTGGTGTCTTTTTTATCATGTTAGAATATCGTGGAGCGCCAACAAGCTACATTGAAGGAGTTCAAGGACGTTACTTTACTGTTACATTGCTTTGGTACAAGTTTGCATCAAGTATTCCAGCGCGTC

SEQ ID NO: 20916 - protein, 417 aa, Streptococcus agalactiae
  VARIANT 148: Xaa = Any Amino Acid
MNLKKVRLFEKFFLDKNLHKTYFILGLTITIVLSLLMPFFNEPDGQYHLAVSGRISNNIIDTSYYGEYNIDSGMRRQSTSYRDGTRFEKYYLNKANFVDGNHLPREINYSKHNFVFWGHLVPAVGLFLGKFVYPSMGVMITVARLFSXFVSITLVALIIRYVKKGKLIYFAIFLSPVVLNSFASLSYDSTGYIVFGAFLSLLINLLVDKSLTKNRSIALIGLILLVIVACKQNYWLFLLLVIPVLLQVNNPKLMGYNQKLSHLFQGLKSKKLFWLCLTFLSLAIVYVLTARHGGVLAVLRRYVMTFGYNYAGINILSNDITSWLASPYPSQNFIPTWVSSVWYLMVFLVWFSEEKFVKSKNMGFLFLASFFVGILGVFFIMLEYRGAPTSYIEGVQGRYFTVTLLLVQVLHQVFQRV

SEQ ID NO: 20917 - protein, 924 aa, Streptococcus agalactiae; identical to SEQ ID NO: 7221

SEQ ID NO: 20918 - protein, 308 aa, Streptococcus agalactiae; identical to SEQ ID NO: 2642

SEQ ID NO: 20919 - protein, 933 aa, Streptococcus agalactiae
ATGGTAAAGACAGCAGTTTTAATGGCGACATACAATGGCGAAAAATTTATATCTGAACAACTTGATTCAATTCGCCAACAGACATTAAAACCAGATTATGTATTATTGAGGGATGATTGTTCAACGGATGAAACAGTCAATGTCGTCAATAACTATATCGCAAAACATGAGTTAGAAGGCTGGAAAATTGTTAAAAACGACAAAAACTTAGGCTGGCGTTTAAATTTTCGTCAATTACTTATTGATGTGTTAGCCTATGAGGTTGATTATGTCTTTTTTAGTGATCAAGATGATATTTGGTATCTTGATAAAAACGAACGACAGTTTGCCATTATGTCAGATAACCCTCAAATTGAGGTTTTGAGTGCAGACGTTGATATCAAAACGATGTCTACAGAAGCCAGTGTTCCACATTTTCTAACTTTTTCTTCTAGTGATAGAATCAGTCAGTATCCTAAAGTATATGATTATCAAACATTCCGTCCCGGATGGACCATTGCTATGAAGAGAGATTTTGCGCAAGCTATCGCTGATAATTGGACTTTTGGAGCTAATATTTCGCACGATAATCTTATCGAGACAACTGCCAGTATTATTGGAAATGGTTATAACCTTAACGAAAGCGTAGGAGTTCATATTCGATATGGAGGAAACGCAAGTGGTAATAGCAAATTTGTTTTGAATTGGAAGTCGCCTAAAACACAACATATCACAGGATTAAAAACATTTGTTGATTTTTACGAAACCATGCAGAAGGTTGTCAACAAATATCAAAATGATGTCGCTTTAAATCAACGCTTAGCCTTTGAAAAAGAAAGATTGGAAGCTTCTAAATTGTCATTAATTCATAATAGTGCTTTTGTGATTAAAAATTGGCGACTCTATAACTCTAATAGTGGACGTATGAGAGATTTATTATTTGCGTTTAAAAAG

SEQ ID NO: 20920 - protein, 311 aa, Streptococcus agalactiae
MVKTAVLMATYNGEKFISEQLDSIRQQTLKPDYVLLRDDCSTDETVNVVNNYIAKHELEGWKIVKNDKNLGWRLNFRQLLIDVLAYEVDYVFFSDQDDIWYLDKNERQFAIMSDNPQIEVLSADVDIKTMSTEASVPHFLTFSSSDRISQYPKVYDYQTFRPGWTIAMKRDFAQAIADNWTFGANISHDNLIETTASIIGNGYNLNESVGVHIRYGGNASGNSKFVLNWKSPKTQHITGLKTFVDFYETMQKVVNKYQNDVALNQRLAFEKERLEASKLSLIHNSAFVIKNWRLYNSNSGRMRDLLFAFKK

SEQ ID NO: 20921 - protein, 1052 aa, Streptococcus agalactiae
ATGATTAAATTTAGTAATAAAATTGTACAAGAAGATTTAGCACTTATTAGTAACCAAAATTATATTAATTGGGAAAGAATTGCTAATAAAGGCGTTTTAATAAGTGGTTCTAATAGTATGTTAGCGAGTTATATGGTATTTTTACTAGCCTATCTCAATGAGACAAGAAATTACCAAACGCAAATTATTGCGACAGCTAGAAACATTGAAAAAGCCCGTGATAAATTTTCAGATTTAGTTGGGAAAGATTATTCACCTTAATTCCTTATGATGTAGAAGAACGCCTAGAGTATGATGGAAAAGTGGATTACATTATCCATGCAGCAAGCAATGCTAGTCCAACTGCTATTTTGAGTAATCCTGTTAGCATCATAAAAGCTAATACAATTGGTACATTGAATTTATTAGACTTTGCAAAGGAAAAAACAATTGAAAACTTCTTGTTCTTATCAACGCGTGAAGTATATGGAACATCTATTAAAGAAGTGATTGATGAAGAAGCTTATGGTGGATTTGATATTTTAGCTACTAGAGCTTGTTACCCAGAAAGCAAACGTATGGCTGAAACTCTACTGCAAAGTTACTATGATCAATATAAGGTACCCTTTACTATTGCTCGTATTGCACATTCATTTGGTCCTGGTATGGAGCTTGGTAACGATGGTCGTATTATGAATGATCTTTTATCGAATGTCATTGATGGCAAAGATATCGTTTTAAAAAGTAGTGGTACAGCAGAGCGTGCTTTCTGTTATTTAGCAGATGCTGTATCAGGGTTATTTACTATTTTATTAAATGGTGAAGTTGGTCAAGCTTACAATGTAGCAAATGAAGATCAACCCATTATGATTAAGGATTTGGCACAAAAGTTAGTTGATCTCTTTTCTGATAAAAATATTTCAGTAGTATTCGATATTCCTAAAACTATGAGTGCAGGTTATAGCAAAATGGGGAGAACACGTCTCACTATGGCCAAATTAGAAGCGTTGGGATGGAAGCGAGAAGTTTCTCTTGAATCTGGAATATTAAAAACAGTACAAGCATTTGAGGAG

SEQ ID NO: 20922 - protein, 351 aa, Streptococcus agalactiae; identical to SEQ ID NO: 7226

SEQ ID NO: 20923 - protein, 717 aa, Streptococcus agalactiae; identical to SEQ ID NO: 7227

SEQ ID NO: 20924 - protein, 239 aa, Streptococcus agalactiae; identical to SEQ ID NO: 2648

SEQ ID NO: 20925 - protein, 777 aa, Streptococcus agalactiae
ATGTTAGCTTATATTGATAAAGTTGCGCGTGATAATAAAATTGAATATTCTTTAGGCGGAGGCAGCCTACTGGGAGCAATGAGACATAAAGGATTCATTCCATGGGATGACGATATTGATTTGATGCTAGAAAGAAGCCAGTATGAGCGTTTGATGAAAGCATTAGCTGATGCTAATAATAGCGATTTTAAATTGCTACATCATTCTGTTGAAAAAAATCTATGGCCATTTGCCAAGCTGTATCACACAAAGTCAATGTACTTAAGTAAAACAGATAGAATTCATCCTTGGACAGGGATTTTTATTGATATCTTCCCACTTGACCGATTACCAGAGAGTGCAGAAGAACGTCAAAGATTCTTTAAAAAAGTTCACTCTGCTGCTGCAAATTTGATGTGTACGACTTACCCCAATTTTGCTAGCGGTTCCCGAAAGCTTTATGCAAATGCAAGGCTAATTTTGGGGCTACCCCGATTCATTGCTTATCACGGCCAAGCTAAAAAACGTGCTGAAATTGTTGATCAAGTGATGGAAACATATAATAATCAAGAGGTTCCTTACATGGGTTATACCGATTCAAGATATCGCTTGAAAGAATATTTTCCAAGAGAAATTTTTTCTGAGTATGAAGATGTTATGTTTGAAAACATTAAAACCCGAAAAATTAAAAATGAGCATGCTTATCTGAATCAATTATATGGGGGTAGTTATATGGAATTACCTCCAGAAAGTAAGAGAGAAAGTCATAGTTATTACACTTGGTACTGGAAAGAAGGT

SEQ ID NO: 20926 - protein, 259 aa, Streptococcus agalactiae; identical to SEQ ID NO: 2650

SEQ ID NO: 20927 - protein, 956 aa, Streptococcus agalactiae
TTGTATCCAATAGATAGCAGTATTAGTGTCGATGGTGATAAAATGTTTTAAATAGTAGTGGTGATGAAACAGAGCAAAAAGAATTATTACAAAATAGCCTGTATAAACTTCACTCTATTGATAAGTTAGACTTTGATTTGACAAATGCTGATATTAAAGAGTTAGAGATTACAGGACATGTTGCTTCAAAAAGAGATTATAATTTGTCTGTTGCTCAGGAAAAGAAAGGCGTCATAGAGACTAAACGGAGTCTAATTTCTGTTGATAATCAAAAACAAGATCAAGGGATTTTTGTCGAGGATTCTAAAGGCTATATAAAGACACCTAGTTTGAGCAGTTATGGTATAAATTTTGCCATGTATGACGACAATCAAAATAGATTATTGCAAGGTTCAGAGTATATTTTAGGAAGATTGAATGCAGATAAAAAAGTATCTCTATATCAACCTAATGGCTTTTGGATAAATACTCAAAAAACGATTAAGAGTTTAAATAAAGAATATCTTAACCAAAATGCTTACCATATTAGAGGAAATAACATTATAGGTATTGATGGCTATTCAAATGACATAGACTTGAATCCTAGGTTATGGGCTTATAACTATAAAAAACAAGTGAAAAGTAACCAATCATTATTTAAATTACGAGGTTTGTCTAATAAGTATAAGTATTTCTTAATACAGACAAAATCTCCAAAAGGCTACTTACAAAGCAATAAACCATTTTATTTTACAGTAAATAAAGATAGTGTTTCTAAAGCACAATTTGGTAACTATAATATAAATGGTTATATAATGGACATGCAGTACAACAAACAAGAATACAATGCACTTGCAAACACTCCAAAAGGTCAAAAAACAAAGAAAACTTTCAAACCCATGACCCTAGTGATTCTTTTTGCAGTAGCTTTATTTATTTTCTATATTACAGCTATAAGATTTGTATTTAAAAGAATG

SEQ ID NO: 20928 - protein, 319 aa, Streptococcus agalactiae
MYPIDSSISVDGDKIVLNSSGDETEQKELLQNSLYKLHSIDKLDFDLTNADIKELEITGHVASKRDYNLSVAQEKKGVIETKRSLISVDNQKQDQGIFVEDSKGYIKTPSLSSYGINFAMYDDNQNRLLQGSEYILGRLNADKKVSLYQPNGFWINTQKTIKSLNKEYLNQNAYHIRGNNIIGIDGYSNDIDLNPRLWAYNYKKQVKSNQSLFKLRGLSNKYKYFLIQTKSPKGYLQSNKPFYFTVNKDSVSKAQFGNYNINGYIMDMQYNKQEYNALANTPKGQKTKKTFKPMTLVILFAVALFIFYITAIRFVFKRM

SEQ ID NO: 20929 - protein, 446 aa, Streptococcus agalactiae
ATGAGTAAAAAACATATTTTTATTTGTCTGTTTTTCATGCTTTTTTTAGTAGGTTGCCAAATAATAAAAAAGTAAAAACAGATAAAAAAGTAGATATTACAGCTTATTATTATCATAATAATACCCCGCAATACAGTGTTCAGATTAATGCTATTCATTTACAAACAGCATTGGATAAAGTGAGGACGGGGGAGTTTGAGAGCAAAGACTTTACACACTATACTTTTGATAGTATCAAGCGGAAGTACCAAGTTAGTGGTAAAAAAGTCCTTATGGATAATAACTATAGATTTGGTTCTGGTATAAAAAATACTAGACAGGATGCTATTGCTATTGTAAGGTTACTGCTTGAAAAGAATAAAGATTATTTAATTTACATGAATGGCTTAGAAGAGCCAAGTGTTTTATATAATCCAGAAAATAAACGTTATAAGTTCACAAATAAC

SEQ ID NO: 20930 - protein, 149 aa, Streptococcus agalactiae
  VARIANT 20: Xaa = Any Amino Acid
MSKKHIFICLFFMLFLVGCXNNKKVKTDKKVDITAYYYHNNTPQYSVQINAIHLQTALDKVRTGEFESKDFTHYTFDSIKRKYQVSGKKVLMDNNYRFGSGIKNTRQDAIAIVRLLLEKNKDYLIYMNGLEEPSVLYNPENKRYKFTNN

SEQ ID NO: 20931 - protein, 351 aa, Streptococcus agalactiae
ATGAGTTTAGCATTGCAAATTGAAATGTTTATTTTAGCCATTGTCCTACTTTATATGATTATAAGAATGGTTAATAAAAACACATTTTCTGTTAAACGTTCTTTACCTTGGCTATTAGTTGGTTTAATTCTAGTCTTTATTAGTGTATTTCCTGGGGTGGTCTCATTTATCGCTCATCACCTTGGATTCGCTTTAACGATGAATTTCTTGTTATTTGGTGCTATTTTATTTCTGTTTTGTTTAGAATTATTTGATACTAGTAACAATACCAAAAGAGATGAGCAAATTAAACGCCTGATTCAAGAGGTTTCTTTGTTGAAAAAAGAGATAGAGGATAGCACTTTAGATGAG

SEQ ID NO: 20932 - protein, 117 aa, Streptococcus agalactiae
MSLALQIEMFILAIVLLYMIIRMVNKNTFSVKRSLPWLLVGLILVFISVFPGVVSFIAHHLGFALTMNFLLFGAILFLFCLELFDTSNNTKRDEQIKRLIQEVSLLKKEIEDSTLDE

SEQ ID NO: 20933 - protein, 555 aa, Streptococcus agalactiae
TTGGGTTTAAATCATATTGACCTTGTTCAAAATCTAGGTATTGGTGGCTGTGTGCAGACAGGATACTTATACGCTAATCGTAATCATTACGATGTTGCCGTTTTTGATGGTGATGGTCAACATGATATTAGAAGCATTGAAGATGTTGTTATGCCAATCTTAAATGACGAAGCAGATTTTGTTATTGGTTCTCGCTTTGTTGATAAAAAACATCAAAATTTTCAATCGACAGCAATGAGGCGTCTTGGCATAAATTTAATATCTGCTGCTATAAAATTAACGACGGGACACAAAGTCTATGATACAACAAGTGGTTATAGGGCAGCCAACGCGGCGCTAATAGCTTATTTATCGTGTCATTATCCAGTACAATACCCAGAGCCTGAATCAACTGCTCGGATTTTGAAAAAAGGCTATCGTTTGAAGGAAGTCACAGCTAATATGTTTGAACGTGAGGCAGGTACTTCAAGTATAAGTTCCCTAAAATCGATTTTTTATATGACGGATGTTTTAACATCAATTATTATTGCAGGGTTTATTAAGGAGGATGATAAA

SEQ ID NO: 20934 - protein, 186 aa, Streptococcus agalactiae; identical to SEQ ID NO: 8758

SEQ ID NO: 20935 - protein, 732 aa, Streptococcus agalactiae
ATGAAAGTTAATATTTTAATGGCCACCTACAATGGAGAGAAGTTTCTGGCGCAGCAAATCGAAAGTATCCAAAAGCAAACCTTTAAAGAGTGGAACCTCCTAATCAGAGATGATGGTTCAAGTGACAAGACATGTGATATTATTAGAAACTTTACTGCTAAAGATTCTCGAATTCGTTTCATTAATGAAAATGAGCACCATAATTTAGGAGTTATTAAATCATTTTTTACGCTAGTTAATTACGAAGTTGCAGATTTCTATTTTTTTAGTGATCAAGATGATGTATGGTTGCCAGAAAAGTTATCTGTAAGTTTAGAGGCAGCAAAGCATAAAGCATCTGATGTACCATTACTTGTTTATACTGATTTGAAAGTTGTTAATCAAGAATTAAATATTTTACAAGACAGCATGATTCGGGCTCAATCGCACCATGCCAATACGACATTATTACCAGAACTAACTGAGAATACTGTTACTGGTGGGACTATGATGATAAATCATGCATTAGCTGAGAAGTGGTTTACTCCTAATGATATCTTAATGCATGATTGGTTTTTAGCACTCTTAGCAGCAAGTTTAGGAGAAATCATTTATTTGGATTTACCAACTCAACTATACCGTCAACATGACAATAATGTTTTGGGGGCGAGGACAATGGATAAGAGATTTAAGATACTTCGTGAAGGTCCTAAATCTATATTTACAAGGTATTGGAAACTTATNNNNNTTAAT

SEQ ID NO: 20936 - protein, 244 aa, Streptococcus agalactiae
  VARIANT 241, 242, 243: Xaa = Any Amino Acid
MKVNILMATYNGEKFLAQQIESIQKQTFKEWNLLIRDDGSSDKTCDIIRNFTAKDSRIRFINENEHHNLGVIKSFFTLVNYEVADFYFFSDQDDVWLPEKLSVSLEAAKHKASDVPLLVYTDLKVVNQELNILQDSMIRAQSHHANTTLLPELTENTVTGGTMMINHALAEKWFTPNDILMHDWFLALLAASLGEIIYLDLPTQLYRQHDNNVLGARTMDKRFKILREGPKSIFTRYWKLXXXN

SEQ ID NO: 20937 - protein, 1152 aa, Streptococcus agalactiae
ATGCAAGATGTTTTCATTATAGGAAGTAGAGGGTTGCCAGCTCGTTACGGTGGTTTTGAAACTTTTGTTTCAGAATTGATTAATCATCAAAAAAGTTCCGACATAAAATACCATGTTGCATGCCTTAGTGATAAAGAACATCATACTCATTTTAACTTTGCTGACGCTGATTGTTTTACTATAAATCCTCCCCAATTAGGGCCAGCACGCGTGATTGCTTATGATATTATGGCCATTAATTATGCCCTTGACTTGGTTAAGACACATGATTTAAAAGAGCCTATTTTTTATATTTTAGGAAATACAATTGGTGCATTTATTTGGCATTTTGCCAATAAAATACATAAAGTCGGTGGCTTATTGTATGTTAATCCGGATGGTTTAGAGTGGAAGCGATCAAAGTGGTCTCGTCCTATACAGCGTTATTTAAAATACGCCGAAAAATGTATGACTAAAAATGCAGACCTAATTATTTCTGATAATATTGGTATTGAAAATTACATTCAAACTACCTACTCTAATGTGAAGACAAGGTTCATTGCTTACGGTACAGAGATTAATTCTGGGGAATTATCGTCAGATGATCCACGTGTCAAACAGTTGTTTAAAAAATGGAATATTAAGTCTAAGGGTTACTATCTAATCGTTGGTCGATTTGTCCCTGAAAACAATTATGAAACAGCTATTAGGGAGTTCATGGCTTCAGATACTAAGCGTGATTTAGTTATTATCTGTAACCATCAAAATAACCCCTACTTTGAAAAGTTGTCCTTAAAGACAAACCTTCAACAAGATAAAAGAGTTAAGTTTGTAGGTACGCTCTATGAAAAAGATCTGCTGGATTATGTTCGTCAACAAGCCTTTGCTTATATTCATGGGCATGAAGTTGGCGGTACTAATCCAGGACTGCTTGAGGCTTTAGCTAATACTGATTTGAATCTTGTTCTAGATGTTGATTTCAACAAATCAGTAGCAGGTCTCTCAAGTTTTTACTGGGCTAAAAAAGAGGGGGATTTAGCTAAGCTTATTAACGATAGTGATCAACAACAGGATTTATCTACTTACGGTGATCGAGCAAAAGCCATTATTCAAGAAAACTATACTTGGAAAAAAATTGTTGAAGAATATGAGGATTTGTTTTTAAATGAAAGT

SEQ ID NO: 20938 - protein, 384 aa, Streptococcus agalactiae
MQDVFIIGSRGLPARYGGFETFVSELINHQKSSDIKYHVACLSDKEHHTHFNFADADCFTINPPQLGPARVIAYDIMAINYALDLVKTHDLKEPIFYILGNTIGAFIWHFANKIHKVGGLLYVNPDGLEWKRSKWSRPIQRYLKYAEKCMTKNADLIISDNIGIENYIQTTYSNVKTRFIAYGTEINSGELSSDDPRVKQLFKKWNIKSKGYYLIVGRFVPENNYETAIREFMASDTKRDLVIICNHQNNPYFEKLSLKTNLQQDKRVKFVGTLYEKDLLDYVRQQAFAYIHGHEVGGTNPGLLEALANTDLNLVLDVDFNKSVAGLSSFYWAKKEGDLAKLINDSDQQQDLSTYGDRAKAIIQENYTWKKIVEEYEDLFLNES

SEQ ID NO: 20939 - protein, 852 aa, Streptococcus agalactiae
ATGATTTTAATTACAGGAGCAAACGGGCAATTAGGTAGTGAATTACGTCACCTTTTAGAAGAACGAACTCAAGAGTATGTTGCTGTTGATGTAGCTGAAATGGATATTACAAATGCCGAGATAGTGGACAAAGTCTTTGAAGAGGTGAAGCCATCTTTAGTTTACCATTGTGCAGCTTACACAGCTGTTGATGCGGCAGAAGATGAAGGAAAAGAGCTAGATTTTGCAATCAATGTCACTGGTACAGAGAATGTCGCTAAGGCTGCTGCTAAACATGATGCAACACTTGTTTACATTTCGACGGACTACGTGTTTGATGGTGAAAAACCAGTGGGGCAAGAATGGGAAGTAGATGATCTGCCTAATCCCAAAACAGAGTACGGTCGTACAAAACGTATGGGTGAAGAGTTAGTTGAAAAATATACTTCAAAATTCTATACCATTCGCACAGCGTGGGTATTTGGTAACTATGGTAAAAACTTTGTCTTTACGATGCAAAACCTTGCAAAAACACACAAAACTCTAACTGTTGTTAACGACCAACATGGACGACCAACATGGACACGTACTTTGGCTGAGTTTATGACTTATTTAGCTGAAAATCAAAAAGATTTTGGTTACTATCATTTATCAAATGATGCTAAAGAAGATACAACATGGTATGATTTTGCGGTTGAAATCTTAAAAGACACAGATGTGGAGGTTAAGCCTGTTGATTCTAGTCAATTCCCAGCAAAAGCAAAACGTCCTTTAAATTCAACTATGAGTTTGGAAAAAGCGAAAGCAACAGGATTTGTGATTCCTACTTGGCAAGATGCTTTAAAAGAGTTCTACAAGCAGGAAGTTAAAAAA

SEQ ID NO: 20940 - protein, 284 aa, Streptococcus agalactiae
MILITGANGQLGSELRHLLEERTQEYVAVDVAEMDITNAEIVDKVFEEVKPSLVYHCAAYTAVDAAEDEGKELDFAINVTGTENVAKAAAKHDATLVYISTDYVFDGEKPVGQEWEVDDLPNPKTEYGRTKRMGEELVEKYTSKFYTIRTAWVFGNYGKNFVFTMQNLAKTHKTLTVVNDQHGRPTWTRTLAEFMTYLAENQKDFGYYHLSNDAKEDTTWYDFAVEILKDTDVEVKPVDSSQFPAKAKRPLNSTMSLEKAKATGFVIPTWQDALKEFYKQEVKK

SEQ ID NO: 20941 - protein, 339 aa, Streptococcus agalactiae; identical to SEQ ID NO: 7245

SEQ ID NO: 20942 - protein, 113 aa, Streptococcus agalactiae; identical to SEQ ID NO: 7246

SEQ ID NO: 20943 - protein, 1107 aa, Streptococcus agalactiae
ATGGCAGAGAAAAAAGGAAATACAACTTTTAATGTTCAAGTTGCGGATTTTATTCGCAATCATAAAAAACAAGGTACTGCAATTGATGATGAGGTAACAGAAAAACTTGTTATTCCTTTTGTTTTAGATGCAGATCAAATTGATGATTTGTTAGAACGATTGACAGACGGTGGCATTTCAATCACAGATAAAGAAGGCAATCCTTCAACAAAGTATGTGGTAGAAGGGCCAAAATCTGAAGAATTGACTGATGAAGAGCTCATAGGAAGTAATTCTGCTAAAGTCAATGACCCAGTACGTATGTACTTGAAGGAAATTGGTGTTGTTCCTCTTTTAACGAATGAAGAAGAAAAAGAATTGGCTGTTGCGGTTGCTGAGGGAGATTTAATGGCTAAACAACGTTTAGCTGAAGCAAACCTTCGTCTTGTTGTCTCAATTGCAAAACGTTATGTTGGACGTGGAATGCAATTTCTTGATTTAATTCAAGAGGGTAACATGGGGCTCATGAAAGCTGTTGATAAATTTGATTATTCAAAGGGATTCAAATTTTCAACTTATGCAACATGGTGGATTCGTCAAGCTATAACACGTGCAATTGCAGATCAAGCACGTACGATTCGTATTCCTGTTCATATGGTTGAAACGATTAATAAATTGGTCCGTGAACAACGTAATCTTCTTCAAGAACTTGGTCAAGATCCAACTCCTGAGCAAATCGCAGAACGCATGGATATGACACCAGATAAAGTACGTGAAATCCTAAAAATTGCTCAAGAGCCGGTATCGCTAGAAACGCCAATCGGTGAGGAAGATGATAGCCATTTGGGTGATTTCATTGAAGACGAAGTTATTGAAAATCCAGTAGATTATACTACACGTGTTGTTCTTCGTGAGCAATTAGATGAGGTTTTAGATACTCTTACTGACCGTGAAGAGAATGTTCTTCGTTTACGCTTTGGTCTTGACGATGGTAAAATGCGTACGTTAGAGGACGTAGGTAAAGTATTTAATGTTACTCGTGAGCGCATTCGTCAGATTGAAGCTAAAGCCCTTAGAAAACTTCGCCATCCTAGTCGTAGCAAGCAACTTAAAGATTTCATGGAAGAT

SEQ ID NO: 20944 - protein, 369 aa, Streptococcus agalactiae
MAEKKGNTTFNVQVADFIRNHKKQGTAIDDEVTEKLVIPFVLDADQIDDLLERLTDGGISITDKEGNPSTKYVVEGPKSEELTDEELIGSNSAKVNDPVRMYLKEIGVVPLLTNEEEKELAVAVAEGDLMAKQRLAEANLRLVVSIAKRYVGRGMQFLDLIQEGNMGLMKAVDKFDYSKGFKFSTYATWWIRQAITRAIADQARTIRIPVHMVETINKLVREQRNLLQELGQDPTPEQIAERMDMTPDKVREILKIAQEPVSLETPIGEEDDSHLGDFIEDEVIENPVDYTTRVVLREQLDEVLDTLTDREENVLRLRFGLDDGKMRTLEDVGKVFNVTRERIRQIEAKALRKLRHPSRSKQLKDFMED

SEQ ID NO: 20945 - protein, 1872 aa, Streptococcus agalactiae
TTGAAAAAGCTTTTGAAAAAATTTACACAGAAAAGAAAAAATGATATAATCAAATGTAAAACTATAATGGGTTATTTCTGTGGAGGTCATGACTTGGCAATTGATAAAGAAAAAATTTCTGAAATCAAGAACAGTGTTAACATTGTTGATGTCATCGGTGAAGTTGTCGGTTTGACAAAAACAGGACGCAATCATCTTGGTTTATGCCCATTTCATAAAGAAAAAACGCCATCTTTTAATGTTATCGAAGATAGGCAGTTTTTTCATTGTTTTGGTTGTGGTCGCTCTGGTGATGTCTTTAAATTTGTGGAAGATTACCAACATATTAGTTTTTTAGATAGTGTACAAGTTCTAGCTGAACGTTCAGGAATACCTCTAGATACTAATTTTAAGGGGCAAGTTCCTAAAAAACCTAAAGCTAATCAGTCGCTTTTAGATATTCATAGAGTTGCTTCGGGATTTTACCATGCCTATTTAATGACAACTAATGATGGTGAACGCGCTAGACAATACCTTGCCGAGCGCGGAGTGACAGAGGACTTAATTAAACATTTTCAAATAGGATTATCGCCGGGAGGGCAGGATTTTCTATATCGTCGTCTGGCAAAAGAGTTTGATGAAAAAACTTTGATGTCTTCTGGTTTGTTCAATTATTCAGAAAATAGCAATCAGTTTTACGATTCATTTAATAATAGAATTATGTTTCCGTTAACTAATGATATTGGTGAAGTCATTGCGTTTTCAGGACGAGTTTGGACTCAAGAGGACATTGATAGAAAACAAGCTAAATATAAAAATTCTCGTGCCACCCCTATTTTTAATAAGTCTTACGAGCTTTACCATTTAGATAAAGCGCGTGCTGTAATTAATAAAGCACATGAAGTTTACCTAATGGAAGGCTTTATGGATGTTATTGCAGCTTATCGTGCAGGAATTGAGAATGTTGTTGCTTCTATGGGGACCGCTTTAACCAATGAACACGTTAGACACCTTAAAAGATTTACTAAGAAAGTTGTTCTGACTTATGATGGTGATAGAGCTGGTCAAAACGCAATTGACAAGTCTTTAGAACTGCTATCAGATATGACTGTTGATATCGTTAGGATACCTAATAAAATGGACCCTGATGAATTTCTACAAGCAAATTCAGCAGAAGATTTTAAACAACTCTTAGAAAAAGGGCGCATCAGTAATACAGAGTTTTATATCCACTACTTAAAGCCTGAAAACACCGATAATTTACAATCTGAAATTGCTTATGTTGAAAAAATAGCGAAATTAATTGCTAAATCTCCATCGATAACAGCACAAAATTCATATATTACAAAAGTGGCTGAACTCTTGCCAGATTTTGATTATTTTCAAGTAGAACAATCGGTTAATAACGAACGATTGCATCATAGAAGTCAACAGCAAGCTTCACCTTCAGTACAAACAAGTGCTACAGTGCAATTACCACAGACAGGTAAGTTATCAGCTATCACTAAAACAGAAATGCAATTGTTTCATCGATTATTGAATCATCCCTACCTGTTAAATGAATTCCGTAATAGGGATAATTTTTATTTTGATACAACAGAAATACAAGTTTTATATGAGTTGCTAAAAGAAAGTGGTGAGATCACGTCTTATGATTTATCACAAGAAAGTGACAAAGTTAACCGTACTTATTATATGATTTTAGAGGAACAATTACCTGTAGAAGTATCTATTGGAGAGATTGAAGCCGTCGAAAAGGCACGTGACCGTTTATTGAAAGAACGTGATTTAAGAAAACAAAGCCAGTTAATTAGACAATCTAGTAATCAAGGTGATCAAGAAGGAGCCTTGGCTGCATTAGAAAATTTAATTGCTCAAAAAAGAAATATGGAA

SEQ ID NO: 20946 - protein, 624 aa, Streptococcus agalactiae
MKKLLKKFTQKRKNDIIKCKTIMGYFCGGHDLAIDKEKISEIKNSVNIVDVIGEVVGLTKTGRNHLGLCPFHKEKTPSFNVIEDRQFFHCFGCGRSGDVFKFVEDYQHISFLDSVQVLAERSGIPLDTNFKGQVPKKPKANQSLLDIHRVASGFYHAYLMTTNDGERARQYLAERGVTEDLIKHFQIGLSPGGQDFLYRRLAKEFDEKTLMSSGLFNYSENSNQFYDSFNNRIMFPLTNDIGEVIAFSGRVWTQEDIDRKQAKYKNSRATPIFNKSYELYHLDKARAVINKAHEVYLMEGFMDVIAAYRAGIENVVASMGTALTNEHVRHLKRFTKKVVLTYDGDRAGQNAIDKSLELLSDMTVDIVRIPNKMDPDEFLQANSAEDFKQLLEKGRISNTEFYIHYLKPENTDNLQSEIAYVEKIAKLIAKSPSITAQNSYITKVAELLPDFDYFQVEQSVNNERLHHRSQQQASPSVQTSATVQLPQTGKLSAITKTEMQLFHRLLNHPYLLNEFRNRDNFYFDTTEIQVLYELLKESGEITSYDLSQESDKVNRTYYMILEEQLPVEVSIGEIEAVEKARDRLLKERDLRKQSQLIRQSSNQGDQEGALAALENLIAQKRNME

SEQ ID NO: 20947 - protein, 375 aa, Streptococcus agalactiae
ATGATTAAAGAACTAAAAGAATTTTTATTTAAGGGTAATGTTTTAGACCTTGCTGTTGCTGTTATTTTAGGTGCAGCTTTTAATGCTATTATCACTTCACTTGTTAAAGACGTTATTACACCGCTTATCCTTAATCCTGTATTAAAAGCTGCTGGCGTTTCAAATATTGCACAGCTTTCATGGAACGGTGTTGCTTACGGTAATTTCTTAAGTGCAGTTATTAATTTCTTAATCGTTGGTACTACTTTATTCTTCATCGTTAAAGCTGCTAACAAGGTTATGGCTAAGAAACCTGCTGAAGAAGAAATTATTGAAGTTGTTGAACCAACACAAGAGCAATTACTTGCTGAAATCCGCGACTTACTCGCTAACAAA

SEQ ID NO: 20948 - protein, 125 aa, Streptococcus agalactiae; identical to SEQ ID NO: 2666

SEQ ID NO: 20949 - protein, 486 aa, Streptococcus agalactiae
TTGACTAAGAATAATAGCATAAAGGCAGAGGAATATATGGTTCAGGGTTCAATTAATATTGAAAAATATAAAGATTTGGCGCTCCAAAAACAAGGCGAGCATCGTAAATTTTTAGCAAGTTTAAAAAAGAAAGCTCCTAAAAACTTAGATAAAATAGTCCAACAGATACATCAAGAGGTTTTTCAAGAAATTGATTGTACAGCATGTGCTAATTGTTGTAAAACTTTAGGTCCCCTATTTACAGAAGCTGATATTTCTAGGATTTCTAAACATTTCCGGATGAAGTTATCGGCTTTTGAAGATTTATTTTTAGAAGTAGATGAAGATGGAGATAAAGTATTTAAAGCGATGCCTTGTCCGTTTTTAGGCGATGATAACTTATGTAGTATATACGATGTCAGACCTAAAGCTTGTCGTGAATTTCCACATACTGATCGTAAGAAAATCTATCAAATTAATAACTTAACGATAAAAAATACTNNNNNT

SEQ ID NO: 20950 - protein, 162 aa, Streptococcus agalactiae
  VARIANT 161, 162: Xaa = Any Amino Acid
MTKNNSIKAEEYMVQGSINIEKYKDLALQKQGEHRKFLASLKKKAPKNLDKIVQQIHQEVFQEIDCTACANCCKTLGPLFTEADISRISKHFRMKLSAFEDLFLEVDEDGDKVFKAMPCPFLGDDNLCSIYDVRPKACREFPHTDRKKIYQINNLTIKNTXX

SEQ ID NO: 20951 - protein, 504 aa, Streptococcus agalactiae
ATGGCTATTTCTGGATTATCATATACTAAAGAGCGTGCTAAAGTCTATGATTTTTCAAAACCTTATTACACTACAGAAAATGCGGTTCTTGTTAGGAAGTCTGATTTAGGAAAATATACTTCAATCGAAAGCCTTAAAGGTAAAAAAATAGCAGTACAAAAAGGAAGTATCGAAGAGGGAGTTTCTAAGAAATCATTCAAAAATTCTCACGTCGTGTCACTGACAGCGATGGGAGAAGCGATTAGTGAGTTAAAATCAGGCAAGGTAGAAGCTGTTGATTTAGAAAAACCCGTAGCTGAAGGTTACTTGGCCCAGAATACAGACCTTGTTCTTGCTAAGTTTGCCCTTAAAACAGGAGAAGGGGATGCTAAGGCTGTAGCTTTACCTAAAGACAGTGGAAAAATGTTGAAGACTGTTAACAAAGTGATAAAGAGACTTGAAAAAGAAGATAAATATAAAGTTTATATTTCAGATGCGGCTAAATTAACTGGCAATCAAGTTGAA

SEQ ID NO: 20952 - protein, 168 aa, Streptococcus agalactiae
MAISGLSYTKERAKVYDFSKPYYTTENAVLVRKSDLGKYTSIESLKGKKIAVQKGSIEEGVSKKSFKNSHVVSLTAMGEAISELKSGKVEAVDLEKPVAEGYLAQNTDLVLAKFALKTGEGDAKAVALPKDSGKMLKTVNKVIKRLEKEDKYKVYISDAAKLTGNQVE

SEQ ID NO: 20953 - protein, 207 aa, Streptococcus agalactiae
TTGGTAACGGATTACGTTGCGAAAGCTTTTGCCATTGATGATGTCGTTTCCTCCTTTGGAATGAATGGTATTGGGGGATTGTTGGGAAGTTTAGGAGTTGGTCTCTTTAAATTATCACATATGCCAGTTCAACTGTTAGCATTAGTTACCACAATTCTTTTGTCAATTATAATGACCTATATCATATCTAAAGCGATTTTTAGAAAA

SEQ ID NO: 20954 - protein, 69 aa, Streptococcus agalactiae
MVTDYVAKAFAIDDVVSSFGMNGIGGLLGSLGVGLFKLSHMPVQLLALVTTILLSIIMTYIISKAIFRK

SEQ ID NO: 20955 - protein, 594 aa, Streptococcus agalactiae
GTGTTTTTACTATTATGTATTTTATCGATGTGGCTCATGATTTTTGGGGTTGCATTTTATTACTTTGGGTCGCTACATCAATCATTGACTTCAAGGATTATTTATCAGTTTGTACTTACTGTTTTGCTAACGACAATAGCTTGGTTCATGGGTGCCTATTTTTTAGGATTTGAAGGTCATTTTAAAACTGTCTTTCAATTCCAAGAAGCAGATGGTAAACAAATTGTAAATTGTTTATTTCAACTTTGTTTCGCCCTTTACGCAGTAGTAATGCTTATTGGGTCAATTATTGATAGAGTTCAGACGAAGCGACTTTTATTAGCTGTTGTTTCTTGGCTTTTCTTGGTGTATACGCCCTTAGCTTATTTAATTTGGAATTCAGAGGGTGTTTTTGCAAAGATGGGAGTACTTGATTTTTCAGGCGGAATGGTCGTTCATTTATCTGCAGGGCTTTCTTCGTATATTTTAGCTCATGTTATTGGCAAGAGTGAACATCAGCACAATAAGGTTAAAAATGATAATCTCTTTTTAGGAATGATACTTATTACATTTGGTTGGTTTGGATTTAATATGGGTCCAGNNNNNTTAATTAAT

SEQ ID NO: 20956 - protein, 198 aa, Streptococcus agalactiae
  VARIANT 194, 195: Xaa = Any Amino Acid
MFLLLCILSMWLMIFGVAFYYFGSLHQSLTSRIIYQFVLTVLLTTIAWFMGAYFLGFEGHFKTVFQFQEADGKQIVNCLFQLCFALYAVVMLIGSIIDRVQTKRLLLAVVSWLFLVYTPLAYLIWNSEGVFAKMGVLDFSGGMVVHLSAGLSSYILAHVIGKSEHQHNKVKNDNLFLGMILITFGWFGFNMGPXXLIN

SEQ ID NO: 20957 - protein, 1125 aa, Streptococcus agalactiae
ATGAAACATTATCAAACCATAATTATCGGTGCAGGCGCTGCAGGAATCGGTTTTGGTTCTGCCATGCAACGATTAGGACTTACAAATTTTCTTATCATTGAAAAAGGGCACATTGGAGAATCTTTTTTAAGATGGCCCAGAACAACACAATTTATCACACCTTCCTTCACTACCAATGGCTTTGGTTTTCCAGATCTAAACGCTGTTATTCCAGATACTTCTCCTGCTTTCTCATTTGAAAAAGAACATCTTTCTGGAGTGGAATATGCACGCTACTTACAATTAGTTGCTGCTCATTATAATCTCCCTATCCAAAACGAAACATCTGTTCTATCTATTGATAAACGAGATAACCTTTTTGTTATTAAAACTTCAAAGGGAGATTTTTCTGCTGATTATCTTATTATGGCAACAGGAGAATTTCAAAATCCAAATACCATTGATATTAAAGGTGCAGATCTAGGAATGCACTATGGCCAAGTTGATAATTTCCATATCAAATCTGACAATCCATTTATCATCATTGGTGGAAACGAAAGTGCTTGTGATGCACTAACACATCTAGTATATTTGGGAAATCAAGTCGAATTATATACAGATACGTTTGGTCGTAAAGAGAGCAATCCCGATCCAAGCATCTCTTTATCCCCCATAACTAAAGAACGTTTAAAACATATACAAGACCACAAAAAAGAATATTATAGTATCTCTGAAGGCAAGAAAGCCATTGAGATTAAACAAATTGGAAAACAATATCAAGTTACTTTTGATGACGGTAGTACTGCGGAGTCTTTCCATAAACCTATTCTTTCCACAGGTTTTCTAAATACCTGTCATCTCATTGACGGAATCGCTTTATTTGAATACGATAAAAATCAGTTGCCAATAGTTACTGAAGATGACGAATCTACTATCGTTAATAACTGTTTCTTAATTGGTCCAAGCTTACGACAAAGAGATACTATTTTCTGCTATATTTATAAATTCAGACAGCGCTTTGTCCCTGTTATTAACCATATCGCACAACGAGAAGGGATTATATTAGACGAAGATACCCTTGAATTCTTTAAAGAAAATCAAATGTACCTTGATAACCTAGCTTGTTGCGATGTCAATTGTGATTGC

SEQ ID NO: 20958 - protein, 375 aa, Streptococcus agalactiae
MKHYQTIIIGAGAAGIGFGSAMQRLGLTNFLIIEKGHIGESFLRWPRTTQFITPSFTTNGFGFPDLNAVIPDTSPAFSFEKEHLSGVEYARYLQLVAAHYNLPIQNETSVLSIDKRDNLFVIKTSKGDFSADYLIMATGEFQNPNTIDIKGADLGMHYGQVDNFHIKSDNPFIIIGGNESACDALTHLVYLGNQVELYTDTFGRKESNPDPSISLSPITKERLKHIQDHKKEYYSISEGKKAIEIKQIGKQYQVTFDDGSTAESFHKPILSTGFLNTCHLIDGIALFEYDKNQLPIVTEDDESTIVNNCFLIGPSLRQRDTIFCYIYKFRQRFVPVINHIAQREGIILDEDTLEFFKENQMYLDNLACCDVNCDC

SEQ ID NO: 20959 - protein, 984 aa, Streptococcus agalactiae
ATGTCAGAAAAAATCAGAGTTTTACTCTATTATAAATATGTTTCAATTGAAAATGCGGAAGAGTACGCTGCGAAACATCTAGAATTTTGTAAATCTATTGGACTTAAAGGTCGTATTTTGATTGCGGATGAGGGGATTAATGGAACTGTTTCTGGAGATTATGAAACAACTCAGAAGTATATGGATTGGGTCCACAGCGATGAGCGTTTTGCTGATCTTTGGTTCAAGATTGACGAGGAAAATCAACAAGCTTTCCGTAAAATGTTTGTTCGTTATAAGAAAGAGATCGTGCACCTTGGGTTAGAAGACAATAGCTTTGATAGTGATATTAATCCTTTGGAAACAACAGGTGAGTATTTAAATCCTAAACAATTTAAAGAAGCCTTGCTTGATGAAGATACTGTTATTTTAGATACGCGTAATGATTATGAGTATGACTTAGGTCACTTCCGTGGAGCAATTCGTCCTGATATTCGCAATTTCCGTGAGTTACCACAATGGGTACGTGACAACAAAGATAAGTTTATGGAAAAACGTGTTGTTGTGTACTGTACCGGTGGTGTTCGTTGTGAGAAATTCTCGGGTTGGATGGTTCGAGAAGGTTTTAAAGATGTTGGACAATTACACGGTGGTATTGCAACATATGGAAAAGATCCGGAAGTTCAAGGTGAACTTTGGGATGGTGCGATGTATGTTTTTGATGATCGTATCTCGGTGCCAATTAATCATGTTAATCCAACTGTCATTAGTAAAGATTATTTTGATGGAACACCTTGTGAACGTTATGTCAATTGTGCAAATCCGTTTTGTAACAAACAAATTTTTGCTTCAGAAGAAAACGAAGCGAAGTATGTTCGAGGGTGCTCGCCTGAATGTCGTGCACATGAACGTAATCGCTATGTGCAAGAAAATGGTTTATCACGTCAAGAATGGGCAGAACGTTTAGAAGCTATTGGAGAATCCTTACCTCAAGTAGCAAATGTT

SEQ ID NO: 20960 - protein, 328 aa, Streptococcus agalactiae
MSEKIRVLLYYKYVSIENAEEYAAKHLEFCKSIGLKGRILIADEGINGTVSGDYETTQKYMDWVHSDERFADLWFKIDEENQQAFRKMFVRYKKEIVHLGLEDNSFDSDINPLETTGEYLNPKQFKEALLDEDTVILDTRNDYEYDLGHFRGAIRPDIRNFRELPQWVRDNKDKFMEKRVVVYCTGGVRCEKFSGWMVREGFKDVGQLHGGIATYGKDPEVQGELWDGAMYVFDDRISVPINHVNPTVISKDYFDGTPCERYVNCANPFCNKQIFASEENEAKYVRGCSPECRAHERNRYVQENGLSRQEWAERLEAIGESLPQVANV

SEQ ID NO: 20961 - protein, 303 aa, Streptococcus agalactiae
ATGACTTATGAATTATGTCTAGAATACGGTACTTATCCACTTAGACCTGTAGATGCTTGGGCTGACGAAATCAATACTGCACCTGCGTTTATTACTGAAGATAAAAAACTTTTAGAACTTTTAGAAGAAGTCAATACCTTATTCCATGAGCTCTTTTTAACGATAGAATGTTCCTTCCACTATATTGGTCATGACTTCCCAGAAAAAAGAGCAAAAATCACACAAATTTATCATGTGATTATCGAACATTTAAGCATACACTACCCTGAATATGACATTAAAATTGAATCATTATTAATGGGA

SEQ ID NO: 20962 - protein, 101 aa, Streptococcus agalactiae; identical to SEQ ID NO: 7258

SEQ ID NO: 20963 - protein, 1370 aa, Streptococcus agalactiae
ATGTTGAAAAAACTATTTGCACCCCCTCAGAAAAGAGAACGTTTATCACTGAGGAAATTAAGCATAAATATCCTCGTTATCGTGTACAAGTCCTTTTTTCTATTTTTGTAGGTTATATGGGATACTATTTTGTTCGTAATACGACTTCAATTTTATCTGGTATCCTTAATATGTCTGCTACTGAGATTGGTATTATTACCTGTGCTAGCTACATTGCTTATGGTCTCTCCAAATTTATTTCTGGTTTGATTTCAGATGAATCGAATTCTAAAATTTTCCTTCCAGTTGGTTTGTTTCTTACAGGACTAGTTAATGTGTTAATCGGTGTTATTCCCTCTGTAATTACTAGTATTTGGCTCTTTACTATCATGTATCTTATTAATGGTTGGTTACAAGGGATGGGATACCCTCCTGGAGCGCGTACATTAGTCTATTGGTATGATAATAAAGAAAGAATTAAATATGCCACCATTTGGAATTTATCTCACAATTTTGGTGGAGCAATAGCGCCGATTTTAACTGGTGTAGGTCTAGCTCTTGCTGGTAATGATTCTCTTAATCAAGCGCGTGCTGCTTATTGGTTTCCAGGGGTGGTGGCTTGTCTTTTGGCTGTTCTTGTTTACTTTTTACAAGAAGATACTCCAGAATCTATCGGACTTCCGCCTATAGAAGAGTATCATAAAGAGCAATATACTAATGTTGTGGATTCAAGTGACATTTTAGAAGAGCCTGAAGTTTTGGGTATGGGCGAAATTATAAAAAAATATATTCTACCAAATACTAAACTGATGTGGGCATCCTTGTATTCAATATTTGTATATATTTTACGTTACGGTATTGTCTCATGGACTCCTAAGTTTTTAGCGACGAGTGTGCAAGATGGTGGAAAAGGTATTACTGCAACAGCTGGTATGGGTGGTTTTTCACTTTTTGAAATAGGTGGTATTATTGGGATGCTAACAGCAGGATATCTATCTGCCAAAGTGTTTAAAAACTCTAAACCTTTAACCAATGTAGCCTTCTTAGTTGTAGCAATCTTATTACTAGCTGCCTATTGGTTTATTCCAGCAGGACCTCAATATATGGCATTAGATTTCATTATTTTACTAGGTTTGGGGGCATCAATCTACGGTCCTGTTATGATGGTTGGTCTGTATGCTATGGAGTTGGTTCCAAAAGCAGCAGCTGGAGCAGCTTCAGGATTGACTGGCACATTTAGTTATGTCGGTGGAGCAACGATCGCTACTCTAGCTATTGGTATTATTATTGACCACTTTGGTTGGGGAGTAGCATTTATAATATTTGGTATTTCTGGATTTGCGGCTATTGTCTGTACCTTGCTTTCAAGAGATAAGAGTCTAGAGTATTGG

SEQ ID NO: 20964 - protein, 457 aa, Streptococcus agalactiae
  VARIANT 17: Xaa = Any Amino Acid
MLKKLFAPPQKRERLSXEEIKHKYPRYRVQVLFSIFVGYMGYYFVRNTTSILSGILNMSATEIGIITCASYIAYGLSKFISGLISDESNSKIFLPVGLFLTGLVNVLIGVIPSVITSIWLFTIMYLINGWLQGMGYPPGARTLVYWYDNKERIKYATIWNLSHNFGGAIAPILTGVGLALAGNDSLNQARAAYWFPGVVACLLAVLVYFLQEDTPESIGLPPIEEYHKEQYTNVVDSSDILEEPEVLGMGEIIKKYILPNTKLMWASLYSIFVYILRYGIVSWTPKFLATSVQDGGKGITATAGMGGFSLFEIGGIIGMLTAGYLSAKVFKNSKPLTNVAFLVVAILLLAAYWFIPAGPQYMALDFIILLGLGASIYGPVMMVGLYAMELVPKAAAGAASGLTGTFSYVGGATIATLAIGIIIDHFGWGVAFIIFGISGFAAIVCTLLSRDKSLEYW

SEQ ID NO: 20965 - protein, 1601 aa, Streptococcus agalactiae
TTGTTCTTGTATCCAGATGATTCAGATAAAAATGGAGAATTATTACGTATCTATCAGCAATATTTCATGGTCTCAAATGCTGCTCAATTATTAATTGATGAAGCAATCGAGCGTGGTTCAAATCTTCATGATTTAGCTGAATATGCTTATGTTCAAATTAATGACACTCACCCATCTATGGTCATCCCTGAGTTGATTCGTTTATTGACAGAAAAACATGGTTTTGAATTTGACGAAGCTGTGTCAGTTGTTCGCAATATGGTTGGCTATACAAACCATACCATTCTTGCAGAAGCTCTTGAAAAATGGCCTTTAGAGTATCTTAATGAGGTAGTACCACACCTAGTAACAATCATTAAAAAATTAGATCAAATGATTCGTGAAGAGCAAACAAATCCAGAGGTTCAAATTATTGATGAAGCTGGACGTGTTCACATGGCGCATATGGATATCCACTTCTCAACAAGTGTTAATGGTGTAGCAGCATTACATACAGAAATCCTTAAAAATAGTGAATTAAAGGTTTTCTATGATATTTACCCAGATAAGTTTAACAATAAGACAAACGGTATTACATTCCGTCGCTGGTTGGAGTTTGCTAACCAAGATTTAGCAGATTACTTGAAAGAACTAATTGGGGATAGCTATCTTACTGATGCGACTCAGCTCGAAAAATTGTTAACTTATGCTGATAGCAATGAAGTTCATGATAAATTAGCTGCTATTAAATTTAAAAACAAACTGGCTCTTAAACGTTACCTTAAGGAAAATAAAGGTATTGAATTGGATGAATACTCAATTATTGATACACAAATCAAACGATTCCACGAATATAAGCGCCAACAAATGAATGCTTTATATGTTATTCATAAATACTTAGAAATTAAACGTGGGCATTTCCCATCACGTAAATTAACAGTTATTTTTGGTGGTAAAGCTGCTCCAGCTATACTATTGCACAGGATATCATTCACTTAATTCTCTGCTTATCAGAATTAATTAATAATGATCCAGAAGTTAATAAATACCTTAATGTCCATTTAGTAGAAAATTACAATGTGACAGTAGCGGAAAAGTTAATCCCTGCAACAGATATTTCGGAACAAATTTCATTGGCTTCCAAAGAAGCATCTGGTACAGGTAACATGAAATTTATGTTGAATGGTGCTCTTACTCTTGGTACTATGGATGGGGCAAATGTTGAGATAGCTGAATTAGCTGGCAAAGAGAACATCTACACATTTGGTAAAGACTCTGACACTATCATTAATCTTTATGAAACATCTGGTTATCGTTCAAAAGATTACTATGATAAAGACAAAGTAATTCGTGAAGCTGTTGATTTTATCATTAGTGATGATATAGTGTCACTCGGTAATGCAGAACGACTAAAGAGATTGCATGATGAATTAGTAGGTAAAGATTGGTTCATGACATTGATTGATTTGAAAGAATACATTGCTGTTAAAGAACAAGTGCTTGCTGATTATGAAGATTATGAATCATGGAATAAGAAAGTTATACATAATATTGCTAAAGCAGGGTTCTTCTCATCAGATCGTACAATCGAACAATATAATCAAGATATTTGGCATTCAAAT

SEQ ID NO: 20966 - protein, 534 aa, Streptococcus agalactiae
MFLYPDDSDKNGELLRIYQQYFMVSNAAQLLIDEAIERGSNLHDLAEYAYVQINDTHPSMVIPELIRLLTEKHGFEFDEAVSVVRNMVGYTNHTILAEALEKWPLEYLNEVVPHLVTIIKKLDQMIREEQTNPEVQIIDEAGRVHMAHMDIHFSTSVNGVAALHTEILKNSELKVFYDIYPDKFNNKTNGITFRRWLEFANQDLADYLKELIGDSYLTDATQLEKLLTYADSNEVHDKLAAIKFKNKLALKRYLKENKGIELDEYSIIDTQIKRFHEYKRQQMNALYVIHKYLEIKRGHFPSRKLTVIFGGKAAPAYTIAQDIIHLILCLSELINNDPEVNKYLNVHLVENYNVTVAEKLIPATDISEQISLASKEASGTGNMKFMLNGALTLGTMDGANVEIAELAGKENIYTFGKDSDTIINLYETSGYRSKDYYDKDKVIREAVDFIISDDIVSLGNAERLKRLHDELVGKDWFMTLIDLKEYIAVKEQVLADYEDYESWNKKVIHNIAKAGFFSSDRTIEQYNQDIWHSN

SEQ ID NO: 20967 - protein, 623 aa, Streptococcus agalactiae
ATGACAAGAAATTTTACAACTTACGTTGGACAACAAGGAAAAGTATTATCAGAATTAACAAATGAAGAGATTTACGTTGAATTGTTAAATTTTGTAAAAGAAGAAGCTGCCGCTAAATCAAAAAATAGCTCTCAACGTAAGGTATACTATATTTCAGCTGAGTTTCTAATTGGTAAATTACTTTCAAATAATTTGATTAACTTAGGGATTTATAAAGATGTCAAAAAAGAGTTAGAACTTGTAGGTAAATCAATTGCTGAAATAGAAGATGTAGAGCCAGAACCATCACTTGGTAATGGTGGTTTAGGGCGTTTAGCATCATGTTTTATTGACTCGATTTCTTCTTTAGGTATTAATGGAGAAGGTGTTGGTTTAAACTATCACTGTGGGCTTTTCAAACAAGTATTTCGCAATAATCAACAAGAAGCAGAAGCTACTACTGGATTGAGAATAATTCTTGGTTAGTACCAACAGATATTTCTTATGATGTTCCTTTCGGACTTTACTTTAAAATCACGCCTAGATAGAATTGATGTATTAGGTTATAAGAAAGATACTAAAAATTATTTGAACCTTTTTGATATTGATGGACTTGATTATAACCTTATGAAAGGTATCACTTT

SEQ ID NO: 20968 - protein, 209 aa, Streptococcus agalactiae
  VARIANT 146: Xaa = Any Amino Acid
MTRNFTTYVGQQGKVLSELTNEEIYVELLNFVKEEAAAKSKNSSQRKVYYISAEFLIGKLLSNNLINLGIYKDVKKELELVGKSIAEIEDVEPEPSLGNGGLGRLASCFIDSISSLGINGEGVGLNYHCGLFKQVFRNNQQEAEAXYWIENNSWLVPTDISYDVPFRDFTLKSRLDRIDVLGYKKDTKNYLNLFDIDGLDYNLMKRYHF

SEQ ID NO: 20969 - protein, 1392 aa, Streptococcus agalactiae
TTGGTCGAAACTGATCAAAAATTTTGGCAAATTCTTCCCTTAACAACAACAAGCTTCGGGGACTCTCCTTACCAGTCTTTTTCTGCAGTAGCTGGTAATACACATTTAATTGATTTTGATTTGCTAACGCTTGAAGGTTTCATTTCGAAAGATGACTACCAAAATATTAGTTTTGGACAGGATCCAGAAGTTGTTGATTATGCTGGTCTGTTTGAAAAACGCCGTCCAGTTTTAGAAAAAGCAGTTAAAAATTTCTTGCAAGAAGAGAGAGCAACGAGAATGCTATCTGATTTCTTGCAAGAAGAAAAATGGGTAACTGATTTTGCTGAATTTATGGCGATCAAAGAACATTTTGGTAATAAGGCGCTTCAAGAATGGGATGACAAGGCTATTATACGCCGCGAAGAAGAAGCCTTAGCAGGATATCGTCAAAAGCTTAGTGAAGTGATAAAATATCATGAAGTAACGCAATATTTCTTTTACAAACAATGGTTTGAGTTAAAAGAATATGCTAATGATAAAGGGATTCAGATTATCGGTGATATGCCAATCTACGTTTCTGCCGATAGTGTAGAAGTTTGGACAATGCCTGAACTGTTTAAATTAGATCGCGACAAACAACCACTTGCTATTGCTGGTGTACCAGCGGATGATTTTTCTGACGATGGTCAGCTTTGGGGCAATCCTATTTACAATTGGGATTACCACAAAGAGTCAGATTTTGACTGGTGGATTTATCGTATTCAATCTGGTGTTAAGATGTATGACTATTTGCGTATTGATCATTTTAAAGGTTTTTCAGATTATTGGGAAATTCGAGGAGATTATCAAACAGCTAACGATGGCTCATGGCAACCAGCTCCCGGTCCAGAATTATTTGCAACTATCAAAGAAAAATTAGGTGATTTACCTATTATTGCTGAGAATTTAGGCTATATTGATGAGAGAGCAGAGAGATTACTGTCTGGAACAGGGTTCCCAGGTATGAAAATCATGGAATTCGGTTTTTATGATACAACAGGAAATAGTATTGATATTCCTCATAACTACACAGAAAATACAATTGCATATGCTGGAACTCATGATAACGAAGTTATTAATGGCTGGTTTGAAAATCTTACAGTCGAACAGAAAGCTTATGCAGAAAATTACATGCGTCGTTTGCCAAATGAGCCCATTACTGAGACTGTACTACGTACCTTGTATGCAACTGTTAGTCAAACAACGATTACATGTATGCAAGACCTATTAGATAAACCTGCAGATAGCCGTATGAACATGCCAAATACCGTTGGAGGTAACTGGCAATGGCGTATGAGAAAAGAAGACTTAACAGAAAATCGCAAAGCATTCTTAAAAGAGATTACAACTATTTATAATAGAGGGAATAAA

SEQ ID NO: 20970 - protein, 464 aa, Streptococcus agalactiae
MVETDQKFWQILPLTTTSFGDSPYQSFSAVAGNTHLIDFDLLTLEGFISKDDYQNISFGQDPEVVDYAGLFEKRRPVLEKAVKNFLQEERATRMLSDFLQEEKWVTDFAEFMAIKEHFGNKALQEWDDKAIIRREEEALAGYRQKLSEVIKYHEVTQYFFYKQWFELKEYANDKGIQIIGDMPIYVSADSVEVWTMPELFKLDRDKQPLAIAGVPADDFSDDGQLWGNPIYNWDYHKESDFDWWIYRIQSGVKMYDYLRIDHFKGFSDYWEIRGDYQTANDGSWQPAPGPELFATIKEKLGDLPIIAENLGYIDERAERLLSGTGFPGMKIMEFGFYDTTGNSIDIPHNYTENTIAYAGTHDNEVINGWFENLTVEQKAYAENYMRRLPNEPITETVLRTLYATVSQTTITCMQDLLDKPADSRMNMPNTVGGNWQWRMRKEDLTENRKAFLKEITTIYNRGNK

SEQ ID NO: 20971 - protein, 1020 aa, Streptococcus agalactiae
ATGGTAACTATAAAAGATGTTGCTGCCAAAGCTGGTGTTAATCCATCGACAGTAAGTCGTGTACTAAAAGATAATGCATCTATTTCAAGTAAGACGAAAGAGCGCGTGAAAAAAGCTATGGAAGAGCTGGGCTATGTTCCTAATGTTGCAGCACAAATGTTGGCTAGTGGTTTAACGCAAAATATTGGAGTTATTTTTCCTCCACTTGTTTTACCAGATCGCTTAAGTGAACCTTTTTTCATGGAGATTCTTTCTACATTAACTAATGAAGCAAAAGAGCATGGATTTACAGTTTCTATTGCAACAAGTATGTCTTCTGAGGAGTTGTTAGAACAAGTAAAATTAATGCATCTACAAAAACGAGTGGATGGTTTTATTGTTCTCTATTCGGATCAAAAAGATCCTATCAGAGAGTATTTATTAAAATATAAACTGCCCTTTGTTGTTGTTGGTGCTGCTAATGGCTATGAAAATGAGATTACTTATATTGATAATGATAATCAACTGATGGGGAAATCTGCCATTGATTATCTCTATAAAAAAGGACATAAAAGCATCCAGTTTGTTACAGATGATTTAAATTCAGAAGTATCAGAAGAGCGCTATTTAGGGTATTTTAAAGGTGCTAGAAAGTTAGGTTTAAACCAAAAGCCAGCTCTTTTATTTGACAGAGGCAATCCGCAGGTTTTAGAGGAATTTATAAATAGAGTCAAAGAAGAAGAGACAACTGCTTTAATTGTTATTGGTGATACTGTCTCTGTTAGAGTAATGCAATTTCTTTCTTTCTATAAATTAAAAGTTCCAGATGACATTTCTATCATGACCTTTAATAATTCTCTCTTCTCACATCTGATTCATCCTTACCTAAGCACATTTGATATTAATGTTAATAATCTAGGAAGGACAAGCGTTCGTCGTCTGATTGACATCATTAAATCTCCAGACAAAGTCTTTAGTGAGACTATTATTGTGCCTTTTACTTTAGAAGAGCGTGAAAGTGTCCGAGATATTTCTAAAAAA

SEQ ID NO: 20972 - protein, 340 aa, Streptococcus agalactiae
MVTIKDVAAKAGVNPSTVSRVLKDNASISSKTKERVKKAMEELGYVPNVAAQMLASGLTQNIGVIFPPLVLPDRLSEPFFMEILSTLTNEAKEHGFTVSIATSMSSEELLEQVKLMHLQKRVDGFIVLYSDQKDPIREYLLKYKLPFVVVGAANGYENEITYIDNDNQLMGKSAIDYLYKKGHKSIQFVTDDLNSEVSEERYLGYFKGARKLGLNQKPALLFDRGNPQVLEEFINRVKEEETTALIVIGDTVSVRVMQFLSFYKLKVPDDISIMTFNNSLFSHLIHPYLSTFDINVNNLGRTSVRRLIDIIKSPDKVFSETIIVPFTLEERESVRDISKK

SEQ ID NO: 20973 - protein, 1245 aa, Streptococcus agalactiae
ATGGAAAAAAATACTTGGAAAAAATTACTTGTTAGTACTGCTGCTCTTTCAGTAGTTGCAGGAGGAGCAATTGCTGCTACTCACTCTAACTCAGTTGATGCTGCTTCAAAAACAACTATCAAACTTTGGGTCCCAACAGATTCAAAAGCGTCTTATAAAGCAATTGTTAAAAAATTCGAGAAGGAAAACAAAGGCGTTACTGTAAAAATGATTGAGTCTAATGACTCCAAAGCTCAAGAAAACGTAAAAAAAGACCCAAGCAAGGCAGCCGATGTATTCTCACTTCCACATGACCAACTTGGTCAATTAGTAGAATCTGGTGTTATCCAAGAAATTCCAGAGCAATACTCAAAAGAAATTGCTAAAAACGACACTAAACAATCACTTACTGGTGCGCAATATAAAGGGAAAACTTATGCATTCCCATTTGGTATTGAATCTCAAGTTCTTTATTATAATAAAACAAAGTTAACTGCTGACGACGTTAAATCATACGAAACAATTACAAGCAAAGGGAAATTCGGTCAACAGCTTAAAGCAGCTAACTCATATGTAACAGGTCCTCTTTTCCTTTCTGTAGGCGACACTTTATTTGGTAAATCTGGTGAAGATGCTAAAGGCACTAACTGGGGTAATGAAGCAGGTGTTTCTGTCCTTAAATGGATTGCAGATCAAAAGAAAAATGATGGTTTTGTCAACTTGACAGCTGAAAATACAATGTCTAAATTTGGCGATGGTTCTGTTCATGCTTTTGAAAGTGGACCATGGGATTACGACGCTGCTAAAAAAGCTGTCGGTGAAGATAAAATCGGTGTTGCTGTTTACCCAACAATGAAAATCGGTGACAAAGAAGTTCAACAAAAAGCATTCTTGGGCGTTAAACTTTATGCCGTTAACCAAGCACCTGCTGGATCAAACACTAAACGAATCTCAGCTAGCTACAAACTCGCTGCATATCTAACTAATGCTGAAAGTCAAAAAATTCAATTCGAAAAACGTCATATCGTTCCTGCTAACTCATCAATTCAATCTTCTGATAGCGTCCAAAAAGATGAACTTGCAAAAGCAGTTATCGAAATGGGTAGCTCAGATAAATATACAACGGTTATGCCTAAGTTGAGTCAAATGTCAACATTCTGGACAGAAAGTGCTGCTATTCTTAGCGATACTTACAGTGGTAAAATCAAATCTAGCGATTACCTTAAACGTCTAAAACAATTCGATAAAGACATCGCTAAAACAAAA

SEQ ID NO: 20974 - protein, 415 aa, Streptococcus agalactiae; identical to SEQ ID NO: 7268

SEQ ID NO: 20975 - protein, 1362 aa, Streptococcus agalactiae
ATGAATAAAAAACTGATCTCACTTGAGGTATGTCCCTAAAAGAGGTCTTTCAAAAAGGTGATTTAGCAACTAAACTATCATTCTTAATTATGGGACTTGCTAACCTCAAAAATAAACAAATTGTCAAGGGACTTTTATTTTTAATCAGTGAAATTCTGTTTTTAATTACCTTTGTTTACCAAGTTATCCCAGCTGTAAAAGGTCTTATTTCCTTAGGGACCCAAGAACAAGGTATGACAACTAAAACTGTGGATGGTATTAAAATCCAAGTTGCGACACAAGGTGATAACTCTATGTTAATGCTAATTTTTGGATTAGCTTCACTTATCTTCTGTTGCGTATTTGCCTATATTTACTGGTCAAACATTAAAAGCGCAGCACATTTATTGACCTTGAAAGAAGAAGGAAGAGAAATTCCATCCTTCAAAAAAGATATTAAAAGCTTGACAGATGGACGCTTCCATATGACTTTAATGTCTATTCCTTTAATAGGGGTGCTTCTATTTACAATCCTTCCGTTAGTTTATATGATTTGTTTGGCATTTACTAACTATGATCATAACCACTTACCACCAAAAAGTTTATTTGACTGGGTTGGTTTTGCTAACTTCGGTAATATCTTTAGCGGGCGTATGGCCAGTACTTTCTTCCCTGTTCTATCTTGGACATTAATTTGGGCTGTTTTCGCTACTGTAACGAATTTCTTCTTTGGTATTATTCTTGCCTTACTAATTAATACAAAAGGTTTGAAATTCAAAAAGATGTGGCGTACTATTTTTGTTATTACCATGGCTGTCCCTCAATTTATCTCTCTCTTAATCATGAGAAACCTCTTAAGTGACGCTGGACCGGTTAACGCCTTGTTAATAAAATGGGGACTTATTTCTTCAGCACATCCCCTTCCATTCCTTTCTGATCCGGTCTGGGCGAAATTCTCAATCATCTTTGTTAATATGTGGGTTGGTATTCCTGTAACAATGCTTGTTGCTACTGGTATCATCATGAATTTACCTGCAGAACAAATTGAAGCTGCTGAAATTGATGGGGCGAATAAGTTCCAAGTCTTTCAATCAATTACTTTCCCACAAATTTTGTTGATTATGACTCCTACTTTAATTCAACAATTTATCGGAAATATTAACAACTTCAACGTTATCTACCTACTCACTCAAGGTGGACCAACAAACTCACATACTACCAGCAGGTAGCACCGATTTGCTTGTCACTTGGCTATACAATTGACAGTAACTGCTGCAGATTATAACTTAGCATCTGTTGTTGGATCTTAATCTTTATTCTTTCAGCAGTATTAGTTTACTAGCTTACACAAGAACAAATTCTTACAAGGAAGGGGCAGCTAAA

SEQ ID NO: 20976 - protein, 456 aa, Streptococcus agalactiae
  VARIANT 9, 398, 401, 415, 439: Xaa = Any Amino Acid
MNKKLISLXGMSLKEVFQKGDLATKLSFLIMGLANLKNKQIVKGLLFLISEILFLITFVYQVIPAVKGLISLGTQEQGMTTKTVDGIKIQVATQGDNSMLMLIFGLASLIFCCVFAYIYWSNIKSAAHLLTLKEEGREIPSFKKDIKSLTDGRFHMTLMSIPLIGVLLFTILPLVYMICLAFTNYDHNHLPPKSLFDWVGFANFGNIFSGRMASTFFPVLSWTLIWAVFATVTNFFFGIILALLINTKGLKFKKMWRTIFVITMAVPQFISLLIMRNLLSDAGPVNALLIKWGLISSAHPLPFLSDPVWAKFSIIFVNMWVGIPVTMLVATGIIMNLPAEQIEAAEIDGANKFQVFQSITFPQILLIMTPTLIQQFIGNINNFNVIYLLTQGGPTNSXYYXAGSTDLLVTWLYNXTVTAADYNLASVVGILIFILSAVXSLLAYTRTNSYKEGAAK

SEQ ID NO: 20977 - protein, 833 aa, Streptococcus agalactiae
ATGAATAAGAAAAAACGTCTTAACCTTACTTTTGTTTATATTTTATTGATAGTACTATCAATTATGTGGCTCTTTCCATTGTTTGGGTCGTTCTCACAAGCTTCCGTGGTGAAGGAAGTGCCTTTGTCAACTACTTTATTCCTAAAACTTGGACATTAGACAACTACGCTAAACTCTTCACCCAAAACACATTCCCATTTGGTCAATGGTTCTTAAATACATTATTTGTCGCTACATGTACTTGTATACTATCAACTTTAATCACTGTAGCAATGGCTTATTCTCTCAGCAGAATCAAATTCAAACACCGTAATGGTTTCCTAAAGCTAGCTTTAGTCTTGAATATGTTTCCTGGGTTCATGTCAATGATTGCAGTTTACTACATCCTAAAAGCTCTAAATCTAGACCAAACATTAACCGCTTTAATATTTGTCTATTCTGCAGGAGCAGCATTAACCTTCTACATCGCAAAGGGTTTCTTTGATACTATTCCATACTCTTTGGATGAGTCTGCTATGATTGATGGGGCGACCCGTTTGGATATTTTCCTTAAAATCACCTTACCATTGTCAAAACCCATTATCGTTTATACTGCATTAATCGCTTTTATGGGCCCTTGGATGGACTTTATCTTTGCAAAAGTTATTTTAGGTGATGCTACGAGCAAGTACACAGTCGCTATTGGTCTCTTTTCAATGTTGCAACAAGATACCATCAACCAGTGGTTTATGTCATTTACAGCAGGATCTGTTATTATTGCAATTCCAATCACAATACTTTTCATGTTCATGCAAAAATACTATGTTGAAGGTATTACAGGTGGGTCTGTAAAA

SEQ ID NO: 20978 - protein, 278 aa, Streptococcus agalactiae; identical to SEQ ID NO: 11538

SEQ ID NO: 20979 - protein, 1468 aa, Streptococcus agalactiae
ATGGAAAAAACAAAATCATTCTTTGGACATCCTCGTGGTTTGTCCACTCTTTTCTTTACTGAAATGTGGGAAAGATTCTCATACTATGGTATGCGTGCTATTTTGCTGTACTATATGTACTATAGTGTTTCTCAAGGTGGCCTTGGTATGGACAAGACTGTCGCTGCATCAATCATGGCTGTCTATGGTTCACTGGTTTATCTCTCATCAGTAATTGGTGGTTTTGTCAGCGACCGTATTCTAGGTAGTCGTAAAACTGTTCTGTATGGTGGTATTCTAATCATGCTAGGTCATATTGCTCTAGCTACACCATTTGGTCAAACAGCTCTATTCATTTCGATTGCTCTAATTATCCTTGGTACTGGACTATTAAAACCAAATGTATCAGAGATGGTTGGTAATTTATATGGAGAAAATGATTCTCGTCGTGATGCTGGTTTTAGTATCTTTGTTTTTGGTATTAACCTTGGTGCTTTTATTTCACCCATTGTAGTGGGGTACCTCGGACAAGAAGTAAATTTCCATCTTGGTTTCTCACTTGCTGCTATTGGTATGTTCTTTGGTCTCCTCCAATATACCTTAGATGGAAAAAAATATTTGACTGAAGAGAGTCTCCGACCAAACGATCCTTTAAGTCCTGAAGAAAAGTCCTCTCTATATAAAAAAGTTGGGCTTATCCTTATTGGATTGTATTGTACTTATTCTTCTTCACTTGATGCATATGCTAACAATTGAAGTAATTATCGATATTTTTAGTATTATTGCAATCGCCATCCCAATTATTTATTTTATCAAGATTTTAAGTAGTAAAAAGATTTCTTCTGTTGAGCGTTCTCGAGTGTGGGCATATATCCCTCTCTTTATCGCCTCAATTCTATTTTGGTCAATTGAAGAACAAGGTTCAGTTGTCTTAGCCTTATTTGCAGATGAACAAACAAAACTTTACCTTAACTTCTTTGGGCATCATATTAATTTCCCATCAAGTTATTTCCAAAGTATGAACCCTCTCTTCATTATGCTTTATGTACCATTCTTTGCTTGGTTATGGGCTAAATGGGGAAGTAAGCAACCTTCATCACCTAAAAAATTTGCGTATGGACTTTTCTTTGCTGGAGCTTCATTCTTATGGATGATGCTACCAGGTTTACTCTTTGGAGTTGACGCTAAAGTAAGCCCTCTTTGGTTAACAATGAGTTGGGCTATTGTCATCGTTGGGGAAATGCTAATCTCACCAGTTGGATTATCAGCAACTAGTAAGCTCGCACCTAAAGCATTCCAAGCTCAAATGATGAGCATCTGGTTCTTAAGTAATGCTGCAGCACAAGCTATTAACGCTCAAATCGTTAAATTGTACACACCTGATACTCAAATTCTTTATTATGGTGTTGTTGGTGGTATAACAGTTGTATTTGGATTTATCCTCTTATTTTATGTTCCACGCATTGAAAAACTAATGTCTGGAGTTAAA

SEQ ID NO: 20980 - protein, 490 aa, Streptococcus agalactiae
  VARIANT 231: Xaa = Any Amino Acid
MEKTKSFFGHPRGLSTLFFTEMWERFSYYGMRAILLYYMYYSVSQGGLGMDKTVAASIMAVYGSLVYLSSVIGGFVSDRILGSRKTVLYGGILIMLGHIALATPFGQTALFISIALIILGTGLLKPNVSEMVGNLYGENDSRRDAGFSIFVFGINLGAFISPIVVGYLGQEVNFHLGFSLAAIGMFFGLLQYTLDGKKYLTEESLRPNDPLSPEEKSSLYKKVGLILIGIXIVLILLHLMHMLTIEVIIDIFSIIAIAIPIIYFIKILSSKKISSVERSRVWAYIPLFIASILFWSIEEQGSVVLALFADEQTKLYLNFFGHHINFPSSYFQSMNPLFIMLYVPFFAWLWAKWGSKQPSSPKKFAYGLFFAGASFLWMMLPGLLFGVDAKVSPLWLTMSWAIVIVGEMLISPVGLSATSKLAPKAFQAQMMSIWFLSNAAAQAINAQIVKLYTPDTQILYYGVVGGITVVFGFILLFYVPRIEKLMSGVK

SEQ ID NO: 20981 - protein, 462 aa, Streptococcus agalactiae
ATGTCACGCAGTCAAAAAGTTATTTTAACTAATATGTGTCTTATTGAAGATAATAAAGGACGTATTGTGATGCAAATCCGTGATCCTAAACGTTATTCTTGGTCAGGAGCTGCTCTACCAGGCGGCCATATTGAAGAAGGAGAAAGCTTGTATGATGCTCTCGTTCGAGAAGTTCGCGAGGAGACAGGTTTAACAATAAGTAATCCCAAATTAGTTGGTATGAAGCATTGGTACACAGATGAAGGCATCCGTTATTTGGTATTCCTTTATAAAACATATGATTTTTCAGGTGAATTACAATCGTCAGATGAAGGTGATGTTATATGGGTTGAACGTTCACAACTTGATAAGATTGAACTAGCATATGATATGCTTAACCTTTTGAGAGTATTTGACGAAGATGACATCTCAGAGATGTTTTATAGTAAGCGACTTGAAGATGGTTTTATAAGAAAATTTTAT

SEQ ID NO: 20982 - protein, 154 aa, Streptococcus agalactiae
MSRSQKVILTNMCLIEDNKGRIVMQIRDPKRYSWSGAALPGGHIEEGESLYDALVREVREETGLTISNPKLVGMKHWYTDEGIRYLVFLYKTYDFSGELQSSDEGDVIWVERSQLDKIELAYDMLNLLRVFDEDDISEMFYSKRLEDGFIRKFY

SEQ ID NO: 20983 - protein, 186 aa, Streptococcus agalactiae
TTGAAAAAAAAGAATTTACTTCAGGAGAGTATTAATAAACGTCTATCTGAAGAGCGATATCAAATTCCTAAAGAAAAAAGAGAGAAAAAACGATTTGACATGCAGCTTATTCTGATTATTTCTATTTTAATAGGGCTAATCATGTCTATTATCGGAATTATTCGATTTTTCTTAACCTACAGTAGT

SEQ ID NO: 20984 - protein, 62 aa, Streptococcus agalactiae; identical to SEQ ID NO: 2684

SEQ ID NO: 20985 - protein, 1323 aa, Streptococcus agalactiae
ATGATTAACTTATTTGATAGTTACACTCAATCAAGTTGGGATTTACATTTTTCCTTGATAAAATCAGGTTATATTAACCCTACTATAGCTTTGAATGATGATGGTTTTTTACCAGACGACGTAACATCACCCTATTTATATTACACTGGTTTTGCAAAGACAGGTGCTGGCCGCCCACTTTACTACAATGAACTTAGAGTTCCTGATACATGGGAAATTATTGGTTTTAGTAGTGGTGCTGATATTGTTGACTTAGGTGTCAAAAAGGGCAGGATTATTTATGCAAACCCAAATCATAAGCGTCTAATAAAAGAGGTAGACTGGTTTGATGAGCAAGGTAGAGTCATTTTAAAAGATCGCTTTAATAAGTTTGGGTTCTGTTTTGCACAAACCTTTTATAACGCGGATGGTCAAGTGATTCAGACGTCATATTATAATAAGGATGGGCAAGAGGTTATATCAGAGAACCATATGACAGGGGATTATATTTTAAATGATAATAATCAGTTTAAGGTTTTTAAATCTAAAGTTGAATTTGTCATAAATTATCTTCAAGAAGCAAAATTTAACTTAGATAGAATCTTCTATAATTCTCTGTCAACACCATTTTTAGTAAGCTTTTACCTTAATCGTCTAGAGAGTAAAGATGTTCTCTTTTGGCAGGAGCCTCTCGTAGATGATATTCCAGGAAATATGCGCTTATTATTGAACAATCCTTCCCCAAACACTAAAATTGTAATTCAAAGTTATGAAGCTTATGCTAATGCTATGAGGTTATTAACCGACGAAGAACAAAAACAAGTTAGCTTTTTAGGATTTATGTATCCTCTTAAAGAGACAGAAAAATTACATAACCAAGCTCTTATTTTGACGAATTCTGATCAAATCGAAGCATTAGAAAGTTTAGTGACTTCTCTTCCTAATTTGACTTTTAACATAGGTGCTTTGACCGAGATGTCTAGTGATCTCATGAATTTTGGCAAATATGATAATGTTGTACTCTACCCAAATATCACAACAAATCAAATACAATATTTATCAAATATTTGTGCTTTTTATCTTGATATTAATCATCATAATGAGATATTATCAGCAGTTCGCTCTGCTTTTGAACATCAACAGTTAATTTTTGCTTTCGAAGAGACTAGTCATCAAATTCGTTTTGTATCACCTAAAAATATTTTTCCAAAAAAAGATATTTTTACATTTATTTCGCACTTGCAGCCACTAATTGGCAATAAATGTAATATAGAAAAAGCATTAAAACAGCAACTTGAAGCTTGTCATGTTTCAAGCTCTACTCAGTATCAATCTGTAATTAAT

SEQ ID NO: 20986 - protein, 441 aa, Streptococcus agalactiae
MINLFDSYTQSSWDLHFSLIKSGYINPTIALNDDGFLPDDVTSPYLYYTGFAKTGAGRPLYYNELRVPDTWEIIGFSSGADIVDLGVKKGRIIYANPNHKRLIKEVDWFDEQGRVILKDRFNKFGFCFAQTFYNADGQVIQTSYYNKDGQEVISENHMTGDYILNDNNQFKVFKSKVEFVINYLQEAKFNLDRIFYNSLSTPFLVSFYLNRLESKDVLFWQEPLVDDIPGNMRLLLNNPSPNTKIVIQSYEAYANAMRLLTDEEQKQVSFLGFMYPLKETEKLHNQALILTNSDQIEALESLVTSLPNLTFNIGALTEMSSDLMNFGKYDNVVLYPNITTNQIQYLSNICAFYLDINHHNEILSAVRSAFEHQQLIFAFEETSHQIRFVSPKNIFPKKDIFTFISHLQPLIGNKCNIEKALKQQLEACHVSSSTQYQSVIN

SEQ ID NO: 20987 - protein, 1506 aa, Streptococcus agalactiae
ATGACAGTTTATAATATAAACCATGGAATTGGTTGGGCAAGTAGCGGTGTTGAGTATGCTCAAGCATACCGAGGTTCTGTTTTGAGAAAACTTGGAATTGATGCTAAGTTTATTTTTACAGATTTTTTTTCAGCTGATAATATTATTAGCCTCACGCGAAATATAGGTTTTCAGGATAAAGAAATTATTTGGTTATATAATTTCTTTTCAGATATTGAGCTTGCACCGACAACTTTTAGTATAGAAGATTTGCAAAAACAATATCTTGGAAAACTTGTTCGAAAAGAAGATAAAGGTCGGGTAATCAAGTTTTTCTACGAAGATGAAAATATCTATTTAACAGTTTACCTTGATAACTTTAACAAGGATAAAGTGCATCGTGTAGAAATCGTTTCAAATAACAACCTTATCAGAAAAGATTATTATAGTTATACACGTACTTTCTCAGAGTATTACTATCCTAAAGATGGTGTAGCTCACCTTTATCAACGTAGATTCTACAATGAAGATGAAAGTACAGCCTTTTTGGAGATGGTAGAAAATAGCTCAAGTCGTTTTATTATCAATGGCAGACTTTTACCATCCAAAGTAGCTTTTTTTGATTATTTTTTGGAATCAATAACTTTCACTTCAAAAGATATTATTCTTTTGGATAGAGGAACTGATACCGCTCAGAGTCTTTTGCGCCATGGTAAACCCGCTAAGCTAGGGACTGTTGTTCATGCGGAACATTTTAGTGAGAATACTGTGACTGCTGACACTATTTTATGGAATAACTATTACGATTATCAGTTTACTAACGCTAATAGATTTGATTTTTTTATTACCTCCACTGATAAACAAACAGAACTTTTGGAACAACAATTTAAACAATTTACAAATCATAATCCTAGAATTATAACTATCCCGGTAGGCTCAATTGACAATCTTAAAATGCCAATGGATAATCGCCGTCCGTACTCTATTTTGACAGCTTCACGCCTAGCTAGTGAAAAACATGTAGATTGGTTAGTACGTGCAGTTATTAGGATAAGAGAAATTCTTCCTGAAGTGACATTTGATATCTATGGATCAGGTGGAGAAGAAGAAAAAATTAGAAATATTATAAATGCAGCCAATGCAACGGAATACATTCGATTGATGGGACATAAAAATCTCTCGAATGTTTATCAAAATTATGAGTTATATTTGACAGCTTCTAAAAGTGAGGGGTTTGGCTTAACTTTACTTGAAGCTATTGGCGCAGGACTTCCTTTGATTGGGTTTGATGTTCGTTATGGTAATCAAACTTTTATCAAAGACGGAGAAAATGGTTATCTAATTCCTCGATTTGATATGGATGATGAGGAAGCTATTGTAGAAGCTTTTAAAGAGAAAGTGTTACAATTATTCCAACAGGATCAAAAGGCTTTACGAGAAGCTTCTTACGCCATTGCCGAAGGATTCTTAACAAGTGAAGTAGAAGGAAAATGGTATAACTTAGTTAAGGAGTTGGTACAAGATGAT

SEQ ID NO: 20988 - protein, 502 aa, Streptococcus agalactiae
MTVYNINHGIGWASSGVEYAQAYRGSVLRKLGIDAKFIFTDFFSADNIISLTRNIGFQDKEIIWLYNFFSDIELAPTTFSIEDLQKQYLGKLVRKEDKGRVIKFFYEDENIYLTVYLDNFNKDKVHRVEIVSNNNLIRKDYYSYTRTFSEYYYPKDGVAHLYQRRFYNEDESTAFLEMVENSSSRFIINGRLLPSKVAFFDYFLESITFTSKDIILLDRGTDTAQSLLRHGKPAKLGTVVHAEHFSENTVTADTILWNNYYDYQFTNANRFDFFITSTDKQTELLEQQFKQFTNHNPRIITIPVGSIDNLKMPMDNRRPYSILTASRLASEKHVDWLVRAVIRIREILPEVTFDIYGSGGEEEKIRNIINAANATEYIRLMGHKNLSNVYQNYELYLTASKSEGFGLTLLEAIGAGLPLIGFDVRYGNQTFIKDGENGYLIPRFDMDDEEAIVEAFKEKVLQLFQQDQKALREASYAIAEGFLTSEVEGKWYNLVKELVQDD

SEQ ID NO: 20989 - protein, 2385 aa, Streptococcus agalactiae
ATGACAGCCTTTAATAGTTTATTTTCGTTAGATAAGAAACGTTTAAAAAAACTTCAGCGTACTTTAAATACTATCAATAGTTTAAAGGACCAAATGGCAACACTATCAAATGAGGAGTTGCAAGCTAAGACAACTGAATTTAGAAAACGTTTAGTTAATGGGGAAACACTAGATGATATTTGCGCTGAAGCTTTTGCTGTTGTTAGGGAAGCTGATAAGCGCGTATTAGGTCTATTTCCGTATGATGTACAGGTAATCGGTGGTCTTGTTCTGCACCAAGGAAATACTGCTGAGATGAAAACTGGTGAAGGAAAAACATTAACTGCCACTATGCCTTTGTATCTCAATGCTTTAGAAGGGAAGGGGGCAATGTTGCTGACTAATAATTCTTACCTTGCTATTCGAGATGCGGAAGAAATGGGAAAAGTATATCGTTTTTTAGGATTGAGTGTCGGTGTGGGAGTTTCTGATAATGAGGAAGAGGAGAGAGATGCTGCGACTAAGCGAGCTGTTTATAGTTCGGATATTGTCTATAGTACAAGTAGTGCACTAGGCTTTGATTATTTAATTGATAACCTAGCTTCATCTAAATCTCAAAAATATATGCCCAAGTTACATTATGCTATTGTAGATGAAGCTGACGCAGTTCTTCTAGATATGGCCCAGACTCCTTTAGTTATTTCAGGTTCACCCCGAGTACAATCTAATCTCTATAAAATAGCAGATGAACTAATTCTTAGTTTTGAAGAACAAGTTGATTATTATTTTGACAAAGAGCGTCAGGAAGTGTGGATAAAAAACCAGGGTGTTCGTGAAGCTGAGAGATATTTTAGAATCCCTCATTTTTATAAACAGTCTAATCGAGAACTTGTGCGACATTTGAACTTATCTTTAAAAGCACATAAATTATTTGAACGAGGAAAAGATTATGTGGTTGACGATGGTGAAATCAAGTTGTTAGATGTGACTAATGGCCGTGTTTTAGAAGGTACTAAACTTCAAGGAGGTGTTCATCAAGCTATTGAGCAAAAAGAGCATCTTAATGTCACACCAGAGTCTCGAGCAATGGCTTCCATTACCTATCAAAATCTTTTTAGAATGTTTACTAAATTAGCTGGAATGACAGGAACTGGAAAAACTGCTGAAAAAGAGTTTATTGAGGTCTATGATATGGAAGTAGTTAGAATTCCAACTAATTCTCCTGTTAGACGAATTGACTATCCTGATAAGATTTATACAACCTTACCAGAGAAAATCCATGCAACGATTGAATTTGTTAAACAGGTTCATGATACAGGACAACCAATCCTACTAGTTGCCGGTTCTGTGAGAATGTCAGAGCTATTCTCAGAATTATTATTACTAAGTGGTATCCCTCATAGCCTGTTAAATGCTCAAAGTGCGGTTAAGGAAGCACAGATGATTGCAGAAGCAGGGCAAAAAGGTGCGGTCACTGTTGCAACGAATATGGCTGGTCGTGGTACAGATATTAAGTTAGGTAAGGGAGTATCAGAATTAGGTGGTCTTGCGGTTATTGGAACGGAGAGAATGAAGAGTCAAAGAATGGACTTACAATTAAGGGGACGTTCGGGTCGACAAGGGGATATTGGTTTTAGTCAATTTTTTGTATCATTTGAAGATGATCTAATGATAGAATCAGGTCCTAAATGGGCGCAAGATTACTTTAGGAAAAATCGTGACAAAGTTAATCCAGAAAAACCTAAAGCCTTAGGTCAGAGAAGATTCCAGAAGTTATTCCAGCAAACTCAGGAAGCTAGTGACGGTAAGGGAGAGTCTGCACGTAGTCAAACGATAGAGTTTGATTCGAGTGTACAACTTCAGCGAGAGTATGTTTATCGTGAGAGAAATGCTTTGATCAATGGAGAAAGTGGACATTTTAGTCCAAGACAGATTATTGATACAGTGATTTCTTCCTTCATTGCTTATTTAGATGGTGAAGTAGAAAAAGAAGAACTCATTTTTGAAGTAAATCGTTTTATATTTGATAATATGTCTTACAATCTTCAAGGGATTTCTAAAGAGATGTCACTTGAAGAAATTAAAAACTATTTATTCAAAATAGCCGATGAGATTCTTCGAGAAAAGCATAATTTGCTTGGTGATAGTTTTGGTGACTTTGAACGTACTGCTGCTTTAAAAGCGATTGATGAAGCTTGGATTGAAGAAGTAGATTATCTACAACAATTACGTACTGTGGCAACAGCTCGTCAAACGGCACAGCGTAACCCGGTTTTCGAATATCATAAAGAAGCATATAAATCCTACAATATCATGAAAAAAGAAATTCGTGAACAAACTTTTAGAAATCTACTTTTGAGTGAAGTATCCTTCAATGAGAATGGAGATCTTCAAATTTATTTTATA

SEQ ID NO: 20990 - protein, 795 aa, Streptococcus agalactiae
MTAFNSLFSLDKKRLKKLQRTLNTINSLKDQMATLSNEELQAKTTEFRKRLVNGETLDDICAEAFAVVREADKRVLGLFPYDVQVIGGLVLHQGNTAEMKTGEGKTLTATMPLYLNALEGKGAMLLTNNSYLAIRDAEEMGKVYRFLGLSVGVGVSDNEEEERDAATKRAVYSSDIVYSTSSALGFDYLIDNLASSKSQKYMPKLHYAIVDEADAVLLDMAQTPLVISGSPRVQSNLYKIADELILSFEEQVDYYFDKERQEVWIKNQGVREAERYFRIPHFYKQSNRELVRHLNLSLKAHKLFERGKDYVVDDGEIKLLDVTNGRVLEGTKLQGGVHQAIEQKEHLNVTPESRAMASITYQNLFRMFTKLAGMTGTGKTAEKEFIEVYDMEVVRIPTNSPVRRIDYPDKIYTTLPEKIHATIEFVKQVHDTGQPILLVAGSVRMSELFSELLLLSGIPHSLLNAQSAVKEAQMIAEAGQKGAVTVATNMAGRGTDIKLGKGVSELGGLAVIGTERMKSQRMDLQLRGRSGRQGDIGFSQFFVSFEDDLMIESGPKWAQDYFRKNRDKVNPEKPKALGQRRFQKLFQQTQEASDGKGESARSQTIEFDSSVQLQREYVYRERNALINGESGHFSPRQIIDTVISSFIAYLDGEVEKEELIFEVNRFIFDNMSYNLQGISKEMSLEEIKNYLFKIADEILREKHNLLGDSFGDFERTAALKAIDEAWIEEVDYLQQLRTVATARQTAQRNPVFEYHKEAYKSYNIMKKEIREQTFRNLLLSEVSFNENGDLQIYFI

SEQ ID NO: 20991 - protein, 990 aa, Streptococcus agalactiae
ATGAGTACGATAAGCTATATTTATTGGGATGATTTTTCAAGGTTTTCTTATAATTTTGGAACAAAATTACAATTTTGGGGAAAATCAGTATGCTTTGAAAATCCATTAGCTCCTTCTAGCACAAACTTGTATACATGGAGCTCCCAGACTAATTATCAGTCAAAAAGAATTTCTCCTAACTTACCTTTATTAAGAAAGGGAACTCGTTATAGCTTGTCATTAAATGCAGAACTCGATTTAGTTGGCTCTCTTTTTGTTCGCATTGAATTTTACAATCGCTTTAATGAGTCTGTTGGTTTTGAACTGTTAAAAAAAGATAGTATTATTTTTATCTATCCTAAAGAGGCTTATACCTATACCATTAGTTTGATTAATGCAGGTTGTAGCGATTTTACTTTTCATTATTTGAAACTTGAGGAAATTACAGATAGCGTTATTCAGGAGAAAAATCTATCGACAGAGTTTACTATTGAAGAACATCAAGACGTTTTAAATCTTCTTTTGGTCGAGAAAAAAGATAGTGTGTATATTAATAAAATAGAAAGCATTTCTCAATTGCAACAGAAAGTCGAGTTGGTCAGCAATCCCTCATTAAATTCTGATAGTTTGATATTACCTGAGTTGGAAAAGGGGTTAGAAGATGCATTAAAAGTTTTTCCTAACATTAAGATTAATGTCATTGCGTATGGAACACAAGGTAATTTTGCTGCTTTATATTATGCTAAAAAATTTCCCAGAATAACTGCCTATATTAATGATTGTTTTGCTCCTTTCGGAATTTTACTTAAATCCTTACCACACTTGACTGCTAAACAACAAATATTTCTTAGAGAAGTCTGGGATACGAGAGAGACGTCTCCAAATGTAAAGCACTATGGATTGGTTTCAGAAAATTCCTCTTTAAATTTAGTAGCAATGATCTTATCTGGTAATGAACATCTACCTTACCTCACACTTTTAAAAAAGCAGGACGACAATTATGACAGCCTT

SEQ ID NO: 20992 - protein, 330 aa, Streptococcus agalactiae
MSTISYIYWDDFSRFSYNFGTKLQFWGKSVCFENPLAPSSTNLYTWSSQTNYQSKRISPNLPLLRKGTRYSLSLNAELDLVGSLFVRIEFYNRFNESVGFELLKKDSIIFIYPKEAYTYTISLINAGCSDFTFHYLKLEEITDSVIQEKNLSTEFTIEEHQDVLNLLLVEKKDSVYINKIESISQLQQKVELVSNPSLNSDSLILPELEKGLEDALKVFPNIKINVIAYGTQGNFAALYYAKKFPRITAYINDCFAPFGILLKSLPHLTAKQQIFLREVWDTRETSPNVKHYGLVSENSSLNLVAMILSGNEHLPYLTLLKKQDDNYDSL

SEQ ID NO: 20993 - protein, 1557 aa, Streptococcus agalactiae
ATGTCAAAAATAAAACTTACAATTCTTCAAGTTGGTGAAGAGAACTGGGCAACTAAAGAGAATATCCCTAATGATATGGAATGGCTCTTTATTAAACCAGATCAAATTTCTGACTTTGTAACTACAGAAAATAATTATCTTACATCGTCAAAGTTATTACAAAAACTACCTCGAAAAATATCTGCTCTTTTGTTGACAGAGCAAACTTATGGACCAGAGTTATCTAGTTTATCGTCATTCTTTGAGGTTTATGAAGTATTTTATCCTAAAGATAAACATGCTACGGGGATAACAGAAGAGTTTTTACGCTCGAAAATGGCCCAACGATATGATAGTAGCTCTCCAGCTCAGCTAATTCGTCAATTTTATAAAGGGCTTTTTATAGGACAATACGGAGAGAAACTTCAAGTTTCACAAATACAAATTAGAAATGATTTTGAAGGTGTAGTAAACTATCAGGGAAATAACTATCTTGAATTAGAAGGGCAATTTGGTGAGGACTATAGTTTTTTACTTAATTTTGCTTACAATATTCCATTTTCATCGGATTTTTATAATGAGTTATTTTTAGAACACATTATAGAGGGTGATATAGATATTCGATTGGTTATTTCGTTGATTGTTGATGGTTCTGTTGATGATATTGCTAAAGAGTGGTACTTTGAGAAGGAAGACCTAAATCAACTTATTTCTTTAGAGTCCGATATTAGTGGTAGCCTTGCAGTTAAACTTTTTGCTAAGGGAAAGGGTATCGTTAAGTTAGGTCCATTGCACCGTCGTAATGGTAGAGGAGGATTGGGCACATTTCTACTAGGAGGAGAACGTCACATAGATGCTATAGGTCATGAATTTATGACTTATTTTGATCCAGTAGATTTCAAACCACCTCTAACTGTTTATTTTTCGGGATTTCGTTCAGCTGAAGGCTTTGAGGGATTCTGGATGATGAAGAGTATGAAGACTCCATTCATGTTAATTTGTGATCCACGATTACAAGGTGGTGCCTTTTATATAGGAAGCAAAGAATATGAACAAAAAATAGTTGATGCTATTCAAGAAAAACTGGCCTTTTTAAATTTTAGTTCTGATCAGTTAATTTTATCCGGGCTTTCAATGGGGACTTATGGTGCTACTTACCATGGTGCTAAGCTAAATCCTCATGCTATTATTATTGGTAAACCAATATTTAATTTAGGAACAGTTGCTCAACGTGAAAGATTAGAGAGACCAGATGGATTTGCTACTTCATTAGATATTCAACTACTCAATCAAGGTGATTTGACCAGAGCCTCTTCTGAGAAGTTAAATAACCATTTTTGGAAATCTATAGAAGAAGGAGATTTTTCAAATACGACTTTTGCCTTAGCCTATATGAAAAACGATGACTATGATGCGACTGCCTTTTCTGATTTATTGCAATATTTTAGAGGAAAGAAGCATAAGATATTAGGAAGAGGTTGGGATGGCCGACATGGTGATTGTTCTGCAGAAGTTGGTGCATGGTTTACAAGTCAGTATAGGCGAATGCTATCTAATGATTTTGGAAGGAAGGAAGAA

SEQ ID NO: 20994 - protein, 519 aa, Streptococcus agalactiae
MSKIKLTILQVGEENWATKENIPNDMEWLFIKPDQISDFVTTENNYLTSSKLLQKLPRKISALLLTEQTYGPELSSLSSFFEVYEVFYPKDKHATGITEEFLRSKMAQRYDSSSPAQLIRQFYKGLFIGQYGEKLQVSQIQIRNDFEGVVNYQGNNYLELEGQFGEDYSFLLNFAYNIPFSSDFYNELFLEHIIEGDIDIRLVISLIVDGSVDDIAKEWYFEKEDLNQLISLESDISGSLAVKLFAKGKGIVKLGPLHRRNGRGGLGTFLLGGERHIDAIGHEFMTYFDPVDFKPPLTVYFSGFRSAEGFEGFWMMKSMKTPFMLICDPRLQGGAFYIGSKEYEQKIVDAIQEKLAFLNFSSDQLILSGLSMGTYGATYHGAKLNPHAIIIGKPIFNLGTVAQRERLERPDGFATSLDIQLLNQGDLTRASSEKLNNHFWKSIEEGDFSNTTFALAYMKNDDYDATAFSDLLQYFRGKKHKILGRGWDGRHGDCSAEVGAWFTSQYRRMLSNDFGRKEE

SEQ ID NO: 20995 - protein, 561 aa, Streptococcus agalactiae
ATGACTTATTTTGATCCAGTAGATTTCAAACCACCTCTAACTGTTTATTTTTCGGGATTTCGTTCAGCTGAAGGCTTTGAGGGATTCTGGATGATGAAGAGTATGAAGACTCCATTCATGTTAATTTGTGATCCACGATTACAAGGTGGTGCCTTTTATATAGGAAGCAAAGAATATGAACAAAAAATAGTTGATGCTATTCAAGAAAAACTGGCCTTTTTAAATTTTAGTTCTGATCAGTTAATTTTATCCGGGCTTTCAATGGGGACTTATGGTGCTACTTACCATGGTGCTAAGCTAAATCCTCATGCTATTATTATTGGTAAACCAATATTTAATTTAGGAACAGTTGCTCAACGTGAAAGATTAGAGAGACCAGATGGATTTGCTACTTCATTAGATATTCAACTACTCAATCAAGGTGATTTGACCAGAGCCTCTTCTGAGAAGTTAAATAACCATTTTTGGAAATCTATAGAAGAAGGAGATTTTTCAAATACGACTTTTGCCTTAGCCTATAGAAAAACGATGACTATGATGCGACTGCCTTTNNNNNTTAAT

SEQ ID NO: 20996 - protein, 187 aa, Streptococcus agalactiae
  VARIANT 184, 185, 186: Xaa = Any Amino Acid
MTYFDPVDFKPPLTVYFSGFRSAEGFEGFWMMKSMKTPFMLICDPRLQGGAFYIGSKEYEQKIVDAIQEKLAFLNFSSDQLILSGLSMGTYGATYHGAKLNPHAIIIGKPIFNLGTVAQRERLERPDGFATSLDIQLLNQGDLTRASSEKLNNHFWKSIEEGDFSNTTFALAYRKTMTMMRLPXXXN

SEQ ID NO: 20997 - protein, 1442 aa, Streptococcus agalactiae
ATGTTTCATTTTATTCCATCTTGGTATAATGAAAATCGTACCTGGTATGATAATAATTACTTGTGGTATTTCAAGCCGACTAATGTCGGTTTTGATGATACTATCAACCAAATGAAGATGTTTGATTATGCTGGAAAAGAGAGTAGATTAGTTGTCTTAAACTATATGCCCAATTTACGTTATTATTTACATCGCTATGACTTGTTAGAATCAGGTTATTATTCAGTTTTTGATGATATTCAAGAAATTGGGAATGTAAGACAGCAAATGATTGACTTCCGACAACTCAATTGGCCTGAAGGGGTGGACTTTACCTATACTCCATTTATAGTTTTGGTAAAAAAGTCAGGAGATTTAATTGCTAAGGTTCAATTTGGTGAAGAAGGAAATTTAACGCATATTGATTATTTTGCAAATGAACAAATAGCTAAGAAATACCTCTTTGATGATAGAGGATTTCTATCTAGTATTCTCTATTATGATAATGGTGGTGAAGCCTATCAAGATTATTTAGCACCATCAGGGGAAAGGATCATGAGAGAATACCTAAGAGAAGATGACCACCATGTTGAAATTAATCCTAAGAAAGCTATTCATTTTTTAAAGTTATCTTACTCCGATATTGAAGAGTTGATTAGAGAGAAATATCTGACCTATCTCCATAAAGAAGTTAGTAAATCAGATACTATCATTGCTAGCTTTAATCAAGTTCATAACGCATTTATTGTTGGGAACACTAGTAAAGGAAATTTATATTATCTGTTTTCTCGGAGAGGAATAATGCTCACAATGTATTGGAGGATTACTCTTCCTTATCTCGTGCAGACGCTATTATTTGTGATAGACTAGATATTGCTGCACAGTTGAAAGAAAAAATAGATAAACCAGTTGTTCATGTTTCTCCCTTTGATACGCGTTTAGCTTTGGGAAAAAGTAATCAAGTTAGAGATTTAGAAATATATTTTGTTGTAGATAGACTTTCCCATAAAGAATTGCAAAAGTCTTTAACATCCTTATATAAGGTTATGCTCAAAAATAATGATATAAAAGTAACATTTGTCAGCTACGAACGAGAATTTGAAAGTCGGCAATTGACATATGACTACCTTAAAGAAGCAACAAAAGTTTTTGATCAGAAATTCTTTAGTTTATCAGACGATGATGCCAATCAAGTTCTTATGCAATCTGATGAAGTAGAAAAGGAAAAAACACGCCTTTCTTTTACCCATCCTTTGTCAGAAACAGATATCATAAACCGGTTAGAGTATGTCCGTTTGATTATTGATATCTCTAAAATACCAGACTTATACACGCAAATTGCAGGGATAAGTTCAGGTATCCCTCAGATAAATACAATATTAACAGAATTTGTTGAACACAGGAAAAACGGTTACGTTATTGAAGAGATCCAAGAATTGGAAAGGCAATNNNNNTTAATTAAT

SEQ ID NO: 20998 - protein, 481 aa, Streptococcus agalactiae
  VARIANT 251, 477, 478: Xaa = Any Amino Acid
MFHFIPSWYNENRTWYDNNYLWYFKPTNVGFDDTINQMKMFDYAGKESRLVVLNYMPNLRYYLHRYDLLESGYYSVFDDIQEIGNVRQQMIDFRQLNWPEGVDFTYTPFIVLVKKSGDLIAKVQFGEEGNLTHIDYFANEQIAKKYLFDDRGFLSSILYYDNGGEAYQDYLAPSGERIMREYLREDDHHVEINPKKAIHFLKLSYSDIEELIREKYLTYLHKEVSKSDTIIASFNQVHNAFIVGNTSKGNXILSVFSERNNAHNVLEDYSSLSRADAIICDRLDIAAQLKEKIDKPVVHVSPFDTRLALGKSNQVRDLEIYFVVDRLSHKELQKSLTSLYKVMLKNNDIKVTFVSYEREFESRQLTYDYLKEATKVFDQKFFSLSDDDANQVLMQSDEVEKEKTRLSFTHPLSETDIINRLEYVRLIIDISKIPDLYTQIAGISSGIPQINTILTEFVEHRKNGYVIEEIQELERQXXLIN

SEQ ID NO: 20999 - protein, 1227 aa, Streptococcus agalactiae
TTGAAATTACTATATATTTTTGAAAAAAATATTATTCTTCGTAAAATATTGATAACATTTTCATTAATAATCATTTTTTTACTTGGTCGCTATGTTCCAATACCTGGTGTCTTGATTTCTGCTTATAAGGGACAAGACAATAACTTTGCGACGCTTTATTCAACAGTAACTGGTGGTAATTTGTCTCAGATTGGGGTCTTTTCATTGGGTATTGGTCCTATGATGACCACAATGATTTTACTAAGACTATTTACGATTGGTAAATACTCTAGTGGAGTATCTCAAAAAGTTCAACAGTTTCGCCAAAATGTGGTGATGCTTGTCATAGCAACTATTCAAGGGCTAGCCATAGCCATATCTTTTCAATATCGTAATGGTTTTTCTCTGACCAAATTATTACTCGCGACAATGATACTTGTGACTGGTGCATATATTATTTCCTGGATTGGTAATCTAAATGCGGAATACGGGTTTGGTGGAATGACTATTTTAGTGGTGGTAGGTATGCTTGTTGGGCAATTTAATAATATTCCTCTTATTTTTGAATTATTCCAAGATGGTTATCAACTTGCTATCATCTTATTTCTTTTGTGGACACTAGTAGCAATGTACTTAATGATAACTTTTGAACGTTCAGAATATCGTATACCAGTAATGCGTACTTCAATCCATAATCGTCTCGTTGATGATGCCTACATGCCGATAAAAGTAAATGCTTCGGGAGGGATGGCATTTATGTATGTTTATACCTTACTAATGTTCCCCCAGTATATTATTATTTTACTAAGAAGTATTTTCCCAACTAATCCAGATATCACATCATACAATGACTATTTTAGTTTATCTTCTATTCAGGGAGTGGTTATTTATATGATTTTAATGTTTGTTTTATCAGTTGCATTTACTTTTGTGAATATTGATCCGACTAAAATTTCTGAGGCAATGCGAGAAAGTGGTGATTTTATTCCTAATTATAGACCTGGTAAAGAAACACAAAGTTATTTATCGAAAATCTGTTATTTATTTGGAACTTTTAGTGGTTTTTTCATGGCTTTCTTAGGAGGGGTACCATTATTATTTGCTCTTGGAAATGATGATCTTAGGACAGTTTCATCTATGACAGGGATTTTTATGATGATCACAGGGATGTCATTTATGATATTGGATGAATTCCAAGTTATTCGTATTCGTAAACAATACACTTCTGTATTTGAAAATGAGGAGAAT

SEQ ID NO: 21000 - protein, 409 aa, Streptococcus agalactiae
MKLLYIFEKNIILRKILITFSLIIIFLLGRYVPIPGVLISAYKGQDNNFATLYSTVTGGNLSQIGVFSLGIGPMMTTMILLRLFTIGKYSSGVSQKVQQFRQNVVMLVIATIQGLAIAISFQYRNGFSLTKLLLATMILVTGAYIISWIGNLNAEYGFGGMTILVVVGMLVGQFNNIPLIFELFQDGYQLAIILFLLWTLVAMYLMITFERSEYRIPVMRTSIHNRLVDDAYMPIKVNASGGMAFMYVYTLLMFPQYIIILLRSIFPTNPDITSYNDYFSLSSIQGVVIYMILMFVLSVAFTFVNIDPTKISEAMRESGDFIPNYRPGKETQSYLSKICYLFGTFSGFFMAFLGGVPLLFALGNDDLRTVSSMTGIFMMITGMSFMILDEFQVIRIRKQYTSVFENEEN

SEQ ID NO: 21001 - protein, 1194 aa, Streptococcus agalactiae
ATGAGAGTTATTAAAGTAAAAACAATTTCGGAAACTTTAGATTATATTTCTAAACATACCGCTTCGGTAGCGCGTTTTGGTGATGGAGAAATTGATATTATTGCGGGGAATTCTATTCCTTACCAGGTTTATGATTCTGAACTTGCTAAGCGATTAAAACGTTTATTAAATCGACAGAGTAATGAGAAGCTAGTTATCTGTGTAAGTGATGTTTTTGATAATTTAGGTAGATACAACGATTTTTCACAACAATTTTGGAGGGATCATCTATATCAGTATAATGATTTGTACCAAAAAAATTGTCAGGCTGAATGGTATGGTTCAACTTTTATTTCTAGACCCTATATGGATTTACTGGATAAGAGTTTGTCAGTAACGTACTTTGAACAGCTAAAAGCATTATGGAAAAATAAAGATATTTTAATTGTCGAGGGTGAGACTTCTCGTTCAGGCGTTGGCAATGACTTATTTAATGATGCCAATACTATTTCGCGTATCATTTGTCCTTCGAAAGATGCATTTTCATCTTTTTATGAAATCAAGGAAACTATACTTGAACATAGTAGAGGTAAGCTAATTTTACTTATGCTTGGTCCAACTGCAAAGCTATTAGCTGAAGATTTATCGCAGCTAGGACATCAAGCTATTGATTTAGGTCATATCGATTCAGAATATGAGTGGTTTAAGATGGGAGCAGTTTCTAAGGTGAAACTTTCTCATAAACATACGGCAGAACATAATTTTGACGAAGATATTACTTTAATAGAAGACAATAGTTACGAAAATCAAATTGTATCAAAAATTGGTACATCAGATAGACAGTACGCTTTGACAGTGACATTAACAGATGATATATGGGAGCTAGAACATTTATTACAAAGATGTCCTAATACTGATTTTCATATTGCTGCCCCAGTTTATTGTTCGGATAGACTTAAGCAGTTAGTAGGTTATCCAAATTATTACCTACATGAAGCTATTACTGAAGAGCAATTCGAAGTACTCCTATTAAATAGCGATATATATTTAGATATTAATCATGGTGAAGAAGTTTGGAATGTTGTTGATAGATGTATAACTGAGGGTAAAACTATATATGGAATCAGACGGGCAAGAAAAGATAATCAATATATTTCTTTTGAGCGAACCATGGATGATTTTGAATATTTGTGTGACACTATTAAACAAAATAGA

SEQ ID NO: 21002 - protein, 398 aa, Streptococcus agalactiae
MRVIKVKTISETLDYISKHTASVARFGDGEIDIIAGNSIPYQVYDSELAKRLKRLLNRQSNEKLVICVSDVFDNLGRYNDFSQQFWRDHLYQYNDLYQKNCQAEWYGSTFISRPYMDLLDKSLSVTYFEQLKALWKNKDILIVEGETSRSGVGNDLFNDANTISRIICPSKDAFSSFYEIKETILEHSRGKLILLMLGPTAKLLAEDLSQLGHQAIDLGHIDSEYEWFKMGAVSKVKLSHKHTAEHNFDEDITLIEDNSYENQIVSKIGTSDRQYALTVTLTDDIWELEHLLQRCPNTDFHIAAPVYCSDRLKQLVGYPNYYLHEAITEEQFEVLLLNSDIYLDINHGEEVWNVVDRCITEGKTIYGIRRARKDNQYISFERTMDDFEYLCDTIKQNR

SEQ ID NO: 21003 - protein, 885 aa, Streptococcus agalactiae
ATGGAGGCAATAGTGACTGATAAATTAGTTTCTGTTATTATTCCAGTCTATAATGCAGCACCATATTTAGAGGGGTGTGTAAATACCATTTTAGGACAAACATACCAAGTTTTTGAAATTCTACTGATAGATGACGGTTCTACAGATACATCTGCTAGTATCTGCGATCAATTATCCCTAAGAGATAACCGTATTAGAGTTTTCCATATCGAAAATGGCGGTGCTTCTAAAGCTAGAAACTTTGGATTAGCACGAATTAGTCCAGAGAGCCAATTTGTTACGTTTGTTGATTCGGGCGATTGGGTAAAGGAAAATTATTTGGAAGTACTGCTAGCTCAGCAAGAAAAATATAATGCTGATATTGTTATCAGTAATTACTATATCTACAGAGAAACAGAAGATATTTTTGGTTACTACATCACTGACAAAGATTTTGTTATCGAAGAAATCTCTGCTCAAACAGCTATTGATAGACAAGTGCATTGGCATTTAAATAGTTCAGTATTCATCGTTATTTGGGGGAAATTATATCGAAGAGAACTATTTGATACCATCACCTTCCCAATAGATAAAGTATTTGAAGATGAGTTGGTAAGTGTTTTACTTTTTATAAAAAGTAAAAAAACAATTTTAGTTAATGGAAGCTATTATGGCTATAGAATTCGTCCAAATAGCATTATGACATCGGCGTTTTCATCCAAAAGAGCAGAAGATCTTATTTATATTTTTGATAGTAAATTGTCGGAGATTATACTATCAGGATTGGATTCAACTGCAACTGTAGAGAGATATTTTTGGTTAATGCGTGACTATAAACAGCGCTTAGAACAAGAAAATTTACAGAAAACAATAATATATAAAGTGATATCAAATCGGTTATCAAGG

SEQ ID NO: 21004 - protein, 295 aa, Streptococcus agalactiae
MEAIVTDKLVSVIIPVYNAAPYLEGCVNTILGQTYQVFEILLIDDGSTDTSASICDQLSLRDNRIRVFHIENGGASKARNFGLARISPESQFVTFVDSGDWVKENYLEVLLAQQEKYNADIVISNYYIYRETEDIFGYYITDKDFVIEEISAQTAIDRQVHWHLNSSVFIVIWGKLYRRELFDTITFPIDKVFEDELVSVLLFIKSKKTILVNGSYYGYRIRPNSIMTSAFSSKRAEDLIYIFDSKLSEIILSGLDSTATVERYFWLMRDYKQRLEQENLQKTIIYKVISNRLSR

SEQ ID NO: 21005 - protein, 1182 aa, Streptococcus agalactiae
GTGAAAAATAACGTTATTTGTTTGGCAGGTGATAATAAATCTTTAAATCAGATCCAAACAGTTATAAAATCGATTTTATGTCACAATGATAGAGTAAGTATTTATATTTTAAATCAAGATATAGCTTCAGAATGGTTTAGAAATATTCAAAGACGTTTATTAAATAGTCATAGTTGTATTTTTGATATAAAACTCTTTGATGATACTTTTAAGGAATTTAAAACGCCCCGTGCCCATATTACCTATATGGCTTATGCAAGGTACTACATTCCGCAACTTATTGATGCAGAGAAAGTTCTTTATTTAGATATTGATACTTTGGTTGTTGATAACTTAGATAAGTTGTTTGAGATAGAATTAGGGGACTACCCGATAGCAGCTATCTTAGATGGAGACGGTATTCATTTTAACTCAGGTGTTATGCTAATAAACTCGCTTTACTGGATGAGATATCGAGTAACAGAAAAACTTCTGGAAATAACAGAACGAGAATTGGATAATGGAATTTTTGGAGACCAAGGGGTTCTCAATCTTCTTTTTGATAATAATTGGCTTAAGTTAGAAGATAAGTATAATGCTCAAGTTGGAAATGATTTAGGTGCCTTTTATGAAAATTGGCAAGGGTATTTTGATCGTAACTTTGAATCGCCTACTATTATCCATTACTGTACTCATGATAAACCATGGAATACTTTTTCTTCTTCAAGGTTTAGGGAGACATGGTGGCAATATGAGCAACTAGATTGGAATGAGGTGTTTAATTTTGAAACGTATCTGTTACCTGAGCCAACATTTGAAAAACACTTCTTTACTTTCACAACGTCCGTGGATTTGCTTTATATTGAAGAATTGGTTGAACTATTCCCCAATAGTTGCTTCCATATAGCTGCTTGGACCTCTTTTGGCCCAAGATTACTTAAGTTAGCCACAAACTCTAACGTTCGTCTGTATCCTTCAATAACCAGCCCACTTTTTGAACAACTAATGACTAAAGCAAATTATTACCTTGATATCTCAACTTCTTGGAAGGAAATACAATTTTGTCAAAAAGCTATTGAGAAATCAATTCCGATATTGAGTTTTAATGAAACAGTGACATTTGAATATAGGGAGTTAAGTCATTGCTTTATTAATTTGGAGGATATGCGACAGTTTTTATGTAAAAATGGAGGCAATAGTGAC

SEQ ID NO: 21006 - protein, 394 aa, Streptococcus agalactiae
MKNNVICLAGDNKSLNQIQTVIKSILCHNDRVSIYILNQDIASEWFRNIQRRLLNSHSCIFDIKLFDDTFKEFKTPRAHITYMAYARYYIPQLIDAEKVLYLDIDTLVVDNLDKLFEIELGDYPIAAILDGDGIHFNSGVMLINSLYWMRYRVTEKLLEITERELDNGIFGDQGVLNLLFDNNWLKLEDKYNAQVGNDLGAFYENWQGYFDRNFESPTIIHYCTHDKPWNTFSSSRFRETWWQYEQLDWNEVFNFETYLLPEPTFEKHFFTFTTSVDLLYIEELVELFPNSCFHIAAWTSFGPRLLKLATNSNVRLYPSITSPLFEQLMTKANYYLDISTSWKEIQFCQKAIEKSIPILSFNETVTFEYRELSHCFINLEDMRQFLCKNGGNSD

SEQ ID NO: 21007 - protein, 1239 aa, Streptococcus agalactiae
ATGAAAAATAGAAAAGCTATCGCGTTAGCGGCAGATTTTGGCTATCAAGAGCAAGTTAAGACTATAATTAAATCAATATGCTTTCATAATCAATTTATTGATTTTTATATCTTAAATGACGATTTTCCAGTTGAATGGTTTCAAATGATGGAATATCATTTATCTAAAATGGATTGCACAATATCTAACACTAAAATTTTTAATGAAGAAATTAAACATTTTAAATTTCAAAAACCGATGCCCTATCCTACTTACTTTCGATACTTTATACCTGAAGTTATTCATGAAGATAAGGTACTATATTTAGACTGTGATATGATTATCACCAGTGATTTAACATCGATATTTACTCTTGATATTTCAAAATATGGTGTAGCGGCTGTTCGAGATGATTTGCTCGAAGAATATGATGGTAAAGAAGATTATTTTAATTCAGGTTTGCTATTAATTAATAATATTTTTTGGCGAGAACAAGGGATTAGTCAGCGACTGTTAGATTATACTAGAGAAAACCAAGGGGCTCTTCAATATCATGACCAGGATGTTTTGAATGATGTACTGTGCGATAATTGGCTAGAACTTGATGAAACTTATAACTATCATACAGGAGCAGATATGTTATATAACCTATTCCAACAGTCTGAACGTCAATTAAATCGCAGGAAAGATTTACCTAAAGTTATTCATTATACAGCGACAAAACCATGGAAATACCTTGAAACATCTGTTCGTTGGCGCGATATATGGTGGGAATATAATAGACTTGAATGGCGCGATATTTTTACAAGATGGCAAGTCAATGATGGTGTAGATGTTTCATTGAAGAAAGTGTTACAACCTATCCATCGAGCTTTCATTTTTACTTACTCAGATTCAATTGAAGGAATTGAGAGGTTGGCTAAGGATTTACCAAACTGGCAATTTCATATTGCTGCCTATACTCAAATTTCAGAAAAATTGAAACAATTGGAAATGCATTCAAATATAAAACTTTATCCACTTGTTTATCGTTTCAAATTAAATGAGCTAGTTGAAAATTCAGATATTTACCTTGATATTAATCATGGTGATGCAGATACTCAGGTTCTGGAGCAAGTGAAGAAATTAGGTAAAGATATTTTATCCCTTTCTACAACTTATCATGGTCAAGGCAAACAATTTGAGAGAGTTACGGATATTATTGATTATTTAAAGAATGAACGATTTAAAGAACATATTAGAAAGGAATATTGTGAAAAA

SEQ ID NO: 21008 - protein, 413 aa, Streptococcus agalactiae; identical to SEQ ID NO: 2706

SEQ ID NO: 21009 - protein, 1203 aa, Streptococcus agalactiae
ATGAAGAAAACAATTGTTTTAGGTGCAGATTTCCAATATCGTGATCAAGTTATGACAACTATAAAATCTATTGTTAGTCATAATCAACATTTAACTATTTATATCATTAACACAGATTTTCCCGTAGAATGGTTTAATATCCTTAACCATTCTTTAGAACAGTTTGACTGTAGAGTAAAAAATATTCCCATAAGTTCAGATGTCTTTGAGGGGATACCTACCCTGAGCCATATCAGTGTGGCGGGATTTTTCAGATGGTTTATTCCAATTCACCTTGAAGAAGAGATAGTTTTATATTTAGATAGTGATGTAATAGTTAGGGGTTCTTTGGATCCTCTATTTGACATAAACCTTGAAGAGAATTTATTAGGAGCTGTAGCAGATCATTTTTCAACGCTTTACTATGGAGATACAGCACCAGTTAGTTTTAATTCAGGTGTTATGCTAATCAATAATTCATTATGGAAAAAAGAAGAAATTTATAATAGCCTTATGAGGATTGCTGATAAGGGTTCTGCTGTTGGGGTAGGAGATCAAGAATACCTTAATATTTTGACTCAGAATCGTTGGATAGATATCGGTAAACAATATAATGTTCAGATTGGTCAAGATGTCAATATTAATGCATATGGGCGACCAGATTTGTATCATTTTTATGATGATTGCGAACCTGTTATTGTTCATTATAATAGTCAAGATAAACCGTGGAATAAATATAGTCAATCGCGATACCGTTCAGAATGGTGGTATTATTTTGGTTTAGAATGGTCAGTTATTTATGCTCAACAACAAAAAAATTTGAACAGGTTAACAGGTAAAACACTGAATTTATTTACATTAACAGCCTCAGATACATTAGAACATATTGAAGTACTTGCAAAAACTCTACCAGATTATCAGTTTCATATTGCAGCACGTAGTGATATTTCAGAGAAATTAGCTAATCTAGAAACTTATAGCAATATTAAAGTTTATAAATTAGTTATCAACCCTATCTTGGAAGAGCTTATACGTAACTGTGATGTGTACTTGGATATTAATCATTCTTACGAAGTAGAAGGTATTCTAGATAAAATAAAAGAAGAGAATAAACCGATTTTAGCCTTTGATTCTACAGCACATACGACAAAAAATATAGAAGTTATCTCAGAAACAATGCCTGAATTGATGGTTAAAAGAATAAGGGAAGTAGGTCCTCTTAGA

SEQ ID NO: 21010 - protein, 401 aa, Streptococcus agalactiae
MKKTIVLGADFQYRDQVMTTIKSIVSHNQHLTIYIINTDFPVEWFNILNHSLEQFDCRVKNIPISSDVFEGIPTLSHISVAGFFRWFIPIHLEEEIVLYLDSDVIVRGSLDPLFDINLEENLLGAVADHFSTLYYGDTAPVSFNSGVMLINNSLWKKEEIYNSLMRIADKGSAVGVGDQEYLNILTQNRWIDIGKQYNVQIGQDVNINAYGRPDLYHFYDDCEPVIVHYNSQDKPWNKYSQSRYRSEWWYYFGLEWSVIYAQQQKNLNRLTGKTLNLFTLTASDTLEHIEVLAKTLPDYQFHIAARSDISEKLANLETYSNIKVYKLVINPILEELIRNCDVYLDINHSYEVEGILDKIKEENKPILAFDSTAHTTKNIEVISETMPELMVKRIREVGPLR

SEQ ID NO: 21011 - protein, 1080 aa, Streptococcus agalactiae
GTGTTAATAAAACTATTATTTAACTGGTATGATATGGTCTGGATAAGAGAGAGTTTTAAAGAGAGATTAACTAAAATGCGAGTACATATTACAAGTATATATGGGCAGTCACCGCGTAGCATTGCCCTTATATCACAAAAACTAGTTAAGGATGTCGGACGTCAACTTGGTTATGATGAAATGGGAATCTACTTTTATAATGATCATGCTGAAACGCATGGTGAAAGAAGTACTAGGATGGATGGTATCATTGCGGGATTAGGCAGAGGGGATATTGTTGTTTTTCAAGTACCTACATGGAATTCAACAGAATTTGATGAACTTTTTCTAGATAAATTACAGGCATACGGTGCTAGAATTATAACTTTTGTACATGATATTGTTCCCTTAATGTTTGAGTCTAATTTTTATTTATTAGATAGAGTAATTGACATGTATAATCGTTCGGATGTTGTTATTCTACCTACAAAAGCGATGCATGATTATCTAATTGAAAAAGGGATGACTACCTCTAAAGTTCTTTATCAAGAAGTATGGGATCATCCAGTTAATATAGACCTCCCTCGTCCAGAATGTCAAAAAGTCCTTAGTTTTGCAGGCGATATTCAACGCTTTCCCTTTGTCAATGACTGGAAGGAAAATATCCCGCTCATCTATTATGGAGACGGAAGCAGACTCAATTCTGAGGCAAATGTTCATGCTCAGGGATGGAAAGATGATGTAGAATTGATGCTAAGTCTTTCTAAGCGGGGAGGATTTGGCCTGTGTTGGAGTGAAGATAGAGAGGAGTTAGTCGAGCGTCGTTATTCGAGGATGAATGCCTCGTATAAATTATCTACTTTCTTGGCTGCTGGACTTCCAATTATTGCTAACCATGATATTTCAAGTAGAGACTTTATCAAACAACACGGATTAGGATTTACAGTTGAAACGCTAGAAGAAGCTGTTGAAAAAATTAATAATATGGAAAAAGAGACTTATGACAGCTATGTGGAAAATGTTGAGAAGATAGCAACTCTCTTGCGAAATGGTTATATCACTAAAAAATTGTTGATAGATGCTGTGCATATGCTTTATAGA

SEQ ID NO: 21012 - protein, 360 aa, Streptococcus agalactiae
MLIKLLFNWYDMVWIRESFKERLTKMRVHITSIYGQSPRSIALISQKLVKDVGRQLGYDEMGIYFYNDHAETHGERSTRMDGIIAGLGRGDIVVFQVPTWNSTEFDELFLDKLQAYGARIITFVHDIVPLMFESNFYLLDRVIDMYNRSDVVILPTKAMHDYLIEKGMTTSKVLYQEVWDHPVNIDLPRPECQKVLSFAGDIQRFPFVNDWKENIPLIYYGDGSRLNSEANVHAQGWKDDVELMLSLSKRGGFGLCWSEDREELVERRYSRMNASYKLSTFLAAGLPIIANHDISSRDFIKQHGLGFTVETLEEAVEKINNMEKETYDSYVENVEKIATLLRNGYITKKLLIDAVHMLYR

SEQ ID NO: 21013 - protein, 3978 aa, Streptococcus agalactiae
ATGTCCCAAAAGACTTTTGGCAAGCAGTTAACAGTTGTAGATACTAAGAGTAGAGTCAAGATGCATAAATCAGGAAAAAACTGGGTAAGAACAGTAATGTCGCATTTTAATCTATTTAAAGCGATTAAAGGGAGAGCAACTGTTGAAGCAGATGTGTGTATTCAAGATGTTGAAAAAGAAGACCGACTATCTTCAGGAAATTTGACCTATCTCAAAGGAATACTAGCTGCTGGAGCTCTGGTAGGTGGAGCGAGTTTAACCAGTCGTGTTTATGCAGATGAGACTCCAGTTGTTCAAGAACAATCAAGTTCTGTACCAACACTGGCAGAACAAACGGAAGTGACTGTTAAAACAACTACTGTTCAAAATCATCAAGATGGGACAGTATCGAAAAACATTATTGATTCTAATAGTGTATCTATGTCAGAGTCAGCCTCAACAAGTACTAGTGAATCTGTAAGTATGTCTATGTCAGGGTCAACTTTAACAAGTGTAAGTGAATCTGTAAGTACATCTGCTTTAACAAGTGCTTCAGAATCGATAAGCACGTCAGCCTCAGAAAGTGTTTCAAAATCTACAAGTATTAGTGAGGTTTCAAATATTCTTGAAACTCAAGCTTCTTTAACTGATAAAGGAAGAGAGTCGTTTTCGGCAAACCAGATAGTAACAGAAAGTAGCTTAGTTACTGATGCTGGTAAAAATGCTTCAGTATCTAGCCTAATTGAAATTACAAAACCAAAATCGGAGTTACAGACTTCCAAAATGTCAAATGAGTCGCTTATAACTCCAGAGAAATCCCAAGTAATGATTGCAAGCGATAAAACTGGGAATGAGAGTCTAACTCCGACAATTAGATTAAAATCAGTTATTCAGCCAAGGAGCATGAACTTGATGACTTTGAGTTCGGAGATGGACTTGATACCACTAGAAGAAGTGTCTGATACTGAAATGTTAGGTAAAGATGTATCAAGCGAGTTGCAGAAAGTTAATATTGCGTTAAAAGATAACACTCTTAGTGAGCCTGGAACAGTTAAATTAGATAGTTCAGAAAACCTTGTTTTGAACTTTGCCTTTTCAATCGCTTCTGTTAACGAGGGAGATGTCTTTACTGTAAAGCTTTCTGATAACCTTGACACACAAGGGATTGGTACTATTCTAAAAGTTCAAGATATAATGGATGAAACGGGGCAGTTATTAGCGACTGGGTCATATAGTCCTTTAACACATAATATTACATACACCTGGACAAGGTATGCTTCTACGTTGAATAATATTAAAGCTAGAGTCAATATGCCAGTTTGGCCTGACCAGAGAATAATTTCTAAAACAACTTCAGATAAGCAGTGCTTTACTGCAACATTGAACAATCAAGTTGCTTCAATTGAGGAACGTGTTCAGTATAATAGTCCTTCAGTGACAGAACATACTAATGTTAAGACAAATGTAAGATCTCGGATCATGAAGCTTGATGATGAAAGACAGACAGAAACTTATATTACTCAAATTAATCCTGAAGGTAAGGAAATGTATTTCGCATCAGGACTTGGGAATCTATATACTATTATCGGTTCAGATGGAACATCAGGTTCACCAGTTAATTTATTAAATGCGGAAGTAAAGATTCTAAAAACTAATTCAAAAAATCTTACAGATAGTATGGATCAAAATTATGATTCGCCTGAGTTTGAAGATGTGACTTCCCAGTATAGTTATACTAACGATGGTTCTAAAATTACCATAGATTGGAAAACAAATTCTATTTCTTCCACTACATCTTATGTTGTTTTGGTCAAAATACCTAAACAAAGTGGTGTATTGTATTCAACTGTTTCTGATATAAATCAAACATATGGTTCTAAATATTCTTATGGGCATACGAATATAAGTGGTGACTCAGATGCGAATGCCGAAATTAAACTTTTATCAGAAAGTGCTTCTACGAGTGCGTCGACGTCAGCAAGTACCAGCGCTTCCATGAGTGCCTCGACATCAGCAAGTACCAGCGCTTCCATGAGTGCGTCGACGTCAGCCAGCACCAGCGCTTCCATGAGTGCCTCAATGTCAGCTAGCACAAGTGCTTCCATGAGTGCCTCGACATCAGCAAGTACCAGCGCCTCAATGAGTGCGTCGATGTCAGCCAGCACAAGTGCTTCAATGAGTGCCTCAACAAGTGCAAGTACTAGCGCTTCAACAAGTGCAAGTATGAGCGCCTCAACCAGTGCAAGTACTAGTGCTTCAACAAGTGCCAGTACCAGTGCCTCGACGTCAACAAGTACTAGCGCTTCCACGTCAGCAAGTACCAGTGCATCCACATCAGCAAGTATGAGCGCATCCACGTCAGCAAGTACCAGTGCATCCACGTCAGCAAGTATGAGCGCCTCCACAAGTGCAAGTATCAGTGCATCCACGTCAGCAAGTATGAGCGCTTCCACAAGTGCAAGTACCAGTGCATCCACGTCAGCAAGTACTAGCGCCTCAATGAGTGCATCGACGTCAGCCAGCACCAGTGCTTCCACAAGTGCAAGTACTAGCGCCTCAATGAGTGCATCGACATCAGCAAGTACCAGCGCTTCAACAAGTGCAAGTACGAGTGCTTCCACATCAGCAAGTACTAGCGCCTCAACATCGGCAAGTACAAGTTCTTCCACAAGTGCAAGTACCAGTGCATCGACATCAGCCAGCACTAGCGCCTCAATGAGTGCCTCGACGTCAGCCAGCACCAGTGCTTCCATGAGTGCGTCGACGTCAGCCAGCACTAGCGCCTCAATGAGTGCCTCGACGTCAGCCAGCACCAGTGCTTCCATGAGTGCGTCGACGTCAGCCAGCACTAGCGCCTCAACGAGTGCGTCAATGTCAGCCAGCACAAGTTCTTCAACAAGTGCCTCGATGTCAGCCAGCACTAGCGCTTCAATGAGTGCGTCAATGTCAGCCAGCACAAGTTCTTCAACAAGTGCCTCGATGTCAGCCAGCACTAGCGCTTCAATGAGTGCCTCGACGTCAGCCAGTACAAGTGCTTCAATGAGTGCGTCGACGTCAGCAAGTACTAGCGCCTCAATGAGTGCATCAACGTCAGCCAGTACAAGTGCTTCAATGAGTGCCTCGATGTCAGCCAGCACTAGCGCTTCAACAAGTGCAAGTACGAGTGCATCCACGTCAGCAAGTACCAGCGCCTCAACGAGTGCATCAATGTCAGCCAGCACAAGTGCTTCAATGAGTGCCTCGACGTCAGCCAGCACTAGCGCTTCAATGAGTGCGTCGACGTCAGCCAGCACCAGCGCCTCAACGAGTGCATCAATGTCAGTCAGCACAAGTGCTTCAATGAGTGCCTCGACATCAGCCAGCACTAGCGCTTCAACAAGTGCTTCCACGTCAGCAAGTACTAGCGCCTCAACAAGTGCTTCAACAAGTGCTTCAACATCAGCAAGTACCAGCGCTTCCACAAGTGCCTCAACGTCAGCCAGCACTAGCGCTTCAACAAGTGCAAGTACGAGTGCATCCACGTCAGCAAGTACCAGCGCCTCAACGAGTGCATCAATGTCAGCCAGCACCAGCGCCTCAACGAGTGCATCAATGTCAGTCAGCACAAGTGCTTCAATGAGTGCCTCGACATCAGCCAGCACTAGCGCTTCAATGAGTGCGTCGACGTCAGCCAGCACCAGTGCTTCAATGAGTGCGTCGACGTCAGCCAGCACCAGCGCCTCAACGAGTGCATCAATGTCAGCCAGCACAAGTGCTTCAATGAGTGCCTCGACATCAGCCAGTACAAGTGCTTCAATGAGTGCCTCGATGTCAGCAAGTACCAGCGCTTCCACAAGTTCTTCAAGCTCAGTGACTTCTAATTCATCAAAAGAGAAGGTGTATTCTGCCTTACCTTCTACGGGTGACCAAGATTATTCTGTAACTGCTACTGCCTTAGGTTTAGGTTTAATGACTGGGGCAACTCTTTTGGGAAGGAAAAAATCTAAAAAAGATAAGAAC

SEQ ID NO: 21014 - protein, 1326 aa, Streptococcus agalactiae
MSQKTFGKQLTVVDTKSRVKMHKSGKNWVRTVMSHFNLFKAIKGRATVEADVCIQDVEKEDRLSSGNLTYLKGILAAGALVGGASLTSRVYADETPVVQEQSSSVPTLAEQTEVTVKTTTVQNHQDGTVSKNIIDSNSVSMSESASTSTSESVSMSMSGSTLTSVSESVSTSALTSASESISTSASESVSKSTSISEVSNILETQASLTDKGRESFSANQIVTESSLVTDAGKNASVSSLIEITKPKSELQTSKMSNESLITPEKSQVMIASDKTGNESLTPTIRLKSVIQPRSMNLMTLSSEMDLIPLEEVSDTEMLGKDVSSELQKVNIALKDNTLSEPGTVKLDSSENLVLNFAFSIASVNEGDVFTVKLSDNLDTQGIGTILKVQDIMDETGQLLATGSYSPLTHNITYTWTRYASTLNNIKARVNMPVWPDQRIISKTTSDKQCFTATLNNQVASIEERVQYNSPSVTEHTNVKTNVRSRIMKLDDERQTETYITQINPEGKEMYFASGLGNLYTIIGSDGTSGSPVNLLNAEVKILKTNSKNLTDSMDQNYDSPEFEDVTSQYSYTNDGSKITIDWKTNSISSTTSYVVLVKIPKQSGVLYSTVSDINQTYGSKYSYGHTNISGDSDANAEIKLLSESASTSASTSASTSASMSASTSASTSASMSASTSASTSASMSASMSASTSASMSASTSASTSASMSASMSASTSASMSASTSASTSASTSASMSASTSASTSASTSASTSASTSTSTSASTSASTSASTSASMSASTSASTSASTSASMSASTSASISASTSASMSASTSASTSASTSASTSASMSASTSASTSASTSASTSASMSASTSASTSASTSASTSASTSASTSASTSASTSSSTSASTSASTSASTSASMSASTSASTSASMSASTSASTSASMSASTSASTSASMSASTSASTSASTSASMSASTSSSTSASMSASTSASMSASMSASTSSSTSASMSASTSASMSASTSASTSASMSASTSASTSASMSASTSASTSASMSASMSASTSASTSASTSASTSASTSASTSASMSASTSASMSASTSASTSASMSASTSASTSASTSASMSVSTSASMSASTSASTSASTSASTSASTSASTSASTSASTSASTSASTSASTSASTSASTSASTSASTSASTSASTSASMSASTSASTSASMSVSTSASMSASTSASTSASMSASTSASTSASMSASTSASTSASTSASMSASTSASMSASTSASTSASMSASMSASTSASTSSSSSVTSNSSKEKVYSALPSTGDQDYSVTATALGLGLMTGATLLGRKKSKKDKN

SEQ ID NO: 21015 - protein, 1494 aa, Streptococcus agalactiae
ATGATAGAAAATTTTTTAGAAAAAAATATTCTTAATAAAGTTAAATTACTTACTTTATGTTATGATACCCCCTCACTATCCTTAGATACCGCCTGTAACCGACTCCACTTATCACCAGTTGAGCTTAAAAACTATTGTCATAAATTAAATGTTTTATTTGGTCATAAACTTTCTATCCATATCCAAAAAGAACGGATTTTATGTAAGCTAAATAAACTTACTCAGGAAGATGCCTTAAAAATAGTTTATAATGAGTCAAACACTTTACAACTTCTTAAATTTTTAATTGATGACTCGTCTGATAAAAAATCTCTAGTATCTTTTGGAAATGATCTCTTCTTATCTCGTTCTTCTGTCTATCGTCTGCGAGAAAATTTAATTCCTTTAATTAAAGATTTAGGATTATCTTTATCTAAAAATACCATTGTAGGTGACGAATATCGCATTAGATATCTCATCGCATACCTCACTACTAAATTTGGTATTAAAATTTACGATCTGTCTGCTCTAGATATTAAGATTATTCGACAATTTTTATTTGAGAGTGGTACTAATATAAGACCTACTACGCACCTTTCTGATATCTTTATTTTTTTTGATACGCTTTTCATTTTAACCTGGAAACGTCACCATCATAAAGTTAAAATTCCAAACTCCAAACTTTTCTCTTCTCTTAAAAAAATCTTTATTTATGAGGAGCTGAATACATGTGTAAAAAGTATCGTTCAACCTTACTTCAATGTTATTTTTAATTCAGAAGACATGGATTATATTTTTCTTATCTATCTTACAAGCGCTAACTCTTTTGCTGCTCAAAAGTGGACTGAAACACATGTCGATGAAGTGTTAGCTATTTTTAAAAGTCTTCCTAAATTCCAAATGCTACTACAACCTTTGAAAGAAGCTCTTCCATACTCTGACACCTACTACGATGAGCTAGTGAAAGTCACTATTTACTTTTCTCGAAACTTCATAGTTGGTCTGAATCAATTAATTCCTGAAACACTTAGTTTTCCTTCAACATTCTATCCTGGAAATAATCCTAAACTAATATCCATTATCGAACCAATAGTCACTCATTGGCTAACTGAAATTGGAGAATCAAAGTTCAAAAAAACGCACTTCTTCTTGCTCTGTGCTCACCTTGAAAGAGTAATAAAGAATAGCATGCCTCCTATAAATATTGTGTTGCTGACAACTGATTTTATTAATAATGAAATTTTAAAAGACTATATTTTGCAATCCCTTTCAACAGATAAAATTAGATTTCATTCCTATTACTTATTGACAGATAATATTAGTCAAATATCGACCTTAAAACCCGATTTAATTATCACTAATCGAAAACTGTTTACCTATGTTACAAAGGAACTAGCTACAAATAGTTTAGTCGCTCATATTGATTACAACGATACACCCTCTCAAATCAGTAATATCCAAACTATTATTTCTAATATTAAAGAAGAAAAATATCGAAAAATCTTTGATAAAATA

SEQ ID NO: 21016 - protein, 498 aa, Streptococcus agalactiae
MIENFLEKNILNKVKLLTLCYDTPSLSLDTACNRLHLSPVELKNYCHKLNVLFGHKLSIHIQKERILCKLNKLTQEDALKIVYNESNTLQLLKFLIDDSSDKKSLVSFGNDLFLSRSSVYRLRENLIPLIKDLGLSLSKNTIVGDEYRIRYLIAYLTTKFGIKIYDLSALDIKIIRQFLFESGTNIRPTTHLSDIFIFFDTLFILTWKRHHHKVKIPNSKLFSSLKKIFIYEELNTCVKSIVQPYFNVIFNSEDMDYIFLIYLTSANSFAAQKWTETHVDEVLAIFKSLPKFQMLLQPLKEALPYSDTYYDELVKVTIYFSRNFIVGLNQLIPETLSFPSTFYPGNNPKLISIIEPIVTHWLTEIGESKFKKTHFFLLCAHLERVIKNSMPPINIVLLTTDFINNEILKDYILQSLSTDKIRFHSYYLLTDNISQISTLKPDLIITNRKLFTYVTKELATNSLVAHIDYNDTPSQISNIQTIISNIKEEKYRKIFDKI

SEQ ID NO: 21017 - protein, 1989 aa, Streptococcus agalactiae
ATGATAGATAGAAAAGATACTAACCGATTTAAATTAGTTTCCAAATATAGCCCTTCGGGAGATCAACCTCAAGCTATTGAAACGTTGGTTGACAATATTGAAGGAGGAGAAAAAGCTCAGATTTTAAAAGGTGCTACTGGTACTGGTAAAACCTACACAATGAGCCAAGTTATCGCCCAAGTTAACAAGCCAACCTTGGTGATTGCACATAATAAAACCTTAGCAGGTCAACTTTATGGAGAGTTTAAAGAATTTTTTCCTGACAATGCCGTAGAGTACTTTGTTTCATATTATGATTATTATCAACCAGAAGCTTATGTGCCTTCTTCGGATACTTATATTGAAAAAGATAGTTCAGTCAATGACGAAATTGACAAATTACGTCACTCAGCGACTTCTTCGTTATTAGAAAGAAATGACGTTATTGTTGTAGCATCTGTTTCTTGTATTTACGGTTTAGGTTCTCCTAAAGAGTATGCAGACAGTGTTGTTAGCCTTAGGCCAGGTCAAGAAATTTCACGTGATCAGTTATTGAACAATCTCGTTGATATTCAATTTGAGCGTAACGATATTGATTTTCAACGTGGAAAATTTCGCGTTCGTGGCGATGTTGTAGAAGTTTTTCCTGCGAGTCGTGATGAGCATGCCTTTCGAATTGAATTTTTTGGTGATGAAATTGATCGTATAAGAGAAATAGAATCGTTAACAGGGCGTGTGCTAGGAGAAGTGGAACATTTAGCTATTTTCCCAGCAACACACTTTATGACAAATGATGAACATATGGAAGAAGCTATTTCAAAAATACAAGCTGAAATGGAAAATCAAGTAGAACTTTTTGAAAAAGAAGGGAAATTGATTGAAGCGCAACGTATTCGACAAAGGACAGAATATGATATTGAAATGCTTCGTGAAATGGGATATACAAATGGTGTTGAGAACTACTCACGTCACATGGATGGTAGAAGTGAAGGTGAGCCACCTTTTACTTTGTTAGATTTCTTCCCAGAAGATTTTTTGATTATGATTGATGAGAGTCACATGACAATGGGGCAAATCAAAGGGATGTATAATGGAGACCGTTCGCGTAAAGAAATGTTGGTTAATTACGGTTTCCGTTTACCATCTGCCTTAGATAACCGTCCACTTCGTCGTGAAGAATTCGAAAGCCATGTCCATCAAATTGTCTATGTATCTGCAACGCCAGGAGACTATGAAATGGAGCAAACAGATACAGTTGTTGAGCAAATTATCCGGCCAACAGGACTTCTTGATCCAGAAGTTGAAGTTAGACCAAGTATGGGGCAGATGGATGACTTGCTTGGTGAAATCAATTTGAGGACTGAAAAAGGTGAGCGTACCTTTATTACAACATTGACAAAGCGTATGGCAGAAGACTTAACAGATTATCTCAAAGAAATGGGAGTTAAAGTTAAGTATATGCACAGCGATATTAAAACCTTAGAACGTACAGAGATTATTCGTGATTTACGACTTGGTGTGTTTGATGTTTTAATTGGTATTAATCTCTTACGTGAAGGAATAGATGTTCCTGAGGTTTCCCTTGTTGCAATCTTAGATGCTGATAAGGAAGGTTTCCTTCGTAATGAGCGTGGTCTTATCCAAACAATCGGACGTGCAGCACGTAACAGTAATGGTCATGTTATTATGTATGCTGATAAAATAACAGATTCTATGCAAAGAGCTATGGATGAAACCGCTCGCCGTCGTCGTTTACAAATGGATTATAATGAAAAGCATGGAATTGTGCCACAAACAATTAAAAAAGAAATCCGTGATTTAATTGCTATTACTAAAAGTAATGACAGCGATAAGCCTGAAAAAGTTGTCGATTACAGTAGTTTATCTAAAAAAGAAAGGCAAGCTGAAATTAAAGCTCTTCAACAGCAAATGCAAGAAGCAGCTGAATTATTGGACTTTGAGCTAGCTGCACAAATCCGAGATGTTATCTTAGAACTAAAAGCAATCGAT

SEQ ID NO: 21018 - protein, 663 aa, Streptococcus agalactiae; identical to SEQ ID NO: 2716

SEQ ID NO: 21019 - protein, 918 aa, Streptococcus agalactiae
ATGAATAAAAGGATTTTAAATAGTCAGTTCGCTGTCTATAAAAACTGGCCGTCATGGCTATTATTGTTATTTGCTTGTTTTATGGTATACCTATTTTTTTTCGTTGGTCTAACTCTAGGTGGTGTGGGAATTGTTCTAGTGTCTTCTGTACTCTATAAGTTTTCTTCCTATACTTTTTTTGAGTTTATTAATTTATTTAATAATATCTATGGAGAATTAGGAACCTTTAGTTTTTCAGCATTCCTTTTGCTTATCTGGGTAAAATTCGTAGAAAAAAGACCTTTTTCAGAATTGGGGTTTTCTACAAAGTTTAAAAGAACTCTGTGGTCACTTATAAAAGGCTGGAGTATAGGTTTTATTCTATTTTCAATTTCTGTCATCACTGCTTATATATTGGGAGGACTTGACTTTCATAGCTATGATGTTTCTAAGGCAACGATTTTCTATGTTGTAACTCTCCTTCCTTTTTGGCTTATTCAAAGCGGTACGGAAGAATTGCTAACACGAGGGTGGCTTCTTCCTCTAATTAATCATCGTTTTCATTTAGCTGTTGCCATAGGGGTCTCATCCACTTTATTTGGCATTTTGCACTTGGTAAATGCCCATGTCACTTTTCTTTCTATTGTAAGTATTATATGTTCGGGAGTTTTAATGTCCTTGTATATGATTAAAAGTGGTAATATTTGGAGTGTTGCAGCCTTACATGGAGCTTGGAATTTTAGCCAAGGTAATCTCTATGGTATTGCCGTAAGTGGTCAGAAAGCAGGAGCATCTCTTTTGCATTTTACCGTTAAAGAAAACGCACCGGACTGGATATCAGGTGGTGCATTCGGAATAGAAGGAAGTTTGATTTCTATTTTTGTTCTCTTAGCAGCAATTATATACCTTCTATGGCTAATTAAGACTGAAGAAACAGAT

SEQ ID NO: 21020 - protein, 306 aa, Streptococcus agalactiae; identical to SEQ ID NO: 2718

SEQ ID NO: 21021 - protein, 2181 aa, Streptococcus agalactiae
ATGAAGCACAAGTTAAAAGCTTTTACGCTTGCTTTACTCTCAATATTCTTTGTGTTTGGTGGAAAGGTCAGTGCAGAAACTGTGAATATTGTTTCTGATACAGCATACGCTCCATTCGAATTTAAAGATTCTGATCAAACTTATAAAGGAATCGATGTTGACATCGTTAACGAAGTCGCTAAGCGTGCTGGCTGGAATGTTAACATGACGTACCCAGGTTTTGATGCCGCAGTTAACGCTGTTCAATCTGGACAGGCAGACGCGCTAATGGCCGGAACTACTGTTACTGAAGCACGTAAAAAAGTCTTTAATTTCTCAGATACTTATTACGATACTTCCGTTATTCTTTATACTAAAAATAATAATAAAGTCACAAACTACAAACAACTAAAAGGAAAAGTAGTCGGTGTAAAAAATGGAACAGCTGCTCAAAGCTTCTTAGAGGAAAATAAATCTAAATACGGCTATAAAGTTAAAACATTTGATACAAGTGACCTAATGAATAACAGCCTTGATTCTGGTTCTATTTACGCCGCTATGGACGATCAACCAGTTGTGCAATTTGCGATAAATCAAGGAAAAGCTTACGCCATTAACATGGAAGGCGAGGCAGTTGGTAGCTTTGCATTTGCTGTCAAAAAAGGTAGTGGACACGATAACCTAATTAAAGAATTTAACACAGCTTTTGCACAAATGAAATCAGATGGCACTTATAATGACATCATGGATAAATGGCTTGGGAAAGACGCTACAAAAACAAGCGGCAAAGCAACAGGTAATGCCAATGAAAAAGCAACTCCTGTAAAGCCAAGTTATAAAATTGTTTCTGATTCTTCATTCGCACCATTCGAATATCAAAACGGTAAAGGGAAATATACTGGTTTTGATATGGAATTAATCAAGAAAATTGCTAAACAGCAAGGTTTTAAACTTGATATCTCAAATCCAGGTTTTGATGCCGCTTTAAATGCTGTCCAATCTGGACAAGCTGACGGTGTTATTGCAGGAGCTACAATCACAGAAGCACGCCAAAAAATCTTTGATTTTTCTGATCCTTATTACACATCTAGCGTTATCTTAGCGGTTAAAAAAGGAAGCAATGTCAAATCATACCAAGATTTAAAAGGAAAAACAGTTGGTGCTAAAAATGGTACTGCCTCATATACTTGGTTATCAGACCACGCAGATAAGTACAACTATCATGTTAAAGCATTTGATGAAGCATCTACAATGTATGATAGTATGAACTCAGGTTCAATTGATGCTCTAATGGATGACGAAGCAGTTCTTGCTTACGCTATTAATCAAGGTCGTAAATTTGAAACACCTATCAAAGGTGAAAAATCAGGCGATATCGGATTTGCAGTGAAAAAAGGGGCAAATCCAGAATTAATTAAAATGTTTAACAACGGTCTTGCTTCACTCAAAAAATCAGGTGAGTACGATAAACTTGTTAAAAAATACCTTTCCACAGCCAGCACTTCTTCAAACGATAAAGCTGCTAAACCTGTAGATGAATCAACTATTTTAGGGTTAATTTCTAATAACTACAAACAATTGCTATCTGGTATTGGAACTACTTTAAGTTTAACTCTTATCTCATTTGCGATTGCTATGGTTATTGGTATTATCTTTGGTATGATGAGCGTATCACCAAGTAATACTCTCCGCACAATTTCAATGATTTTTGTTGATATTGTCCGTGGTATTCCACTCATGATTGTGGCCGCTTTTATTTTCTGGGGTATTCCTAATTTAATCGAAAGCATCACAGGTCACCAAAGTCCAATTAATGACTTCGTTGCTGCTACTATCGCTCTTTCTTTAAATGGTGGTGCGTACATTGCTGAAATTGTACGTGGTGGTATTGAAGCTGTTCCTTCTGGTCAAATGGAAGCAAGTCGTAGTTTAGGTATTTCTTACGGCAAAACTATGCAAAAGGTTATCTTGCCTCAAGCAGTACGCCTTATGTTACCAAACTTTATCAACCAATTTGTCATCTCATTAAAGGATACAACAATTGTATCAGCAATCGGACTTGTGGAACTCTTCCAAACTGGTAAAATCATAATTGCACGTAACTATCAATCATTCCGTATGTATGCTATCCTTGCAATTATGTATCTTGTAATCATTACCCTTCTCACCCGTCTAGCAAAACGTTTAGAAAAGAGGCTTAAA

SEQ ID NO: 21022 - protein, 727 aa, Streptococcus agalactiae; identical to SEQ ID NO: 2720

SEQ ID NO: 21023 - protein, 738 aa, Streptococcus agalactiae
ATGGCAGAATTAAAAATTGATGTCCAAGATTTACACAAGTCGTATGGGCAAAATGAAGTTTTAAAAGGTATTGATGCTAAATTTTATGAAGGTGATGTTGTTTGTATTATTGGACCTTCTGGTTCAGGAAAATCAACTTTCCTTCGCACATTGAACTTACTTGAATCAATCACAAGTGGAAAAGTTGTTGTGGACGGCTTTGAGTTATCAAATCCAAAAACAGACATAGACAAAGCACGTGAAAATATCGGAATGGTATTTCAACACTTCAATCTTTTCCCACATATGTCAGTTCTTGAAAACATCACTTTTGCTCCTATAGAACTTGGTAAAGAATCTAAAGAAGCAGCTGAAAAGCATGGGATGGAATTACTTGAAAAAGTTGGTTTAGCCGATAAAGCTAATGCCAAACCAGATAGTTTATCTGGAGGACAAAAACAACGTGTAGCTATCGCAAGAAGCTTAGCGATGAATCCAGATATCTTACTTTTTGACGAACCAACTTCTGCACTTGATCCAGAAATGGTTGGAGATGTTCTCAATGTTATGAAAGATTTAGCTGAACAAGGTATGACTATGTTAATTGTGACACACGAAATGGGATTTGCTCGTCAAGTTGCCAATCGTGTTATCTTTACAGATGGTGGTCGTTTCCTCGAAGATGGGACACCTGAGCAAATCTTTGATACACCTCAACACCCACGTCTCCAAGACTTCCTTAATAAAGTTTTAAACGTT

SEQ ID NO: 21024 - protein, 246 aa, Streptococcus agalactiae; identical to SEQ ID NO: 2722

SEQ ID NO: 21025 - protein, 348 aa, Streptococcus agalactiae; identical to SEQ ID NO: 11589

SEQ ID NO: 21026 - protein, 116 aa, Streptococcus agalactiae; identical to SEQ ID NO: 2724

SEQ ID NO: 21027 - protein, 165 aa, Streptococcus agalactiae
ATGGGAGATAAACCGATATCATTTCGTGATAAAGATGGGAACTTTGTTTCAGCGGCCGATGTCTGGAATGCTGAAAAATTAGAAGAACTCTTTAACACATTAAATCCTAATCGTAAACTTCGTTTAGAACGCGAAAAATTAGCAAAAGAAAAAAGGATAGTTAAG

SEQ ID NO: 21028 - protein, 55 aa, Streptococcus agalactiae; identical to SEQ ID NO: 11592

SEQ ID NO: 21029 - protein, 1311 aa, Streptococcus agalactiae
ATGAGTATGTTTTTAGATACTGCCAAAATTAGTGTTAAGGCAGGTCGCGGTGGTGATGGCATGGTTGCTTTTCGCCGTGAGAAATATGTCCCCAATGGAGGCCCGTGGGGCGGTGATGGCGGTAAAGGCGGATCGGTCATTTTTAAAGTAAACGAAGGTTTACGAACTTTGATGGATTTTCGATATAACCGTAATTTTAAAGCAAAAGCTGGTGAAAAAGGGATGACTAAAGGTATGCACGGTCGAGGTGCAGAAGACCTTATTGTGTCATTACCACCTGGAACAACTGTTCGTGATGCTACTACAGGTAAGGTTATTACCGACCTTGTGGAGCATGATCAGGAATTCGTTGTAGCCAGAGGTGGCCGGGGTGGTCGTGGAAATATTCGCTTTGCAACCCCACGTAATCCAGCTCCTGAAATTGCTGAAAAAGGGGAGCCTGGCGAAGAGCGTGAATTACAATTAGAATTAAAAATTTTGGCTGATGTTGGTCTCGTTGGTTTCCCATCGGTTGGGAAGTCGACGCTACTTAGTGTTGTTTCAGCAGCAAAGCCTAAAATTGGTGCCTATCATTTTACGACAATTGTCCCTAATTTAGGGATGGTTCGTACAAAATCAGGTGATAGCTTTGCAATGGCTGATCTCCCTGGTTTGATTGAAGGGGCTAGTCAAGGTGTCGGATTAGGAACTCAGTTTCTTAGACATATTGAGCGTACACGTGTTATTCTACATGTTATTGATATGTCGGCAAGTGAAGGACGAGACCCTTACGATGACTATGTTTCAATTAATAATGAGTTGGAAACTTACAATCTTCGATTGATGGAACGTCCGCAAATTATTGTTGCCAATAAAATGGACATGCCTGATTCAGAAGAGAATTTGGCAGCATTCAAAGAAAAATTAGCTGCAAACTATGATGAGTTTGATGACATGCCTATGATTTTTCCAATTTCAAGTTTAGCACATCAAGGACTAGAGAACCTTATGGATGCGACGGCTGAATTATTAGCCAATACAGAAGAGTTTCTTCTTTATGACGAAACTGACATGCAAGAAGATGAAGCATACTATGGATTTAACGAAGATGAACGTCCATTTGAGATTACACGTGATGATGATGCAACGTGGGTATTGTATGGTGATAAGCTAGAAAAACTCTTTGTTATGACAAATATGGAACGCGATGAATCAATAATGAAATTTGCTCGTCAGTTACGTGGTATGGGCGTTGATGAAGCCCTTCGAGAGCGCGGAGCTAAGGATGGAGATATTGTTCGTATAGGTAACTTCGAATTTGAATTTGTAGAT

SEQ ID NO: 21030 - protein, 437 aa, Streptococcus agalactiae
MSMFLDTAKISVKAGRGGDGMVAFRREKYVPNGGPWGGDGGKGGSVIFKVNEGLRTLMDFRYNRNFKAKAGEKGMTKGMHGRGAEDLIVSLPPGTTVRDATTGKVITDLVEHDQEFVVARGGRGGRGNIRFATPRNPAPEIAEKGEPGEERELQLELKILADVGLVGFPSVGKSTLLSVVSAAKPKIGAYHFTTIVPNLGMVRTKSGDSFAMADLPGLIEGASQGVGLGTQFLRHIERTRVILHVIDMSASEGRDPYDDYVSINNELETYNLRLMERPQIIVANKMDMPDSEENLAAFKEKLAANYDEFDDMPMIFPISSLAHQGLENLMDATAELLANTEEFLLYDETDMQEDEAYYGFNEDERPFEITRDDDATWVLYGDKLEKLFVMTNMERDESIMKFARQLRGMGVDEALRERGAKDGDIVRIGNFEFEFVD

SEQ ID NO: 21031 - protein, 126 aa, Streptococcus agalactiae; identical to SEQ ID NO: 16203

SEQ ID NO: 21032 - protein, 42 aa, Streptococcus agalactiae; identical to SEQ ID NO: 2730

SEQ ID NO: 21033 - protein, 477 aa, Streptococcus agalactiae
ATGACCGATCCGCCTTTACCGCCATCACCGCCCCACGGGCCTCCATTGGGGACATATTTCTCACGGCGAAAAGCAACCATGCCATCACCACCGCGACCTGCCTTAACACTAATTTTGGCAGTATCTAAAAACATACTCATTTCTAAAATTCCTATTCTTTATTCTATTCAGTATAAAAAAACGCTTTACAGCGTTTCTCATTACATGATTGCACTAATAGCACCAAATACCAAACCACCAACTGTTACTAGTACCATCAAAATAACAACAAAAAGAGTTAGTTTTTCAAACCCAGTTTTTTTTCGTTGTCCGTTATCTCCAAAAGCCACTCATGTCACCTCATTTACTGAATATATAGTTAAGTCTATATTAACACGAAACGTCTTATTTCGCAAACTACAAACCGTTAGCTTAAATATATCTTTATTAAATCGCTTCCATATTTCCTTGTGCTTTATAAGAGTTTATGATAAATTA

SEQ ID NO: 21034 - protein, 159 aa, Streptococcus agalactiae
MTDPPLPPSPPHGPPLGTYFSRRKATMPSPPRPALTLILAVSKNILISKIPILYSIQYKKTLYSVSHYMIALIAPNTKPPTVTSTIKITTKRVSFSNPVFFRCPLSPKATHVTSFTEYIVKSILTRNVLFRKLQTVSLNISLLNRFHISLCFIRVYDKL

SEQ ID NO: 21035 - protein, 1239 aa, Streptococcus agalactiae
ATGGTTTTACAAGATTTCGACAACCTTTTAAAAAAATATGCCCAATTAATTATTTCTAAAGGTTTAAATGTCCAAAAAGGGCATACTCTCGCTTTAACAATCGATGTGGAACAAGTCCACTTAGCAAGGCTTTTAACTGAAGCCGCTTATGAAAAGGGAGCAAGTGAAGTTATTGTTGATTATACAGATGATTTTATCACGCGCCAGCGACTACTTCATGCTTCAGACGAAGTTCTCACGAATGTTCCACAGTATACCGTTGATAAATCTTTAGCGCTATTAAATAAGAAAGCTAGTCGATTAGTTGTGAAATCTTCTAACCCTAACGCTTTCGCTACTGTTGATCCTAAACGTTTATCTGAAACAACTAGAGCAACCGCTATTGCCTTAGAGGAACAAAGTAGAGCAATACAAGCTAATAAAGTATCTTGGAACGTGGCTGCAGCTGCTGGTAGAGAATGGGCTGCACTTGTCTTCCCAGAATTAAAAACAAGCGACCAACAAGTTGATGCTCTTTGGGATACCATTTTCAAATTAAATCGTATTTATGAAGATGATCCTATTGCTGCTTGGGACGCACATGAAGCTAAATTATTAGAAAAAGCTACTAGACTAAATCAAGAACAATTTGATGCTCTTCATTATACCGCACCAGGTACAGATTTAACGCTTGGTATGCCTAAAAATCATATTTGGGAGGCAGCCGGTAGTCTCAACGCTCAGGGAGAGACTTTTATCGCTAATATGCCTACTGAAGAAATCTTTTCAGCACCTGATTACCGTCGTGCAGATGGGTATGTGACAAGTACAAAACCTCTCAGTTATGCTGGCGTTATTATCGAAAATATGATGTTTACTTTTAAAGACGGTAAAATTATCAATGTCACTGCAGAAAAAGGGCAAGAAACAATCCAACGCTTAATCGAGGAAAATGATGGGGCAAGATCGCTTGGGGAAGTTGCACTTGTCCCACATAAAACACCAATTTCACTGTCTGGACTAATTTTCTTTAATACTTTATTCGATGAAAATGCCTCTAATCACCTCGCTATTGGATCTGCATATGCCTTCAATGTAGAAGGAGGAACAGAAATGACAAGTCAAGAATTGGATGAAGCTGGTTTAAATCGTTCTTCAACACATGTTGATTTTATGATTGGTTCAGAACAAATGGATATTGATGGTATTCGTGCAGATGGAACTGCTGTCCCAATCTTTAGAAATGGCGAATGGGCTATT

SEQ ID NO: 21036 - protein, 413 aa, Streptococcus agalactiae
MVLQDFDNLLKKYAQLIISKGLNVQKGHTLALTIDVEQVHLARLLTEAAYEKGASEVIVDYTDDFITRQRLLHASDEVLTNVPQYTVDKSLALLNKKASRLVVKSSNPNAFATVDPKRLSETTRATAIALEEQSRAIQANKVSWNVAAAAGREWAALVFPELKTSDQQVDALWDTIFKLNRIYEDDPIAAWDAHEAKLLEKATRLNQEQFDALHYTAPGTDLTLGMPKNHIWEAAGSLNAQGETFIANMPTEEIFSAPDYRRADGYVTSTKPLSYAGVIIENMMFTFKDGKIINVTAEKGQETIQRLIEENDGARSLGEVALVPHKTPISLSGLIFFNTLFDENASNHLAIGSAYAFNVEGGTEMTSQELDEAGLNRSSTHVDFMIGSEQMDIDGIRADGTAVPIFRNGEWAI

SEQ ID NO: 21037 - protein, 576 aa, Streptococcus agalactiae
ATGAAAGTGAAAAATAAGATTTTAACGATGGTAGCACTTACTGTCTTAACATGTGCTACTTATTCATCAATCGGTTATGCTGATACAAGTGATAAGAATACTGACACGAGTGTCGTGACTACGACCTTATCTGAGGAGAAAAGATTAGATGAACTAGACCAGTCTAGTACTGGTTCTTCTTCTGAAAATGAATCGAGTTCATCAAGTGAACCAGAAACAAATCCCTCAACTAATCCACCTACAACAGAACCATCGCAACCCTCACCTAGTGAAGAGAACAAGCCTGATGGTAGCACGAAGACAGAAATTGGCAATAATAAGGATATTTCTAGTGGAACAAAAGTATTAATTTCAGAAGATAGTATTAAGAATTTTAGTAAAGCAAGTAGTGATCAAGAAGAAGTGGATCGCGATGAATCATCATCTTCAAAAGCAAATGATGAGAAAAAAGGCCACAGTAAGCCTAAAAAGGAACTTCCTAAAACAGGAGATAGCCACTCAGATACTGTAATAGCATCTACGGGAGGGATTATTCTGTTATCATTAAGTCTTTACAATAAGAAAATGAAACTTTAT

SEQ ID NO: 21038 - protein, 192 aa, Streptococcus agalactiae; identical to SEQ ID NO: 11600

SEQ ID NO: 21039 - protein, 2037 aa, Streptococcus agalactiae
ATGAAACGTAAATACTTTATTCTTAATACGGTGACGGTTTTAACGTTAGCTGCTGCAATGAATACTAGCAGTATCTATGCTAATAGTACTGAGACAAGTGCTTCAGTAGCTCCTACTACAAATACTATCGTTCAAACTAATGACAGTAATCCTACCGCAAAATTTTCATCAGAATCAGGACAATCTGTAATAGGTCAAGTAAAACCAGCTAATTCTGTGGCGCTTACAACAGTTGACACGCCTCATATTTCAGCTCCAGATGCTTTAAAAACAACTCAATCAAGTCCTGTCGTTGAGAGTCCTTCTACTAAGTTAACTGAAGAGACATACAAACAAAAAGATGGTCAAGATTTAGCCAACATGGTGAGAAGTGGTCAAGTTACTAGTGAGGAACTCGTCAATATGGCATACGATATTATTGCTAAAGAAAACCCATCTTTAAATGCAGTCATTACTACTAGACGCCAAGAAGCTATTGAAGAGGCTAGAAAACTTAAAGATACCAATCAGCCGTTTTTAGGTGTTCCCTTGTTAGTCAAGGGGTTAGGGCACAGTATTAAAGGTGGTGAAACCAATAATGGCTTGATCTATGCAGGTGGAAAAATTAGCACATTTGACAGTAGCTATGTCAAAAAATATAAAGATTTAGGATTTATTATTTTAGGACAAACGAACTTTCCAGAGTATGGATGGCGCAATATAACAGATTCTAAATTATACGGTCCAACGCATAACCCTTGGAATCTTGCTCATAATGCTGGTGGCTCTTCTGGTGGAAGTGCAGCAGTTATTGCTAGCGGGATGACGCCAATTGCTAGCGGTAGTGATGCTGGTGGTTCTATCCGTATTCCATCTTCTTGGACGGGCTTGGTAGGTTTAAAACCAACAAGAGGATTGGTGAGTAATGAAAAGCCAGATTCGTATAGTACAGCAGTTCATTTTCCATTAACTAAGTCATCTAGAGACGCAGAAACATTATTAACTTATCTAAAGAAAAGCGATCAAACGCTAGTATCAGTTAATGATTTAAAATCTTTACCAATTGCTTATACTTTGAAATCACCAATGGGAACAGAAGTTAGTCAAGATGCTAAAAATGCTATTATGGACAACGTCATATTCTTAAGAAAACAAGGATTCAAAGTGACAGAGATAGACTTACCAATTGATGGTAGAGCATTAATGCGTGATTATTCAACCTTGGCTATTGGTATGGGAGGAGCTTTTTCAACAATTGAAAAAGACTTAAAAAAACATGGTTTTACTAAAGAAGACGTTGATCCCATTACTTGGGCAGTTCATGTTATTTATCAAAATTCAGATAAGGCTGAACTTAAGAAATCTATTATGGAAGCCCAAAAACATATGGATGATTATCGTAAGGCAATGGAGAAGCTTCACAAGCAATTTCCTATTTTCTTATCGCCAACGACCGCAAGTTTAGCCCCTCTAAATACAGATCCATATGTAACAGAGGAAGATAAAAGAGCGATTTATAATATGGAAAACTTGAGCCAAGAAGAAAGAATTGCTCTCTTTAATCGCCAGTGGGAGCCTATGTTGCGTAGAACACCTTTTACACAAATTGCTAATATGACAGGACTCCCAGCTATCAGTATCCCGACTTACTTATCTGAGTCTGGTTTACCCATAGGGACGATGTTAATGGCAGGTGCAAACTATGATATGGTATTAATTAAATTTGCAACTTTCTTTGAAAAATATCATGGTTTTAATGTTAAATGGCAAAGAATAATAGATAAAGAAGTGAAACCATCTACTGGCCTAATACAGCCTACTAACTCCCTCTTTAAAGCTCATTCATCATTAGTAAATTTAGAAGAAAATTCACAAGTTACTCAAGTATCTATCTCTAAAAAATGGATGAAATCGTCTGTTAAAAATAAACCATCCGTAATGGCATATCAAAAAGCACTTCCTAAAACAGGTGATACAGAATCAAGTCTATCTCCAGTTTTAGTAGTACCCCTTTTATTAGCTTGTTTTAGCTTTGTAACAAAAAAGAATCAGAAAAGT

SEQ ID NO: 21040 - protein, 679 aa, Streptococcus agalactiae
MKRKYFILNTVTVLTLAAAMNTSSIYANSTETSASVAPTTNTIVQTNDSNPTAKFSSESGQSVIGQVKPANSVALTTVDTPHISAPDALKTTQSSPVVESPSTKLTEETYKQKDGQDLANMVRSGQVTSEELVNMAYDIIAKENPSLNAVITTRRQEAIEEARKLKDTNQPFLGVPLLVKGLGHSIKGGETNNGLIYAGGKISTFDSSYVKKYKDLGFIILGQTNFPEYGWRNITDSKLYGPTHNPWNLAHNAGGSSGGSAAVIASGMTPIASGSDAGGSIRIPSSWTGLVGLKPTRGLVSNEKPDSYSTAVHFPLTKSSRDAETLLTYLKKSDQTLVSVNDLKSLPIAYTLKSPMGTEVSQDAKNAIMDNVIFLRKQGFKVTEIDLPIDGRALMRDYSTLAIGMGGAFSTIEKDLKKHGFTKEDVDPITWAVHVIYQNSDKAELKKSIMEAQKHMDDYRKAMEKLHKQFPIFLSPTTASLAPLNTDPYVTEEDKRAIYNMENLSQEERIALFNRQWEPMLRRTPFTQIANMTGLPAISIPTYLSESGLPIGTMLMAGANYDMVLIKFATFFEKYHGFNVKWQRIIDKEVKPSTGLIQPTNSLFKAHSSLVNLEENSQVTQVSISKKWMKSSVKNKPSVMAYQKALPKTGDTESSLSPVLVVPLLLACFSFVTKKNQKS

SEQ ID NO: 21041 - protein, 720 aa, Streptococcus agalactiae; identical to SEQ ID NO: 11603

SEQ ID NO: 21042 - protein, 240 aa, Streptococcus agalactiae; identical to SEQ ID NO: 11604

SEQ ID NO: 21043 - protein, 840 aa, Streptococcus agalactiae
ATGGAAACATATACTCTATCGAATACTCTTAACATTCCTAAAATTGGTTTTGGGACATGGCAACTAACTGAAGGTGAAGAAGCTTATAAAGCAGTGACTCATGCTTTAAAAGTTGGTTATACTCATATTGATACTGCTCAGATTTATGGTAATGAACATAGTGTTGGACGTGCTATAAGAGACAGTGGTTTGGCGCGAGAAAGTATCTTTTTGACAACTAAGATTTGGAATGACAAACATGACTATCATTTAGCCAAAGCTTCTATTGATGAATCTCTGCAGAAATTAGGTGTTGATTATATTGATCTTCTTTTGATTCATTGGCCAAATCCAAAAGCTCTTCGTGAAAATGATGCGTGGAAGGCTGGGAATGCAGGCACTTGGAAAGCGATGGAAGAAGCTTATAAAGAAGGAAAGGTAAAAGCTATTGGTGTTTCGAATTTCATGAAACATCACTTAGAGGCTTTATTTGAAACCGCCGAAATAAAACCTATGGTTAATCAAATTATCCTAGCACCAGGTTGTGCTCAAGAAGATTTGGTTCGCTTCTGTAAAGGAAATGATATCTTATTAGAAGCTTACAGTCCATTTGGAACAGGTGCTATTTTTGAAAATGAATCTATAAAAGCTATTGCTGAAAAATATGGTAAATCAGTTGCACAAGTAGCTCTTCGCTGGTCACTTGATAATGGCTTTTTACCATTACCTAAGTCAGCGACTCCCAAAAATATTGAAGCAAACCTTGATATTTTTGATTTTCAATTAAACGAAGATGATATTACTACCTTAATACAACTAGATTCAGGTATTAAACCCAAAGATCCAGATAATGTCTCATTT

SEQ ID NO: 21044 - protein, 280 aa, Streptococcus agalactiae; identical to SEQ ID NO: 11606

SEQ ID NO: 21045 - protein, 672 aa, Streptococcus agalactiae
ATGACAAAAGAAGATATCAAAAAACAAGTTCGAAGAGCTTTTGATTTTCGTATGGCGATTCGTGTTTATAATAATAATGATATTCCTAAAGAAGATATGGAGTATATTTTAGACACTGCTTGGTTGAGTCCTTCTTCAGTCGGTTTAGAAGGCTGGCGATTTTTAGTACTAGATAGACAAACAATTGCAAAATTTCGAGATAAACTTAAGGAAGTTGCTTGGGGAGCACAATATCAACTAGATACTGCTAGTCACTTTGTTTTACTACTAGCTGAAAAAGGTGCTTATTATAACGCTGATAGCATGATTAACAGTCTCATTCGACGTGGTCTAGATGATCCAGCCGCCCTTGAGAGTAGGATACCTCTCTACAAATCCTTCCAAGAAAACGATATGAAAATTGATTCTGAACGTTCTCTTTGGGATTGGACAGCAAAACAAACTTATATCGCACTTGGTAATATGATGACGGCTGCTGCTATGATCGGCGTAGATTCATGCCCAATTGAAGGATTTGACTATGAAAAGGTCAATAATATTCTTAGTAAAGAAGGGTTAATAGACGATAAGAAAGAAGCTATTTCTTGTATGGTTTCATTTGGTTATCGTTTGCGTGAACCTAAACATTCCCGTGCTAGGAAAGAACGTCAAGAGGTCGTTACTTGGGTTGAG

SEQ ID NO: 21046 - protein, 224 aa, Streptococcus agalactiae
MTKEDIKKQVRRAFDFRMAIRVYNNNDIPKEDMEYILDTAWLSPSSVGLEGWRFLVLDRQTIAKFRDKLKEVAWGAQYQLDTASHFVLLLAEKGAYYNADSMINSLIRRGLDDPAALESRIPLYKSFQENDMKIDSERSLWDWTAKQTYIALGNMMTAAAMIGVDSCPIEGFDYEKVNNILSKEGLIDDKKEAISCMVSFGYRLREPKHSRARKERQEVVTWVE

SEQ ID NO: 21047 - protein, 390 aa, Streptococcus agalactiae; identical to SEQ ID NO: 11609

SEQ ID NO: 21048 - protein, 130 aa, Streptococcus agalactiae; identical to SEQ ID NO: 2744

SEQ ID NO: 21049 - protein, 924 aa, Streptococcus agalactiae; identical to SEQ ID NO: 11611

SEQ ID NO: 21050 - protein, 308 aa, Streptococcus agalactiae; identical to SEQ ID NO: 2746

SEQ ID NO: 21051 - protein, 1384 aa, Streptococcus agalactiae
ATGTCAAAAAATAATAATGACCACACTCAAAAATCTGAGAATGGTATGGTACGCGGCCTAGAAAATCGTCACGTACAGTTAATTGCGATTGCAGGGACAATCGGAACTGGGCTTTTTCTTGGTGCAGGTCGTTCAATTAGCCTGACGGGTCCTTCAATAGTTCTTGTCTATGCTATCACTGGCGCTTTCATGTTCTTCATGATGCGTGCTATTGGAGAGATGCTTTATCAAGATCCAAATCAGCATACTTTTATTAATTTCATTACCAAATATTTAGGACCCGGTTGGGGATTTTTCTCAACACTTTCTTATTGGATTTCCCTAATATTTATCGGTATGGCAGAGATTACAGCCGTAGGAGAGTATGTTCAATTTTGGTTCCCTGAATGGCCATCCTGGATTATCCAAATTGTTTTTTTAGCTATCCTAAGTTCTATCAACTTAATTGCTGTAAAAGCATTCGGAGAAACCGAGTTTTGGTTTGCTATGATAAAAGTTATTGCAATTCTTGGTTTAATACAACCGGTATCTTTATGGTATTAACAAACTTTGACACCGGTCACGGATACCATGCTTCAATCTCAAATATCACCAATCTTTTGAATGGTTCCCTAAAGGTAAATTGAATTTCTTCATGGCTTTCCAAATGGTATTCTTTGCTTATTTAGCTATTGAATTTGTCGGAGTAACAACTTCTGAAACAGCTAATCCACGTAAAGTTTTACCAAAAGCAATCCAAGAAATTCCGATGCGTATTATTTTATTCTACGCAGGTTCATTATTAGCAATTATGGCCATCTTCCCATGGCAACAGTTACCAGTTAATGAGTCACCTTTCGTTACAGTATTCAAACTAGCTGGGATTAAGTGGGCTGCCGCTTTGATTAACTTTGTTGTCCTAACGTCTGCAGCATCTGCTCTTAATTCTACTTTATACTCAACAGGGCGTCATTTATTCCAATTGGCTAATGAATCACCAAATGCTCTTACAAAAGCGTTAAAATTAGACCAATTATCTCGTCAAAGCGTTCCAAGTCGAGCTATTATTGCATCAGCTGTAATCGTTGGAGCTTCAGCACTTATCAGTGTTTTACCTGGTATTTCAGATGCCTTCTCCTTAATTACTGCATCATCTTCTGGTGTTTACATTTCTATCTATGTTCTTATTATGATTGCACATTGGAAATATCGTAAATCACCTGATTTTATGGAAGATGGTTATAAAATGCCTGCCTACAAAATCCTTTCACCAATCACACTTCTCTTCTTCCTCTTTGTATTCGTTTCTCTCTTCTTGCAAGATTCAACATACATCGGGGCTATTGGAGCAACCATCTGGATTATTGGATTTGGTTTATATAGTCACTTCAAACATAAATCACAT

SEQ ID NO: 21052 - protein, 462 aa, Streptococcus agalactiae
  VARIANT 174, 200: Xaa = Any Amino Acid
MSKNNNDHTQKSENGMVRGLENRHVQLIAIAGTIGTGLFLGAGRSISLTGPSIVLVYAITGAFMFFMMRAIGEMLYQDPNQHTFINFITKYLGPGWGFFSTLSYWISLIFIGMAEITAVGEYVQFWFPEWPSWIIQIVFLAILSSINLIAVKAFGETEFWFAMIKVIAILGLIXTGIFMVLTNFDTGHGYHASISNITNXFEWFPKGKLNFFMAFQMVFFAYLAIEFVGVTTSETANPRKVLPKAIQEIPMRIILFYAGSLLAIMAIFPWQQLPVNESPFVTVFKLAGIKWAAALINFVVLTSAASALNSTLYSTGRHLFQLANESPNALTKALKLDQLSRQSVPSRAIIASAVIVGASALISVLPGISDAFSLITASSSGVYISIYVLIMIAHWKYRKSPDFMEDGYKMPAYKILSPITLLFFLFVFVSLFLQDSTYIGAIGATIWIIGFGLYSHFKHKSH

SEQ ID NO: 21053 - protein, 465 aa, Streptococcus agalactiae; identical to SEQ ID NO: 11615

SEQ ID NO: 21054 - protein, 155 aa, Streptococcus agalactiae; identical to SEQ ID NO: 2750

SEQ ID NO: 21055 - protein, 2403 aa, Streptococcus agalactiae
ATGAAAGAAAAAATTATAAAATATTTGGAAGAACACGGTAAAACTAGCGTTAATGACTTAGCTGCTGCCCTAGATATGGCAGGCGCAAAAGCATTTCCAAAATTAATCAAAACAATCTCAAATTTGGAGAGCCACAGGCAATTAAGATTTGACGATAATGGAAGTCTTTCTCTTCGAAAGAAAGAAGCTAAGAAAAAGGAAATCACAGTAAGAGGTCTTTTTAGAGCAAATAAAGCAGGATTTGGTTTTCTTAGTATTGACCAAGACGAAGATGATATGTTTATCGGAAAAAACGATATTGCTTATGCTATTGATGGTGACACGGTAGAAGCTGTTGTAAAGAAACCAGCGGACCGTCTTAAAGGGACTGCAGCAGAAGCGCGTGTTGTTAATATTGTTGAACGTAGTTTAAAGACGCTTGTTGGTAAGTTTGTCTTAGACGATGAGCGCCCTAAATACGCAGGATATATCAAATCAAAAAATCAAAAAATCAATCAAAAGATTTATATACGCAAAGAACCGGTCGTTTTAGACGGAACAGAAATTATCAAAGTAGATATTGATAAATATCCGACACGAGGACATGATTACTTCGTAGCAAGTGTTCGTGATATCGTTGGACATCAAGGAGATGTTGGTATTGATGTTTTAGAAGTCTTGGAAAGTATGGATATCGTCTCAGAATTTCCTGAGGACGTTATTGCAGAAGCTAATGCTATCCCAGATGCTCCAACGGAGAAAGATTTAATTGGGCGTGTTGATTTACGTCAAGAGGTCACTTTCACTATTGATGGAGCGGATGCCAAAGATTTAGACGATGCTGTGCATATTAAATTACTGGATAATGGTCATTTTGAACTTGGAGTTCATATCGCAGATGTATCATACTACGTTACTGAAGGCTCTGCCTTAAATCGTGAAGCACTTAGTCGTGGTACGTCTGTATATGTCACAGATCGCGTTGTACCAATGTTACCAGAGCGTCTATCTAACGGTATATGTTCATTAAATCCAAATCTTGATCGTTTAACGCAGTCTTGTATTATGGAAATTGACCAAAATGGGAAAGTTGTTAATCATCAAATTACACAGTCAGTGATTAATACCACTTATCGTATGACTTATACCGCTGTAAATGATATTATTGCTGGCGATGAGGAAATCTGCTCAGAATATGAGTCTATTGTGCCCTCAGTACAGCATATGGTTACTTTACACCATATTTTGGAAACTATGCGTACGCGTCGTGGAGCGCTGAATTTTGATACATCTGAAGCAAAAATTATGGTTAATGATAAGGGAATGCCAGTTGATATTGTTATTCGCAACAGAGGCATTGCTGAACGCATGATTGAGTCATTTATGTTGGCGGCAAATGAAACGGTTGCTGAACATTATGCTCGTCTAAAATTGCCATTTATTTATCGTATACACGAAGAGCCTAAAGCTGAAAAATTACAAAAATTCATCGATTATGCTTCTATTTTCGGTGTTCACATTCAAGGAACAGCAACTAAAATCACCCAACCTGCTTTACAGGACTTTATGAAAAAAGTACAAGGGCAGCCAGGAAGTGAAGTGTTATCTATGATGTTATTGCGCTCGATGCAACAAGCTAGATATTCTGAACACAACCATGGACATTATGGACTTGCTGCGGAATATTACACTCACTTTACTAGCCCCATTCGACGTTATCCAGACTTGTTAGTTCATCGTATGATTCGTGATTATGGTGATAAAGCGATGGATAAAGCTGATCATTTTGCTAACCTTATCCCAGAAATTGCAACTCAAACGTCTAGTCTTGAGAGACGTGCCATTGATGCTGAACGTATTGTAGAGGCAATGAAGAAAGCCGAATACATGGAAGAATATATTGGTGAGGAATTTGAAGGTGTGGTTGCAAGCGTTGTTAAATTTGGTATGTTTGTAGAATTACCAAATACTATTGAAGGATTGGTTCACGTAACGACCTTGCCTGAATATTATCACTTTAATGAACGTACGCTGACGCTTCAAGGTGAGAAATCTGGGAAAGTTTTCCGTGTTGGTCAACAAATTAAGGTTAAGTTGATTCGTTCTGATAAGGAAACTGGTGATATCGATTTTGATTATTTACCATCAGATTTTGATATTGTTGAAAAGGTAAGTAAAAGTTCGCGTGAGGGTCGTCCTAATCGAAGTTCTAAACGAGAACATCAGCATAGAATTTCTGATCGTGATAATAAGAACAAAAATACATCTAAGAAAAAAGCATCTCGAAAACCCCAAAGGAACTCGGATAGCAAATCACATCATCACAAAGACGATAGAACAACAGGTTCAACCAAGAAAAAAACGAAAAAACCTTTCTATAAAGGCGTTGCTAAGAAAGGTCAGAAACGGAAATCTAAGAAAGGT

SEQ ID NO: 21056 - protein, 801 aa, Streptococcus agalactiae
MKEKIIKYLEEHGKTSVNDLAAALDMAGAKAFPKLIKTISNLESHRQLRFDDNGSLSLRKKEAKKKEITVRGLFRANKAGFGFLSIDQDEDDMFIGKNDIAYAIDGDTVEAVVKKPADRLKGTAAEARVVNIVERSLKTLVGKFVLDDERPKYAGYIKSKNQKINQKIYIRKEPVVLDGTEIIKVDIDKYPTRGHDYFVASVRDIVGHQGDVGIDVLEVLESMDIVSEFPEDVIAEANAIPDAPTEKDLIGRVDLRQEVTFTIDGADAKDLDDAVHIKLLDNGHFELGVHIADVSYYVTEGSALNREALSRGTSVYVTDRVVPMLPERLSNGICSLNPNLDRLTQSCIMEIDQNGKVVNHQITQSVINTTYRMTYTAVNDIIAGDEEICSEYESIVPSVQHMVTLHHILETMRTRRGALNFDTSEAKIMVNDKGMPVDIVIRNRGIAERMIESFMLAANETVAEHYARLKLPFIYRIHEEPKAEKLQKFIDYASIFGVHIQGTATKITQPALQDFMKKVQGQPGSEVLSMMLLRSMQQARYSEHNHGHYGLAAEYYTHFTSPIRRYPDLLVHRMIRDYGDKAMDKADHFANLIPEIATQTSSLERRAIDAERIVEAMKKAEYMEEYIGEEFEGVVASVVKFGMFVELPNTIEGLVHVTTLPEYYHFNERTLTLQGEKSGKVFRVGQQIKVKLIRSDKETGDIDFDYLPSDFDIVEKVSKSSREGRPNRSSKREHQHRISDRDNKNKNTSKKKASRKPQRNSDSKSHHHKDDRTTGSTKKKTKKPFYKGVAKKGQKRKSKKG

SEQ ID NO: 21057 - protein, 291 aa, Streptococcus agalactiae; identical to SEQ ID NO: 11619

SEQ ID NO: 21058 - protein, 97 aa, Streptococcus agalactiae; identical to SEQ ID NO: 2754

SEQ ID NO: 21059 - protein, 1167 aa, Streptococcus agalactiae; identical to SEQ ID NO: 11621

SEQ ID NO: 21060 - protein, 389 aa, Streptococcus agalactiae; identical to SEQ ID NO: 2756

SEQ ID NO: 21061 - protein, 1642 aa, Streptococcus agalactiae
ATGACAAGTAAAGCATTAATATGGTCTATATTACAGATTGATAGTGCTAGAGCTTATAATAGTTTTTTATATTACCTTCAGAAAATCCCCTGGTTGGGAAGAAAAATCCCTAACCGATGGTTTAAAACCGATGATATAAAAGGTGTAGTACTATTATTCGTATCATTTTCTTTTTCTTAAGAGGTTTTGGTCGTTCCATAGGTTACGTACTATATTGTTATGTTTTATCATTTTTTGTTAGAAGTGGCATGAAGCAGTTAAATATTTTGCCGCAAGAAGGTTTTACCCTAACTTTAACATTGATGGTGATTACCTCTCTTTTAATTGTCATAAATTTCTATATAAAACTTATAGAACCTAATGATATGCAACAAACTCATATGATTCGCCTTTTCAGAATTGAGCCATCGAGGTATTTCCAATCCGCTGAACTTTTAGAAGCCAGTAGTGAACTATTTTTTAGAAGTTTGAGCTTTGGCATATTTTTCCATTTAAATCACTTTGCTTTTTGGCATGGTTTGACTTTTGCTTTATTTTTAGCAGGTAGTCGCCTTGGAATCAAGGTGCTCTGTTTGCCTTTATATGGTAGAGGTAAAGACCAAGAGAATCCAGAGTCTTTACTAAATATTTTATTTTACTTAGGGATTGGTATAGGAGTCTTCCTTTCTCTCTTTTTCCTTCTTCTTGGCAAACAGTTCTCTCCATATCCATTTTTTTCATGGTACACCGGTATTGCAGGACTTATCATATGGTTAGTTAGTTACTATCGATTAAAGACTTATTCTAAACTTAATCACTTGACCTACCTTACCCTAACGCATGAGACGATGAAGGAGAAAATTGCAAAGATTGATAATATAGAGCTGCTTGGGATTGAAATGAAAGATAGGGATATAAATGTCAGTGAACTTTCTCCCCTGCTATTTGAAAATTTATCAGGTATTTCATATTTAAACGCTATCTTTTTAAAACGGATGAGTAGATACTTGCAAAGAAAAATTTTGGTACGTTTAGCTATTTTAAGTGTTCTGTTTGGAATAGAACTCCTTTTCCTGCTATTTTTTAAAGAAAAGATAAATATTCCGATGAATGAGCATAGTTTTTCAAAATTCCTATTTTTGAGTGCAGTTCCAGGATATCTAATATATATCGGTGAATCCTATTCAAAATTTTGTTTCTATCATTTGGATCGTCCATTATTAAGATATAATTTCTATCATGAAAGAGAAAATATCTTAGCAACCTTAAAAATACGTTTCCTTTATAGTATAAAACTTAATTTCCCCATTTTTGTAGCTCTAAACATATGTTTTGGAACCTATTATTTTAATTTTTTCACCCCTAAGATTGATCAGATTATCATATTAGTAATTACACAAGCTATATCAATGATTTTATTTAGTTTTTACTTTTTGATCTTTATTTCTTATTACAGCCTTTTACAGAAGGATTAAAATCAAAGAGTGCTATGTATAATATTTTAACCTTTATTATATACTATATGGGATATCAACTATTTACCTTTACTAAATCTATAACGATGCCAATATTATTAGTAAGCCTAGGAATTATAGTTGTTATTTTAATTATTGGCTATTTAGCAGTTGTAGTATTTGCTCCAAAAACTTTCCGTTTAAAAAGT

SEQ ID NO: 21062 - protein, 548 aa, Streptococcus agalactiae
  VARIANT 52, 473: Xaa = Any Amino Acid
MTSKALIWSILQIDSARAYNSFLYYLQKIPWLGRKIPNRWFKTDDIKGVVLXIRIIFFFLRGFGRSIGYVLYCYVLSFFVRSGMKQLNILPQEGFTLTLTLMVITSLLIVINFYIKLIEPNDMQQTHMIRLFRIEPSRYFQSAELLEASSELFFRSLSFGIFFHLNHFAFWHGLTFALFLAGSRLGIKVLCLPLYGRGKDQENPESLLNILFYLGIGIGVFLSLFFLLLGKQFSPYPFFSWYTGIAGLIIWLVSYYRLKTYSKLNHLTYLTLTHETMKEKIAKIDNIELLGIEMKDRDINVSELSPLLFENLSGISYLNAIFLKRMSRYLQRKILVRLAILSVLFGIELLFLLFFKEKINIPMNEHSFSKFLFLSAVPGYLIYIGESYSKFCFYHLDRPLLRYNFYHERENILATLKIRFLYSIKLNFPIFVALNICFGTYYFNFFTPKIDQIIILVITQAISMILFSFYFLXLYFLLQPFTEGLKSKSAMYNILTFIIYYMGYQLFTFTKSITMPILLVSLGIIVVILIIGYLAVVVFAPKTFRLKS

SEQ ID NO: 21063 - protein, 697 aa, Streptococcus agalactiae
ATGGAGTTAGTAATTAGAGATATTCATAAGCGGTTTCAGGAAACAGAGGTCTTGAGAGGAGCAAGTTACCGATTTTATTCAGGTAAAATAACAGGGGTCTTAGGTAGGAATGGTGCTGGGAAAACAACTTTATTTAATATACTTTATGGGGATCTTGCAGCTGACAACGGGACCATTTGTTTATTGAAGGATAATCACGAGTATCCTCTTACCGATAAGGATATTGGTATTGTTTATTCCGAAACTACCTTCCAGAATTTTTAACAGGGTATGAATTTGTAAAATTTTACATGGATTTACATCCTTCAGATGATTTAATGACAATAGATGTTATTTAGATTTTATGGAAATAGGACAAACAGAGCGTCATAGAATTATCAAAGGATATTCTGATGGAATGAAGAGTAAGCTCTCATTAATTTGCCTGATGATTTCTAAGCCAAAAGTAATTTTACTAGATGAGCCACTGACTGCAGTTGATGTTGTATCAAGTATTGCAATAAAACGCCTTTTGTTGGAATTAAGTGAGGATCATATTATTATATTATCAACTCATATAATGGCCTTAGCAGAAGATCTATGTGATATTGTGGCTGTATTAGACAAAGGAAAACTCCAGACATTAGACATTGATCGTAAACATGAACAATTCGAAGAGCGTCTTCTTCAAGTGTTGAAGGGAGATGAATATGACAAG

SEQ ID NO: 21064 - protein, 233 aa, Streptococcus agalactiae
  VARIANT 111: Xaa = Any Amino Acid
MELVIRDIHKRFQETEVLRGASYRFYSGKITGVLGRNGAGKTTLFNILYGDLAADNGTICLLKDNHEYPLTDKDIGIVYSENYLPEFLTGYEFVKFYMDLHPSDDLMTIDXYLDFMEIGQTERHRIIKGYSDGMKSKLSLICLMISKPKVILLDEPLTAVDVVSSIAIKRLLLELSEDHIIILSTHIMALAEDLCDIVAVLDKGKLQTLDIDRKHEQFEERLLQVLKGDEYDK

SEQ ID NO: 21065 - protein, 591 aa, Streptococcus agalactiae
ATGCTTATGACAAAAATAATAGGACTGACAGGAGGGATAGCTTCTGGAAAGTCAACGGTAACAAAAATAATACGAGAATCAGGTTTTAAAGTCATAGATGCGGATCAAGTGGTTCATAAATTGCAAGCTAAGGGTGGGAAACTTTACCAAGCTTTATTAGAATGGTTGGGTCCCGAGATACTTGATGCTGATGGTGAGTTGGATAGACCAAAGCTTTCTCAAATGATTTTTGCTAATCCAGACAATATGAAGACATCAGCTAGGCTACAAAATAGTATCATTCGTCAAGAGTTAGCATGTCAGCGCGACCAATTAAAACAAACAGAAGAGATATTTTTCATGGATATTCCTTTATTGATTGAAGAAAAGTATATAAAATGGTTTGATGAGATTTGGTTGGTATTTGTTGATAAAGAAAAACAATTACAACGATTAATGGCCCGTAACAACTACAGTCGAGAAGAAGCGGAATTACGACTTTCACACCAAATACCTTTAACAGATAAAAAAAGTTTCGCTAGTCTTATTATTGATAATAATGGTGATTTAATAACTTTAAAAGAGCAAATGTTGGATGCTCTTCAACGTTTA

SEQ ID NO: 21066 - protein, 197 aa, Streptococcus agalactiae; identical to SEQ ID NO: 11630

SEQ ID NO: 21067 - protein, 819 aa, Streptococcus agalactiae; identical to SEQ ID NO: 11631

SEQ ID NO: 21068 - protein, 273 aa, Streptococcus agalactiae; identical to SEQ ID NO: 7376

SEQ ID NO: 21069 - protein, 570 aa, Streptococcus agalactiae
GTGGCTCTCTTAGAGGATCATAACCATAAAGAATATGAAAAGATTATGATTAAGGCTCTTATTTTTTCAATTGATCAATCAATAGAGCCTAATCAAGAAGAATTAGCACGCTTAACAGACTATCTTTTTACGGTGGAGCAGTGGGGATATTATGAAATTATTCTCTTAGGAAATTGCTCACGTCTCATTAATTACAATACTTTATTTTTATTGACCAAAGAAATGGTTAATTCGTTTGCTTATTCAGAACAAAATAAAACCAATAAAATCCTAGTTACACAATTAGCAATTAATTGTCTAATCATCAGCATTGATCACTCTTACTTTGAGCATAGCCACTACTTAATTGATAAGGTTAGATCATTGTTACAGGATGAAGTTAATTTCTATGAAAAAACTGTTTTCTTATATGTAACTGGATACTATCATTTAAAACTTGGTGATACTTCTTCAGGAAAAGAAGATATGAGGAAAGCTTTACAGATTTTTAAATATTTAGGTGAAGATTCATTTTACAATACTTATAATGAACATTATTGTCAAAAAGTACTTGGCAATAATAAAGAATGC

SEQ ID NO: 21070 - protein, 190 aa, Streptococcus agalactiae
MALLEDHNHKEYEKIMIKALIFSIDQSIEPNQEELARLTDYLFTVEQWGYYEIILLGNCSRLINYNTLFLLTKEMVNSFAYSEQNKTNKILVTQLAINCLIISIDHSYFEHSHYLIDKVRSLLQDEVNFYEKTVFLYVTGYYHLKLGDTSSGKEDMRKALQIFKYLGEDSFYNTYNEHYCQKVLGNNKEC

SEQ ID NO: 21071 - protein, 300 aa, Streptococcus agalactiae
ATGGAAAAAGAATTAGGAAAAACACTAAGAAGATTACGTAAAGGAAAAAAAGTTAGTATTTCTTCTTTAGCAGATGAGCACCTATCCAAGTCACAAATCTCAAGGTTTGAGAGAGGAGAGTCAGAAATTACTTGTAGTCGTTTGCTTAATATTTTAGACAAACTCAACATCACTATTGATGAATTTGTGTCGATTCATTCTAAGGCGCACACTCATTTTTTTATCCTTTTAAATCGAGTAAGAAAATATTGTGCTGAAAAAAATGTAACTAAATTAGTGGGTGGCTCTCTTAGAGGATCA

SEQ ID NO: 21072 - protein, 100 aa, Streptococcus agalactiae
MEKELGKTLRRLRKGKKVSISSLADEHLSKSQISRFERGESEITCSRLLNILDKLNITIDEFVSIHSKAHTHFFILLNRVRKYCAEKNVTKLVGGSLRGS

SEQ ID NO: 21073 - protein, 1584 aa, Streptococcus agalactiae
ATGAAGATTAAAAAATTATTAGTGGCCTTGCCGCAGCTTTAATTATCAGTTCACTATCAACTATTAACTATGAGGTTAAAGCTGATGACACCACCAGTGAGTATCACTATATCAGTAAGCAAAATAATGAAGAGCAGCTTATTAGTTACATCAAGGAACAACATCGTTTGCTCAATCAATTTGTTGTTGATAATGTCAACTCATTCACTCAACTAAATGCTAATCCAACTATTGAACAGTTAAATAGAGCTATAACATTATTTAAACAAAAAGATGAGCAATTATTTAACCAGGTGAAAGCTAGTCATCTCTCTCCCAGTAACTATAATGCTATCGTTAATCAACGTAATGTCATTAACCAACTGTTCAAAATCTGATTGACCAAAATCATAATAAGCTTCAGGCAAGTCAAAATAAAGCAGCTCAGCTCGTGGGGCAACGTAATCAGGTTGTTAACAAAATTCAAGCTATTTTAGCAACTGTAAACTACAACTCTGTGAATTCTATACAAGAAGCTGAAAATTTATTTCATTCACTCAGAAATCAAATTGAACCTCTTGTAGCTGAAGTTAATAATTACAAAGCTGCTATGGCAACCCTTCAACAAGAAGTAGATGCCCTATCAACAGCGACTATGAAACTGAGACTTCTAAACTTGCTACTCTCAAAGTTAGCGAAAATACTTCTGTTCCTGCAAACAAAGTAGAAGAAAAAACTACTCAATCAGAAGCGTCAGGCAATAAACAAGAAGTAACTAAGAGTGAGGAAAAACAGGCTACCTCTGATGCAAAGGCATCACAGCCTGAGTCAGCTAATATTGCCGATTACGATAGTTTAAAAGAAGTTTTACGAAATAATATTAGTAACCAAGTACCACACATCAGTGTTCAAATGGAGTTTAAAACTCAAGAACAAGTTGACGAATACCAAAAAAATCTTGGAAGCATCATCCGGGAAATTGGAGATACACTTGGAACAGCAACTGAATTCAATGTCAAAAGTAACATTAGCACTTATACTCTTGGTGGACAAATCCAACGCATTATTGTAAAAAGCGACATCACAATCACCTATACTCTTAAAGGTGACATGGTAGGATTACATAAAGAATATAAACAGTTTGTAGATTCTTTTGTCAAAGAAAATATTACTAACAAAAATATCACAAGTGATTATGAAAAAGCTAAAGTAATTCATGACCACTTGGTTAATAATTATACTTACGCGACTGAAGAACTGGCAACAACTCGTGAAACTGCTAGTGGTATCAGTATCCATGCCCCTGAAGCACTCTACAAAGACAAACGTGGTGTGTGTCAAGCCTTTGCAGTAATGTTTAAAGATATGGCTGCTGCTGGCTTATCAGTATGGTATGTAACTGGTCAAGCTGGAGGTGGAAATCACGCTTGGAACATTGTTACTATTAATGGCGTTAAATATTATGTTGATACAACATGGGATAATAATATAAAAAGCAATAAATATTTCCTTGTTGGTAAAACAATAATGGATGCTGATCATCTTTTGGATAGTCAATACAATGCATTAGCTAAAGATATTCCAGCTGATCGCCATCAAGGTGCA

SEQ ID NO: 21074 - protein, 529 aa, Streptococcus agalactiae
  VARIANT 122: Xaa = Any Amino Acid
MKIKKIISGLAAALIISSLSTINYEVKADDTTSEYHYISKQNNEEQLISYIKEQHRLLNQFVVDNVNSFTQLNANPTIEQLNRAITLFKQKDEQLFNQVKASHLSPSNYNAIVNQRNVINQXVQNLIDQNHNKLQASQNKAAQLVGQRNQVVNKIQAILATVNYNSVNSIQEAENLFHSLRNQIEPLVAEVNNYKAAMATLQQEVDALSTATIETETSKLATLKVSENTSVPANKVEEKTTQSEASGNKQEVTKSEEKQATSDAKASQPESANIADYDSLKEVLRNNISNQVPHISVQMEFKTQEQVDEYQKNLGSIIREIGDTLGTATEFNVKSNISTYTLGGQIQRIIVKSDITITYTLKGDMVGLHKEYKQFVDSFVKENITNKNITSDYEKAKVIHDHLVNNYTYATEELATTRETASGISIHAPEALYKDKRGVCQAFAVMFKDMAAAGLSVWYVTGQAGGGNHAWNIVTINGVKYYVDTTWDNNIKSNKYFLVGKTIMDADHLLDSQYNALAKDIPADRHQGA

SEQ ID NO: 21075 - protein, 174 aa, Streptococcus agalactiae; identical to SEQ ID NO: 7385

SEQ ID NO: 21076 - protein, 58 aa, Streptococcus agalactiae; identical to SEQ ID NO: 7386

SEQ ID NO: 21077 - protein, 96 aa, Streptococcus agalactiae; identical to SEQ ID NO: 7387

SEQ ID NO: 21078 - protein, 32 aa, Streptococcus agalactiae; identical to SEQ ID NO: 2758

SEQ ID NO: 21079 - protein, 897 aa, Streptococcus agalactiae
ATGACATTTAAGTCAGGATTTGTAGCAATTTTAGGTCGTCCAAATGTTGGAAAATCAACCTTCCTAAACCATGTTATGGGACAAAAAATTGCTATCATGAGTGATAAAGCTCAAACAACACGTAATAAAATTATGGGGATTTATACAACAGAAACTGAGCAAATTGTTTTCATTGATACCCCAGGAATTCATAAACCAAAGACCGCCCTTGGTGATTTTATGGTTGAATCTGCTTATAGTACTTTACGTGAAGTTGAAACAGTTCTTTTCATGGTTCCTGCCGATGAAAAGCGAGGCAAAGGCGATGATATGATTATTGAACGTCTTAAGGCTGCCAAGATTCCTGTTATTTTAGTAATCAACAAAATTGATAAGGTTCATCCAGACCAACTTTTGGAACAGATTGATGACTTCCGTAGTCAAATGGATTTTAAAGAAGTAGTGCCAATTTCTGCCCTTCAAGGAAATAATGTGCCAACCCTAATCAAGTTATTGACTGATAATCTTGAAGAAGGTTTCCAATATTTCCCAGAAGATCAGATTACTGATCATCCGGAACGATTTTTAGTATCAGAAATGGTTCGTGAGAAGGTACTTCATTTAACGCAACAAGAGGTTCCTCACTCAGTAGCTGTTGTTGTCGAATCCATGAAACGTGATGAAGAAACTGATAAAGTGCACATTCGTGCAACTATCATGGTTGAACGTGATAGTCAAAAAGGCATTATCATTGGAAAACAAGGTGCTATGCTCAAGAAAATAGGAAAAATGGCGCGCCGTGATATTGAACTTATGTTAGGTGATAAAGTTTACCTAGAAACTTGGGTAAAAGTCAAGAAAAACTGGCGTGATAAAAAGCTTGATTTAGCTGATTTTGGCTATAATGAAAAAGAGTAT

SEQ ID NO: 21080 - protein, 299 aa, Streptococcus agalactiae; identical to SEQ ID NO: 7396

SEQ ID NO: 21081 - protein, 396 aa, Streptococcus agalactiae; identical to SEQ ID NO: 11643

SEQ ID NO: 21082 - protein, 132 aa, Streptococcus agalactiae; identical to SEQ ID NO: 2764

SEQ ID NO: 21083 - protein, 495 aa, Streptococcus agalactiae; identical to SEQ ID NO: 11645

SEQ ID NO: 21084 - protein, 165 aa, Streptococcus agalactiae; identical to SEQ ID NO: 11646

SEQ ID NO: 21085 - protein, 804 aa, Streptococcus agalactiae; identical to SEQ ID NO: 11647

SEQ ID NO: 21086 - protein, 268 aa, Streptococcus agalactiae; identical to SEQ ID NO: 11648

SEQ ID NO: 21087 - protein, 474 aa, Streptococcus agalactiae; identical to SEQ ID NO: 11649

SEQ ID NO: 21088 - protein, 158 aa, Streptococcus agalactiae; identical to SEQ ID NO: 11650

SEQ ID NO: 21089 - protein, 801 aa, Streptococcus agalactiae; identical to SEQ ID NO: 11651

SEQ ID NO: 21090 - protein, 267 aa, Streptococcus agalactiae; identical to SEQ ID NO: 11652

SEQ ID NO: 21091 - protein, 984 aa, Streptococcus agalactiae
TTGCAAGAATACTCTATCGAAATTACTTTACAACATCCAGATGATATGATGTCACTCTTTGGCAGCAATGAGCGCCATTTAAAATTAATCGAAGAAAATTTAGATGTTATCATTCATGCTAGAACTGAACGTGTTCAGGTATTAGGTGACTCTGAAGAAACAGTAGAAACCGCTCGGCTAACTATTGAAGCATTATTAGTGCTTGTTAACCGTGGGATGACTGTGAATACTTCAGATGTTGTAACAGCCTTATCCATGGCACAAAATGGTTCAATTGATAAATTCGTTGCCCTTTATGAGGAAGAAATTATTAAGGATAGCTATGGTAAGCCTATCCGTGTTAAGACTTTAGGGCAAAAAATATACGTTGATAGCGTTAAAAATCATGATGTTGTTTTTGGTATTGGGCCTGCTGGAACGGGAAAAACTTTTTTAGCAGTCACTCTAGCAGTAACGGCACTAAAGCGTGGTCAAGTTAAACGAATAATCTTAACGAGACCAGCGGTTGAAGCTGGTGAAAGCCTTGGTTTCTTGCCTGGAGATCTCAAAGAGAAAGTTGATCCTTATTTGAGACCAGTTTATGATGCCCTATATCAAATTTTAGGTAAAGAGCAAACAAGTCGCTTAATGGAGCGTGAAATCATCGAAATTGCTCCATTGGCTTACATGCGTGGTCGTACTTTAGATGATGCATTTGTCATATTAGATGAAGCGCAAAACACCACTATAATGCAAATGAAAATGTTCCTAACACGACTTGGCTTCAATTCTAAAATGATTGTAAATGGCGATGTTAGCCAAATTGACTTACCAAAGAATGTTAAATCTGGTTTGATTGATGCTGTTGAGAAATTACGAAATATCAAAAAGATTGACTTTATTCATTTATCAGCAAAGGATGTTGTAAGACACCCTGTCGTTGCTGAAATAATAAATGCTTATTCAGATTCAGAAAGTAGTCACAAGCTACAACCTGATAATGAC

SEQ ID NO: 21092 - protein, 328 aa, Streptococcus agalactiae
MQEYSIEITLQHPDDMMSLFGSNERHLKLIEENLDVIIHARTERVQVLGDSEETVETARLTIEALLVLVNRGMTVNTSDVVTALSMAQNGSIDKFVALYEEEIIKDSYGKPIRVKTLGQKIYVDSVKNHDVVFGIGPAGTGKTFLAVTLAVTALKRGQVKRIILTRPAVEAGESLGFLPGDLKEKVDPYLRPVYDALYQILGKEQTSRLMEREIIEIAPLAYMRGRTLDDAFVILDEAQNTTIMQMKMFLTRLGFNSKMIVNGDVSQIDLPKNVKSGLIDAVEKLRNIKKIDFIHLSAKDVVRHPVVAEIINAYSDSESSHKLQPDND

SEQ ID NO: 21093 - protein, 1770 aa, Streptococcus agalactiae
ATGAGATATACAAATGGAAATTTTGAAGCCTTTGCAAGACCTCGAAAACCTGAAGGTGTGGATAAAAAATCCGCTTATATTGTTGGTTCTGGTTTAGCAGGATTAGCTGCCGCTGTCTTTTTAATACGTGATGGTCAAATGGATGGTCAACGTATTCATATTTTTGAAGAACTACCTCTTTCTGGAGGATCACTTGACGGTGTCAAACGACCTGATATCGGTTTTGTAACGCGTGGTGGTCGTGAAATGGAAAATCACTTCGAATGTATGTGGGATATGTACCGTTCCATCCCCTCTCTCGAAGTTCCAGATGCTTCTTATCTAGATGAATTTTATTGGCTTGACAAGGATGATCCCAATTCATCTAACTGTCGCCTCATTCATAAACAGGGGAATCGCTTAGAATCTGATGGTGATTTTACACTCGGAACACATTCCAAAGAGTTAGTTAAGCTAGTCATGGAGACTGAAGAGTCTTTAGGTGCTAAAACGATTGAAGAAGTCTTTTCAAAAGAATTTTTTGAAAGTAATTTTTGGACTTATTGGGCTACTATGTTTGCCTTTGAGAAATGGCATTCAGCGATTGAAATGCGTCGATATGCTATGCGCTTCATCCATCATATCGGTGGTCTGCCTGATTTCACTTCATTAAAATTTAATAAATATAATCAATATGATTCTATGGTGAAACCAATCATCAGTTATTTAGAGTCTCACAATGTGGATGTTCAATTTGATAGCAAGGTGACTAATATCTCCGTAGACTTTAAGAACGGTCAGAAGCTTGCAAAAGCTATTCATCTCACAGTTGGTGGTGAAGCAAAAATAATTGATCTTACTCCAGATGATTTTGTTTTTGTAACGAATGGTTCTATCACTGAAAGTACGAACTATGGTAGTCATGATACTGTAGCTAAACCTAATACCGATTTGGGAGGTTCTTGGAATCTTTGGGAAAACTTAGCTGCTCAATCTGATGAATTTGGACATCCTAAAGTCTTCTACAAAGATATTCCAAAAGAGTCATGGTTTGTTTCTGCTACTGCAACAATAAAAGATCCAGCTATTGAACCTTATATAGAGCGTTTAACACATCGTGACCTCCATGATGGTAAAGTAAATACAGGAGGCATTGTTACAGTTACAGATTCTAATTGGATGATGAGTTTTGCTATCCATCGCCAACCGCATTTCAAAGAGCAAAAGGAAAATGAAACAATTGTTTGGATTTATGGACTCTATTCAAATGTGGAAGGTAATTATATTAAAAAACCAATTGAAGAATGTACTGGTCGAGAAATCACAGAAGAGTGGTTGTATCACTTAGGTGTTCCTGAAATGAAGATTCATGATTTATCTGATAAACAATATGTAAGTACAGTTCCTGTTTATATGCCTTACATTACTAGTTATTTCATGCCTCGAGTTAAAGGTGACCGACCAGATGTTATCCCACAAGGTTCTGTTAACCTAGCCTTCATTGGTAATTTTGCAGAATCTCCATCCAGAGATACAGTATTTACAACGGAATATTCTATTAGAACTGCTATGGAAGCTGTTTATACTTTCTTAAATGTTGAACGTGGTGTTCCAGAAGTCTTTAATTCAGCATTTGATATTCGTGTCTTGTTGCAATCTTTATACTATCTCAATGATAAGAAATCTGTTGAAGATATGGATTTACCAATACCTGCCTTAATGCGTAAAGTAGGCATGAAAAAAATTAGAGGAACTTATTTAGAAGAATTACTTCGAGAAGCTCATCTTTTA

SEQ ID NO: 21094 - protein, 590 aa, Streptococcus agalactiae; identical to SEQ ID NO: 11656

SEQ ID NO: 21095 - protein, 213 aa, Streptococcus agalactiae; identical to SEQ ID NO: 11657

SEQ ID NO: 21096 - protein, 71 aa, Streptococcus agalactiae; identical to SEQ ID NO: 7414

SEQ ID NO: 21097 - protein, 507 aa, Streptococcus agalactiae; identical to SEQ ID NO: 11659

SEQ ID NO: 21098 - protein, 169 aa, Streptococcus agalactiae; identical to SEQ ID NO: 11660

SEQ ID NO: 21099 - protein, 852 aa, Streptococcus agalactiae; identical to SEQ ID NO: 11661

SEQ ID NO: 21100 - protein, 284 aa, Streptococcus agalactiae; identical to SEQ ID NO: 11662

SEQ ID NO: 21101 - protein, 555 aa, Streptococcus agalactiae; identical to SEQ ID NO: 11663

SEQ ID NO: 21102 - protein, 185 aa, Streptococcus agalactiae; identical to SEQ ID NO: 2780

SEQ ID NO: 21103 - protein, 726 aa, Streptococcus agalactiae
GTGGAACCTAAATATCAACGTATATTAATTAAGTTATCTGGCGAAGCATTGGCGGGAGATAAGGGTGTCGGTATTGACATTCCTACCGTTCAATCTATTGCAAAAGAAATTGCCGAAGTACACAATTCAGGTGTTCAAATAGCACTTGTCATTGGTGGAGGTAATCTTTGGCGTGGAGAACCTGCAGCAGAAGCAGGGATGGATCGTGTTCAAGCTGATTATACAGGGATGTTAGGGACAGTAATGAATGCTCTTGTAATGGCTGATAGCCTTCAACAATATGGGGTAGATACTAGAGTTCAAACAGCTATTCCGATGCAAACTGTTGCTGAGCCTTACGTACGTGGTCGTGCTTTACGTCATCTAGAGAAGAATCGTATTGTTGTCTTTGGAGCGGGTATTGGTTCGCCTTATTTCTCAACTGATACAACAGCAGCGCTTCGTGCTGCTGAGATTGAGGCAGAAGCAATTTTAATGGCTAAAAATGGAGTAGATGGTGTTTATAATGCTGATCCAAAGAAAGATGCCAATGCTGTCAAATTTGATGAATTAACTCACGTTGAAGTAATAAAACGAGGGTTAAAAATCATGGATGCAACCGCATCAACTATTTCAATGGATAATGATATTGACCTTGTTGTTTTCAATATGAATGAGACTGGTAATATTAAGCGTGTTGTTCTTGGAGAACAAATCGGAACAACTGTTTCAAACAAAGCATCTGAA

SEQ ID NO: 21104 - protein, 242 aa, Streptococcus agalactiae; identical to SEQ ID NO: 2782

SEQ ID NO: 21105 - protein, 678 aa, Streptococcus agalactiae
ATGTTGGTTTGTAATCATGTCGGAAAAACATTTGGACGACAAGAGGTTTTAAAGGACTGTCATTTTCATCTTAAAAGAGGAGAAATAATTGGTATAATGGGTAAAAGTGGCAGTGGTAAAAGTAGCCTTGCCCGACTCATTATAGGACTAGATAGTCCTACTTGTGGTTCGATACATTTTCAAGGAAAAAATTACACACCTAAAGATGGTAAGGCGCAGATTATCCTTGTTTTTCAAGATGCGCTTAGTTCGGTCAATCCATATTTTAGTATTGAGGAAATTTTGAATGAAGCTTTTTATGGAAAAAAAACAACTTTTGAATTATGCCAAATATTAGAAGCGGTGGGTTTAGATGGAACTTATCTAAAATATAAAGCTAGACAACTTAGTGGTGGTCAGCTACAGAGAGTTTGTATCGCTAGAGCTTTACTCTTAAAGCCTAAAATTATTATTTTTGATGAATCCTTAAGTGGATTAGACCCAGTAACTCAAATTAAAATGCTACATTTATTACAAAAATTAAAACGCCGTTATGAATTAAGTTTTATAATGATTTCCCATGACCCTAAAATTTGTCAAGCTATCTGTAACCGGGTCTTTCTGATAAAAAATGGTTATTTAGTAGAAGATAATGAATTCTTGAAGAGAGCATGTTCTACTAACTGTTTGACCAATCTC

SEQ ID NO: 21106 - protein, 226 aa, Streptococcus agalactiae
MLVCNHVGKTFGRQEVLKDCHFHLKRGEIIGIMGKSGSGKSSLARLIIGLDSPTCGSIHFQGKNYTPKDGKAQIILVFQDALSSVNPYFSIEEILNEAFYGKKTTFELCQILEAVGLDGTYLKYKARQLSGGQLQRVCIARALLLKPKIIIFDESLSGLDPVTQIKMLHLLQKLKRRYELSFIMISHDPKICQAICNRVFLIKNGYLVEDNEFLKRACSTNCLTNL

SEQ ID NO: 21107 - protein, 585 aa, Streptococcus agalactiae
ATGGGGGAATCGCTAACTATTATTGGTGAGAGTGGTTCAGGGAAAACCCTCTTGGCAAAATTATTGGTTGGTCATATTCCACAAGGTATGACAGTTAGAGGAAACATATTTTTTAAGGGAGTTGATTTAGGTAAACTAACTGTAAAGCAGTGGCAGAAATTAAGGGGACGAGATATTGCCTATTTAGTGCAAAATCCCATGTCTATGTTTAATCCTTTTCAAAAAATTGAAGCGCATATTTTGGAAACAATCCTTAGTCATGAGAAATGTTCAAAGAGAGTAGCCTTATCTAAAGCGTTAGAATGGATGAAACGTTTAAATTTAGATGATGCGATATCCCTGTTAAAAAAATACCCCTTTGAGCTTAGTGGAGGAATGCTACAAAGAATTATGTTAGCCACTATATTATCTCTTGATCCTCAGGTAATCATATTAGATGAGCCGACCTCAGCGGTTGATTGCCATAATTGTTCTACTATATCAGCTATTTTGCAGGAATTGCAAAATAATGGAAAAACCTTGATTACTGTAACGCATGATTATCAGTTAGCTAGAGACCTGGAGGGGGCAATTACTAGTTATAAG

SEQ ID NO: 21108 - protein, 195 aa, Streptococcus agalactiae
MGESLTIIGESGSGKTLLAKLLVGHIPQGMTVRGNIFFKGVDLGKLTVKQWQKLRGRDIAYLVQNPMSMFNPFQKIEAHILETILSHEKCSKRVALSKALEWMKRLNLDDAISLLKKYPFELSGGMLQRIMLATILSLDPQVIILDEPTSAVDCHNCSTISAILQELQNNGKTLITVTHDYQLARDLEGAITSYK

SEQ ID NO: 21109 - protein, 804 aa, Streptococcus agalactiae; identical to SEQ ID NO: 11671

SEQ ID NO: 21110 - protein, 268 aa, Streptococcus agalactiae; identical to SEQ ID NO: 11672

SEQ ID NO: 21111 - protein, 942 aa, Streptococcus agalactiae; identical to SEQ ID NO: 11673

SEQ ID NO: 21112 - protein, 314 aa, Streptococcus agalactiae; identical to SEQ ID NO: 11674

SEQ ID NO: 21113 - protein, 1596 aa, Streptococcus agalactiae
TTGAGTATTACTTGTTTATTGATGGTGACTCTGACTGCATGCCATTCACAGGATAGCAAAAGTCATAAACTAAACAGTGATAAACTCACGCTTGCTTGGGGAGAAGACTTTGGTGATGTTAATCCGCATCGCTATAACCCTGATCAGTTTGTTATCCAGGATATGGTTTATGAGGGGTTGGTACGATATGGTGACAATGGGAAAATTGAACCAGCTTTAGCGGAAAGCTGGAGCATTAGTCAAGATGGAAAAACCTACACTTTTAAATTGAGAAATGCTAAATATTCTGATGGCAGTAACTTTAATGCTGCGAATGTCAAACGTAATTTTGATAGTATTTTTTCGAAGTCTAATAGAGGTAATCATAATTGGTTTAATTTAACGAATCAATTGGAAAATTATCGTGCCTTGAATCAAAGTACTTTTGAAATTAAACTGAAACAAGCTTATAGTGCTACTTTATATGATCTCTCTATGATTCGTCCAATTCGTTTTTTATCTGATAACGCTTTCCCTAAAGGTGATGATACAACTAAGAAGAATGTAAAAAAACCAATTGGAACGGGTCAATGGGTTGTGAAAAGTAAAAAGCAAAATGAATATATTACCTTCAAACGTAATGAGAATTACTGGGGAAAGAAACCAAAATTAAAAGAAGTAACCGTAAAAGTTATACCTGATGCTCAGACGCGTGCTTTAGCATTTGAATCAGGTGACGTTGATTTGATCTATGGGAATGGCATTATTGGTTTAGACACTTTTGCCCAATATACGAAGGACAAGAAATATGTCACAGCTGTTTCTCAACCTATGTCAACAAGACTTTTGTTGCTAAATGCTAAGGAAAGTATTTTCCAAGATAAAAAAGTTCGTCAGGCAATGAATCATGCTATTGACAAAGTTTCTATTGCTAAGAACACTTTTAGAGGAACAGAAAAGCCAGCAGACACTATTTTTTCAAAATCAACACCTCACTCAGATGCTAAGTTAAATACTTATAGCTATAATGTTGATAAAGCAAATCAGCTATTGGATCAAGCTGGTTGGAAGTTGGGAAAAGATAAGGTTCGTGAAAAAGATGGTAAAGCTCTAACCTTACGTCTTCCTTATATCGCCACTAAGGCAACTGATAAAGACCTGGTAACTTATTTCCAAGGAGAATGGCGTAAAATCGGTATTAATGTTTCTCTTATTGCTATGGAAGAAGATGATTATTGGGCTAATGCTAAAAAGGGTAATTTTGATATGATGTTAACCTATTCTTGGGGAGCACCATGGGACCCTCATGCTTGGATGTCGGCATTAACTGCCAAGGCAGATCATGGACATCCAGAAAATATAGCTTTAGAAAATCTAGCAACTAAAACTGAAATGGATAGACTTATTAAGTCAGCTCTAGTAGATCCTAAGGAAGAAAATGTTGATAGAGACTATAAGAAGGTTCTTGAATTATTGCATGATGAGGCTGTATATATCCCATTAACTTATCAATCGGTGATTTCTGTTTATAGGAAAGGTGATTTTAAAACCATGCGCTTTGCGCCAGAAGAAAATTCATTCCCATTACGCTATATAGAAAAAAATAATGTATCTAAG

SEQ ID NO: 21114 - protein, 532 aa, Streptococcus agalactiae
MSITCLLMVTLTACHSQDSKSHKLNSDKLTLAWGEDFGDVNPHRYNPDQFVIQDMVYEGLVRYGDNGKIEPALAESWSISQDGKTYTFKLRNAKYSDGSNFNAANVKRNFDSIFSKSNRGNHNWFNLTNQLENYRALNQSTFEIKLKQAYSATLYDLSMIRPIRFLSDNAFPKGDDTTKKNVKKPIGTGQWVVKSKKQNEYITFKRNENYWGKKPKLKEVTVKVIPDAQTRALAFESGDVDLIYGNGIIGLDTFAQYTKDKKYVTAVSQPMSTRLLLLNAKESIFQDKKVRQAMNHAIDKVSIAKNTFRGTEKPADTIFSKSTPHSDAKLNTYSYNVDKANQLLDQAGWKLGKDKVREKDGKALTLRLPYIATKATDKDLVTYFQGEWRKIGINVSLIAMEEDDYWANAKKGNFDMMLTYSWGAPWDPHAWMSALTAKADHGHPENIALENLATKTEMDRLIKSALVDPKEENVDRDYKKVLELLHDEAVYIPLTYQSVISVYRKGDFKTMRFAPEENSFPLRYIEKNNVSK

SEQ ID NO: 21115 - protein, 687 aa, Streptococcus agalactiae
ATGGCTAAAAAAAGTAAAAACTTACGTGCTGCTCTTGAGAAAATTGACAGCACTAAAGCATACAGCGTAGAAGAAGCTGTAGCTCTTGCAAAAGAAACTAACTTTGCTAAATTTGATGCAACTGTTGAAGTTTCTTATAATCTTAACATTGATGTTAAAAAAGCTGACCAACAAATCCGTGGTGCTATGGTTTTACCAGCAGGTACTGGTAAAACTTCACGTGTTCTTGTTTTTGCTCGTGGCGCTAAAGCTGAAGAAGCTAAAGCAGCAGGTGCAGACTTTGTCGGTGAAGATGACTTAGTTGCTAAAATCCAAGGTGGATGGCTTGACTTTGATGTTGTTATCGCAACACCAGATATGATGGCACTTGTTGGACGTCTTGGACGTGTCCTTGGACCTCGTAACTTGATGCCAAATCCTAAAACTGGTACAGTAACTATGGACGTTGCTAAAGCAGTTGAAGAGTCTAAAGGTGGTAAAATTACTTACCGTGCTGATAAAGCAGGTAACGTCCAAGCCCTTATTGGTAAAGTTTCATTTGATGATGCTAAATTAGTTGATAACTTCAAAGCATTTAATGATGTTATTGTTAAAGCTAAACCAGCTACTGCAAAAGGAACTTACATCACAAACCTTTCAATTACAACAACACAAGGTGTTGGTATCAAAGTTGATCCTAACTCACTT

SEQ ID NO: 21116 - protein, 229 aa, Streptococcus agalactiae; identical to SEQ ID NO: 2794

SEQ ID NO: 21117 - protein, 423 aa, Streptococcus agalactiae; identical to SEQ ID NO: 11679

SEQ ID NO: 21118 - protein, 141 aa, Streptococcus agalactiae; identical to SEQ ID NO: 11680

SEQ ID NO: 21119 - protein, 222 aa, Streptococcus agalactiae
ATGGGAATCTACTTTTATAATGATCATGCTGAAACGCATGGTGAAAGAAGTACTAGGATGGATGGTATCATTGCGGGATTAGGCAGAGGGGATATTGTTGTTTTTCAAGTACCTACATGGAATTCAACAGAATTTGATGAACTTTTTCTAGATAAATTACAGGCATACGGTGCTAGAATTATAACTTTTGTACATGATATTGTTCCCCCTTTTAATGGGTTT

SEQ ID NO: 21120 - protein, 74 aa, Streptococcus agalactiae
MGIYFYNDHAETHGERSTRMDGIIAGLGRGDIVVFQVPTWNSTEFDELFLDKLQAYGARIITFVHDIVPPFNGF

SEQ ID NO: 21121 - protein, 174 aa, Streptococcus agalactiae
GTGCTGGCTGACGTCCAGGCACTCATTGAAGCACTTGTGCTGGCTGACATTGATGCACTCGATGAGGCGCTGGTACTAGCTGACGTGGATGCACTCGTACTTGCACTTGTTGCAGCGCTAGTGCTGGCTGACATCGAGGCACTCATTGAAACACTTGTACTGGCNNNNNTTAAT

SEQ ID NO: 21122 - protein, 58 aa, Streptococcus agalactiae
  VARIANT 56, 57: Xaa = Any Amino Acid
MLADVQALIEALVLADIDALDEALVLADVDALVLALVAALVLADIEALIETLVLAXXN

SEQ ID NO: 21123 - protein, 612 aa, Streptococcus agalactiae
GTGCTTTCTTCGGATACTTATATTGAAAAAGATAGTTCAGTCAATGACGAAATTGACAAATTACGTCACTCAGCGACTTCTTCGTTATTAGAAAGAAATGACGTTATTGTTGTAGCATCTGTTTCTTGTATTTACGGTTTAGGTTCTCCTAAAGAGTATGCAGACAGTGTTGTTAGCCTTAGGCCAGGTCAAGAAATTTCACGTGATCAGTTATTGAACAATCTCGTTGATATTCAATTTGAGCGTAACGATATTGATTTTCAACGTGGAAAATTTCGCGTTCGTGGCGATGTTGTAGAAGTTTTTCCTGCGAGTCGTGATGAGCATGCCTTTCGAATTGAATTTTTTGGTGATGAAATTGATCGTATAAGAGAAATAGAATCGTTAACAGGGCGTGTGCTAGGAGAAGTGGAACATTTAGCTATTTTCCCAGCAACACACTTTATGACAAATGATGAACATATGGAAGAAGCTATTTCAAAAATACAAGCTGAAATGGAAAATCAAGTAGAACTTTTTGAAAAAGAAGGGAAATTGATTGAAGCGCAACGTATTCGACAAAGGACAGAATATGGTAAGAAATGCTTCGTGAAATGGGATATNNNNNTTAAT

SEQ ID NO: 21124 - protein, 204 aa, Streptococcus agalactiae
  VARIANT 201, 202, 203: Xaa = Any Amino Acid
MLSSDTYIEKDSSVNDEIDKLRHSATSSLLERNDVIVVASVSCIYGLGSPKEYADSVVSLRPGQEISRDQLLNNLVDIQFERNDIDFQRGKFRVRGDVVEVFPASRDEHAFRIEFFGDEIDRIREIESLTGRVLGEVEHLAIFPATHFMTNDEHMEEAISKIQAEMENQVELFEKEGKLIEAQRIRQRTEYGKKCFVKWDXXXN

SEQ ID NO: 21125 - protein, 249 aa, Streptococcus agalactiae
ATGAAAGAAAAAATTATAAAATATTTGGAAGAACACGGTAAAACTAGCGTTAATGACTTAGCTGCTGCCCTAGATATGGCAGGCGCAAAAGCATTTCCAAAATTAATCAAAACAATCTCAAATTTGGAGAGCCACAGGCAATTAAGATTTGACGATAATGGAAGTCTTTCTCTTCGAAAGAAAGAAGCTAAGAAAAAGGAAATCACAGTAAGAGGTCTTTTTAGAGCAAATAAAGCAGGNNNNNTTAAT

SEQ ID NO: 21126 - protein, 83 aa, Streptococcus agalactiae
  VARIANT 81, 82: Xaa = Any Amino Acid
MKEKIIKYLEEHGKTSVNDLAAALDMAGAKAFPKLIKTISNLESHRQLRFDDNGSLSLRKKEAKKKEITVRGLFRANKAGXXN

SEQ ID NO: 21127 - protein, 111 aa, Streptococcus agalactiae
TTGAACGTAGTAAAGCTCGAGGGATTTGAAGCTTTTATGCAACGTTTTACAGGTGTTTTAGTCTTTTTCTGGCTACTAATCGGCTTAGTATTATCTATTTTATCAAGTCAT

SEQ ID NO: 21128 - protein, 37 aa, Streptococcus agalactiae
MNVVKLEGFEAFMQRFTGVLVFFWLLIGLVLSILSSH

SEQ ID NO: 21129 - protein, 222 aa, Streptococcus agalactiae
ATGATTATGACAAAAATAATAGGTTTGACAGGAGGGATAGCTTCTGGAAAGTCAACGGTAACAAAAATAATACGAGAATCTGGTTTTAAAGTCATAGATGCGGATCAAGTGGTTCATAAATTGCAAGCTAAGGGTGGGAAACTTTACCAAGCTTTATTAGAATGGTTGGGTCCCGAGATACTTGATGCTGATGGTGAGTTGGATAGACCAAAGCTTNNNNNT

SEQ ID NO: 21130 - protein, 74 aa, Streptococcus agalactiae
  VARIANT 73, 74: Xaa = Any Amino Acid
MIMTKIIGLTGGIASGKSTVTKIIRESGFKVIDADQVVHKLQAKGGKLYQALLEWLGPEILDADGELDRPKLXX

SEQ ID NO: 21131 - protein, 261 aa, Streptococcus agalactiae
TTGAGAAAATCATTTTACAGTTGGTTGATGACACAAAGAAATCCAAAATCAAATGAACCAGTAGCAATCCTAGCAGATTACGCTTTTGATGAAACCACTTTTCCAAAACATAGTTCGGATTTTGAAACAGTTAGTCGTTATTTAGAAGATGAGGCTAGTTTTTCCTTTAATTTAACAGATTTTGATGATTATTTGGGAAGATTATCTCAATCCATTAACAATAATATAGAGATTGGGGTATTTTCCCCAATCTTCTTTTTT

SEQ ID NO: 21132 - protein, 87 aa, Streptococcus agalactiae
MRKSFYSWLMTQRNPKSNEPVAILADYAFDETTFPKHSSDFETVSRYLEDEASFSFNLTDFDDYLGRLSQSINNNIEIGVFSPIFFF

SEQ ID NO: 21133 - protein, 102 aa, Streptococcus agalactiae
TTGGGAGTATCTCTTGATACTGGTCTTCCAGATAAGCAAGTGGTTGTTTCTATGGATGTTCTTCCCGAATTGAAAGAACTTTGGCCTAAAAANNNNNTTAAT

SEQ ID NO: 21134 - protein, 34 aa, Streptococcus agalactiae
  VARIANT 31, 32, 33: Xaa = Any Amino Acid
MGVSLDTGLPDKQVVVSMDVLPELKELWPKXXXN

SEQ ID NO: 21135 - protein, 579 aa, Streptococcus agalactiae
ATGTTAACGACAAAGGAAAATTTCAAAGGAAATAACAAATTATTGGTGGGAATTGTACTCGCTGTACTATCATTTTGGTTATTTGCACAGTCTATTTTAAACATGGGACCAGATGTTCAGTCATCATTAGGTATTTCATCTGGTGCAATGGATATTGGTGTCTCAAGTACGGCATTGTTTTCAGGTTTATTTATTGTTGTAACTGGTGGTTTAGCAGATAAACTTGGTCGAGTTAAATTTACTTTTATTGGTCTTTGCTTAAATATTATTGGTTCTCTACTAATTGTTTTAGCTAATGGAGCAGTGCTATTTATTATGGGACGTATTTTTCAAGGATTGGCAGCAGCTTTTATTATGCCATCAACAATGGCCTTGGTTAAAACGTACTACGATGGTAAAGATAGACACGTGCAGTTAGTTTCTGGTCAATCGGATCATGGGGTGGCTCAGGTCTATGTTCTATTTGGTGGAGCGGTGGCAAGTACTCTAGGTTGGCGTTATGTCTTTATCTTTTCAATCATCGCATCAGTAGTTAGTTTTCTATTAATTTTAGGAACCCCAGAAAGTAAAAATNNNNNT

SEQ ID NO: 21136 - protein, 194 aa, Streptococcus agalactiae
  VARIANT 136, 193, 194: Xaa = Any Amino Acid
MLTTKENFKGNNKLLVGIVLAVLSFWLFAQSILNMGPDVQSSLGISSGAMDIGVSSTALFSGLFIVVTGGLADKLGRVKFTFIGLCLNIIGSLLIVLANGAVLFIMGRIFQGLAAAFIMPSTMALVKTYYDGKDRXRAVSFWSIGSWGGSGLCSYFGGAVASTLGWRYVFIFSIIASVVSFLLILGTPESKNXX

SEQ ID NO: 21137 - protein, 111 aa, Streptococcus agalactiae
TTGTCGTTAACATATGTTATCTATTCTCCTTCTTCAAGCATAGCAAGCGCTGCAGTTGCCATTGATTTAGCAGATACCATCAATGATGATTCTGCAATTTGGAATTTTGGA

SEQ ID NO: 21138 - protein, 37 aa, Streptococcus agalactiae
MSLTYVIYSPSSSIASAAVAIDLADTINDDSAIWNFG

SEQ ID NO: 21139 - protein, 1198 aa, Streptococcus agalactiae
ATGGCCAATGCATCTTTGCGACATCAATTATTTGAAAAACTTGACCAAAAATGTGATCAAATGGTTGCTATTCGTCGCTATTTACATGAAAATCCCGAATTATCATTTAAAGAGACAAAAACAGCAGCTTATATTTCAGATTTTTATAAAGGTAAGGACTGTCATGTTCAGACACAATTTGGTGGTATGAATGGCGTCGTAGTCGATATCTATGGTGATAAAGCGACAGATAAGCCCATCAAACACATTGCTTTGAGAGCCGACTTTGATGCTCTTCCAATTCAGGAAGAGACAGGGCTTTCTTTTGCTTCAAAAACAGCGGGCGTCATGCATGCTTGTGGACATGATGCCCATACAGCTTATTTATTGATTTTGGCTGAGAGCTTGATTGAATTAAAATCAGAATTTTCAGGTCATATCCGTATCTTACATCAACCGGCTGAAGAGGTACCACCGGGCGGAGCAAAAGCAATGATTGAAGCAGGATGTTTAGATGGCATTGATGCTGTCCTTGGTATCCATGTTATGTCAACGATGGAAGAGGGGACGGTACAATATCACGCAGGTCCCATTCAAACAGGGCGTGCCACTTTTAAAGTTATTTTGCAAGGTAAGGGTGGACATGGTTCCATGCCACATCGTGCAAATGATACAATTGTTGCAGCGTCTAGTTTTGTTATGGCAGCGCAAACGATTGTCAGTCGTCGAGTTAATCCATTTGACACAGCGGTAGTTACTATCGGATCTTTTGATGGTAAAGGTTCCGCTAATGTGATCAAAGATAGTGTAACCTTAGAAGGTGATGTGCGCGTGATGTCTGAAGAGACACGAGGTGTTGTTGAGGAGGAATTTAAGCGTATTCTAGAGGGAATAGCACAAACTTATGGTGTTAGTTATCAGTTAGACTATCAGAATGATTATCCTGTTTTAGTTAATAACAGTGAAGTGACACAGAAAGTTGCAAATAGTTTAAAATCTGTTGCTATAAAAGAAATTTTAGACGTCATTGATTGCGATCCTCAAACGCCGTCTGAAGATTTTGCCTATTATGCTCAAACAATCCCAGCTTGCTTCTTCTATGTTGGAGCACACGAAGAGGGGCAACCATATTACCCACATCATCATCCAAAATTCCAAATTGCAGAATCATCATTGATGGTATCTGCTAAACATGGCAACTGCAGCGCTTGCTATGCTT

SEQ ID NO: 21140 - protein, 400 aa, Streptococcus agalactiae
MANASLRHQLFEKLDQKCDQMVAIRRYLHENPELSFKETKTAAYISDFYKGKDCHVQTQFGGMNGVVVDIYGDKATDKPIKHIALRADFDALPIQEETGLSFASKTAGVMHACGHDAHTAYLLILAESLIELKSEFSGHIRILHQPAEEVPPGGAKAMIEAGCLDGIDAVLGIHVMSTMEEGTVQYHAGPIQTGRATFKVILQGKGGHGSMPHRANDTIVAASSFVMAAQTIVSRRVNPFDTAVVTIGSFDGKGSANVIKDSVTLEGDVRVMSEETRGVVEEEFKRILEGIAQTYGVSYQLDYQNDYPVLVNNSEVTQKVANSLKSVAIKEILDVIDCDPQTPSEDFAYYAQTIPACFFYVGAHEEGQPYYPHHHPKFQIAESSLMVSAKSMATAALAML

SEQ ID NO: 21141 - protein, 903 aa, Streptococcus agalactiae; identical to SEQ ID NO: 11685

SEQ ID NO: 21142 - protein, 301 aa, Streptococcus agalactiae; identical to SEQ ID NO: 2806

SEQ ID NO: 21143 - protein, 1712 aa, Streptococcus agalactiae
ATGCATATTGAGACTGTTATTGATTTCAAAGAATTAGGAAAAAGATATCGTTTTAAAAATCCTACAAAAGAATTAATAGCTGATACTTTAGAACAAGTCTTAGAAGTGATAAAAGAAGTTGATTATTATCAATCTCAAAATTATTATGTTGTTGGTTATTTATCTTATGAAGCATCTGCTGCTTTTGATTCACATTTTAAAGTTTCTCAACAGAAGTTGGCTGGAGAACATCTAGCTTATTTTACAGTACATAAAGATTGTGAGAACGAAGCTTTTCCTTTAAGTTATGAAAATGTTAGATTAGCAGATAATTGGACTGCTAATGTTTCTGAGCAAGAATATCAAGAGGCAATTGCTAATATTAAAGGACAAATTAGACAAGGAAATACTTATCAAGTAAATTATACACTAGAGCTTAGCCAACAATTATGCTCGGATCCCTTTAGTGTTTATGAACGCCTAATGGTAGAACAAGGAGCAGGATATAATGCTTATATTGCCTACGACGATAAAAGGATTTTATCTGTAAGCCCGGAATTGTTCTTTAAGAAGAAGGATGAAGTCTTAACAACTAGACCAATGAAGGGAACAAGCGCTAGAAAGCCTACTTATCAAGAAGATGTGGCGGAGCGAGATTGGTTGGCAAATGATCCTAAAAATCGTTCTGAAAATATGATGATTGTTGATTTATTAAGAAACGATATGGGCCGTATCTGTGATGTTGGAACAGTTAAGGTAAAAAAACTATGTCAAGTGGAGCAGTATGCAACTGTGTGGCAAATGACATCAACTATTGAAGGAGTTTTATCGCCAGAAGTGACACTTATGTCTATTTTTCAAGCTCTATATCCTTGTGGATCTATCACTGGAGCTCCTAAGATATCAACAATGGCTATTATTAATGAGTTGGAAAAACGGCCAAGAGGTATTTATTGTGGGACGATAGGACTTTGCATGCCAGACGGACAAGCTATTTTTAACGTTCCTATTCGCACAGTACAAATGAAAGGTCAACAAGCCTATTACGGCGTTGGTGGAGGTATTACGTGGGAGAGCCAGACAGATTCTGAATATGAAGAAACCCGTCAAAAATCAGCTGTTTTAACACGTGTCAATCCAAAATTTCAATTAATAACTACAGGAAGAGTGACTGAAAATAAACTTCTTTTCTCTCAACAACATGTCGAGAGATTAGTCGAATCAGCGTCTTATTTTGCTTATCCTTTTGATAAAAGTAAATTCGAAAGGGAACTGAAAAAATACCTTCATCAGCTAGATAAGAAGGATTACCGCTTGAAAATAATGCTTGATAAAACTGGTAAGGTAACGTTTGAGGTAAAACAACTAGTGAATTTATCAAAAAAGTTTTTAACGGCAGAGGTGGTCGTACAAGACTACCCTATTAAATTATCCCCGTTTACTTATTTTAAAACTTCTTATCGCCCCATATTATTGAAAGTCAGAATGAAAAGATATTTGTATCTCCTGAGGGGCTGCTATTGGAAACAAGTATTGGGAATATTGTTTTAGAAAAAAATGGAAGGTTTTTAACCCCAGATTTATCAGAAGGAGGGTTGAATGGGATTTATCGTCGTCATCTCCTTGAAAACCAAAAAGTAATTGAAGCACCACTAACTTTAAAAGATTTAGAATCAGCCGATGCTGTATACGCCTGTAATGCTGTTAGAGGGCTTTATCCTCTAAACCTAAAG

SEQ ID NO: 21144 - protein, 571 aa, Streptococcus agalactiae
MHIETVIDFKELGKRYRFKNPTKELIADTLEQVLEVIKEVDYYQSQNYYVVGYLSYEASAAFDSHFKVSQQKLAGEHLAYFTVHKDCENEAFPLSYENVRLADNWTANVSEQEYQEAIANIKGQIRQGNTYQVNYTLELSQQLCSDPFSVYERLMVEQGAGYNAYIAYDDKRILSVSPELFFKKKDEVLTTRPMKGTSARKPTYQEDVAERDWLANDPKNRSENMMIVDLLRNDMGRICDVGTVKVKKLCQVEQYATVWQMTSTIEGVLSPEVTLMSIFQALYPCGSITGAPKISTMAIINELEKRPRGIYCGTIGLCMPDGQAIFNVPIRTVQMKGQQAYYGVGGGITWESQTDSEYEETRQKSAVLTRVNPKFQLITTGRVTENKLLFSQQHVERLVESASYFAYPFDKSKFERELKKYLHQLDKKDYRLKIMLDKTGKVTFEVKQLVNLSKKFLTAEVVVQDYPIKLSPFTYFKTSYRPHIIESQNEKIFVSPEGLLLETSIGNIVLEKNGRFLTPDLSEGGLNGIYRRHLLENQKVIEAPLTLKDLESADAVYACNAVRGLYPLNLK

SEQ ID NO: 21145 - protein, 2448 aa, Streptococcus agalactiae; identical to SEQ ID NO: 11691

SEQ ID NO: 21146 - protein, 816 aa, Streptococcus agalactiae; identical to SEQ ID NO: 11692

SEQ ID NO: 21147 - protein, 801 aa, Streptococcus agalactiae; identical to SEQ ID NO: 11693

SEQ ID NO: 21148 - protein, 267 aa, Streptococcus agalactiae; identical to SEQ ID NO: 11694

SEQ ID NO: 21149 - protein, 831 aa, Streptococcus agalactiae; identical to SEQ ID NO: 11695

SEQ ID NO: 21150 - protein, 277 aa, Streptococcus agalactiae; identical to SEQ ID NO: 11696

SEQ ID NO: 21151 - protein, 365 aa, Streptococcus agalactiae
GTGATTGATCAAGTTGGTTTGAGAGGGTTTGAAAATAGACCAATTAATGCCTTATCAGTGGACAATTTCAACGATGCTTATGGCAAGATGTCTCGTTCAAGAAGCGGATTACATTTTTTTAGATGAGCCGTTTGTAGGGATTGATTCCATTAGTGAACAAATCATAGTTAATTTACTAAAAAAATTAAGTAAGGCCGGAAAATTAATTTTAGTCGTCCATCACGATTTGAGTAAAGTTGATCATTATTTTGATCAAGTATTATTTGAACCGTCATCTAATTGCTTGTGGATCAATAGATCAGGCATTTACCCGTGAGAATTTAAGTGCTGCTTACGGTGATGCTATTTTGTTAGGACAAGGAGAC

SEQ ID NO: 21152 - protein, 123 aa, Streptococcus agalactiae
  VARIANT 20, 89: Xaa = Any Amino Acid
MIDQVGLRGFENRPINALSXGQFQRMLMARCLVQEADYIFLDEPFVGIDSISEQIIVNLLKKLSKAGKLILVVHHDLSKVDHYFDQVIXLNRHLIACGSIDQAFTRENLSAAYGDAILLGQGD

SEQ ID NO: 21153 - protein, 342 aa, Streptococcus agalactiae
ATGATTATTAGTAAACACTTAAGCGTAAGTTATGATAATAATTTAGTGCTAGAAGATATTAATTTACGCTTAGAAGGCTCCGGAATCATTGGTATTTTAGGGCCTAATGGGGCGGGGAAATCTACGCTTATGAAAGCTCTTCTTGGTTTGGTTGATTCTACTGGAGAATCAGGGATTGGGGGAGATTTGCTACCTTTAATGGGGAGAGTAGCATATGTTGAACAAAAAACTAATATTGATTACCAATTCCCTATAACTGTTGGAGAATGCGTTTCTTTAGGATTATATAAGGAACGAGCCTCTTAGCGACTATCAAAAACTGACTGGGAAAAGTATCCCGAG

SEQ ID NO: 21154 - protein, 115 aa, Streptococcus agalactiae
  VARIANT 111: Xaa = Any Amino Acid
MIISKHLSVSYDNNLVLEDINLRLEGSGIIGILGPNGAGKSTLMKALLGLVDSTGESGIGGDLLPLMGRVAYVEQKTNIDYQFPITVGECVSLGLYKERGLFSDYQKLTGXKYPE

SEQ ID NO: 21155 - protein, 924 aa, Streptococcus agalactiae; identical to SEQ ID NO: 16327

SEQ ID NO: 21156 - protein, 308 aa, Streptococcus agalactiae; identical to SEQ ID NO: 16328

SEQ ID NO: 21157 - protein, 645 aa, Streptococcus agalactiae; identical to SEQ ID NO: 16331

SEQ ID NO: 21158 - protein, 215 aa, Streptococcus agalactiae; identical to SEQ ID NO: 16332

SEQ ID NO: 21159 - protein, 687 aa, Streptococcus agalactiae; identical to SEQ ID NO: 7459

SEQ ID NO: 21160 - protein, 229 aa, Streptococcus agalactiae; identical to SEQ ID NO: 7460

SEQ ID NO: 21161 - protein, 267 aa, Streptococcus agalactiae; identical to SEQ ID NO: 7461

SEQ ID NO: 21162 - protein, 89 aa, Streptococcus agalactiae; identical to SEQ ID NO: 2830

SEQ ID NO: 21163 - protein, 552 aa, Streptococcus agalactiae; identical to SEQ ID NO: 11707

SEQ ID NO: 21164 - protein, 184 aa, Streptococcus agalactiae; identical to SEQ ID NO: 2832

SEQ ID NO: 21165 - protein, 1377 aa, Streptococcus agalactiae; identical to SEQ ID NO: 11709

SEQ ID NO: 21166 - protein, 459 aa, Streptococcus agalactiae; identical to SEQ ID NO: 11710

SEQ ID NO: 21167 - protein, 411 aa, Streptococcus agalactiae
ATGGTTAAAGCACTAGAAACATACATCGTAACAAATGGAAATGGGCGACAAGCGATTGATTTTTATAAAAATGTCTTTCAAGCTGATTTAGTAAATATGATGACATGGGAAGAAATGGACCCCAACTGTCTTGAAGACCGCAAGGATTTAATCATTAATGCTCAGCTTATTTTTGATGGCATTCGTCTTCAAATTTCGGATGAAAATCCAGATTTCGTGTATCAAGCTGGTAAAAATGTTACGGCCGCTATTATTGTGGGTAGCGTAGAGGAGGCGCGTGAAATTTATGAAAAATTAAAGAAGAATGCACAAGAAGTTCAGTTAGAGTTACAAGAAACTTTCTGGAGTCCTGCTTACGCAAACTTAGTAGACCAATTTGGTGTGATGTGGCAAATTTCAACAGAGTTAAAC

SEQ ID NO: 21168 - protein, 137 aa, Streptococcus agalactiae; identical to SEQ ID NO: 11712

SEQ ID NO: 21169 - protein, 375 aa, Streptococcus agalactiae
ATGATTTCATCAATTGGACAGGTAATGCTCTACGTTAGCAATGTTGAAGCATCAGCAGATTTTTGGAAAAACAAGGTGGGTTTTGAGCGTGTTGAAAAACAAACACAAGGAGATTATGTAACCTATATAGTTGCACCGAAGTTGGATAGTGAAGTTAGCTTCGTCTTACATGACAAAGCAATTATAGCTCAAATGAGTCCTGAGCTAGATTTAGCAACTCCCTCTATTTTATTTGAAACTACTGATATTGACAGTACATATCAAGAATTAACAGCAAATGAGGTTATGACAAATCCTATTGTTGATATGGGGAGTATGAGAGTTTTTAATTTTTCCGATAATGACAATAATTACTTTGCAATCCGTGAAGTAAAA

SEQ ID NO: 21170 - protein, 125 aa, Streptococcus agalactiae; identical to SEQ ID NO: 2838

SEQ ID NO: 21171 - protein, 954 aa, Streptococcus agalactiae
ATGAAATTAGCGGTTTTGGGGACAGGTATGATTGTTAAGGAAGTTTTGCCTGTCTTGCAGAAAATTGATGGTATTGATTTAGTTGCTATCTTATCAACAGTTAGAAGTTTGGAGACAGCTAAAGATCTAGCTAAGGAATATAACATGTCTCTAGCTACGAGTGAATATAAGGCCGTCTTGGACAATGAGGAGATTGATACAGTTTATATTGGACTGCCGAATCACTTGCATTTTGACTATGCTAAGGAGGCACTCTTGGCAGGAAAACATGTCATTTGTGAGAAGCCATTTACATTAGAAGCAAGTCAATTAGAAGAACTTGTATCTATTGCCAATACTAGGCAATTAATATTACTCGAAGCAATTACAAATCAATACTTACCTAATTTTGATCTTGTAAAAGAACATTTAAGCAACCTTGGTGATATTAAAATTGTAGAATGTAACTATTCCCAATATTCATCGCGTTATGATGCCTTTAAACGTGGGGAAGTAGCACCAGCTTTCAATCCTGAAATGGGTGGAGGTGCGTTGAGAGACCTTAATATTTATAATTTACATTTAGTAATTGGACTTTTTGGAGAACCTATAACAGCACAGTATTTACCAAATATAGAGCGTGGTATTGATACTTCAGGAGTTCTAGTCCTAGACTATGGGCACTTTAAAACAGTCTGTATTGGAGCAAAAGATTGTAGTGCAGAAGTAAAATCTACTATTCAAGGTGATAAGGGGTCTATAGCGATTTTAGGGCCAACTAATACTATGCCTAAAATTTCATTAACTATGAATGGACAAGAAAGTCATGTTTATCAATTAAATGGTGATAGGCACCGCATGCACGATGAATTTGTTATTTTTGAAGGTATTATTAGCAATTTAGATTTTAAGCGTGCTGCTCAAGCTTTAGAACATAGTAGAACGGTGATGAAAGTTCTAGATATGGTAACGAAA

SEQ ID NO: 21172 - protein, 318 aa, Streptococcus agalactiae; identical to SEQ ID NO: 11716

SEQ ID NO: 21173 - protein, 450 aa, Streptococcus agalactiae
ATGAAGGCACAAGAATTATGGAATAAGTTTAAATCTTTGAATCCTTCAATCGGTGATGAGATAGATGCATGGCAATTTGGAGCAGAACCAGATCTTCTGGCAAAGTTAGTTGTAGATGGGACAAAAACTGCAACGGCCTCTGCCTATGATTTATATGAATTAGATGAGGAAGAGTTACCACAAGTTGGTTCATATGATATTATTTTGGATAGCAATGATGAAGCTATCTGTATTATTGAAATAACTAAAGTTGATATTGTCCCTTTTAAAGATGTCTCTGCAGACCATGCTTTTAAAGAAGGAGAAGGAGATAAAACATTAGAATGGTGGAGAAGAGCTCACATTGATTTCTTTAAACCTTATTTTGAGGAGTTTGGTTTAATGTTTAGTGAGGACTCTAGGATAGTTTTAGAGGAATTCCAAGTGGTTTACCCAAAGGAGATTAACGAA

SEQ ID NO: 21174 - protein, 150 aa, Streptococcus agalactiae; identical to SEQ ID NO: 11718

SEQ ID NO: 21175 - protein, 696 aa, Streptococcus agalactiae
ATGACTAAAGTTGTTTTAGTGACGGGCTGTGCTAGTGGAATTGGTTATGCACAGGCTCAATATTTTTTGAAACAAGGGTATCAAGTATATGGTGTGGATAAGTTGGATAAACCGAACTTAAACGGTAATTTTAACTTTATAAAGTTGGATTTATCCTCTGATTTATCCCCACTATTCACAATGGTACCGAGTGTTGATATTTTGTGTAATACTGCAGGTATTCTAGATGCCTACAAGCCACTTCTAGAAGTAAGTGATGAAGAAGTGGAACACCTATTTGATATTAATTTTTTTGTGACTGTTAGGCTAACACGTCATTATCTTAGACGTATGGTGGAAAAGAAGTCAGGTATTATTATCAATATGTGCTCAATAGCAAGTTTTATAGCGGGTGGCGGTGGAGCTGCATATACTAGTTCTAAACATGCCCTTGCGGGATTCACACGTCAATTGGCTTTGGATTACGCAAAAGATTGTATTCAAATTTTTGGTATAGCGCCAGGTGCTGTACAAACTGCTATGACTGCTAGCGATTTTGAACCTGGTGGATTAGCAGAATGGGTAGCTAGTGAGACGCCAATTGGTCGTTGGACTAAACCAAGTGAAGTTGCTGAATTAACTGGATTTCTTGCTTCAGGAAAAGCGAGATCAATGCAAGGTGAAATTGTCAAAATTGATGGTGGCTGGAGTTTGAAA

SEQ ID NO: 21176 - protein, 232 aa, Streptococcus agalactiae; identical to SEQ ID NO: 11720

SEQ ID NO: 21177 - protein, 232 aa, Streptococcus agalactiae
ATGACATTTGAAGAAATTTTACCAGGTTTAAAAGCAAAGAAAAAATATGTACGTACAGGTGGGGGGGTGCTGAAAATTATGTTCAGTTATTTGATACCTTGAAGTTAATGGGAAAGTACTACAGGCTACACCTTATTTTCTTATTAATGTTACTGGTGAAGGTGAAGGTTTTTCCATGTGGGCACCAACACCATGTGATGTTTTAGCAGAGGATTGGATCGAGGTCAATGAC

SEQ ID NO: 21178 - protein, 78 aa, Streptococcus agalactiae; identical to SEQ ID NO: 2848

SEQ ID NO: 21179 - protein, 234 aa, Streptococcus agalactiae; identical to SEQ ID NO: 11723

SEQ ID NO: 21180 - protein, 78 aa, Streptococcus agalactiae; identical to SEQ ID NO: 11724

SEQ ID NO: 21181 - protein, 531 aa, Streptococcus agalactiae
ATGGCTTGCATAATCAGGAGAGCAAGATTAGGAGATGAAGTCAATTTAGCTTATATTCAAACGGAGAGCTGGAAAGCTGCTTTTGGTAAGATACTACCTGAGGATATCATTCAAAAAACTACGGAAATAGAACCTGCCATAACAATGTATCAACAGCTACTACACAAGGAGATTGGTAAGGGTTATATATTGGAAGTAGATAGCAATCCTCATTGTATGGCTTGGTGGGATAAAAGTAGAGAAGATGATATGCTTGATTATGCAGAACTCATTTGTATACATAGTCTTAAAGAAGGTTGGAGAAAAGGTTATGGGTCTCAAATGATGAATCATGTACTATCAGAGATACAACAAGCAGGTTATAATAAAGTGACGCTTTGGGTATTTACAGAAAATACACGCGCAAGAAAATTTTACGATAGGTTTGGTTTTTCTTTTAAGGGTAAATCAAAAACTTATTTTGAAAAGGAAGAAATGTGTTATGAGAAGATTTTGCACCAGCGAGATAAAGCATCCGATAACACAATAGTA

SEQ ID NO: 21182 - protein, 177 aa, Streptococcus agalactiae
MACIIRRARLGDEVNLAYIQTESWKAAFGKILPEDIIQKTTEIEPAITMYQQLLHKEIGKGYILEVDSNPHCMAWWDKSREDDMLDYAELICIHSLKEGWRKGYGSQMMNHVLSEIQQAGYNKVTLWVFTENTRARKFYDRFGFSFKGKSKTYFEKEEMCYEKILHQRDKASDNTIV

SEQ ID NO: 21183 - protein, 1409 aa, Streptococcus agalactiae
ATGGCATTATTTTTTACTTCCTAAAGGTATCTCAAGTCATTTTCTTAGTATTATTGATTGCCTATGCCAGCTTTTTAGTGATTTCATTAGTCATTGGAGGTGTTCATCTCTATGAAAAAAATGAGCGCAAAAAAAGTTTAACTAGAAATAAAGAAAAAATTCCAATTTCAATTATTGTACCAGCCTATAATGAATCAACAACCATTGTGAGTTCGATTGATTCGTTATTGCACCTTGATTATGAAGCATATGAAATTATCGTTGTGGATGACGGTTCCAGTGACAATACTTCAGATGTTCTCAAGGAAGAGTTTGCATTAATGAAAATCTCGAATACGATTGATTCAATTATTGCTACTCAAACTTGTAAAGATGTCTTTCAGAGACAGGTTGGTAAGGTTAAACTGACACTCATTGTTAAAGAAAATGGTGGCAAAGGGGATGCCTTAAATATGGGGATCAATGCTGCTAATTACGATTATTTTCTATGTCTAGATGCAGATTCTATGTTGCAGGTAGATTCTTTGAGTCAAATTAGCAAATCCATACAGGTAGATCCGACAGTTATAGCAGTGGGAGGGCTCGTCCAAGTTGCCCAAGGTGTTAAGATTGAGCAGGGGAAAGTAGCATCTTATCGTTTGCCTTGGAGAATTATTCCTTGTGCACAAGCACTTGAGTATGATTCATCATTTTTAGGAGCTCGAATCTTTTTAGACTATTTAAGAGCTAATTTAATTATTTCGGGGGCTTTCGGTCTTTTTAAGAAAGACCTTGTTAAAGCGGTGGGAGGATATGACACCCAGACTCTAGGAGAAGATATGGAGTTGGTGATGAAATTACATTTCTTCTGTCGTAATAATAATATTCCCTATCGTATTTGTTATGAAACAGATGCTGTTTGTTGGAGCCAGGCACCAACGAATTTAGGGGATTTACGTAAACAGAGACGCCGATGGTATCTTGGCTTGTACCAATGTTTAAAAAAATATAAAAGTATTTTTGCCAATTATCGCTTTGGAGCTGTAGGATCAATTTCTTATATTTACTATATTTTATTTGAATTACTGACCCCGTTTATAGAATGTTTTGGTATCGTCATTATATTTTTGTCCTTATTATTTAATCAATTAAACATCCCATTCTTTATATCATTGGTGAGCCTTTATATCTTTTACTGTGTTTTAATTACATTAAGCTCTTTCTTACACCGTATTTATTCTCAGCAACTAGTAATAGGAATTTTAGATATTGTTAAAGTATTTTATATTGCTGTTTTTAGGTATCTTATCCTACATCCTGTATTAACTTTTGTTAAGGTTGCAAGTGTTATTGGCTATAAAAATAAAAAAATGGTTTGGGGGCATATTACGAGAGAGAAACAAATGAAGGATTTTGAAACAAGCGTTACT

SEQ ID NO: 21184 - protein, 470 aa, Streptococcus agalactiae; identical to SEQ ID NO: 2854

SEQ ID NO: 21185 - protein, 2157 aa, Streptococcus agalactiae
ATGAAAAAATATCTAAGTATTGTAGCCCTTTTAACTATTTTGTTTAGCTCTATTTATTATTTGTATTACTTTGATGGTAGTTTGTATTTACCAAAGGGCTTATTAAAAGAAAATACAAGAACTAACTTTGTTGTTAAAGGTGATACTGTACTTCACAAGCCCACCAATAAACCTTTTGTTGTTAAAGGAGTAGACGTTGAGTCTTCCTTAGCGGGTTATCATCACAACGATTTTCCTATTACTCAAAAAACGTATCGTGAATGGTTCCATTTAATTTCCAACATGGGGGCAAATACTGTAAGAGTCAAGGTACCGATGAATGTTGCATTTTACGATGCCTTATATCACCACAACAAAGCATCAAAGAGGCCACTGTATTTGTTGCAAGGAATACGTATAGATTCTTATCGCAATAATGCTTCTATAACAGCTTTTAATGATAATTATAGGGGGTATTTAAAACGAGAAGCAAAAGGCGTTGTGGATATTCTCCATGGGCGTAAGCAAGTATGGAATACTGATTTTGGTAGCAGTCATTATCATTATGATCTTAGTCCTTGGGTACTTGGTTATGTCGTAGGGGATGATTGGAATAGTGGTACTGTCGCTTATACTAATCATCAAGAGAAAAAAACGCAATATAAAGGACGTTATTTTAAAACTTCTGTGGCAGCTAATCCATTTGAGGTCATGCTAGCTCAAGTAATGGATGAATTGACACATTATGAGACAGCTAAATATGGTTGGCAACATTTGATTAGTTTTTCAAACTCACCAACAACAGACCCTTTTCATTATCGAAAACCATTTGAGGCACAGGCTCCTAAATACGTACAACTAAATGTAGAAAATATTCAAGCTAATTCGAATGTTAAAGCAGGTATGTTTGCAGCATATAAAGCTATTGATTTCCATCCTCGATACAAGGATTATCTATTATTTGATAAAGAGAATATCAGTAAAGAAGATAGACAAAAGATTAAAGAACTTTCTTTGTCACAGGGATACGTTAAACTGCTAAATGCTTATCACAAAATCCCTGTTCTAGTCACGGGTTATGGCTACTCGACAGCGAGAGGTATTGCCCAAAAAGAAATTGATAAACGTCCTCTGCCGATTAATGAAAAAGAACAAGGTCAGCGTTTACTAGAAGATTATGAATCTTTTATATCATCCGGTAGTTTTGGAGCGACTATCAATGCATGGCAAGACGATTGGAATGCAAGGGTGTGGAATACATCCTTCGCCACAAATAAACATAGTCAATTCCTATGGGGGGATGCACAAGTATTTAATCAAGGTTATGGTTTATTAGGCTTTAAAAACGCAAAACATCATTATCAGGTTGATGGTAAAAGAGGCAAAGAAGAGTGGAAACATCCTCTGATGACTAGTGCAACAGGAGATGACTTATATGCTAGCAGTGATGAAAGCTATCTCTACCTTGCGATTAAAACAAAACCTGAAAAACTAAAAGAAAAACGATTATTACCAATAGATATTACACCAAAATCTGGTAGTAGAAAAATGAATGGTAGTAAGGTCACATTTTCTAAATCTAGTGACTTTGTATTGTCTATTGATCCAAATGGCAAGTCTGAATTATTTGTCCAAGAGCGCTATAACGCCTTAAAAGCGAACTATCTTCGACAGCTTAATGGTAAAGATTTTTATGCTTTCCCACCAAAGAAGAACAGTAGTAATTTTGAGCAGATAAATATGGTATTGAGAAATACAAAGATTGTTGAAGACATGGAAAAAGTAAAAGCAACAGAGAGGTTCTTACCAACTCATCCTACTGGTCTTCTCAAAACAGGAACAACTGATAGGCACCAAAAAACATTTGATTCACAAACAGATATTTCGTTTGGAAAGGACTTTATAGAGGTCAGAATTCCGTGGCAGTTGTTGAATTTTTCTGATCCATCATCTCAAAAAATTCACGATGATTACTTTAAACATTATGGTGTGAAGGAGTTAGAAATTGAGAGCATTGCTTTAGGATTAGGTGCTAATAGCAAAGAAAACACACTGATAAAGATGGCAGATTATCGTTTGAAAAATTGGGAGAGACCCGATACCAAAACCTTTTTAAAAGACTCCTATTATAGTATTAAGAAAGAATGGTCTAAAGAAAGAGAGAGAACATATGGTACA

SEQ ID NO: 21186 - protein, 719 aa, Streptococcus agalactiae
MKKYLSIVALLTILFSSIYYLYYFDGSLYLPKGLLKENTRTNFVVKGDTVLHKPTNKPFVVKGVDVESSLAGYHHNDFPITQKTYREWFHLISNMGANTVRVKVPMNVAFYDALYHHNKASKRPLYLLQGIRIDSYRNNASITAFNDNYRGYLKREAKGVVDILHGRKQVWNTDFGSSHYHYDLSPWVLGYVVGDDWNSGTVAYTNHQEKKTQYKGRYFKTSVAANPFEVMLAQVMDELTHYETAKYGWQHLISFSNSPTTDPFHYRKPFEAQAPKYVQLNVENIQANSNVKAGMFAAYKAIDFHPRYKDYLLFDKENISKEDRQKIKELSLSQGYVKLLNAYHKIPVLVTGYGYSTARGIAQKEIDKRPLPINEKEQGQRLLEDYESFISSGSFGATINAWQDDWNARVWNTSFATNKHSQFLWGDAQVFNQGYGLLGFKNAKHHYQVDGKRGKEEWKHPLMTSATGDDLYASSDESYLYLAIKTKPEKLKEKRLLPIDITPKSGSRKMNGSKVTFSKSSDFVLSIDPNGKSELFVQERYNALKANYLRQLNGKDFYAFPPKKNSSNFEQINMVLRNTKIVEDMEKVKATERFLPTHPTGLLKTGTTDRHQKTFDSQTDISFGKDFIEVRIPWQLLNFSDPSSQKIHDDYFKHYGVKELEIESIALGLGANSKENTLIKMADYRLKNWERPDTKTFLKDSYYSIKKEWSKERERTYGT

SEQ ID NO: 21187 - protein, 1482 aa, Streptococcus agalactiae
TTGATTATTTCAACATTGTTAGCCAAAGCGACGAAATCAATGGGTAGACTTATGAGAGGGAAGGTTATTTACGGCACAACCCTTATAGGTCTTTTTCTATTCTTATTTTTCTATTTTTGGATTCCTAAGCATCACATCGAAAGAATACATCATCATCGTATAAAGCAGGTAGATGCGAAGAGTGATTTAACAGGATTTAAAACCCATTTGCCCATTATCAGCATCGATACAAAGCAACAAGCTATTCCTCTTGTTACAAAAGAAGGTGGAAAATATGTCAAAGCTAGGGATAATATTAATGCTGATATCGAATTACGGGATTCTCCAAGTAGATCACATCATTTATCAGAAAAGCCGAGAATTAGGACAAAAGGGTTAATATCATATAGAGGAAATTCCTCTCGTTACTTTGATAAGAAGTCACTGAAAGTTAAGTTTGTCACTAATAAGTTAAAGGAAAAGAAGCATCGATTAGCAGGAATGCCTAAAGAATCGGAGTGGGTATTGCATGGTCCCTTTCTAGACAGAACATTATTAAGAAATTATCTGAGTTATAATATTGCTGGTGAGATTATGTCCTATGCCCCAAACGTTCGCTACTGTGAGTTATTTGTCAATGGTGAGTATCAGGGAGTATATCTAGCAGTTGAGAATATCGAACAAGGTGAGCAACGAGTTCCCATTGAAAAAAGTGATAAAAAGTTGCATAAAACACCTTATATCGTTGCTTGGGATCGTGAACATAAGGCAAAGCAAAAGTTAGATAACTATGTACATTATACACACCAGTCTGGTATCTCAGCTCTTGATGTGAAATATCCAGGTAAACAAAGATTGACATCAAAACAATTAGAGTTTATTAATAAGGACATCAATCATATTGAAAAAGTCCTTTATTCTTATGATTTTTCACAATATCCTAAATATATTGATAGAGAATCATTTGCAAATTATTTTGTCATCAATGAATTTTTTAGAAATGTGGATGCGGGTAAATTTTCAACCTATCTATATAAAGATCTTCGTGATAGAGCAAAACTAGTAGTTTGGGATTTTAATAATGCTTTTGATAATCAAATTGAAGGACGTGTTGATGAGGCAGATTTTACCTTGACGGATGCACCGTGGTTCAATATGCTCATTAAGGACAAAGCATTTATAGACCTGGTTGTTCATCGCTATAAAGAATTACGAAAGGGAGTTCTAGCGACAGAATATTTATCTAATTACATCGACGAGACAAGGCATTTTTTAGGTCCAGCTATTGATCGAAATTATAAAAAATGGGGCTATGTCTTTGATTTAAAGAATACTGATCCAAGGAATTATTTGATTCCTACTGAACGCAATGTGACAAGTTATCACAAATCAGTAGAACAATTAAAAGATTTTATCAAAAAGCGTGGCAGATGGATGGATAGAAATATTGAGACCTTGTATCAATATAGTGCACCATCGAAAAATACTAATACTTTACTGGAG

SEQ ID NO: 21188 - protein, 494 aa, Streptococcus agalactiae; identical to SEQ ID NO: 11732

SEQ ID NO: 21189 - protein, 675 aa, Streptococcus agalactiae
ATGAAAGACCTATTACGAAATAGTCTAGAGCAAAGTGGAAATTTAAGTTTTCAAGATATGATTTTACATATTCTTGTAGCAGCTTTATTGAGTGTAGTTATTTATGTTTCCTATGCTTATACGCATAGTGGAACTGCCTATAGTAAAAAGTTTAATGTTTCATTAATGACATTGACGGTCTTGACTGCAACAGTAATGACCGTTATTGGTAATAATGTAGCCTTGTCATTGGGTATGGTCGGTGCCTTGTCAGTTGTTCGTTTTAGGACAGCCATAAAAGATTCAAGAGATACAGTTTATATTTTTTGGACCATAGTTGTTGGTATCTGTTGTGGTGTCGGTGACTATGTGGTAGCGGCATTAGGAAGTAGCGTTATCTTTATCTTACTATGGGTTATGGGACGTGTTAAAAACGAGAATCGTATGTTATTGATTGTGAAGTGCGATAGAACACTAGAAGTTGATTTAGAAGGAATTTTCTTCCAATATTTTGACGGAAAAGCTGTTCAGCGTGTTAAAAATTCAACAACTAATACTATTGAAATGATTTTCGAAATCTCTAGAAAAGATTACGATAAGCAACACCATGTAGATAATCAGTTAACTGAAAAAGTGTACCAATTGGGAAATATTGATTATTTCAACATTGTTAGCCAAAGCGACGAAATCAATGGG

SEQ ID NO: 21190 - protein, 225 aa, Streptococcus agalactiae; identical to SEQ ID NO: 11734

SEQ ID NO: 21191 - protein, 609 aa, Streptococcus agalactiae
ATGACGCTCGATTCGCATAGTTCAGACGATGGCTATACTATCCGTTCGCTATACTTTGATTCTTTAGAAGATGTTGATTGGCAAGAAAAGGAAGATGGTGTTGAGATACGAAGAAAGATTCGTTTGCGCAATTATGGTAGTCAAAGCAATTTTGCGAAATTAGAAATGAAACAAAAACAAGGTCCTAATCAAAAAAAGCGCTCTCTAAAATTAAGCAAGACAGATGCTCAAGCGCTGATTAATGGTAACAATAGTGTTTTATTAAATTATCCGGATACATTTGCTGCGGAGTGTTATTCAAGGATAACAACGCAACTTTATCAACCTAAAACGGTTATTGAGTACCAAAGAAAAGCTTTTGTTGCTAAGGAAAACAATATCCGAATCACCTTTGACCACCATATAATAGGTACAGAGGCTAGTTATGATATTTTCTCAGAGGATTTAAATCAAAATTATTTATTAGATCCTTACCTTGTTATTTTAGAAGTTAAATATAATGGATTTTTATTGTCTTATATTAAAGAACTCTTAGATTCGGTAGATAGAAGTGAACTTTCAGCGAGTAAGTATTGTTTAGGAAGAGCTGTTAGTAAACATTATCGTTTT

SEQ ID NO: 21192 - protein, 203 aa, Streptococcus agalactiae
MTLDSHSSDDGYTIRSLYFDSLEDVDWQEKEDGVEIRRKIRLRNYGSQSNFAKLEMKQKQGPNQKKRSLKLSKTDAQALINGNNSVLLNYPDTFAAECYSRITTQLYQPKTVIEYQRKAFVAKENNIRITFDHHIIGTEASYDIFSEDLNQNYLLDPYLVILEVKYNGFLLSYIKELLDSVDRSELSASKYCLGRAVSKHYRF

SEQ ID NO: 21193 - protein, 1344 aa, Streptococcus agalactiae
ATGGTTGCTTATGGTAAAAAAAGGCTTTTTAACGGGATTACTTTTATTTGGTATCTTCTTTGGTGCAGGGAACCTCATTTTCCACCAGCATTAGGTGTAGCATCTGGACAAGATTTCTGGCCAGCGATTTTAGGATTTTGTTTGCCAGGAGTTGGATTAGCTATTATTACCCTCCTATTAGGCACACTAACTAATGGTGGTTATAAGACAGAGATGTCGGAAAAATTTAGTCCGTGGTTTTCTTTAACATTTTTAGTTATACTCTACCTAACTATTGGTCCACTTTTTGCTATTCCTAGAACAGCAACGGTTTCTTTTGAAATTGGGGTTGCTCCAATTGTAGGGCATGGTCCGATTGCTCTTTTGTGTTTTACAGCCTGTTTTTTTGCTGCAGCTTATTATCTCGCTATTAGACCAAATGGTATATTAGATAGTGTTGGGAAAATCTTAACACCTGTTTTTGCCTTTTTAATTCTCTCTTTGGTTGTCGTTGGAGCTATTGCTTATGGAAACTTGGAGAGTGCTAAGGCGAGCGCTGACTATGCAGGAAAAGCGTTTGGAAGTGGTGTCTTAGCAGGCTATAATACACTTGATGCACTTGCAGCAGTTGCTTTTTGTCTAGTAGCAACAGAAACGCTTAAAAAGTTTGGTTTTAAAACTAAAAAAGAATATTTATCAACCATTTGGATTGTTGGAATTGTTACTAGTTTAGCATTTAGTATTTTATATATTGGCTTAGGTTTTTTAGGGAATAAGTTTCCTGTCCCAGCTGATATTTTAGCTGACCCAAATGTTAATAAAGGAGCTTATGTATTATCACAAGCATCTTATAAATTATTTGGAAATTTTGGTCGTTATTTCTTGAGTATTATGGTAACATTGACATGCTTTACAACAACAGTTGGGCTTATTGTGTCAGTATCTGAATTTTTTGATAAGAACTTTCGTTTTGGGAATTATAAATTATTTGCTACTGTTTTTACTTTGATTGGCTTTTTAATTGCTAATCTTGGTTTAAATGCTGTAATTACTTTTTCAGTTCCTGTGCTAACTTTATTGTATCCGATTGTTATTGTTATTGTCTTAATTATTTTGATTAATAAGTGGTTGCCGCTTTCAAAAAAGGGAATGTCTTTGACAATTGGTCTTGTCACTTTAGTGTCGTTTGTTGAGGTTCTAGCGGGACAATGGCAAGAAAAAACATTAACTCAGTTAGTAGGATTCCTCCCCTTTCATACTATTTCAATGGGGTGGCTAGTTCCAATGTTGATTGGTCTAGTATTTTCTTTGGTGCTGTCAGATAAACAAAAAGGCCAAGCATTTGATTTAGAGAAATTTGAAGGA

SEQ ID NO: 21194 - protein, 448 aa, Streptococcus agalactiae
MVAYGKKRLFNGITFIWYLLWCREPHFPPALGVASGQDFWPAILGFCLPGVGLAIITLLLGTLTNGGYKTEMSEKFSPWFSLTFLVILYLTIGPLFAIPRTATVSFEIGVAPIVGHGPIALLCFTACFFAAAYYLAIRPNGILDSVGKILTPVFAFLILSLVVVGAIAYGNLESAKASADYAGKAFGSGVLAGYNTLDALAAVAFCLVATETLKKFGFKTKKEYLSTIWIVGIVTSLAFSILYIGLGFLGNKFPVPADILADPNVNKGAYVLSQASYKLFGNFGRYFLSIMVTLTCFTTTVGLIVSVSEFFDKNFRFGNYKLFATVFTLIGFLIANLGLNAVITFSVPVLTLLYPIVIVIVLIILINKWLPLSKKGMSLTIGLVTLVSFVEVLAGQWQEKTLTQLVGFLPFHTISMGWLVPMLIGLVFSLVLSDKQKGQAFDLEKFEG

SEQ ID NO: 21195 - protein, 1992 aa, Streptococcus agalactiae
ATGACAGAAAAAAAATCATTTTACATTACTACCCCAATTTATTACCCATCAGGTAAATTGCACATCGGTTCTGCCTATACAACGATAGCATGTGATGTTTTGGCACGTTACAAACGCATGATGGGCTTTGATGTTCAGTATTTAACTGGTCTTGATGAGCATGGTCAGAAAATTCAGCAAAAAGCTGAAGAAGCAGGCATTACACCACAGGAATATGTTGATGGCATGGCTGAAAGTGTCAAAACATTATGGGAACTTCTAGATATTTCCTATGACAAATTCATCCGTACAACAGATACTTACCATGAAGAAGCGGTTGCTAAAATTTTTGAACAATTGTTGGCACAAGGGGACATCTATCTTGGTGAGTATACTGGATGGTATTCTGTTTCAGATGAAGAATTTTTTACTGAAAGCCAATTAGCAGAAGTTTATCGTGACGAAAACGGTAATATGATTGGTGGTGTTGCGCCATCTGGTCATGAAGTTGAAAAAGTTTCTGAAGAATCTTATTTCTTCCGCATGAGCAAATATGCAGATCGTTTAAAAGCATACTACGCTGAGCATCCAGAATTTATTCAGCCAGATGGTCGTATGAATGAAATGCTTAAAAACTTTATAGAACCAGGTTTAGAAGATTTAGCAGTGTCTCGTACAACTTACACATGGGGAGTTCAGGTACCATCAAATCCAAAACATGTTATTTATGTCTGGATTGATGCTTTGATGAACTATATTTCTGCTCTTGGTTATGGTTGGTCTGACGACCTCAGTCAATATCATAAATTTTGGCCAGCAGACATTCATATGATTGGTAAAGATATTCTTCGTTTCCACTCTATTTATTGGCCTATCATGTTAATGGCGCTGGATTTGCCATTACCAAAACGTCTAGTTGCTCATGGTTGGTTTGTGATGCAAGATGGTAAAATGTCTAAATCAAAAGGGAATGTCGTTTATCCAGAAATGTTAGTAGAGGTTGGTCTTGATCCACTCCGTTATTATCTCATGCGTTCATTGCCTGTTGGTTCAGACGGAACTTTTACGCCAGAAGATTATGTTGGACGTATTAACTATGAACTTGCTAATGATTTAGGAAACCTTCTCAACCGCACTATTGCTATGGTTAACAAGTATTTCGATGGAGAAGTACCAAGATTTGCTGTTGCAACTGACTTTGATGCTGATTTAGCTTCTGTTGCGACAGATAGTATTGAAAACTATCATAAACAAATGGAAGCGGTGGATTTCCCACGTGCCCTTGAAGCTGTATGGAATCTTATTTCACGAACTAACAAATATATTGATGAAACAGCACCGTGGGTACTTGCAAAAGACGAAACCGATCGTGATAAGCTAGAAGCTGTAATGAGTCATTTAGCTGCTAGTCTACGTGTTGTTGCTCACCTCATTCAACCGTTCATGATGGAAACTTCCGATGCCATTATGGAACAACTTGGTTTAGGGACAACATTCGATCTTGAAAAATTGACTTTTGCTGGTCTACCAGAAGGTGTTCGAGTTGTTGCAAAAGGTTCACCAATTTTCCCAAGGTTGGATATGGAAGACGAAATTACTTATATCAAAGAACAAATGAATGCTGGAAAAGCACCAGTGGAAAAGGAGTGGGTTCCTGAAGAAGTTGAATTGACATCAAGCAAAGGTCAAATCAAGTTTGAGGATTTTGACGCTGTTGAAATCCGCGTTGCAGAAGTAATTGAAGTTGAGAAAGTGGAAGGTTCTGATAAACTTCTTCGTTTCCGTCTAGATGCTGGTGACGAGGGCCATCGTCAAATCTTATCAGGGATTGCAAAATTTTACCCAAATGAACAAGAGTTAGTAGGGAAAAAACTCCAAATTGTTGCTAACCTCAAACCACGTAAAATGATGAAAAAATATGTCAGTCAAGGCATGATTCTCTCAGCAGAACATGATGGTAAATTGACAGTGTTGACGGTCGATTCAGCAGTGGCAAATGGATCAATTATTGGT
